United States Patent Application Publication US 2008/0256663 A1 - sequence listing, part 2

SEQ ID NO: 5645 - DNA, 561 bp, Zea mays
  Clone ID: LIB3061-111-Q1-N6-G11
cacgcctgcatgtaccgggcccgctaatacacggtcgacctactcgttcgattgataccaacaagcaacatactaagtggaatacagtatcaacaatagagcaacaatggcggccaagatattttccatccttatgctccttgctctttctgcatgtgttgctaacgcgaccatttttcctcaatactcacaagctcctatagctggccttcttcccccataccttccatcaatgaccgcttcagtttcgcgaaaacccagcccttcaaccctacaggctccaacaagcaatcgcaacaagcaacttacctttatcacccctgttctttcaacaatcgccagccctatctttggtgcactcattggtacaaaccatcagggcacaacagctgcaacaactcgtgctaccagtgatcagccaagtagctctggcaaacctttctacctactctcaacaacaacaatttcttccattcaaccaactgtgtacactgaaccctgctgcttatttacaacaacaacaactactaccattcaggcaactagctactggctactctc

SEQ ID NO: 5646 - DNA, 601 bp, Zea mays
  Clone ID: LIB3061-111-Q1-N6-G12
cacgcctgcgtgtaccgggccgctaatacacggccgacctcagcgttcgggcaaacgtatttgcaaaccagccacaacaacagctgcaacagcatctgccagcgctcagtcaacaagcacatggcggaaccgtggcgcctacctacaacagccacaactgctttaatctaacccggtcgctgtggacaatggacctacatacctgcaacaacagttgttgcaacagaatagtgccagctctgactcaactagttgtggcaaaccctgctgcctactagcaacagctgctctcattcaaccaactgactatgtcgaactctgctgcgtacctacaacagcgacaacagatacttaatccactagcagaggctaacccattggtcgctgccttgctacagcaacaacaattgctgacatacaaccaattctctttgataaaccctgtcttgtcgaggcagcaacccatcgccagaggtgccatcttttagataacatatgagatgtactcgataatggcgccctcattcccgcatgtgtttcctagaaatctcaatatattgattgaaatattgttgtggctggtttgcaactacgtttgccc

SEQ ID NO: 5647 - DNA, 624 bp, Zea mays
  Clone ID: LIB3061-111-Q1-N6-G2
cacgcctgcggtaccgggatcctataccagggtcgcccagctttcgtgccactttctcatattaagcacaatattgtccaatagtggcatcccaaatatcagcctaattatgctccccgccctttctgcagtgctgctacacacagcttttttccgcaatgctcgacaagctcctatggcttaccttcttcccccatacctgggaccaaccatgtctcccatatgtcaaaatccacttcttctaccctacatgatccaacaaggaatcgcagctcacatcttaccttgtcacccttgttcctccaacagtcatcagccctatacagaaattaccttctgtgcatttattgacacaaaacattagggcacaacaactacaacatctcttgctaacaaaccttgctggctactcttagcaacaacagttacctttggtgcatttggtggctcaaacatcagagcacatcaactacaacaactcgtgctagcaaaccttgctcgctactctcagcaacaacagcctctgccattcaaccaactaactgcattgaactctgctgcttatttgcagcaacaacaactactaccattcagccagctagctgctgcctaccccccgcaatt

SEQ ID NO: 5648 - DNA, 593 bp, Zea mays
  Clone ID: LIB3061-111-Q1-N6-G3
ccgcctgcatgaaccgggcccctattacacggctctccaagaaaagtatatgtcatatttaaacgtctgaatcaaaaaatcattagcggactgagggtataaccttcccacggacctaggaaatgcagaagccgtgttcctgggctattctggcaaaatacaccgcaaagacaggattcaacatgggaacaggtcccctgtgctcacattaaggcttgaaaagacccatcaactccatgcatcgcataaaactgattccatccctgccctgcaacagggaggaccactcttattgaaatggaacacacatatgcaatcctcaccttatttaaaagatgaagctgctcaacggctcttagagggtgttcaaaaactcaaaggctagcatggctcctgtatcactgctcttgatgaattaacaggtgtaaatcaacatgaactagttgacaacatctgagagattcaaactcacagcatacatgtcacatcacatacaaacccttagacaactgtttcaacaggaatcgcttcaaaagcagataactcgctagatgagcttcagcgcagcctatctaaacaagactaaggctagc

SEQ ID NO: 5649 - DNA, 503 bp, Zea mays
  Clone ID: LIB3061-111-Q1-N6-G4
ttatgtgagagcaaaaaaacgtacattctaccacagtgctcattcgactacaagggccggtatatcacagagaactgcttcaatggcttcaatgggctttgaacaccgaagggagcaagcatatgggctaccaccagtgcttgatgaaagcactgtagaacatccaattggcccactacaacaacaatcccaggcacatgtaaccatacaaaccattgcatcgcagcagcaacaagcactgacacacctagccgaggagaaccctatacaactactttgaacaacatgtggttgcatcacaacccacttgctttgtgaaacgtgcactgcctaccaacagcagccacagatgcaacagtttctaccagcgctcagtaaactaaccatggagaaccctatggtctactctacaacaggaacaaactgtttcatctatcccgctcgctatgggcaatgcacctacatacctgcaacaacagttgttgcaacaacagttgctgcaa

SEQ ID NO: 5650 - DNA, 432 bp, Zea mays
  Clone ID: LIB3061-111-Q1-N6-G5
cacgcctgcatgtaccgggccgctattacacggtcgacctcagcgttcgttgttggttaagcaaatggatgtgtggcgcgtacaatttgcaactgattaaatgcttttgcctgggcttggctacatactacgacccacctcccagttatgacacaaactcattgcatctacctgccatttgacatccttgaaaggatgtgggacccttttaaactacgaagactgaacgtttaactacttatggcctgggcgcgatctaaatttaaaacctaaggatcttcagcgctttctgttcctaactagttagagattaatagagctcactcagaacttgtggtgtactacatactacctcaccagatttttactcaacaaatcggggctactgacaattgtgcagtaaggaccgcatattcctatgtttttaggttt

SEQ ID NO: 5651 - DNA, 551 bp, Zea mays
  Clone ID: LIB3061-111-Q1-N6-G8
cacgcctgcgtgtaccgggctcctaattacacggtcgaccttagcgttcgttgcatcataaaagagctcattttatgttaccggacaatggccaccataattcaagatatctaatgctgaacgatcactcatgaaggagctgataccgggcaccgtcaatgacagggctgacaggctgaacatagctggctttgttaaacaagctgttacaatgggagcattgaggtgtgaaaaccaggtgccagaaccttacgcgaccacaggcagaacggaaacagcagttgacgtgtataaaacgcgacaggtcctaaaatcatctagcttattacatgagggaccttgggggcgttggtaagtcacaaaacatttaaatgcatcaactacaacaacttgggctaaaaaaccttggtgggtactctcaacatcaccagatggttccatgtcaaccaactggatgcattgaactctggtgcttatttgcaacaacaactaccaactagtgatgctagctagctggctacccggagcaatatcttacattgaaccaactg

SEQ ID NO: 5652 - DNA, 547 bp, Zea mays
  Clone ID: LIB3061-111-Q1-N6-G9
cgcctgcatgtaccgggctgctattacagggtcgacctcagcgttcgtgaaaataagcaaactacttgggaatggcttgcctatattttgaggactttgacataatgagcactgaccgctttttatggattgatggtttacagatcataaaaattaataacctggatatgtagacatttgaagttaatattacaaacacacaaagccttgtgaaaggggaactatgacatggtatagctcaaatagatgtaattcacaaaagaaaatctgccctgttaactcctgtatgatatttctgtcgctcaaaacgctggggtctaagcggctctagtatgcgaattctttatcaagcaagaggatccaatggaagcactctcttcgctcttcttgaaagaatatcgcatgctgagactacctagaccgacgcataataacaaacgatatatcacaacactgctcagggttgaatcatttacagtaagacataaaattgagcgttaaatctgaaatccacactttccaaaagcctttatcggtcggtaatatt

SEQ ID NO: 5653 - DNA, 386 bp, Zea mays
  Clone ID: LIB3061-111-Q1-N6-H1
cacgcctgcagtgtaccgggccgctaattacacggtcgacctcagcgttcgtttttgcatgcatggagggttgaaaaaaagactaaagactggaccaaaacgtaacattggtcggcctgaggtatggtcctcgatgtgggttctcctatgtgatctgaaatcgtcgggccctgatgaggacattgataagtggggtgagactgaccagagaaaaaacctacaccttgggagctggagcacttaaccacatctttcaaaaacctgatctatatcgaaaacctgggtaacactaggtcacacagaattgtaattaattgggaggagaaccccagctttggaaaatatccatagcccgcttactactttgttgagataaagcttgcttg

SEQ ID NO: 5654 - DNA, 418 bp, Zea mays
  Clone ID: LIB3061-111-Q1-N6-H11
cgaactagtaataaaaaaaaaaaaaaaaaaaaaaaaaaaaaaaaaaaaaaaaaaaaaaaaaaaaaaaaaaaaaaaaaaaaaaaaaataaaaaaaaaaaaaaaaaaaaaaaaaaaaaaaaaaaggataaaaaaaatttcaaaaaaaaaagttattttaaagggtgaccaaataaaagaaaaatcgcgttccaatgggaaatcgtaaaccctgaaaaatcccccaaaaccaaacttacgaaagaataaaaaaaaaaccctggcgggcctatcaggaaaaagaaaaaaagaaaaaaaaatgggactcccttaccattttccaatcgaaaaaccccaaaaaacagaccgctaaatgaaacaacaaaaccggggggaaaaaggggaagaccaaaagggcccaaaaaagtttcaaatttaacaa

SEQ ID NO: 5655 - DNA, 544 bp, Zea mays
  Clone ID: LIB3061-111-Q1-N6-H12
cttaaacacataatacgcaagaggatcaattttctattcacacgtgtcaggctgaatacaaaggaatggtatgtgataacagctctggacaaatcatatgctctggagctcttccaatatacgacaaaccgctagattttcttaacaacaacaccacatgatgatacacaattaggctcaagcgcaaatttatgttactatcagcgccagtgatacattgactgcacaaatgatatgagcaacactgcactatgcttccttgcagtacctttttccatctactgacactgcctctacatatctacctgaaggaaacaaatttcagtgcatcttatgttaacagtggatgcaattcattattgccactatacaactaaaaatagcactatagcattgatggtgtctctacaacctggcacatgactacataaaaagaagctacaaacattatattcaaaaaggctcatagcttgtgatgatgccatagcttgctaaccatgactctcatacagttcatcactactctagctaacttaacaaacta

SEQ ID NO: 5656 - DNA, 529 bp, Zea mays
  Clone ID: LIB3061-111-Q1-N6-H2
tcacgcctgcgtgtaccgggcccctattacacggtcgacctcagcgttcgttttcagaacggagttccctgcgttcacacttgggtgccttgcgcttttggcctttattgctgtaagacggtttctctcatgttttggtgcggctcaacatcctttcagccggttaaaagaatttggaagagttgggcttctccccaagttaattcttttttggctagcctctctaaatccgcgatggtcagcttgcatattgtcccagctaggatttggtcactcatgacaaatgccttttttgcgatcaacaggcagaaacaatcacatattttgctcttttgtgcgttctacacaaacattttgtggcgggtgtggagcaaagcgggtgatgcatcatctggcacctgagcctgtggacattattttgcaccattggtggtgcaatgctgaacgccaagctcctttagataagagaaaggtcgtaacacgcctgtaatccttgttgtttgctggctgtggaaacatccaaacactt

SEQ ID NO: 5657 - DNA, 453 bp, Zea mays
  Clone ID: LIB3061-111-Q1-N6-H5
cacgcctgcgtgtaccgggcccctaatacacggtcgacctagtctttcttatctagcacatagaaaggcctttcttaccaacggggggccctaacatatatacacaacctatgctactggaccattactgcatgagatgtttcagagagcctaccacccacaatggtgacagcgcctatagctgccgtgcttgccaaagcccgctgaccaacagggactaatggttgcgaaaaccaaagggtgccaccctacaggacccaacacggaatcaacggtgacatctgaccttgattacccaagttcctgcactaacaccagctctttacagaaggtacctttggtgcattgattgaaacaaaacaagagggcacagctactacaacaactaatgctagaaaaccttggtggctactatcagaaacatgagtgaattgcattcaaccaactagctaa

SEQ ID NO: 5658 - DNA, 659 bp, Zea mays
  Clone ID: LIB3061-111-Q1-N6-H6
cacgcctgcgtgtaccgggcccctattacagggtcgacctcagcgttcggttgatttgggtgatgagaccaccacattgtatctgcatattcggggtgcgcgcatccgatgaatccatgacgagagagatcaaatgcgacctccaaggctggctgggatgatatcaccgacggcgctgtggaatcatgcctgaagatgaggctgaagagtgtggctgccaaacaactgaatatctccatggagaggattgccctgctcaaggcaaacaggccaaaggttccacccgcatagacccatcaagatgaggaagcagagcgaaggcagagcgaggaactagatgggtttggaaaccccaaggaccctcgacgctctacaagctcaccgtggaggaggctgagcacctctctctacaggctgccgcgcttcaggagtggcaccagctatgcaaagagagagccatgacagctcagtgaggagcatttggaccgtgtggatcttactcgcgtgtataaacccatattttttcttcgtctgccattctttgcgtgtctatactggtggggtcactcactgtgtaccctctccgatggttcattgtattctgaaatacttgtgcacgaaaaaactgtttggtaacatactactgttttggcgttttt

SEQ ID NO: 5659 - DNA, 494 bp, Zea mays
  Clone ID: LIB3061-111-Q1-N6-H9
cacgcctgcggaaccgggcccctaatacacggccgacctgcaacaacaacaactaccattcagccagctacctgctgcctacccccagcaatttcttccattcaaccaactggcagcattgaactctcctgcttattggacagcagcaacaactactaccattcagccagctagctggtgtgagccctgctaccttcttgagacaaccacagttgttgccgttctaccagcacgctgcgcctaacgctgacaccctcttacaactgcaacaattgctgccattcaaccaacttgctttgacaaacccagcagcgttctaccaacaacccatcattggtggtgccctctttaagatttcttatgagttatagttcaataataaagatttttgtctgatgtttgtggcttcccagaaataagaaagtacatttctaaaaaggtaaaaaggaaaaaaattctgggggtaggcacacagaaactggctgaaaggaaaa

SEQ ID NO: 5660 - DNA, 556 bp, Zea mays
  Clone ID: LIB3061-112-Q1-K6-A11
gtatgattacattattccatctgcccatttaactgttacaccgctagtttagtcgagcaatttttgcaactacaccataattgggaactgtgaaaagcaaatcctatgatggcaccataggaaaaactgctcagtgggaggggcggtaggattatacatagccaataagtttcggcctaggcaaaaaattggcaaaacgtgccctagtagacaatagcatagcctgattgtctaatcatccagctcaatgatcttgaccacataggaatcacccactttctggcaaacgacgacgcggtcgtgggacttgatcacgcccgaggctttgccatggtcaagagcaaccttcaacacagactcatttgtagcactggtagattcagctgggtgtcgcggatcagcaagcatagggaagaggcctctaactatgagtgattgtcttgcctcaaaagcacctgtgaaactccacttcagttggtttgtctttagacgaggaatgacaacagatagaacaggcatgctgggcctgtacttagcaatgagccttgcagctcgt

SEQ ID NO: 5661 - DNA, 316 bp, Zea mays
  unsure (1)..(316): unsure at all n locations; Clone ID: LIB3061-112-Q1-K6-A12
cggtccccattccgggttttaaccaaaaaagccagactcattcagtngacaacctacgaggnaacatatgattacattattccatctgcccatttaactgttacaccgcagtttagtcgagcaatttttgaactacaccataattggaactgtaaaagcaaatcctatgatggcaccnataggaaaaactgctcagttttcaagcgctataggattatacatagccaataagtttcggcctaggcaaaaaattggcaaaacgtgccctagtagacaatagcatagcctgattgtctaatcatncagctcaatgatc

SEQ ID NO: 5662 - DNA, 654 bp, Zea mays
  unsure (1)..(654): unsure at all n locations; Clone ID: LIB3061-112-Q1-K6-A4
cccgggnaaaaacacatagtgtaccaacaatggcagccaaaatttttgcttccttatgctccttggtctttctgcaagtgttgctaccgcaaccattttcccacaatgctcacaagctcctatagcttcccttcttcccccatacctctcaccagcggtgtcttcaatgtgtgaaaccccaattgttcaaccctacaggatccaacaggcaatcgcaacaggcatcttaccattatcacccttgttcctccaacaaccgtcagccctattacagcagttacctttggtccatttggtggcacaaaacatcagggcacaacaactacaacaacttgtgctagcaaaccttgctgcatactctcagcaacatcagtttcttccattcaaccaactggctgcattgaactctgctgcttatttgcaacaacaattaccattcagccagctagttgctgcctacccccagcaatttcttccattcaaccaactagcagcattgaactctgctgcttatttacagcagcaacaactactaccattcagccagctagctgatgtgagccctgctgccttcttgacacacaacagttgttgccgttctacctgcacgctatgcctaacgctggcaccctcttacaactgcaacaattgctg

SEQ ID NO: 5663 - DNA, 541 bp, Zea mays
  Clone ID: LIB3061-112-Q1-K6-B10
ccactttggatgggctattgggccagatgagagagatgcggtgtttttggctcttaaatgttgggatgaatgctcaagtccacatatttggcatcgtgcttgatcagttagtaggactacttgatttcgctgccagcttggacgcttgatggccagtgggcagacggggggttaaagcacctgcgttgaacggtcaatcttgtgctcaccacatgcttgtgctgggtgatggctttgtgacttgagatatggaatagtgttacaaatctgttgcatcttgctgaagaggtcccatccgatgatgaagatatgccttggtcagtcatgggagtgcgtttgatgttacctgtgctccttgacatgttcgtgccctcagccgtccactagcggcgcacttgttacaggtgccgctcactggatctccatctgacagatcgggaagaacctctggaaaggagcggcccagcaaggaaattagtaagatgtgaaagcacccggactgaaaagatatattgacaactgattgattaagtgtttgatt

SEQ ID NO: 5664 - DNA, 617 bp, Zea mays
  unsure (1)..(617): unsure at all n locations; Clone ID: LIB3061-112-Q1-K6-C10
tattatcgcctcttctgcgctctcttgcgcctttcttgtagagcggccaacaaatgcgtttcattattaccacaatagcacactatgctccctaggtgccattattaccacagtcttctggggtgggggtagcttcaatgaggctctcgaacaccctagctgtgncaaggcctacaggtctacaatcaagacgacttgctggtcgagtcgatcttactaacaaccatattgcgccaattaccaacaacagatccttgcgcacatactaaccatacacaaccatgcgcaaccgcaacagctaacaacaatcttctaccagcactngagccaactatgctgtggtgtaaccctgtcgcctacttgcaacagcagttgcttgcatccaacccacttgctctggcaaacatagttgcataccaacaacaacaacaattgcaacagtttctaccagcgctcagtcaactagccatggtgaaccctgccgcctacctacaacagcaacaactgatttcatctagccctctcgctgtggttaatgcacctacatacctgcaacaacagttgctgcaacagattgtaccagctctgactcagctagctgtggcaaaccctgctga

SEQ ID NO: 5665 - DNA, 534 bp, Zea mays
  unsure (1)..(534): unsure at all n locations; Clone ID: LIB3061-112-Q1-K6-C4
ccgggnncgnctctttttcgtccggtggcgcgccaaccaccaccgtgggggggggcgctttagcaccaacagtggcgcggggggggcgccgcacttttccgcccttctgcttctcggtgtttgttcgtgcggtgttccttccgcgcgcatgctcccatgctcctatccttctccttcttccccccttcctccctccgggctttgattgggggtgcgacaactccgttacccaccccttcatgaaccaactagggcatcaacgagtggcatgcttgcctcaatcacccttggtcctcctcgttgcttcaccctcttacagcactttccttggggccattgttggtnccaaccattgcgggcccaccgcctccgccacctttgcctcctataccctgctgactactttcagcaacacctgcttcctcctttcaaccacatcgcttgcttgcactccaccttcttgattgcatcaacagctgctgctattctgccccctccctttttgactaccccccccacttgcttccgtctacc

SEQ ID NO: 5666 - DNA, 350 bp, Zea mays
  unsure (1)..(350): unsure at all n locations; Clone ID: LIB3061-112-Q1-K6-C5
cccggngtcgacccaacgcgtccgnatttagaaccaaactagcaacatagnaaagcacaatagtgtaccaacaatggcagccaaaatattttgcctccttatgctccttggtatttctgcaagtgctgctacggcgaccattttcccgcaatgctcacaagctcctatagcttcccttcttcccccgtacctctcaccagcggtgtcttcggtatgtgaaaacccaattcttcaaccctacaggatccaacaggcaatcgcagctggcatcttacctttatcacccttgttcctccaacaatcatcagccctattacagcagttacctttggtgcatttattggcacaaa

SEQ ID NO: 5667 - DNA, 601 bp, Zea mays
  Clone ID: LIB3061-112-Q1-K6-C6
cccgggtcgcctttcgtccggctcactgcagaaccccggtgggggggagggtttcagcctccttcagctggggggggctttctgaaatgctgcgtcggcgaccatgttctccgcactgctgccatgctcctatagctctccttacccccccgtgcctgtcaccatccgcctctcctgtcatctcaaaacggtgtctggcactgggaccccatccaacaagccctcacagctggaatcttacctttatcacccttgcttctccaacaaacattagccctattacatctgttacctctgatgcatttattgcctcagaacatcacggcacaacaactacaacaacttgcactagcaaaccttgctgcctatctctgaccacagcacctacttgcattcaaccaactagctgcattgaactctgcttcttatttgcaacaacgacaactaccattcacccagctacctgctgtctacccccagcaatcccgtccacccaaccaactggcagcattgaactctcctgcttatttacagctgccccacttactaccattcgaccagctagctgccgtgagccctgttaccttcgtgatacaaccac

SEQ ID NO: 5668 - DNA, 653 bp, Zea mays
  unsure (1)..(653): unsure at all n locations; Clone ID: LIB3061-112-Q1-K6-C8
cccgggggggaccaactagcaacatagnaagcacaatagtgtaccaacaatggcagccaaaatttttgcttccttatgctccttggtctttctgcaagtgttgctaccgcaaccattttcccacaatgctcacaagctcctatagcttcccttcttcccccatacctctcaccagcggtgtcttcaatgtgtgaaaccccaattgttcaaccctacaggatccaacaggcaatcgcaacaggcatcttaccattatcacccttgttcctccaacaaccgtcagccctattacagcagttacctttggtccatttggtggcacaaaacatcagggcacaacaactacaacaacttgtgctagcaaaccttgctgcatactctcagcaacatcagtttcttccattcaaccaactggctgcattgaactctgctgcttatttgcaacaacaattaccattcagccagctagttgctgcctacccccagcaatttcttccattcaaccaactagcagcattgaactctgctgcttatttacagcagcaacaactactaccattcagccagctagctgatgtgagccctgctgccttcttgaccaacaacagttgttgccgttctacctgcacgctatgcctaacgctggcaccctc

SEQ ID NO: 5669 - DNA, 644 bp, Zea mays
  Clone ID: LIB3061-112-Q1-K6-C9
tccgcgcaaagtcacacgcgccatcaccggggccgccgtccacgacatcatgctcttcagcgtgtccaagctcaccggccatgccggcacgaggctcgggtgggcgctggtgaaggaccgcgaagtggccaggaatatggtctacttcgtcgaccgcagcaccaccggcgtatgcaaggagtcgcatatgcgcgccaccaagatcctcggggtcgtctccgacgcctacgaggtcgtcccgccggccagggccagggccagcggcgcggtgccccgcctcttcgacttcgcgctgcggcgcctggaggagcgctggcgcattctgcgcgccaccgtggctgccaccggcgccttcagcctgccggaggagacctccggctactgcaacttcgccaagcaaaccgtgacagcttgccctgcgttcgcgtggctgcggtgtgagaaggagggacgtcgaggactgcgccgagttgctcgccggccacaatatcgtgggtagcggcggggagcagttcggaggagacgcgcggtgcgtcaggatcaacatgctggacagggacaacgtgttcgacatgctcgtccagcgcctctcctctataaactgaacggagtgaatgttgggagtggcacagcagcctgcattg

SEQ ID NO: 5670 - DNA, 653 bp, Zea mays
  unsure (1)..(653): unsure at all n locations; Clone ID: LIB3061-112-Q1-K6-D1
cggtccccattccgggtcgcccagcgtcccacagcacatanaagtgngatacagtagcaacaatagagcaacaatggcggccaagatattttccatccttatgctccttgctctttctgcatgtgttgctaacgcgaccatttttcctcaatactcacaagctcctatagctgcccttcttcccccataccttccatcaatgaccgcttcagtttgtgaaaacccagcccttcaaccctacaggctccaacaagcaatcgcaacaagcaacttacctttatcacccctgttctttcaacaatcgccagccctatctttggtgcagtcattggtacaaaccatcagggcacaacagctgcaacaactcgtgctaccagtgatcagccaagtagctctggcaaacctttctccctactctcagcaacaacaatttcttccattcaaccaactgtctacactgaaccctgctgcttatttacaacaacaacaactactaccattcagccagctagctactgcctactctcagcagcaacaatttcttccatttaaccaattggccgcactgaacccctctgcttatttccagcagcaaatactactaccatttggccagctagctacaacaagccccactttctttttgaaacaac

SEQ ID NO: 5671 - DNA, 630 bp, Zea mays
  unsure (1)..(630): unsure at all n locations; Clone ID: LIB3061-112-Q1-K6-D9
ccggccgtgcgggggctcgggnacgggacgggacaggacctcaaaatctcagatccttcctgcccgcccgcccgtgcccgtcgacgcgtcgttcttgccggccgcgccccacctccgccctctcctcctccaggggatcggatacgccacaggctgcgcgatggtgctgtgggtcttcggctacggctccctcatctggaaccccggcttcgacttcgacgacaaaatcctcggcttcatcaagggctacaagcgcacctttaatctcgcttgcattgaccacagaggcacaccggagcatccggcgaggacctgcacgcttgaaaccgacgacgaggccatatgctggggaattgcatattgtgtcaagggtggtccagaaaaagagctaaaagcaatgcagtacttggagagaagagagtgtgagtacgaccagaagatatccattgatttctacaaggaaggagatcccttgaaaccagctgtgacaggcgtcttagtgttcgtttccactccagatccaattggcaacaagtactatcttggccctgctcctttgcaggatatggcaatgcaaattgctacagccaatggccctactggctataatagggattacctgttctcaat

SEQ ID NO: 5672 - DNA, 394 bp, Zea mays
  unsure (1)..(394): unsure at all n locations; Clone ID: LIB3061-112-Q1-K6-F7
tacacaaacattaagtaaggagggggggaaattgaggcaccagttcgtatgcaggattcttcctcctaagatgtggcaaagctaattagttttaaaccataatccacctcaatatatatgaattaaagngcatanatggggcaacgacngggaannaaaacatctatttntacaacaaacccangcttcccaaaacggcatggtcagttcgagctcgccctggggatgccgccgctctgcccatcgcagacgccgtggagcatcgacggcgacgtcgcaggacatgaggtcgcctaccagctggtgacccgaaacacccaggcggcccgncgccacgttgtgatttcggccctgacggngccgacgttttggggcngggggctttgcccggtgc

SEQ ID NO: 5673 - DNA, 518 bp, Zea mays
  unsure (1)..(518): unsure at all n locations; Clone ID: LIB3061-112-Q1-K6-G10
tggcacaaaaaacatcagggcacaacaactacaacaactcgtgctagcaaaccttgctgcctactctcagcaacaacagtttctgccattcaaccaactagctgcattgaactctgctgcttatttgcagcaacaacaactactaccattcagccagctagctgctgcctacccccggcaatttcttccattcaaccaactggcagcattgaactctcatgcttatgtacaacaacaacaactactaccattcagccagctagctgctgtgagccctgctgccttcttgacacagcaacatttgttgccgttctacctgcacactgcgcctaacgttggcaccctcttacaactgcaacaattgctgccattcgaccaacttgctttgacaaacccagcagtgttctaccaacaacccatcattggtggtgccctcttttagattgcttatgagttatagttcaataataaagttttttttgctgaaaaannnnnnnnnnnnnanaannnnannanaa

SEQ ID NO: 5674 - DNA, 538 bp, Zea mays
  Clone ID: LIB3061-112-Q1-K6-G11
cccggcttgctccaaccattgctctggcgaacgtagctgcataccagctgctgcatcagctgcaacagtttatgccagtgctcagtcaactagccatggtgaaccctgccgtctacctacaactactttcatctagcccgctcgcggtgggcaatgcacctacgtacctacaacaacagttgctgcaacaaattgtaccagctctgactcagctagctgtggcaaaccctgctgcctacttacaacagttgcttccattcaaccaactggctgtgtcaaactctgctgcgtacctacaacagcgacaacagttacttaatccattggcagtggctaacccattggtcgctaccttcctgcagcagcaacaacaattgctgccatacaaccagttctctttgatgaaccctgccttgcagcaacccatcgttggaggtgccatcttttagattacatatgagatgtactcgacaatggtgccctcataccgacatgtgtttcctagaaataatcaatatattgattgagatttatctcg

SEQ ID NO: 5675 - DNA, 133 bp, Zea mays
  unsure (1)..(133): unsure at all n locations; Clone ID: LIB3061-112-Q1-K6-H9
gggtcgaccagcgtccggcattagctcacgnctccanatggngnaactcgaaccatgaagtgctgatcgttgcccttgctctcctggcgctcgctgcgagcgccgcctccagtacaagcggcggctgtggctg

SEQ ID NO: 5676 - DNA, 420 bp, Zea mays
  Clone ID: LIB3061-112-Q1-N6-A1
ataccgggctggctaattacggggctcgaccttatgctgttcgttttaatttaatttttttttttttatatttttttaatataattattaatatattttttaaaaatattaaaagtttgtttttataaaggttataagtttaggtaattttgatagtaaaattttatcttttttagagtgaatttaaaaggaggggattgggggggaattaaaatagtctttgttaaagaaattttcgggaacaccacttaataatcttggaggacatccttttttggaaagctggggaaataaaaaaggggacctaaaaaaaagtttttgctaaagggtgttcggcctgtttgcagaagggaaacctcactggcaaggcgcattaaggaaagggccaattgggggtaaaaggagggtgtaccattaaac

SEQ ID NO: 5677 - DNA, 540 bp, Zea mays
  Clone ID: LIB3061-112-Q1-N6-A2
ctttgcccgttgcctgaataatgggtgaccaccggagatacggagcgtgagttgaccatgatttaatctgtaccgatggtcttgttcactgacaacaatggagcccgatggccacgattaccccagttgtgcggccacgaactcattagggttatgcagcaggatcacatggacgcatagctgaactgtatgggaactctcccgtcgcttggtgaacagctaaaccgtgatgtcagtctgacggagacgaaagaataactggcgcctcgggtggcagatctgtgagaggatcatgcctacacgaggtctaagcttgtgactgtacgtggtttctcgaacgaaatgactgtgaaatcactgttgcacacaacatacgagccctaggcatacattgtcatttctgcagctgctattgagtcaactaagtcacattcattgggccttgctaactgttgcgtatccagaatggaaactggcgcctgcagctgcattaattaattacgcatctctccgggatgagacacctgatattgtgcactc

SEQ ID NO: 5678 - DNA, 358 bp, Zea mays
  Clone ID: LIB3061-112-Q1-N6-A4
taaccgcttgaaccttcgacaaccgaaagaagtattacagctcacaccttttggccatttggagggacaaaaatttggtgccgtcaactaccacaacatgtgactgctgaccttgggtggtacgtgtaaaaaacattgggggtatgccattaaacacaactggctgagtgtgaactctgctgcttatttgcaacaaaaattaccattcacccaggtaggtgttgactacccccatgaatttgttacattcaaccaagtagtggtattgcaactctgctgcttatttacagccactgacaactactaccatccaagcacctaactgatgtgagccctgatgccttcttgacgcagcaac

SEQ ID NO: 5679 - DNA, 531 bp, Zea mays
  Clone ID: LIB3061-112-Q1-N6-A5
cgcaagcattaacgcctttgcccgttacctgaataatgggtgaccaccggagatccggagcgtgagttgaccatgattcaatcagtaccgatggtcctgttcactgacaaacaatgaggcccgaaggccacgattaccccagttgtgcgcccacgaacccattaggtttatgcagcaggagtcacatggacgctaagcatgaactatattggaagtctcccgccggttggtgaacaactaaaccgtgatttcagtctcgcggagacgaaagaataactggcgcctcgggtggcagatctgtaagaggatcatgcctacacgaagtctaagcttgtggctgtacgtggtttcacaacgaaattactgtgaaatcactgttgctccccaacttaaagcccttagcataaattgtaaattctgcagctggtaatgaatcaactaagtcacatatcaatgggtcttgctaactgttgcgtatccagaatggagaacggcgcctgcagctgcattaattaattacgcatctcgccg

SEQ ID NO: 5680 - DNA, 642 bp, Zea mays
  Clone ID: LIB3061-112-Q1-N6-A8
cacgcctgcgtgtaccgggctcctattacacggtcgacctatgctttctttttattctaaaaacacaccatgtcgaagcagcactttcgacgtcctatcagcaacggatgccaagatgtgggccctatttgcgcttacatgccctttgagtgagcacaacagaggcgctcattattggacaggttcacttgctgctaatgacattataaccacaggtcctgccaccatttgctttaatgggtcttcgaacgtacagaccagcgagcctacacgctacaactagtgcttgcagtgagcgccttacaacaaccactcgcccaattgcgacaccaatacttggcacattgaaccctactgaccattgcaacgcaacagcaacgacaacaaactaggctgctgccatacactgaaccacctagccgaggagaaccctgtgacctacttgcagcaccttgtgcttgcatagcaaccctattgctatggcgaacgtagctgcataccagctacaccatcggttgcagacagagatgcgcagtgctcagtcaactaggcatggtgaaccctgcctgctacctacaactacttatcatgtagcccggtcgcggtgggcaatgcacctacgtacctacaacgacagatgct

SEQ ID NO: 5681 - DNA, 374 bp, Zea mays
  Clone ID: LIB3061-112-Q1-N6-B1
tcacgcctgcgtgtaccgggctggtatacaggggtcgaccccagcgtcctgtgctgcaagctccacgtccggctgagcatagacgaaggcgccatgtacgagaggctggacgtgcaccttcacgcttgccaccaagcggatgtggaggcccagaggtccttgctccggagcaccccagcaccatcagcttgggggccgtcgtggccgtgcgggccttcggcacgccgttcgtggcgatcgcggacagggacaagttccggctgggccgggtcagctccatggccgcggacatggtcttgctgaacccggcccacgccaaggtcatgtcgatctacgaggagatcgtccggccggtgctgtcctcctacatcgac

SEQ ID NO: 5682 - DNA, 569 bp, Zea mays
  Clone ID: LIB3061-112-Q1-N6-B10
cgcaagcattaacgcctttgcccgttacctgaaaaatgggtgaccaccggagatccggagcgtgagttgaccatgattcaatcagtaccgatggtcctgttcactgacaaacaatgagcccgtatggccacaattaccccagttgtgcgcccacgaacccattatggttatgcagcaggatccatggacgatagatgaactatggggaactctcccgccggtgggtgaacaactaaaccgtgatttcagcctcacggagacgcaagaataactggcgcctcggctggcacatctgtaagaggatcttgcctacacgaggcctaagcttgtcgctgtacgtggtttcacaacgaaatgactgtgaaaacactgttgctccccaacttaaaccccttggcatacattcccaattctgcagctggtattgaatcaactaagtcacattcaatcggccttgctaactgtccggcatccagaatggagactggcgcctgctgctgcattaattacttacgcatctctccgggataggacacctgatattgtgcactctctatacattctgctct

SEQ ID NO: 5683 - DNA, 435 bp, Zea mays
  Clone ID: LIB3061-112-Q1-N6-B2
ctaactgcgcagtattggcacagaattcgttgcaccatgctactatgaaagggcgttacaacatgcatacgcactagcctacaagctacaaattgcggttgctgtgagcgcctcacaacaaccaattgcacaatcggaacaacaattgttggcacatgtaaccctacagaccattggatcgcaacaactacatcaacagagagctggcataactggtccacctaaccgtggtgaaccgtgtcacctactattgacaacagctagtggcatacaacaaacttgctctggcgaacggagctgcataccatcgacaacaacagttagcacaggctatgccagtgctcactgaactagccatggtgaaccatgacgtctacctacaactacttttatgtagcccgctcgcgctgggcaatgcacctacctacctacaac

SEQ ID NO: 5684 - DNA, 653 bp, Zea mays
  Clone ID: LIB3061-112-Q1-N6-B5
gcctgcgtgtaccgggcccctattacacgggctccctttttcattattttcactagtttcctttccactctagtttacttttattgtgtcttttgtttctcccgggataagcacgcaccctatgtttcgactagttattgggaacagcgtccgacatcaggccaccgtccaattgcaacaacaattcttggcacatataacaggacacaccatcgcagcgcagctgcctcaacaggtcctaccagctctgagccacctagccgtggtgaaccctgtcgtctacttgcaacaacggctgcttgcatgcaacccacttgctctagcaaacgtagatgcaaaccagcaacaacaacaactgcaacagtttctgccagcgcttagtcaactagccatggtgaaccctgccgactacctacaacagcaacaactgctttcatctagcccgctcgctgtggccaatgcacctacatacctgcaacatgaattgttgcaacacattgtaccagctctaactcaaatagctgtggcaaaccctgttgcctacttgcaacagctgcttccattcaaccaactaactatgtcaaactctgttgcgtacctacaacagcgacaacagatacttaatccattggcagtggctaacccattggtcg

SEQ ID NO: 5685 - DNA, 584 bp, Zea mays
  Clone ID: LIB3061-112-Q1-N6-B9
gggctgcacagattgctgcgcagactagggcaggacatggtggtgctgcttcagctgtagcttgcgcagaacattgtgggtctcattgctaatgcgatgggcggtctggttgaggatgctgatggtatgaacagggagtggtgcatcaagagccacgagctctctctccagctaaacagtgtcgttcttccacttggctcgctaaaggttgggctgtcgcggcacagatcactgctattcaaggtacttgctgaccgagttaacctaccatgtaagcttctgaaaggaatatgttataccgggacagatgaaggagctgttaacttggtcaaagttgattttgacagcatggaatatattattgatttgatgggagctccaggcaccttaatcccttcagacatttctgggagtcagtttcaggactccaacaatagccaattgagcagtgatgccattgaagagagtgccgcagaattgtgcttagcccttgagcagattaatggtggatatgagaacaaaaatactattggaggatgctcatctggtcacagatctattttagcgctcacgaggtcacacct

SEQ ID NO: 5686 - DNA, 518 bp, Zea mays
  Clone ID: LIB3061-112-Q1-N6-C11
ttaatgcctttgcccgttacctgaataatgggtgaccaccggagatacggagcgtgagttgaccatgatttaatctttaccgatggtcttgttcactgacaatcaatgagcccgaaggccatgattaccccagttgtgcggacacgaactcattagggttatgcagcaggagtccatggacgatagatgaattatttggaactctcccgtcggttcgtgaacaactaaaccgttatgtcagtctcacggagacgaaagaataactggcgcttcggctggcacatctgtaagaggatcttgcttacacgaggtctaagcttgtgactgtacgtgttttctcaacgaaatgactgtgaaatcactgttgctcacaaccttaaaccccttagcatacattgtaatttctgcagttggtattgtgtcaaataagtcagattagtatcgcccttgctaactgttgcgtatccagaatggaaaattgcgcctgcagctgcattaattacttacgcatctctccg

SEQ ID NO: 5687 - DNA, 540 bp, Zea mays
  Clone ID: LIB3061-112-Q1-N6-C2
agtgaacttgctctcttcctagctagggcagtgattgttgaagtgaaaagaacgggctatttggttgaaaccagcaaaaagcccctgccgaactagcaccggtagccaatttgttcagaggcgcgcgctctactgtcagctagccattctggtgagcggatactgcggagctggggcgggggcactggatgggctgtggaagatactaagggcacgatcactaacctattgggggagtacaacactggtggtgacctaagagaacctgcagagcatccgtgatcttgggatgcccttcttcaaccatgaggtggttaagaaggcactggtcatggctatggagaagcagaatgacaccagcatcttggtcctgctgcaggagtgaatgcggcgaggggctcataaccatcaaccagatgaccaaaggctttgcccgtgtcaaggaaggccttgatgatctgatcctcgacatcccaaatgcccaggacaagttcggagagtatgccgagctggcaacagagcgcggctggatgctgccga

SEQ ID NO: 5688 - DNA, 651 bp, Zea mays
  Clone ID: LIB3061-112-Q1-N6-C5
cacgcctgcgtgtaccgggcccctaattacacggtcgacctagcgttctttttataccactgcacatagaagcacattagtgtaccaacaatggcagccaaaaatttagactacttatgctccttggaatttctgcaagtgctgctacggtgaccattttaacgcaatgctcacaagactcctatagctgccgttcttcccccatacctctcaccagcggtgccttcggtttgtgaaaacccaattcttgaaccctacaggatccaacaggcaatctcagactggcatacttacctttatcacccttgttcctccaacaatcatcagccctattacagcagttacctttggtgcatttattggcacaaaacatcagggcacaacaactacaacaacttgtgctagcaaaccttgctgcctactctcagcaacagcagtttcttccattcaaccaactagctgcattgaactctgcttcttatttgcaacaacaacaactaccattcagccagctacctgttgcctacccccaacaatttcttccattcaaccaactggcagcattgaactctcctgcttatttacagcagcaacaactactaccattcagccagctagctggtgtgagccctgctaccttcttgacacaac

SEQ ID NO: 5689 - DNA, 369 bp, Zea mays
  Clone ID: LIB3061-112-Q1-N6-C7
cctcttattgacgcgcttgtatcctagcaacgaatcatggagctcatattacatcagttacctttggtgcatttattggcacaaaacatcatggcacaacaactacaacaacttgtgctagcaaaccttgctgactactctcagcaacagcagtttcttccattcaaccaactagctgcattgaactctgcttcttatttgcaacaacaacaactaccattcagccagctacctgctgcctacccccagcaatttcttgcattcaaccaactggcagcattgaactctcctgcttatttacagcagcaacaactactaccattcagccagctagctggtgtgagccctgctacctttttgaacaaccac

SEQ ID NO: 5690 - DNA, 635 bp, Zea mays
  Clone ID: LIB3061-112-Q1-N6-C8
cacgcctgcatgtaccgggcccctaatacacgggcgcccaactagcaacatataaagcacatagtgtaccaacaatggcagccaaaatattttgcttccttatgctccttggtctttctgcaagtgttgctaccgcaaccattatcccacatgctcacaagctcctatagcttcccttcttcccccatacctctcaccagcggtgtcttcaatgtgtgaaaccccaattgttcaaccctacaggatccaacaggcaatcgcaacaggcatcttaccattatcacccttgttcctccaacaaccgtcagccctattacagcagttacctttggtccatttggtggcacaaaacatcagggcacaacaactacaacaacttgtgctagcaaaccttgctgcatactctcagcaacatcagtttcttccattcaaccaactggctgcattgaactctgctgcttatttgcaacaacaattaccattcagccagctagttgctgcctacccccagcaatttcttccattcaaccaactagcagcattgaactctgctgcttatttacagcagcaacaactactaccattcagccagctagctgatgtgagccctgctgccttcttgacacaacaacaga

SEQ ID NO: 5691 - DNA, 642 bp, Zea mays
  Clone ID: LIB3061-112-Q1-N6-D10
cgcctgcatgtaccgggccgctaattacagggtcgacctcagcgttcggatgaatcttatgaccactttgaatgggctattgggacagatgaaggagaatccgatatttttggctttgaaaatgttggaatgaatgcacaagtccacagaaatggaatcgatcttgatcagtttgaggactacttcataacgttgcgagcttggaggcttgatggccagcgcacagagctgtgtgtaaaagcacatgcattgaagggtcaatcatgtgctcaccacaggctagtggtgggtgatggctttgtgactatgacaaagggtgaaagtattagaaatttctttgagcatgctgaagaggccgaggaagaggatgaagacgatgccatggacagggatggaaatgattttgatggtgatgatgcccattcacagaagcatgccaagagccctgaactggcaagagaatttctttgggatgctgctgctgtgatattcaaagaacagattgagaaggccttcagggaaggtacagcacagcaaaatgcacgtagtgtttttgtgacccttgctttaaaacttttggaacagcgagttcatgtagcatgcaaagaaataattacgttggaaaaacagtacaaacttctt

SEQ ID NO: 5692 - DNA, 582 bp, Zea mays
  Clone ID: LIB3061-112-Q1-N6-D3
cacgcctgcggaaccgggccgctattacacggtcgacctcagcgttcgtactagcaacaaaaaagccataatgtaccaacagtggcaagacaaaatacaaaagatttcttatgctgattggaatttatgaacgagctgatacacgacaccaatcaaccacgagtgctcacaagactaactatagctggctttgtaaacccagacctctgacacagcagcgattgtagcatgtgaaaaacgaagccttcaaccctaccagatccaacaggcaaccgcaacaagcgttgtacctttaagaacgtagcagcttcacatacacgctagccctattacaggaggtacctgttggtcatttgatgacacaaaacattaaaggacaacaactacaacaacttgagctatgaaaccttgctggctactcttagcaacatgaatggcttccattgaaccaactgactgcattgaactatgctgctcatttgcaacaacaaaaaaaactgcagtcagctaagatgatgcctaccggcagcaatattacaacattcaaccaactgggagccttgaactctggtgcttacttac

SEQ ID NO: 5693 - DNA, 456 bp, Zea mays
  Clone ID: LIB3061-112-Q1-N6-D4
tcctcccagatccaacatgcaatgggcactgccatatttaccttttcacccttgatgcctgctggggttgtcaaacctattacagtgaatgcctttggtgcatttattggcacaaagctccaggcacagcaactacgacctcttgtgatagcaacaccttgctgtctactctcaaagcagcaggttcttacattctacctacttgcttggttgaactctgctttttatttgcaacaacaacaactaccattcagccagctatttgctggctaccaacagctatttgttgcattcaaacaactgacagcattgaactcttctgcttatttacagcaacaacagctactaccattcagccagctagctggtgtgagccctgctaccttcttgaccaaccacagttgttgccgctctaccagcacgctgcgcctaacgctggcaccctcttacaactgc

SEQ ID NO: 5694 - DNA, 598 bp, Zea mays
  Clone ID: LIB3061-112-Q1-N6-D5
cgcctgcatgtaccggtcccgctattacacggtcgacctactctttctacttgaaaggggtgagaagctaaaaagtgttcccctgatcaaacataggtaatcctaatgcacgaagacacggaagttattggacgaccttaattgttatgatcagaacaaaacatgaccctttaaccttataagcttaccatgtaataaactgtatatcacttgtgcttacaccagacatggttgcccttaataatgtctgtggagtaaccgaataaatacagtaccctctaagctgcttctataactcccatctgattgttacattaggcgagttttaccaaccacctacagacttgcttgcagctggggcctgctcgttctcatccgattaaacatctccatactgccagatccgaaccctttccttatttgccttctcctggaactgttccaggttctggagagccgtcttcctctccctagtgtcccatctcttgcttatttcaagccgagcaaggccttccttaagcatggaagcatttatgctactttctgtctccgcatcaacaagagtaacaatgagaacatttccggttccttgaccctt

SEQ ID NO: 5695 - DNA, 561 bp, Zea mays
  unsure (1)..(561): unsure at all n locations; Clone ID: LIB3061-112-Q1-N6-D8
ggagaaccctccgagcatcctagtgactcccatggctccggccatgtcggcgcagttcacaagaataaccttcagcaacctgtttgtccgtcgggctggcccaggcagcacggagctgaccgtggagggaaggccatccgaccagctgggcaggagaaacctcactgacagccccgtatttgacggccgtggccctgacgccagcctcgtggctcgcgtacagggagtcgctacccagatgggcgacgtgcgccagttgtacaccgtcgtgttccaggagaggccgctcaagggctccacgctcgtcaccgaaggcgcgatgacagaagggtcagacgagtgggcgatctacggtggaactggagtgttcgcgatggcgagaggcgtcataaggagaacgtttcttgccgacacgagcggcgggaactccgacgagcttgcncgtggaggttctctgcccggtgttccgcccggcggcgtttggctcatcgtcgtcacagccagcagcaaaggacatcagctccaccgtcgtcgtcaccaaagtcggagtgtggggtggag

SEQ ID NO: 5696 - DNA, 567 bp, Zea mays
  Clone ID: LIB3061-112-Q1-N6-D9
gcctgcatgtaccggtctggctattacagggtcgacctagcgttcgcgaccagcggaggctatgatagggacggtacaaacctattttacataatacatcacctccccactgcgtgaaagggaaaatctgacatgatggccacaaacatgcaatatctggaagtagattgcgaggagaggtccaacgttcaaggagagctatgtggagttcacaacggtgccttcttggaagcgcgaacaggtgcacaagtaggggcatgtgatttcagggaagcattgggaccacagatcttggtctactttgttctgttgagcaccttcctgacactcgtttgcaagctctataatcgaatcatccttcgaggcctaatgactgaggtaatgctcttgtgcatagagaacagggaatccctattatagccaataaggacattggctgtagcaattcgcattgcactatactgcaaaggaccagggccaaaatagtacttgttgccaattggatctggagtggaaacaaacactaagacgcctgtcacagatggtttcaagggatctccttccttg

SEQ ID NO: 5697 - DNA, 101 bp, Zea mays
  Clone ID: LIB3061-112-Q1-N6-E1
gataagctgtcacgcctgacatgtaccgggcacgcgctaataccacggtcgacccactgtcgttcgcaatatattgattgagatttattctcgtttttatt

SEQ ID NO: 5698 - DNA, 503 bp, Zea mays
  Clone ID: LIB3061-112-Q1-N6-E10
cacgcctgcatgtaccgggcccctaatacacggtcgacctacgcgttcgtgcacatatatactatactatactctaggaagcaaggacaccaccaccatggcaggcaagatgcttgcattgttcgctctcctaactctttgtgcaagcgccactagtgcgacccatattccatggcactagccaccagggatgccattgggtaccatgaacccatgcatgcagtactggatgatgcaacatgggcttgccaacttgatggcgtgtacgtccctgatgctgcagcaactgctggccttaccgcttcagacgatgccacagatgatgccacatatgatgacgcctaacatgatgacaccattgatgatgccgagcatgatgtcaccaatggtcttgccgagcatgatgccgcaaatgatgatgccacaatggcactgcgacgccgcttcgcagattatgctgcatcatgcgttaccattcatgtggaaccaagtggccatgacga

SEQ ID NO: 5699 - DNA, 601 bp, Zea mays
  Clone ID: LIB3061-112-Q1-N6-E12
cacgcctgcgtgtaccgggcccctaatacacggtcgacctatgcgttcgttgcaacatagaacgcacattattgtccaacgccggcagcataaaacaaaagccttcttatgctactaggacttattgcaaatgctaatgaggcaaccacaatgccaggtggtcacaagcaagcatatgtgtccttcaaagcacgtacctttaatgaacggagttgttggaatgggaaaacggagccattcaaccgtacaggatgcaacaagaactggcacatctgatgttaccttaataacgcttgagggctccaacaatcataactgcctataacgagcagttacctttggtgcttttataggcacaaaacatcaaggctcaacaactacaacatcgagagatatgctagcgggctgcctactataactggctgaatggtatttcatgcaaccgactatctgaatcgaactctgctgtcttaagtgcagcagacatacaactacacattcagccagttatagtgctgactaccgccagctagcacatgcattcaaccaactggcaccctggaactctgctgcttatatacagcagcagcaactgctacca

SEQ ID NO: 5700 - DNA, 607 bp, Zea mays
  unsure (1)..(607): unsure at all n locations; Clone ID: LIB3061-112-Q1-N6-E2
gtaacaatcctcaaatgcgtcgagctcattgtatcgcaatccggatcttgctcatgtcctcaatgatccaagcattatgcgccagacttttgaagcagttcggaatcctgaactcatgagggagatgatgcggaacacagacagagccatgagcaacattgagtcttctccagaaggattcaacatgctccgtcgcatgtatgaaactgtccaagagccttttctgaatgcaacaacaatgggtagcgagggtgatcgaaattcgaatccattttctgctcttctaggaaatcaggggtctaaccaagcaagagactcagctgcaaatggaacaactagagcttcagaccccacatcagggtctccagctccaaatactaatccacttccgaatccttggggctcaaatgctggctctgcccaaggagcagcaaggtcctctcctgctagcaatgttaggagtactacagcaagtggcctaggagggttgggttcagcagatttgggaagtacacatggtgccagtggtggtggctctgatgctaccttgttgactcaagttttgcanaacccaactatgatgcagatgatgcagaacattatgtct

SEQ ID NO: 5701 - DNA, 439 bp, Zea mays
  Clone ID: LIB3061-112-Q1-N6-E3
gcctgcgtgtaccgggctgctattacacggtcgaccttagcgttctttcattttacctatggcacgggcaagaggttctaaccggcatggcgactagccttccagtatcccgatccccactccgctggttgccggcgctctagccggattcgacttaaccttgtgctacctaccccatggagctggtggtgaccagcgtcaccatcttgtaggacgtataactacaacgattcgcacgcgttcgtgaagatccttcgcgacgagggtccgtccgagctgtaccgagggctgacacccagcctgatcggcgtggtgccggacgcggcctgtaacttgtacgtctacgagacgctgcatgcggctttacccgtctgcgaccgggcggtgtgccagggccgacgtgggccccgttgttgacgctgctcatcggttcggcggg

SEQ ID NO: 5702 - DNA, 635 bp, Zea mays
  Clone ID: LIB3061-112-Q1-N6-E4
cacgcctgcatgtaccgggcccgctattacacggtcgacctacgcgttcggagaccagcaagcaacatagaaagtgcatatcattagcaacaacacatccacaatggcaaaacaatatattatccctcctctagctacttgctctttactacatgtgtcgctaacgcaacaattttccctcaatgctcacaagctcctgtagcttcccttcttcccccatacctctccatgcaattatagcttcaatgtgtgcaaaacccagctcttcaaccatataggcttcaacaagcaatcgcagcaagcaacatacctttatcgcccttgttgtttcaacaatcaccagccctatctttggtgcagtcattggtacaaaccatcaaggcacaacagctgcagcaactcgtgctacctgtgatcaaccaagtagctctggcaaacctttctccctactctcagcaacaacaatttcttccattcaaccaactgtctacactgaaccctgctgcttatttgcagcaacaactattaccatttagccagctagctactgcctactctcagcaacaacaacttcttccatttaaccaattggccgcactgaaccccgctgcttatttgcagcagcaaatactact

SEQ ID NO: 5703 - DNA, 367 bp, Zea mays
  Clone ID: LIB3061-112-Q1-N6-E5
cacgcctgcgatgtaccgggccgcgctaattacacggccgcaccttgtgctagcaaaccttgctgcctactctcagcaacagcagtttcttccattcaaccaactaggttcattgaactctgcttcttatttgcaacaacaacaactaccattcagccagctacctgctgcctacccccagcaatttcttccattcaaccaactagcagcattgaactctcctgcttatttacagcagcaacaactactaccattcagccagctagctggtgtgagccctgctaccttcttgacacaaccacagttgttgccgttctaccagcacgttgcgcctaacgctggcaccctcttacaactgcaacaattg

SEQ ID NO: 5704 - DNA, 178 bp, Zea mays
  Clone ID: LIB3061-112-Q1-N6-E6
cacgcctgcatgtaccgggcccgctattacacggtcgacccactcgttcgatttcttatgagtgatctttcaataataatgggtaagtccgcctgctgtttgacggcttcctctattattagaactatcatcttataggaaaaaaaaacacaagggccgaccctctaatagatccacc

SEQ ID NO: 5705 - DNA, 531 bp, Zea mays
  Clone ID: LIB3061-112-Q1-N6-E7
cgcctgcatgtaccgggccggctaattacacggctgtactatgcatcttgcattacctgatagactgtttacctagttgatgctattgagggacggaaaaggacttacacaagctcgtaagcccgtactggattttgcacatattaccaaaatatttatgattgtaaaaagcacagtgaggcttggtatcatcagttggacttaaaactgcatactgtgaaaggaatacacaaattgctcatactttgatataagagccagagcagaacagaaaaaatagacgtccgttgattacaacaacatatattttagcagtcttacttgctgataacacgatactgtggcatactatattctgaaaaggaataagtccatacccttataaggcacgaccctaactgtcggacaattaggtccttgaacaatatcatgggtctagctgccacaaatgacaggcggtagcttctaccaatatatgcaatgatggtggataaagcaaacacaccttctgtacagcttactgcaaactgc

SEQ ID NO: 5706 - DNA, 603 bp, Zea mays
  Clone ID: LIB3061-112-Q1-N6-E9
gcctgcgtgtaccgggctgctattacagggtcgacctacgtcgttcggtaacaagggtgataaaggtaagatgccagctgtgattggctgttggcatcctgttgggttgaagaattggttcatagcattatggctcatcaactacatcaacttgggctcgcaaaccttgctgtctactctcagaaacaggggggtggttgccattacaaccaactagtctgcagttgaactctgcttcttatttgcaacaacaacaactaccattcacccagctacctgctgcctacccccatgaatttgtttcattcaaccaactggcatcattgaactctcctgcttatttacagcagcaacaactactaccattcagccagctagctggtgtgagccctgctaccttcttgatacaaccacagttgttgccgttctaccagcacgctgagcctaacgctggcaccctcttacaactgcaacaattgctgccattcaaccaacttgctttgacaaacccagcagcgttctaccaacaacccatcattggtggtgccctcttttagatttcttatgagttatagttcaataataaagttttttgtctgatgt

SEQ ID NO: 5707 - DNA, 642 bp, Zea mays
  Clone ID: LIB3061-112-Q1-N6-F1
cacgcctgcatgtaccgggcccctaattacacggtcgacctcagcgttcgtatttgtgcttggtggatctcttgatgtaatggaagccaacattaaactgttgctaagactcaccttatggtgataatctggactacatctacactgagcttactagctgcgctgggtgatgtgcataaactctcgataacctggggtactcttacaattatgatcagctgcaagggttttccaaaacctcagccagattcatcaatctgaggcatgtgaccatgtatttgcctctttatggggaacctaagtcaattagagggattcttcgcttggcctacctactggaattggacccagctctagaagaattggaattgcatgtgaatggcggcggcgtggatgttgggcgggcactcagacggaatatgttaccgcactcacacaataggctcaagagggtccttatttcaggagccactgtatgggaggggctaatggagctggcatactacattcttcggagtgccaatagactcgaaagtatggtcttagatccaaagataaggattgggggtcctcagctggatggttggatgattgatattggtagggagacgatcaaaaatatttttgagggagaggagtttc

SEQ ID NO: 5708 - DNA, 656 bp, Zea mays
  Clone ID: LIB3061-112-Q1-N6-F10
cacgcctgcatgtaccgggccgctattacacggtcgacctcagcgttcggtgaaaccccaattgttcaaccctacagatccaacaggcaatcgcaacaggcatcttaccattatcacccttgttgctccaacaaccgtcagccctattacagcagttacctttggtccatttggtggcacaaaacatgggggggcaacaactacaacaacttgtgctagcaaaccttgctgcatactctcagcaacatcagtttcttccattcaaccaactggctgcattgaactctgctgcttatttgcaacaacaattaccattcagccagctagttgctgcctacccccagcaatttcttccattcaaccaactagcagcattgaactctgctgcttatttacagcagcaacaactactaccattcagccagctagctgatgtgagccctgctgccttcttgacacaacaacagttgttgccgttctacctgcacgctatgcctaacgctggcaccctcttacaactgcaacaattgctgccattcaaccaacttgctttgacaaacccaacagtgttctaccaacaacccatcattggtggcgccctcttttagattgcttatgagttatagttcaataatgaagttttttggatgatgttt

SEQ ID NO: 5709 - DNA, 528 bp, Zea mays
  Clone ID: LIB3061-112-Q1-N6-F11
gcctgcatgtaccgggctgctattacacggtcgaccccagcgtcctggcacgagtgctccgacttcgtctgagaggaaggccacccgcgggcgacaataggcttgacctacaccttggcgctggacacgagcgtcagctagatggcgctggcgtcactggaagggcaaccggtacaacactgtgagatgacatgaagttcttcgccaccccggcgaggcacatctcgttggggaacaaggtggcgaaccacacccttcctgtgcttcaactcccctacaggcgagcctatagatggtcataccgagcagtcagctgaccttgctactcctgccccatggccgggcgggtgcgctgaaactggcgtcgctcaggtgctggcgccggggcgatcaccctgaccgtcgcttctggccgcacggaccttggcagcgccaggcgttgctggtgcagacgtagaacaacaacgcgcggcccgccccaggtccgtgcccgcagcagcgacaccagcggctatggggccgggcccc

SEQ ID NO: 5710 - DNA, 311 bp, Zea mays
  Clone ID: LIB3061-112-Q1-N6-F2
cacgcgtgcgtgtaccgggctcctattacagggtcgacctcagcgttcttctactagcatcataaaagcacatagttgtccaacagtggccgccaacatattcgataacttatgcttcgagctctttctgatagggtagctaccgcaggcgctcctcccacgaatggtcacaagctactaatcacttttgattttttcaacatcacagtttgaccgaaggcgtctttagtgggagaaaacccagggggccaacccttacggataccagacgcgcgtatgcaacggcaggccatctgtacgcatgtattcac

SEQ ID NO: 5711 - DNA, 637 bp, Zea mays
  Clone ID: LIB3061-112-Q1-N6-F3
cacgcctgcgtgtaccgggccgctattacacggggacgccagccttacaattagctcatcgactccagattggtataactcgacaccatgaggtgctgatcgttgcccttgctctcctggcgctcgctgcgagcgccgcctccagtacaagcggcggctgtggctgccagacaccaccgtttcatctaccgcctccgttctatatgccgcctccgttctatctgccgccgcagcagcagccgcagccatggcaataccccactcaaccaccgcagctaagcccgtgccagcagttcggatcctgcggcgtcggcagcgtcggcagcccgttcctgggccagtgcgtcgagttcctgaggcaccagtgcagcccggcggcgacgccctacggctcgccacagtgccaggcgctgcagcagcagtgctgccaccagatcaggcaggtggagccgctgcaccggtaccaggcgacatacggtgtggtcctgcagtccttcctgcagcagcagccgcagggcgagctcgcggcgctgatggcggcccaggtagcgcagcagctgacggcgatgtgcggcctgcagctgcagcagccaggtccctgcccttgcaacgcagctgccggccggtgtctactact

SEQ ID NO: 5712 - DNA, 449 bp, Zea mays
  Clone ID: LIB3061-112-Q1-N6-F4
cagtgcgatacagaggatcgttcgaacaaaacaccatgatagatggtcatcgctctcgtcgagtgcctggctctgtcagctgccagcgcctctgcaatgcagatgccctgcccctgcgcggggctgcagggcttgtacggcgctggcgccggcctgacgacgatgatgggcgcccgcgggctggacccctacgctgagcacctgaggcaggcggagtgcaccccggtggcggaggtgccctactacgccgatggtcggcagcctgacaccatgttccacccgctcctgctacagtgcttgcatcagaacatgatgatgatggacgttcatgccggcacgcagcagctgaagatgattattcatcttgagcttgccgctgacgccatcaacatcctgtacgatccagctctgatgcagcaactgcagcagctgctggcagcccatggtct

SEQ ID NO: 5713 - DNA, 451 bp, Zea mays
  Clone ID: LIB3061-112-Q1-N6-F5
ccctgtcttcaccccatgacctcacttgaattatagcttcagaggtgaaaacccagctcttcaaccatataggcttgaacaagcaatcgcagcaagcaacatacctttatcgcccttggtgtttcaacaatcaccagccctatctttggtgcagtcattggtacaaaccatcagggcacaacagctgcagcaactcgtgctacctgtgatcaaccaagtagctctggcaaacctttctccctactctcagcaacaacaatttcttccattcaaccaactgtctacactgaaccctgctgcttatttgcagcaacaactattaccatttagccagctagctactgcctactctgagcaacaacaacttcttccatttaaccaattggccggactgaaccgcgctgcttatttgcagcagcaaatactactgccatttagcgagctagctgca

SEQ ID NO: 5714 - DNA, 491 bp, Zea mays
  Clone ID: LIB3061-112-Q1-N6-F6
cacgcctgcatgtaccgggccgctaatacacggccaagcggtagttgcgtatagaggacgcataacaaaacagcatgaatatggacacttgctctcgtcatgggcctggctactagatagatgccgagcgcctgtgcaatgcaaatgaccctgcccctgcacggagctagagggcttgaacagatctggcaccggcctgacgacgatgatgggcgccaatggcactgtacccctcacacaggagtacctgacgcaagctgagcacatgccgctggcagaggccacctactaccccggtggtgggcagcaccatcaccatgcatgcagccggtcaccctacagtgctagcagcagcagatgatgatgaatgacatgcagctcgtacagcatgatgttcacatgatgatgcagcttaagcgtgccgatgatctcaacatgatgctgtacgaaccagatctgcatcatcatcatcagcagctggtggcactcca

SEQ ID NO: 5715 - DNA, 633 bp, Zea mays
  unsure (1)..(633): unsure at all n locations; Clone ID: LIB3061-112-Q1-N6-F9
gcctgcatgtaccggtccgctaatacacggtcgacctcagcgtgcggtaaagctggggattctaggagtgctatctcacgaaaaggcaatgcttacaattcgtgaactgattacaaaccagacattgcgatagacagtagaggaaagtaagtactaaccctttaagagattgccgaatagaatgggggggggggtatacaccacctcactatccttttttgtctattaaccaaaaggatatagctccacaggacggggtgccactcaacgcctactttggggggtaatctgggccattgtcctaggtgttcacaaaggcagcttaaatttggggccgaattcgttatggagtggtaggagactggtcagcgcttgaagtactaacagataaagctggtttcttgaattgaaccacagtaaccgacatgttattacatccttgcgcaccagctgtatgtgccacacaggggttgagcaacttgtcacacacagtggattttttatactnggtcttttagggtgtgttggtacaatattagctactttctttggttggcattgtattccgaatttcatcccatgcttntagagttgttttgggtcattcttgcgggggcggggcctgtttttccc

SEQ ID NO: 5716 - DNA, 479 bp, Zea mays
  Clone ID: LIB3061-112-Q1-N6-G1
cacgcctgcatgagccgggccgcatacagggtcgacccagcgttcgggagagcccaggctggtggaatgctgagcacaaggctcaaccatgtactgtgacgcggcaacatatgccaatcagagcttgcgtgatacagattaactgttcgctcttgggggggtgatcaaaagcatggtcaaaaaaggcgctaaacaaaacacccgagctgtgctcccaacatcattgcttggaattacaccataaaactgatgagtacctaccgactggtcatgttattgcattgaacggaataggccagaaccagcataacactcttcaacatgcctaaggcgggcacacatcgtaagcaaaaacaatatcctatgtgcacaatcgcacggaagggagcctactgagtatgctatcatatgcacatgtccccaagcacaaacacgatggaagccctgacacacggcatggatggccctctgcagttgtc

SEQ ID NO: 5717 - DNA, 573 bp, Zea mays
  Clone ID: LIB3061-112-Q1-N6-G11
gcctgcgatgtaccgggcccgctattacacggctggccttcaatccattgctctggcgaacgtagctgcataccagctgctgctcagtttgttcagtttatgccattgctcattcaactagccatggttgaaccctgctcgtctacctacaactactttcatctagcccgctcgcggtgggcaatggaggggggggcctacaacaacagttgctgcaacaaattgtaccagctctgactcagctagctgtggcaaaccctgctggctaattaaaaacagtggcttgcattcaaaccaactggctgtgtcaaactctgctgcgtacctacaacagcgacaacagttacttaatccattggcagtggctaacccattggtcgctaccttcctgcagcagcaacaacaattgctgccatacaaccagctctctttgatgaaccctgccttgcagcaacccatcgttggaggtgccatcttttagattacatatgagtagtactcgacaatggtgccctcataccgacatgtgtttcctagaaataatcaatatattgattgagatttatctcgaaa

SEQ ID NO: 5718 - DNA, 574 bp, Zea mays
  Clone ID: LIB3061-112-Q1-N6-G12
ctagtgttccaacaggggaggccaaaaattatacataaaaatgcttcttggactatatctaagagcaaatacaaagaagacaccaccaaagaggtggcagcggctaaacgctgctttgtttgccaaaacctgttaccagaatggtatcaattgtgggaaaacccaaaggttgacccctacaggatccaacaggctaataacaacgtggaactaactgacctttgatcacaactaaggtacgtacaacattacaaccagcctctattgacatgcaatggacacttatggtggcatctgattggaaacaaaacatgaaggcacaagatctacaacaacttgaggtaacaaacctttgtgggtacgcagaacgacagtagctgaatggattcaaccaactaggtgaataaaactctgattcatagcagctacaacgacaactaccattaaaccaggtacgctgctgactagccgcaggaattgcttgcatacaaccaactggcagcagtgaactgtgctgctgatccacagaatgcaccactgctaccattcaaacagctatctggagtgagccctg

SEQ ID NO: 5719 - DNA, 598 bp, Zea mays
  Clone ID: LIB3061-112-Q1-N6-G2
cacgcctgcgtgtaccgggcccctataccacggtcgacctagtcgttcgtagctctttaacctataggctttatcatgctctggaaatgtagctcatactttttgggtgctcgcatgcttcaacacaaaacacttcctattttgggtgcagccattggtacaaaccataggggccccccacctgcatcagctggtgctaccagggatcaaccattggctatggcgaacctcaatggctactcttagcagcaacaattacttgcattcaaccaactgcctacactgaaccctgatgggtatttgcagcagctgctattaccattaagccagctagctactgcctactctcaaaaacaacaacttctttcatttaaccaattggccgcactgaaccccgctgcttatttgcagaagcaaatactactgccatttagcgagctagctgcagcaagtcgtgcttccttcttgacacagcaacagatgctgcctttctacaagcagtttgcggctaaccccggaaccctcttacaactacaacaattggtgccctttgtccaacttgctttgacaaacgcagcaggctactaccaacaacaca

SEQ ID NO: 5720 - DNA, 660 bp, Zea mays
  unsure (1)..(660): unsure at all n locations; Clone ID: LIB3061-112-Q1-N6-G7
tggtcacgcctgcaggaaccgggcccgcaatacacggacaccacctagcaacatacatagtgaatacactagcaacatcttatcaccaatggcagtcaagatttttgccattcttgccctccttgctctttcagcaagcgttgctaccgcgactattattccacaatgctcacaacaatacctctctccggggacaggcgcgagatttgaatacccaactatacaatcctacaggctacaagaggccatcgcagcaagcatcttacgggcgttagcattgaccgtccaacaaccatatgccctattgcaacaaccatccttaatgaatctatatctccaaagaatcgcagcacaacaactacaacaacagttgcttccaacaatcaatcaagtagttgcagcgaaccttgctgcttacctccagcaacaacaatttcttccattcaatcaactagctggggtgaaccctgctgcttacttgcaggcacaacagctactaccattcaaccaacttgtcaggagccctgctgccttcttactgcagcaacagttgcttccattccatctacaagttgtggcaaacattgctgctttcttgcaacaacaacaacaattgctgccattttacccacaggttgtggngaaacattaacgccttct

SEQ ID NO: 5721 - DNA, 507 bp, Zea mays
  Clone ID: LIB3061-112-Q1-N6-G8
ccccgttgcctgaataatgggtgaccaccggacatacggagcgtgagttgaccatgatttaatcattaccgatggtcctgttcactgaccacaatgagcccgtaagggcacaattgccccagttgtggggccacgaactcattaggtttatgcagcagcatccatggacgctggcatgaactatggggaactctcgcgtcggttcgtcaacagctaaacagtgatgtcagtctcacggagacgcaagaataactggcgcttcggctggcacatctgtgagaggatcatgcctacacgaggtctaaacttgtgactgtacgtggtttctcgagcgaaatgactgtgaaatcacagttgcacacaacataaaagccctaggcatacattgtcctgtctgcagctcctaatgtgtgaaataagtcacatcaaatgggtcttgctaactgttgcgtatccagaatggaaacaggcgcctgcagctgcattaattaattacgcatctctccg

SEQ ID NO: 5722 - DNA, 622 bp, Zea mays
  Clone ID: LIB3061-112-Q1-N6-G9
gcctgcgatgaaccgggccggctaatacacggtcgacctcagcgttcgtcattatcaacaacagagcacaatggcgaccaagtaattttccctccttatgctccttgctctttctgcatgtgttgctaacgcgacaattttccctcaatgctcacaagctcctatagcttcccttcttcccccatacgcggggatgaatgatagcttcagtatgtgaaaacccagctcttcagccctataggctccaacaagcaatcgcagcaagcaacatacctttatcacccttgttgtttcaacaatcgccagccctatctttggtgcagtcattggtacaaaccatcagggcacagcagctgcagcaactcgtgctacctgtgatcaaccaagtagctctggcaaacctttctccctactctcagcaacaacaatttcttccattcaaccaactgtctacactgaaccctgctgcttatttgcagcaacaactattaccattcagccagctagctactgcctactctcagcaacaacaacttcttccatttaaccaattggccgcactgaaccccgctgcttatttgcagcagcaaatactactaccatttagccagctagctggagc

SEQ ID NO: 5723 - DNA, 481 bp, Zea mays
  Clone ID: LIB3061-112-Q1-N6-H1
cacgcctgcgtgtaccgggccgctatagcacggtcgacctcagcgttcgtagttacctacaccgcatcgattggcacaactacatttagtgacaacatctacagcaactagcgctaacccaccttggtggactctatgagcatcagaagctactaacgttcaacctaattgctgggtagcaccatgcttcttataagaaacatcaacaacgaccattcactcatataacagctgactacggccaccccttatgttgcattgaaccaactaacgctattgaactctcctgattagttacaggaatgcaactactaccattaatgcagatagggtgccgtgagccctggcaccttgctgatacaaccacaacagctgccgttgtatcaagacgctgcgcctaacactcgaactctcttacaactgggacaattgctgtgattcaaccaactagcttggacaaacacagctgccatctaccaac

SEQ ID NO: 5724 - DNA, 513 bp, Zea mays
  Clone ID: LIB3061-112-Q1-N6-H12
cacgcctgcgtgtaccgggccgccaatacacggtcgacccagtcgttcgtatggtgaaactgtacaggctaaggacattaacctaactgaaagggatgtcggaggtcaggacaagacctgcccgtagcggaggcactactttcataacacacaactacttatttttgatgtagacagctaacgactgggtaacgtgtaaaaaaaggctacgtgagagctccacacgtatgcttaatgaggatcacctgcgaaacgctgtactacttgtgttagaaaacaaacaaaagcctgccaatgctctgaatgctgcctaaacactgcaagctaggtctctttatctgcaacagccgctctggtacatacagcgcaccaaggctgcatgtggttgaaggatgtatgaagggcttgacaggctttgcaggaacatctacaccaagagttgaaggttttccagatgattcctattcagcagacggctgaacaaattatgggcgctaacaacacgacatcctg

SEQ ID NO: 5725 - DNA, 226 bp, Zea mays
  Clone ID: LIB3061-112-Q1-N6-H2
cgacctatgtcgtttgtttttttttttttattttttttagatttttttgattttttttttttttttttttttttttttttttttttttttttttttttttttttttttattttttttttttttttttttattttttttttttttttttttttttttgtgtgggggggggtttttttttttttttttaatttttttgtgggtttttttttttattgattgggatttg

SEQ ID NO: 5726 - DNA, 440 bp, Zea mays
  Clone ID: LIB3061-112-Q1-N6-H3
gtcgacctcagcgttcgtatgtttacgcatatatactcacatgtcctagtcatgctttgcgcgacctgaaacaacgcccgtgtggtttaacgtgtcgcaaggataataatagcttttgatgttttatgcttataaaaaaaaacacatgggccgaccctgtaatagatccaaccttcctgcgcgtgcatcagatttccttattctagtatagttaaagttaattcaattcattggcactaggttttacatcggtgaaactgggaaaaccttacagttacccacatatatcaccttgcagcataaaccgctttggccaggtggcctaatagagaagatgactcacattattggccttgccatcactgcccgatctgcaatgggaatacacgcgccctgttgcattacataaatcgccaacgctctgggagatacgcgcagcg

SEQ ID NO: 5727 - DNA, 548 bp, Zea mays
  unsure (1)..(548): unsure at all n locations; Clone ID: LIB3061-112-Q1-N6-H4
cacgcctgcatgtaccgggccgctattacacggtcgacctcagcgttcggtggnaaccctagagggaacaggtgacggcggcgcgctacctagaccgggatacggaggatagatccctgctacttcccggcgcgacggcgccagcaaccggactgcaggctgcttgaagagctcatcatttaatatgaaaggaaggcaagttaatgcaatacctgaagctggatcgggtcgggttcaaagctaggtcatagagtcatagccgggatttgtttcttaaactgggctaaagccctgaagcgcatttcaccggtactccagctgagcctgtatactgcttcagacccaacataaactggtgcaccctgatctattaggacagggtgcaccagattatcggggccatgcagagctctacagctacagatgtggacaacgggaacgggatcctgtgcattgaccacggtataaagctcaacccagggacgaagctatataatcttgacgatacgaaggccccacaactctgtatgtaactgaaaaccccatgc

SEQ ID NO: 5728 - DNA, 363 bp, Zea mays
  Clone ID: LIB3061-112-Q1-N6-H5
tgccgcctgctgaccggtccttacacggtcgcccatcttctttaaacgtgggaagcgctggtattttaaacttggctcgaaaaggctgacattactatctctataggtgcgcacagatttgatgggcacatttacccctataccccctcaaagctctacaagccgctattgcttgaaggacacgttgatcactggggactataagaggcagtttttattgcactactcatgacatactttttcaaacctgttcttgattgatggacaacatggaggaagcgaattgcttaaagaggcttcgcatgagaacttatgtgagcgtttggttaccatgggttctcagatcaatgacacactaacttt

SEQ ID NO: 5729 - DNA, 538 bp, Zea mays
  Clone ID: LIB3061-112-Q1-N6-H8
cgcaagctttaacttctttccccgtagcctcgaataatgggtgcaccatccgtgacatcacggcagcggggagcttgcaccatgcatgttaatgcatttacctgatggtagcttcttcacatgacaaacaatgggcccgtgagggcacaactaccccagttgtgcccccacgaacccattgtggttatgcagcaggatccatggacgctaaatgaactatttggaactctcccgccggttcgtcaacaactacaccgttttttcagtctcgcgcagacgaaagaataacttgcgcctctggtggcacatctctgcgaggatcatgactacacgacgtctaaactcatcactgtacgtggtttctcgacgtaaattactatcaaaacactagtgttcaccacattctagcccttagcatacatccaactttctgcagctcctgttgtgtcaaataagtcccatcagttgggtcttgctaactgctcggtatccagaatggcaaattgtacctgcagctgcatttattaattacacatct

SEQ ID NO: 5730 - DNA, 599 bp, Zea mays
  Clone ID: LIB3061-112-Q1-N6-H9
cacgcctgcggaaccgggccccaataccacggtcgacctcagcgttcggtaataagctcaaagactccagattggcgaactatgaaccctgaacgtgctaatggttgacctagctctcctggcacattgtgccagcgccgactggaggacaagccgcggctgagggtgccaaacaccaccaactaatgtgccgggtacgtagtatatgcctccttcacattatctgtccacgaaatagcagcctcagccatggacacaccccactgaaccaccgcaaggaaacccgccccagctgctgcagatcctggggcgacagcagcgtcagcagcccggctctgggccagcgcgtcaaggtcctgaggcaccactgcagcccgggggggacgcacgactgctcgacacaacgccatgcgctgcagcaccagtgctgccaccacatcatgcatgaggagccgctgcacctgtaccaggagacacacggactggtgctagcctccttgctgcagcagcaggctgaagtggagccttaggaactgatcgcagtccaccaagaacaggatgtcaccgctatctgcggcctggaactccaacagccagga

SEQ ID NO: 5731 - DNA, 358 bp, Zea mays
  unsure (1)..(358): unsure at all n locations; Clone ID: LIB3061-001-Q1-K2-A3
attttgagcattcagaaacacaccaagcgaagcacattagcaacaacctaacaacaatggctaccaagatattggccctccttgcgcttcttgcgctttttgcgagcgcaacaaatgcgttcattattccacaatgctcacttgctccaagttccattattacacagttcctnccaccagttacttcaatgggcttcgaacacccagctgtgcaagcctataggctacaacaagcaattgcggcgagcgtcttacaacaaccaatttgccagttgcaacaacaatccttggcacatctaacaatacaaaccatcgcaacgcaacagcaacaacaattnctaccagcactgagccacct

SEQ ID NO: 5732 - DNA, 136 bp, Zea mays
  Clone ID: LIB3061-001-Q1-K2-F7
ccggctagacgtacgcgtccggtccttacttcagtgtagtataaggttaaaactatgtatgaccgaattaggtgggatccttgactcaatgctgctgtatccaaacgaacgtcaccatgacaggcctatacagaac

SEQ ID NO: 5733 - DNA, 253 bp, Zea mays
  Clone ID: LIB3061-002-Q1-K2-D9
agcattcaaaaacacaccaagcgaagcgcactagcaacgacctaacaccaatggctaccaagatattagccctccttgcgcttcttgcccttttagtgagcgcaacaaatgcgttcattattccacagtgctcacttgctcctagtgccattattccacagttcctcccaccagttacttcaatgggcttcgaacatccagccgtgcaagcctacaagctacaactagcgcttgcggcgagcgccttacaaca

SEQ ID NO: 5734 - DNA, 228 bp, Zea mays
  Clone ID: LIB3061-003-Q1-K1-A12
atcaagagtacccagatgtatccgtcgttgctggtctaaacactaatagggtgtttggtctgaggaatgggctagtccattctcttctcgctcttttttttatttggtttattaaatagaatgagttgatctaaaaaaaaaaaaaaaaaaaaaaaaaaaaaacaacaaaaaaaaaacaatacaaaaaacaacaaacaaaaaaaaaaaaacataaaaccataataaaaa

SEQ ID NO: 5735 - DNA, 374 bp, Zea mays
  Clone ID: LIB3061-003-Q1-K1-G6
aagtgccaggggtgcttcagcataaccactgttttcagccactcccagactgttgatgtgtgccctggctgccaaactgtcctctgccaacccacaggaggaaaggcaaggctcactgagggctgctctttccgcaggaagggagactagagcggatgtggtcttcaagttttgctctatgccagatactagcgtcatgaactgcctttagctaagattttccataagttgttctcgagcagctatgtgttgcatgttggctacttccaaacttatatctggttctggttggattgtgatgaactaatggctctattgaatcatataatgatgttgccgatatttggtgaaaaaaacaagtattaacaacaaag

SEQ ID NO: 5736 - DNA, 246 bp, Zea mays
  Clone ID: LIB3061-004-Q1-K1-G8
cattcaaccaactggcagaaattgctgcgggtaggcagcacgtttctggctgaatgctacttgttgacgcgggggatcacacgcacacttcaatgccgctagtatgccgcatggtactacctgatggcgtttagagcacgcagtacggctttggatacactcctgtacatccgctgccagcgctgccgcggccagctcctggcggacctagccgcgggattcggcgccggcctgcagcctacaggc

SEQ ID NO: 5737 - DNA, 320 bp, Zea mays
  Clone ID: LIB3061-007-Q1-K1-F3
gagaatgcaaactggtttcagggtactatatatgctgtaaggcagtacttgtggttgtttgaggagcataatgtgatggaatttctaattcttgctggcgatcacctgtaccggatggactatgaaaagttcattcaggcacacagagaaacaaatgctgatattaccgttgctgccctaccgatggatgagaaacgtgcaactgcatttggcctcatgaaaattgatgaagaagggaggatcattgagtttgctgagaaaccgaaaggagagcagttgaaagcaatgatggttgacaccaccatacttggccttgatga

SEQ ID NO: 5738 - DNA, 421 bp, Zea mays
  Clone ID: LIB3061-008-Q1-K1-E9
cggtctctctagccttcgatgatagtcttaccggcgccactcaacgccaggtcttcgtgaaaaccatcgccggcgatgagtttcaaccagtctactgtcaaggggcaggccaggagggagaggcctagggctcgccctcatggcctgacgcagcagaggaggcaggaaataaaggaagcctttgatctgtttgatacagataactctggaaccattgatgcaaaagagctcaatgttgccatgagagccttgggatttgagatgactgaagagcaaattaggcaaatgattgctgatgttgacaaagatggcagtggagcgatcgactacgaggagtttgagcacatgatgactgccaaaatcggagagagggatagtaaagaggagctttcaaaagcattccgcattattgatcaagatg

SEQ ID NO: 5739 - DNA, 390 bp, Zea mays
  Clone ID: LIB3061-008-Q1-K1-F5
gggcccatgaagaatagctttaagatttccaccggcacctcggcggcctccgcgcccgcggacgatgaatctgcagatggcccgtctgccgacgacgactcgtccgatgatgccgcggacaaggctgccgccgcgccgtcgtacctgtccgctcgatgggtgaccgccgcagtgacgaccgccgtcgcgctggcgctggcggcgtaaggtgtgcgctcatgtgctatgttttttttataacttattggaccccctatcttcttttcttttgtccaagtcgtgtcccttccttgttggtgaacaaaataagaagggctatttttgtttttttaaaaaaaaaaaaaaaaataaaaaaaaaaaaaaaaataaaaaaaaaaaaaaaaaaaaata

SEQ ID NO: 5740 - DNA, 402 bp, Zea mays
  Clone ID: LIB3061-008-Q1-K1-G2
taggttctccgtgttacgtagcacactctcaaattgaacagattggtgcatcctcagaagctaagaagaggttgaattttaatgtggatgttataaatctgaggatgccggatcgtgcaagaccaaaaggacggacaataaaaaatatagaagataggattatgaaactaggtgccaaaagaaaaaaagaagaataggagatgccaattgtgtggaatagcagatggacataacagcagaacgtgtctgtctgtggaagagaacagggcaagactagcaaaactggctaatcgaaagagaggacgaccggccggatcaagactaaacaataaaacaactgctccacagtggaatgaaacatcgactgctaaaaaacatcgtattgatgaagaagtagaaaat

SEQ ID NO: 5741 - DNA, 196 bp, Zea mays
  Clone ID: LIB3061-009-Q1-K1-A6
gctttgacaaacccaacagcgttctaccaacaacccatcattggtggtgccctgtttgagattgcttatgagttatacttcaataatgaagtcttttggatgatgtctgtggcttcccagaaataagaaagtacatttctaaaaataccgactacgatctatatgccagctaacgcctatctgaacgacgaaacac

SEQ ID NO: 5742 - DNA, 399 bp, Zea mays
  Clone ID: LIB3061-009-Q1-K1-C11
gcttcagtatgtgaaaacccagctcttcaaccctataggctccaacaagcaatcgcagcaagcaacatacctttgtcacccttgtttcaacaatcgccagccctatctttggtgcagtcattggtacaaaccatcaaggcacagcagctgcagcaactcgtgctacctgtgatcaaccaagtagctctggcaaacctttctccctactatcagcaacaacaatttcttccattcaaccaactatctacactgaaccctgctgcttatttgcagcaacaactattaccattcagccagctagctactgcctactctcatcaacaacaacttcttccatttaaccaattggccgcactgaacctcgctgcttatttgcagcagcaaatattactaccattt

SEQ ID NO: 5743 - DNA, 343 bp, Zea mays
  Clone ID: LIB3061-009-Q1-K1-E12
cagcattcagaaacacaccaagcgaagcacattagcaacaacctatcaacaatggctaccaagatattatccctgcttgcggttcttgcgctttttgcgagcgcaacaaatgcgttcattattccacaatgctcacttgctccaagttccattattacacagttcctcccaccagttacttcaatgggcttcgaacacccagctgtgcaagcctataggctacaacaagcaattgcggcgagcgtcttacaacaaccaatttcccagttgcaacaacaatccttggcacatctaacaatacaaaccatcgcaacgcaacagcaacaacaattcctaccagcac

SEQ ID NO: 5744 - DNA, 447 bp, Zea mays
  Clone ID: LIB3061-009-Q1-K1-F8
agcattcaaaaacacaccaagcgaagcgcactagcaacgacctaacaccaatggctaccaagatatgagccgtccttgcgcttcttgcccttttagtgagcgcaacaaatgcgttcattattccacagtgctcacttgctcctagtgccagtattccacagttcctcccaccagttacttcaatgggcttcgaacatccagccgtgcaagcctacaggctacaactagcgcttgcggcgagcgccttacaacaaccaattgcccaattgcaacaacaatccttggcacatctaaccctacaaaccattgcaacgcaacaacaacaacaacagtttctgccatcactgagccacctagccgtggtgaaccctgtcacctacttgcaacagcagctgcttgcattcaacccacttgctctggcgaacgtagctgcataccagcaacaac

SEQ ID NO: 5745 - DNA, 426 bp, Zea mays
  Clone ID: LIB3061-009-Q1-K1-H10
attgagaccaactagcaacatagaaagcacaatagtgtaccaacaatggcagccaaaagattttggttccttatgctccttggtctttctgcaagtgctgctaccgcaaccattttcccacaatgctcacaagctcctatagcttcctttcttcccccatacctctcaccagcggtgtcttcagtatgtgaaaacccaattcttcaaccctacaggatccaacaggcaatcgcagcaggcatcttacctttatcacccttgttcctccaacaaccgtcagccctattacagcagttacctttggtgcatttgttggcacaaaacatcaaggcacaacaactacaacaacttgtgctaggaaaccttgctgcctactctcagcaacagcagtttcttccattcaaccaactggctgcattgaactct

SEQ ID NO: 5746 - DNA, 390 bp, Zea mays
  Clone ID: LIB3061-010-Q1-K1-D10
aatgcagctagttggttgaactctgcttcttatttgcaacatcaacaactaccattcagccagctgtctgctgcctacccccagcaatttcttccattcaaccaactgacagctttgaactctcctgcttatttacagcagcaacaactactaccattcagccagctagctggtgtgagccctgctaccttcttgacacaaccacaattgttgccgttctaccagcacgctgcgcctaacgctggcaccctcttacaactgcaacaattgctgccattcaaccaacttgctttgacaaacccaacagcattctaccaacaacccatcattggtggtgccctcttttagatttcttatgagttatagttcaataataaagttttttgtctg

SEQ ID NO: 5747 - DNA, 62 bp, Zea mays
  Clone ID: LIB3061-010-Q1-K1-D9
cttgatatctatattcatatgatataaaataatatccctttctacatttgcacagaggcact

SEQ ID NO: 5748 - DNA, 427 bp, Zea mays
  Clone ID: LIB3061-011-Q1-K1-B3
caacagtgctgccagcagcagatgaggatgatggacgtgcagtccgtcgcgcagcagctgcagatgatgatgcagcttgagcgtgccgctgccgccagcagcagcctgtacgagccagctctgatgcagcagcagcagcagctgctggcagcccagggtctcaaccccatggccatgatgatggcgcagaacatgccggccatgggtggactctaccagtaccagctgcccagctaccgcaccaacccctgtggcgtctccgctgccattccgccctactactgattcatgatatttgggaaatctcctctatccatctctctctatctatatatgtaataatgcagtcagacgacacacattatcatgtgtggtatgaccaataatatatgcatggtcataataaagttctggttctaatgaaaaa

SEQ ID NO: 5749 - DNA, 313 bp, Zea mays
  Clone ID: LIB3061-012-Q1-K1-D6
tcagcaactacaaccacaacacttatattaacatcaacaacaacagcaacaacggcaggattaatgtataggccaacaactacatcaccaactatcacaaggccatgttcatcaacacgaacagagccatgagcaccaccaatgtcagatccattatcaacaacattaacatcaatttacagtgctcaatgaccatgcattcaacatactacaatatcctcaacaatatgatcaatactagtaataatcacaacagcaacaatgacattgacagtagcaccatcatatctacaatgtcagctattactactat

SEQ ID NO: 5750 - DNA, 240 bp, Zea mays
  Clone ID: LIB3061-013-Q1-K1-B5
atggacgtcgccaaggccatcgagaaggtgggcacccgcaacggctccacctccaaggtggtcaaggtcggtgactgcggacagctctcctagatctctctgatctggtctgttcggccgccctccctccgtcatcgtcgactccccctgcgtccgttcctttggatctgaataagacggtggtgatctgagtggtggtcttaacaaaaacagcttgatgggctgttcatccctaaaact

SEQ ID NO: 5751 - DNA, 334 bp, Zea mays
  Clone ID: LIB3061-013-Q1-K1-D6
caatttcttccattcaaccaactggcagcattgaactctcctgcttatttacaggggcaacaactactaccattcagccagctagctggtgtgagccctgctaccttcttgacacaaccacagttgttgccgttctaccagcacgctgcgcctaacgctggcaccctcttacaactgcaacaattgctgccattcaaccaacttgctttgacaaacctagcagtgttctaccaacaacccatcattggtggtgccctcttttagatttcttatgagttatagttcaataataaagttttctgtctgaaaaattactgaagattaaaagcaaaac

SEQ ID NO: 5752 - DNA, 299 bp, Zea mays
  Clone ID: LIB3061-014-Q1-K1-G5
cccacgcgtccgcagcaggatgatgacatcactgcggggtgaagcgacaatcccatctccgccgtgggaatcatgggtgagcgcttcgttcttggtggtttcgcctgtttttcctggtagtcttaggtactattcttgcttacctggccatcgctagcactattttttgcggcatctggtgggttcgactatgacgattatcctcacctatgtaaaccctagattgatggattttttaataaataaatagcagttctagccaaaaaaaaaaaaaaaccaacaaaaaaaacttgcaaaaa

SEQ ID NO: 5753 - DNA, 380 bp, Zea mays
  Clone ID: LIB3061-015-Q1-K1-B6
gcttgcatctcaaacagcattatcggctggcactcaactgttggtcaatgggcacggatagagaatatgactatcctgggggaggatgttcatgtgtgtgatgaggtgtacagcaatggcggtgttgttctcccacataaagagatcaagtcaagcattctgaagcctgagatcgtcatgtgagctctccagttttagctacagtacattcttaacttctttgacgaagggaggattgcagatccccttttataaacgatattgcttggtatcttcgatctaatgcaaacagcttcatacttggtctcttgttaaactattgacaatgtatcttggtctttgttgaaaagtttagtacttgagtgtcaaaaaaaacaaaa

SEQ ID NO: 5754 - DNA, 302 bp, Zea mays
  Clone ID: LIB3061-015-Q1-K1-H2
ctgccagtctcgcatcccgtccccgtccgcgccggccgactctcgccttttcgtccccgcgtcagcgtcgcggctccggtgagcgtgcgcgtcaccggcggcaggcgagggcaggcggtggtggcgatggcgtccgctgatgcgcgcttggcggtgatcgtctcctccatcctggtcatgcccgactttcccaagccagtgatcatgtttcaggacatcacgacgttgctgttcgatcccaaggcgtaccgtgacaacatctgaccttttgtcaagcggtacatggaccaagggatcaccgt

SEQ ID NO: 5755 - DNA, 299 bp, Zea mays
  Clone ID: LIB3061-016-Q1-K1-C11
acgagcaaaggaaggccagtctcattgaagggctcaaccaactcaactcctcgggcggcgcagatgacgacgatgaggatgacgagtaaagtttggtcccatcgaagtagtgctatcttatgcggcgatcagtatttgtgctatggcatttatcgctacctgtagtcgtgcaacatgcatttttgtttaagtttgtcgatgcgaacaaagttgtttctgttagtttggagctggagttctgaatatttacttttataatattaaaattggaccgagttgaacaaaaaaaactaacaaaa

SEQ ID NO: 5756 - DNA, 229 bp, Zea mays
  Clone ID: LIB3061-017-Q1-K1-B1
gccattctacccacaggatgtggcaaacattgtcgccttcttacaacaacagcaattgctgccatttagccaactcgctttgacgaatcctaccaccttattgcatcagcccaccattggtggtaccatcttctagattttttatgctttatactgtaataataaatttctcatactgatatgtgcaacttctcagtaataaaagattagagatctatattttaagttc

SEQ ID NO: 5757 - DNA, 344 bp, Zea mays
  Clone ID: LIB3061-017-Q1-K1-B12
atatggtatccatcgctttgaaaccatcaaatttgatctccttccatatttcacaagctgcggctagttcagcactccatttgcaagctgctttgataatttcattaccttcacgagcaagatcgcgcccttcgttacgagcttgtacacaggcttctaaagccacacgattagctgctgcaccaggtgcatttccccaaggatgtcctaaagttcctccaccaaattgtaatacggaatcatctccaaagatttcggtcagagctggcatatgccaaacatgaatacccccagaagccaccggtataacacctggcatggatacccagtcctgaatgaaaaag

SEQ ID NO: 5758 - DNA, 260 bp, Zea mays
  Clone ID: LIB3061-017-Q1-K1-F2
caggcaggcaggtcggcgaggagggcaggaagaccgaagaccgagccgtgcgggggctcgggacgggaacgggacaggacctcaaaatctcagatccttcctgcccgcccgcccgtgcccgtcgacgcgtcgttcttgccggccgcgccccacctccgccctctcctcctccagggggatcggatacgccacaggctgcgcgatggtgctgtgggtcttcggctacggctccctcatctggaaccccggcttcgacttcg

SEQ ID NO: 5759 - DNA, 555 bp, Zea mays
  Clone ID: LIB3061-018-Q1-K1-D2-R2A
aaaacaagcacaaaagcaattgaccagactgtaagatcaactatcctgtatgtctttttccagcatgtaccacaacaaagaaatgcctagggtagttaacatctacggccaaattgaaaagtattgtttggttgatcagctgagtcagtaataggaggccagcagctccaagattttattgcctgctctttttgtagctgcaatcagggcacttgtagtgctttatctgttctgcttttgctggggttatcctcacacatttgccgtggaaccaccgctcacaaatgtcgcatccaatccagaactcacttgagttgtagagaccactgcaagaaccacaaagggtttcgctgtggtcttcatcattctcatacctacattcaccaactgccactcttgagttctttatctttccatcatttgatcgcttcgttgagtgcctggatttgctgctgttatcaacaccaggattattctcccttcccttccggtcagccattatttcatacacagatggatgatcattaatcatgttgaattatcgcttcctgtcgt

SEQ ID NO: 5760 - DNA, 573 bp, Zea mays
  Clone ID: LIB3061-018-Q1-K1-D2.F2A
gcccgaaccagcgctcgggatcaacttcgccagggacggcatgaggcgtcgcgactggctctcgctcgtcgccgtacactctgacgcttggctcgtctccgtcgcattcttcttcgccgccaaactcaacggcaacgacaggaagcgattattcaacatgattaatgatcatccatctgtgtatgaaataatggctgaccggaagggaagggagaataatcctggtgttgataacagcagcaaatccaggcactcaacgaagcgatcaaatgatggaaagataaagaactcaagagtggcagttggtgaatgtaggtatgagaatgatgaagaccacagcgaaaccctttgtggttcttgcagtggtctctacaactcaagtgagttctggattggatgcgacatttgtgagcggtggttccacggcaaatgtgtgaggataaccccagcaaaagcagaacagataaagcactacaagtgccctgattgcagctacaaaaagagcaggcaataaaatcttggagctgctggcctcctattactgactcagctgatcaacccaacaatactttt

SEQ ID NO: 5761 - DNA, 308 bp, Zea mays
  Clone ID: LIB3061-020-Q1-K1-C8
cccacgcgtccgcagctagctgcagcaagccgtgcttccttcttgacacagcaacagttgctgcctttctaccagcagtttgcggctaaccccgcaaccctcttacaactacaacaattgttgccctttgtccaacttgctttgacaaacccagcagcctcctaccaacaacacatcattggtggtgccctcttttagattgcttattagttgtaattcaataataaagttttttggatgatgtatgtggccaaccagaaataagaagttacatttccagattctaatgtgaaaaaaattaagtgcat

SEQ ID NO: 5762 - DNA, 227 bp, Zea mays
  Clone ID: LIB3061-021-Q1-K1-C7
caagggtgtgcgcggtttgtgatgccaaattgtatcgtcgtcgtgtgttgaagcgttcgatcgtcggtctagtagtgtgcctgtgagcagcggcgtgctgttgtacgtacgtctgcctctgttgttccatgtttcgggattttccatagcaaatgcatgcgtcgagatctaatatcagcgtctatgctaaaatcagagaattggccgtaggtctttcagaaacaaaa

SEQ ID NO: 5763 - DNA, 344 bp, Zea mays
  Clone ID: LIB3061-021-Q1-K1-C9
agcgacaacagttacttaatccattggctgtggctaacccattggtcgctgccttcctacagcagcaacaattgctgccatacaaccggttctctttgatgaatcctgtcttgtcgaggcagcaacccatcgttggaggtgccatcttttagattacatatgagatgtactcgataatggtgccctcataccggcatgtgtttcctagaaataatcaatatattggttgagatttatctcgataaaaaaaagaaactataaaatataaaacacaatactataagaaaaaatatagctataaaaaaacgaaaatatgatataaattaagagcagaagaactaaaa

SEQ ID NO: 5764 - DNA, 345 bp, Zea mays
  Clone ID: LIB3061-021-Q1-K1-D1
atcaatcatgattcatcttagtagtataggcaccaaatcaaattttcaacatcaattatctaactccaaaaaccatgaagctggtgcttgtggttcttgctttcattgctttagtatcaagtgtttcttgtacacagacaggcggctgcagatgtggtcaacaacaaatccatgagcatcagcatcatccacaacaacatcatccacataaacaacaacatcaaccaccaccacaacatcaccagcagcagcaacaccaacaacaacaagttcacatgcaaccactaaaacatctgcaacaacaagaagttcatgttcaacaactacaacaacaaccgcagcacc

SEQ ID NO: 5765 - DNA, 570 bp, Zea mays
  Clone ID: LIB3061-021-Q1-K1-D2-R2A
ggaaatgtaacttcttatttctggttggccacatacatcatccaaaaaactttattattgaattacaactaataatcaatctaaaagagggcaccaccaatgatgtgttgttggtaggaggctgctgggtttgtcaaagcaagttggacaaagggcaacaattgttgtagttgtaagagggttgcggggttagccgcaaactgcttgtagaaaggcagcaactgttgctgtgtcaagaaggaagcacgacttgctgcagctagctcgctaaatggcagtagtatttgctgctgcaaataagcagcggggttcagtgcggccaattggttaaatggaagaagttgttgttgctgagagtaggcagtagctagctggctaaatggtaatagttgttgctgcaaataagcagcagggttcagtgtagacagttggttgaatggaagaaattgttgttgctgagagtagggagaaaggtttgccagagctacttggttgatcacaggtagcacgagttgctgcagctgttgtgccctgatggtttgtaccaatgactgcaccaaagatagggct

SEQ ID NO: 5766 - DNA, 571 bp, Zea mays
  Clone ID: LIB3061-021-Q1-K1-D2-SP6A
ggaaatgtaacttcttatttctggttggccacatacatcatccaaaaaactttattattgaattacaactaataatcaatctaaaagagggcaccaccaatgatgtgttgttggtaggaggctgctgggtttgtcaaagcaagttggacaaagggcaacaattgttgtagttgtaagagggttgcggggttagcccgaaactgcttgtagaaaggcagcaactgttgctgtgtcaagaaggaagcacgacttgctgcagctagctcgctaaatggcagtagtatttgctgctgcaaataagcagcggggttcagtgcggccaattggttaaatggaagaagttgttgttgctgagagtaggcagtagctagctggctaaatggtaatagttgttgctgcaaataagcagcagggttcagtgtagacagttggttgaatggaagaaattgttgttgctgagagtagggagaaaggtttgccagagctacttggttgatcacaggtagcacgagttgctgcagctgttgtgccctgatggtttgtaccaatgactgcaccaaagatagggctg

SEQ ID NO: 5767 - DNA, 626 bp, Zea mays
  Clone ID: LIB3061-021-Q1-K1-D2.F2A
gcgcaatcgcagcaagcaacatacctttatcgcccttgttgtttcaacaatcaccagccctatctttggtgcagtcattggtacaaaccatcagggcacaacagctgcagcaactcgtgctacctgtgatcaaccaagtagctgtggcaaacctttctccctactctcagcaacaacaatttcttccattcaaccaactgtctacactgaaccctgctgcttatttgcagcaacaactattaccatttagccagctagctactgcctactctcagcaacaacaacttcttccatttaaccaattggccgcactgaaccccgctgcttatttgcagcagcaaatactactgccatttagcgagctagctgcagcaagtcgtgcttccttcttgacacagcaacagttgctgcctttctacaagcagtttgcggctaaccccgcaaccctcttacaactacaacaattgttgccctttgtccaacttgctttgacaaacccagcagccttctaccaacaacacatcattggtggtgccctcttttagattgattattagttgtaattcaataataaagttttttggatgatgtatgtggccaaccagaaataagaagttacatttcca

SEQ ID NO: 5768 - DNA, 387 bp, Zea mays
  Clone ID: LIB3061-021-Q1-K1-D3
gtgcagtgacaagtgagctcagtaaagccagccaaagttcagacttcagaagaagcgagcgagcaggaggaggacaggaagtatggcgcactaccagcaggggaggcggcagcaagtggacgagtacggcaacccggtccctgggggccacggtgtccagggccagcagctgggtgaagccgccggcgggtacggcgtcgcaggcaccggcagctacggcggccagcagcaggccgggtatggccccacgggcaccggcacgcatgacgccgggggctacgacggctcggaccatccgggttacggggctaccggaacgggcgtcgacgacgccggtggcccaagtgcgtatggagcagccacgggcacgagagcccacggcacgca

SEQ ID NO: 5769 - DNA, 440 bp, Zea mays
  unsure (1)..(440): unsure at all n locations; Clone ID: LIB3061-021-Q1-K1-H7
accgccacatagagcgcactatagtgcccctactgtggcacacaatatattgcgttatcatacgctccgtgctctctgtgcgtgctgctccagcgagcatattaccgcaatgctcacacactcctatagcgcacctgctatccccatacctctcaccaacgatgtcttcagtatgtgaaaatccaattcttctaccctacacgatccaacaggcaatcgcagcaggcatcttacctttatcacccttgtgcctccaacaatcatcagccctattacagcagttacctttggtgcatatatcgncacataacatcacggcacaacaactacaacaactcgtgctagcgaacacttgctgtctactctcagcaacagcagttacactttgggcacttgttggcacacaacataaggcacaaaaactacaacaactcgtgcta

SEQ ID NO: 5770 - DNA, 92 bp, Zea mays
  Clone ID: LIB3061-022-Q1-K1-A8
gaattcccgcctaaaaaaaaaaaaaaaagaaaaaaaaaaaaaaaaaaataaatttaaaaaaaaaaaaaaaaaaggacaaccggaggaaaggt

SEQ ID NO: 5771 - DNA, 456 bp, Zea mays
  Clone ID: LIB3061-022-Q1-K1-G1
ctttgagcattcagaaacagaccaagcgaagtgcactagcaacttcctatcaacaatggctaccaagatattatgcctgcttgcgcttcttgcgctttttgcgagcgcaacaaatgcgtccattattccacaatgctcacttgctcctagttccattattccacagttcctcccaccagttacttcaatggccttcgaacacccagctgtgcaagcctataggctacaacaagcgattgcggcgagcgtcttacaacaaccaattgcccaattgcaacaacaatccttggcacatctaacaatacaaaccatcgcaacgcaacagcaacaacagtttctaccagcactgagccacctagccatggtgaaccctgtcgcctacttgcaacagcagctgcttgcatccaacccacttgctctagcaaacgtagttgcaaaccagcaacaacaacaact

SEQ ID NO: 5772 - DNA, 455 bp, Zea mays
  Clone ID: LIB3061-023-Q1-K1-B2
ctatagctgcccttcttcccccataccttccatcaatgaccgcttcagtttgtgaaaacccagcccttcaacgctacaggctccaacaagcaatcgcaacaagcaacttacctttatcacccctgttctttcaacaatcgccagccctatctttggtgcagtcattggtacaaaccatcagggcacaacagctgcaacaactcgtgctaccagtgatcagccaagtagctctggcaaacctttctccctactctcagcaacaacaatttcttccattcaaccaactgtctacactgaaccctgctgcttatttacaacaacaacaactactaccattcagccagctagctactgcctactctcagcagcaacaatttcttccatttaaccaattggccgcactgaacccctctgcttatttccagcagcaaatactactaccatttggccagcta

SEQ ID NO: 5773 - DNA, 234 bp, Zea mays
  Clone ID: LIB3061-023-Q1-K1-C10
catcttaaattatgtaaggctggcgatattgctgatccgttggtgtgtaccatagttctagcatcattggatcttagatagctcccaaagttcgatgtcagcgtggagataagtagacaagttgtgataattggtggcagctggtattcattgcgtaaagttgctatcgaaaattataggtgcatttggtgtgttcttgcgttgaactttctccatgttcatgtttcttccaag

SEQ ID NO: 5774 - DNA, 368 bp, Zea mays
  unsure (1)..(368): unsure at all n locations; Clone ID: LIB3061-023-Q1-K1-D12
cgagaaagcaccaatatgtgtacgcaacaataggcagcccaaaatatcttttcctccttatgcctccttggtatttgctgcaagtgctagctacgtgcgaccattttcnccgcaatgctcacaagnctcctatagcttcccttcttcccccgtacctctcaccagcggtgtcttcggtatgtgaaaacccaattcttcaaccctacaggatccaacaggcaatcgcagctggcatcttacctttatcacccttgttcctccaacaatcatcagccctattacagcagttacctttggtgcatttattggcacaaaacatcagggcacaacaactacaacaacttgtgctagcaaaccttgctgcctac

SEQ ID NO: 5775 - DNA, 453 bp, Zea mays
  Clone ID: LIB3061-023-Q1-K1-G1
caacaagcaacatacaaagtggaatccagtagcaacaatagatcaacaatggcgaccaagatactttccctggttatgctccttgctctttctgcatgtgttgctaacgcgacaattttccctcaatgctcacaagctcctatagcttcccttcttcccccataccttccatcaatgatagcttcagtatgtgaaaacccagctcttcaaccctataggctccaacaagcaatcgcagcaagcaacatacctttatcacccttgtttcaacaatcgccagccctatctttggtgcagtcattggtacaaaccatcaaggcacagcatctgcagcaactcgtgctacctgtgatcaaccaagtagctctggcaaacctatctgcctactatcatcaacaacaatatctgccattcaaccaactatctacactgaaccctgctgctcatttgcag

SEQ ID NO: 5776 - DNA, 340 bp, Zea mays
  Clone ID: LIB3061-023-Q1-K1-H8
ccgcaatcttgtacgctggttcaagagcgttggttcattcatcagtgaccaaagccaaagcaagatgtcaagaaccccgcgctgaagatgatcatctgaaaggcggtcgtggagcagttttctccaggatggataattgtcctaggataaagtgaattatatgcaaagtcgcgccagcgaggagttttggtttatctttagtttttattcgccggggaatcagtggtctggtggctgaattaggtatcattagtccttgtgatctgctaccctatcatgctgaggtgcttgtcagattctcaattattcaaacttcacattttccatcgaagaatgcata

SEQ ID NO: 5777 - DNA, 295 bp, Zea mays
  Clone ID: LIB3061-024-Q1-K1-C11
gcacccgagtggtcgacctgatccgccacatgaacatcaccaagtaaatgaacaaagtgatgaaaacatgcaaagagtgatgaaagcatgcagagagagttgtgtttcttccccggaagtgcttccgagaataaatttttcttatctgattgtctaaaacctataacgggtgtaatggtatcgtagtggttggctgagcatcatgtgactcatattttgtcaggtctatgtgtcatccttaaacttgtaacggtcattatatttcaaaagttttgcattttccaaaactaacaac

SEQ ID NO: 5778 - DNA, 283 bp, Zea mays
  Clone ID: LIB3061-024-Q1-K1-D4
ctcgtcgtgtgcctggctctgtcagctgccagcgcctctgcaatgcagatgccctgcccctgcgcggggctgcgaggggttgtacggcgctggcgccggcctgacgacgatgatgggcgccggcgggctgtacccctacgcggagtacctgaggcagccgcagtgcagcccgctggcggcggcgccctactacgccgggtgtgggcagccgagcgccatgttccagccgctccggcaacagtgctgccagcagcagatgaggatgatggacgtgcagtccgtc

SEQ ID NO: 5779 - DNA, 284 bp, Zea mays
  Clone ID: LIB3061-025-A7-F4B
ttagcatgtgctgatctcatggcagctggatttagaaatgtgaagaacatcgaaggtggttataccgcatgggtggaaagtggccttgccgtgaataaatctcaagcacaagatgaactatgatgtgccctatcatgttggttcttccttgctttgacgacaaccttcgtatagaaaataataggtttaaatgagcaaaaatatacttccttggttatttaaatatatgacacagttgattttcgaaccgctcgtcttgtttaaaaaatcgtcagttttcattt

SEQ ID NO: 5780 - DNA, 260 bp, Zea mays
  unsure (1)..(260): unsure at all n locations; Clone ID: LIB3061-025-A7-R4B
cgcgatcgcgggattnnntnaatcctccacatgcccactcctgaattcctcctctgttctgacgtccaggtagcggtgaccgccggagcggatgaggtcgctggctgccgccacgcccacggccaccaccggcggcggcgcggccgatggcttctccgagccgcgcgccaccagcagcagcgcggacaaggtgcagatcgtaagcagggtggccgacctcatgttcgtatcctggaaacggtgagacgccacgacgggag

SEQ ID NO: 5781 - DNA, 430 bp, Zea mays
  Clone ID: LIB3061-025-Q1-K1-A4
gtttggcggagcagccggggcgttagaatctgaggaggagaagatggtggtgctggtggtggccacgacgtcggagccggcgtccattgggcccgccgccgccttcctcgccatgcccggatggtcccccggcccgcccatcgccgaggcgatggagagttttactaatgggaatgttcgattactgaagcatgagcgtagcattgtcgcagaggatgatcttgaccagcgatggcaggaagccactggagagtctgtttctgaggtcatattcctcagcaaacacactgcagtctccaaacgtccagcactcacagtgcatccaattggtgtgccacatctgaaggaggatgaaaccccaccccaaggaggaactcctggatgggcagcaattccaagtcctcgaattggaccttggctcccgttgatg

SEQ ID NO: 5782 - DNA, 452 bp, Zea mays
  Clone ID: LIB3061-025-Q1-K1-E3
atagaaagcacaatagtgtaccaacaatggcagccaaaatattttgcttccttatgctccttggtctttctgcaagtgttgctaccgcaaccattttcccacaatgctcacaagctcctatagcttcccttcttcccccatacctctcaccagcggtgtcttcaatgtgtgaaaacccaattgttcaaccctacaggatccaacaggcaatcgcaacaggcatcttaccattatcacccttgttcctccaacaaccgtcagccctattacagcagttacctttggtccatttggtggcacaaaacatcagggcacaacaactacaacaacttgtgctagcaaaccttgctgcatactctcagcaacatcagtttcttccattcaaccaactggctgcattgaactctgctgcttatttgcaacaacaattaccattcagccagctagttgct

SEQ ID NO: 5783 - DNA, 437 bp, Zea mays
  Clone ID: LIB3061-025-Q1-K1-G7
aagcaacatagaaagtggaatacaggagcaaaaatagagcaacaatggcggccaggatagtttccatccttatgctccttgctctttctgcatgtgttgctaacgcgaccatttttcctcaatactcacaagctcctatagctgcccttcttcccccataccttccatcaatgaccgctttagtatgtgaaaacccagcccttcaaccctacaggatccagcaagcaatcgcaacaagcaacttacctttatcacacctgttctttcaacaatcgccagccctatctttggtgcagtcattggtacaaaccatcagggcagaacagttgcagcaactcgtgctaccagtgatcagccaagtagctctggcaaacctttccccctactctcagcaacaacaatttcttccattcaaccaactgtctatactgaaccct

SEQ ID NO: 5784 - DNA, 316 bp, Zea mays
  Clone ID: LIB3061-026-Q1-K1-H6
aatggaagaaactgctgttgctgagagtaggcagcaaggtttcctagcacaagttgtggtagttgttgtgcctgcacgctgcgcctaacgctggcaccctcttacaactgcaacaattgctgccattcaaccaacttgctttgacaaacccaacagcgttctaccaacaacccatcattggtggtgccctcttttagattgcttatgagttatacttcaataatgaagttttttggatgatgtttgtggcttaccagaaataagaaagttcatttctagattcttaaaaaaaacaaacccaacagcgttttaacaa

SEQ ID NO: 5785 - DNA, 247 bp, Zea mays
  Clone ID: LIB3061-027-Q1-K1-D4
agcacgttgcgcctaacgctggcactctcttacaactgcaacaattgctgccattcaaccaacttgctttgacaaacccagcagtgttctaccaacaacccatcattggtggtgccctcttttagatttcttatgagttatagttcaataataaagttctttatctgatgtttgtggcttcccagaaataagaaagtacatttctagattcttatgtgcttctaaaaaattaccattatcaccctag

SEQ ID NO: 5786 - DNA, 449 bp, Zea mays
  Clone ID: LIB3061-027-Q1-K1-F12
cgccagcccggacggctataaagacgaggcccatctcgaaatcgtcggcgatgaagaagaccagttcccctctcctgatcgtgctgttcctcacagcagcagccatggcggccgagccggagaagcaggcggcccccgcggcacaggagacggccgtgcacatcgtgtacgttgaccgccccgaggacgccgaccctgaggagttccacatccgcaccctcacccccgtcctcggcagcgaacagaaggccagggacgcagtgctctaccactacaagaacgccgccagcggtttctccgcgaagctcaccccccagcaggtcaaggatctcaaggagcaaccaggtgttctccaggttgtgccgagccagacttaccagctacatggccctgggtctggcactcaccagggcacgacacacaccttgggccttatgtgaaagcgtatg

SEQ ID NO: 5787 - DNA, 278 bp, Zea mays
  Clone ID: LIB3061-027-Q1-K1-G1
gggaacttgaccttcaaacatcttttgaaggtctgaagatggaaatataatcttctgctgaactgacagaaactttgtgaattgcaaagcaacccgaattgaatggtttagctcgtcattcttgatcctgtcacagcgagtggtgacgtcattgacgcttgcccatggaattatgacaactgcatctgccatgagctgtgtaattgcaattcttacattttacctgtcttttgtcaatggtaacatctcgtgactcttgtttgactaacataaataaa

SEQ ID NO: 5788 - DNA, 447 bp, Zea mays
  Clone ID: LIB3061-027-Q1-K1-G12
caaggatctatttgacaagatcgagagcgttgtcatggagatggtattcaaagtccataggggggcaggcaagctcaaggtcttgaagaatagcaagtgttccaggaacccgtcatcattgttggtgtgcaccgaggtgtttgagctcggtccatcattatatgtcgtagagcttaggaaatcccacggagactctacgttgtatagacagctgtgcgaaaggctctccgatgagctaggtgcctgcaagacagaccagatcgcgaggactgaatcatcgagtgacgacctctcgagcgtcgatggcgaagcgttccctctatctgggttctgatcatattgctttccctgtgttgctttgggaacaggggatgaggaacatgctcgttcctgatgcaattctagattaggatcatgaatatagtgtacaaagccagcggcggctgc

SEQ ID NO: 5789 - DNA, 261 bp, Zea mays
  Clone ID: LIB3061-027-Q1-K1-G6
tcgtacgatcattcagaaacatttatatttaagctcactagccacaacctaacgacaagggcttctaagacatcattcctccttgcgctttttggccactatgtgagtgcaacgcttcacgtgcattattagacaatgcttcactcgctccgagtgccattattccacagtttcgtgcttgtgaaaactcaaatgtgcatctatcaccgatctagccgagtttataagctagaatattacgcttgatgacagtgttttata

SEQ ID NO: 5790 - DNA, 231 bp, Zea mays
  Clone ID: LIB3061-028-Q1-K1-B7
ttcattcctcaagatacgtgtggcagatttgcatggtacggttcatttatcaagttatgcccaccccctgtttgtatgttgtggctccatgtgcgagcacgctgtctgccgtgacacctggttcgtcagatgttttgtcaaacttgcttggcttgattggctgtacttgtacctgtaagagctgatagttatatgaatggtttggactgtcctgctgtttaaaaaagatca

SEQ ID NO: 5791 - DNA, 327 bp, Zea mays
  Clone ID: LIB3061-030-Q1-K1-A8
cccacgcgtccggcatcgagagcggcacacgtttctgcatcaccgcgcccatcggcggcagcatcgtgggattctatggacgcgcgacgaccaggctcgtcgctgcgatcggtgtctacctgcgccaactttagtctggtttcagcagcaggacgggtactacagatatgctagataaaggtcttatatatgtcatatgacctatcatggtcttatatgttcgatcgtcgtcgtgtctgtatgtacatacatggctgtcaaataaagctctttgcattctgataaagaaacaaaccaacaaggcacaacagctgcaacaactcaagc

SEQ ID NO: 5792 - DNA, 354 bp, Zea mays
  Clone ID: LIB3061-030-Q1-K1-D5
ctttgagaggttactggaagaggaggctctgacgacaagcacactcgccgccggtggtggtggtgccgaggtgtggttgctcagccgccctaaatgttgaccggccgccggtgatggaagaggcggcaacgacgatggcgcatgcggcggtgagtagtgccgtagtaggtgaccccatggagtacaatgccatactgaggaggaagctagaggaggacctcgaggccttcaaaatgtggaggacggcctcctccagcgtagtgacctctgaacgttctcaaggctcaaacaatcacactggaggtcgcagcatcaggaataattcagcgcagaacaagctgatgaacggtgtaa

SEQ ID NO: 5793 - DNA, 53 bp, Zea mays
  Clone ID: LIB3061-031-Q1-K1-F9
ccgtacctctcaccagcggtgtcttctgtatgtgaaaacccaattcttcaacc

SEQ ID NO: 5794 - DNA, 422 bp, Zea mays
  unsure (1)..(422): unsure at all n locations; Clone ID: LIB3061-032-Q1-K1-D12
tatgttcaaaagggggagaaagtagtatttcaaaaatggtatatcaaaaccctctggaacactaagaggtggatctcttttagggggagttttgtttagtcaaaggaaaagcatttgaaacagggggaggaaatttcaaatcttgaaaatgcttttgcaaactcttatttatttaccttgactatttgcaaaagatctatgaaatggatttacaaaaaggttttgcaaaaacaaaacaagtggtgcaaacgtggtccaaaatgttatataagaaagaaacattccttgcatatcttgtaagtagttatattggctaaattccaagcaacctttgcacttattttatgcaaactagttcaattatgcacttctatatttgctttggtttgtgttggcatcaatcaccananagggggagattg

SEQ ID NO: 5795 - DNA, 436 bp, Zea mays
  unsure (1)..(436): unsure at all n locations; Clone ID: LIB3061-032-Q1-K1-G10
agaccattagctttatctactccagagcgcagaagaacccgatcgacaccatgagggtgttgctcgttgggctcgctctcctggctctcgctgcgagcgccacctccacgcatacaagcggcggctgcggctgccagccaccgccgccggttcatctaccgccgccggtgcatctgccacctccggttcacctgccacctccggtgcatctcccaccgccggtccacctgccgccgccggtccacctgccaccgccggtccatgtgccgccgccggttcatctgccgccgccaccatgccactaccctactcaaccgccccggcctcagcctcatccncagccacacccatgcccgtgccaacagccgcatccaagcccgtgccagctgcagggaacctgcggcgttggcagcaccccgatcctgggccagtgcgt

SEQ ID NO: 5796 - DNA, 304 bp, Zea mays
  Clone ID: LIB3061-033-Q1-K1-A10
ctaacccattggtcgccgccttcctacagcagcaacaattgctgccatacaaccagtgctctttgatgaatcctgtcttgtcgaggcatcaacccatcgttggaggtgccatcttttagattacatatgagatgtactcgataatggtgccctcataccgacgtgtgtttcctagaaataatcaatatattgattgagatttatctcgataaaaaacaatactaccaaataaaacatgcaataagaaaaacaagacaaaatataacaataaaacaacaaatgctgactctctactaactaaaaa

SEQ ID NO: 5797 - DNA, 69 bp, Zea mays
  Clone ID: LIB3061-033-Q1-K1-F1
acgcccacgcgtccgcggacgcgtgggaaaaaaaacaaaaaaaaaaaaaaaaaaaaaaaagggaaagaa

SEQ ID NO: 5798 - DNA, 52 bp, Zea mays
  Clone ID: LIB3061-035-Q1-K1-B9
gaaccccccctttaccggcccattaaccccgccggttttggtggttaccccc

SEQ ID NO: 5799 - DNA, 101 bp, Zea mays
  Clone ID: LIB3061-035-Q1-K1-C10
cccacgcggggccagcaatgatgcattatacatctataattaacttctatgtctcatgtttgtgtgttgcgataaataagaaagtacatttctatattcat

SEQ ID NO: 5800 - DNA, 375 bp, Zea mays
  Clone ID: LIB3061-038-Q1-K1-B7
gaaccgactccaccaaccgatactacataacctccactttacataactcgacaccatgaaattactcctgcttgccctatatcacctgtcgctcacctcaacaaatgcctccattacaccacaatgctcactctctcatacaccaattatacctcaactgcttccaccatatactctcaactaccttctatcacctagctcagcaaccctacaaaccataacaagcgcttactgaacaacttcatacaacaaccaactcaccaattccaacaccaatccttggcacatctaaccataccaacactatcaccacaccagcaacaactgatgctaccatcaactgaccaactaaatgtctacaaccctgtacactac

SEQ ID NO: 5801 - DNA, 403 bp, Zea mays
  unsure (1)..(403): unsure at all n locations; Clone ID: LIB3061-038-Q1-K1-E2
ctgaagttgctaccactcttgaaaggaagaacacggtgcagatctgcagtggtgagagaaaaaaaaacagcaatgaagtgtagcgttacagttacacctgctgtgttgttgctctttgcaaaactactgtctagactccgcctggtaattagtgtactgatagcgaggtaaaaaaaagttagattatttgttagcagcggcagtgatttgacatctaaggaacaacaacacggtgtccaccgattctgctatcctgatggctcgcggcagcctggctggtcggcacacgacacgaagtgaagctgttttactggcggcatctggctttgntatctcatgggacagtgatccacaagagtaaaggatcagctcaatccanagtcaatagatgttccttataaaa

SEQ ID NO: 5802 - DNA, 146 bp, Zea mays
  Clone ID: LIB3061-038-Q1-K1-E8
atgttcagcattcaaaaacagcaccaagcgaagcgcactatcaacttcctaacaccaatggctaccaagatatgagccctccttgcgcttcttgcccttttagtgagcgcaacaaatgcgttcattattccacagtgctcacttgc

SEQ ID NO: 5803 - DNA, 390 bp, Zea mays
  Clone ID: LIB3061-040-Q1-K1-A2
cagcaacatagaaagcacaatagtgtaccaacaatggcagccaaaatattttgcttccttatgctccttggtctttctgcaagtgttgctaccgcaaccattttcccacaatgctcacaagctcctatagcttcccttcttcccccatacctctcaccagcggtgtcttcaatgtgtgaaaacccaattgttcaaccctacaggatccaacaggcaatcgcaacaggcatcttaccattatcacccttgttcctccaacaaccgtcagccctattacagcagttacctttggtccatttggtggcacaaaacatcagggcacaacaactacaacaacttgtgctagcaaaccttgctgcatactctcagcaacatcagtttcttccattc

SEQ ID NO: 5804 - DNA, 405 bp, Zea mays
  Clone ID: LIB3061-040-Q1-K1-E3
ctagcaacatagaaagcacaatagtgtaccaacaatggcagccaaaatattttgcctccttatgctccttggtcgttctgcaagtgctgctacggcgaccattttcccgcaatgctcgcaagctcctatagcttcccttcttcccccgtacctctcaccagcggtgtcttcggtatgtgaaaacccaattcttcaaccctacaggatccaacaggcaatcacagctggcatcttacctttatcacccttgttcctccaacaatcatcagccctattacatcagttacctttggtgcatttattggcacaaaacatcagggcacaacaactacaacaacttgtgctagcaaaccttgctgcctactctcagcaacagcagtttcttccattcaaccaactagctgc

SEQ ID NO: 5805 - DNA, 221 bp, Zea mays
  Clone ID: LIB3061-041-Q1-K1-E6
taccaactagcaacatacatagtgaagtacactagcaacatcttagcaccaatgggagccaagatttttgccctccttgccctccttgctctttcagcaagcgctgctacctcgacttttattccacaatgctcacaacaatacctctctccggtgacagccgcgggatttcaatacccaactgtaccatgtaggattgtatagttggttctagatcgcga

SEQ ID NO: 5806 - DNA, 221 bp, Zea mays
  Clone ID: LIB3061-041-Q1-K1-E7
tagcaactagcaacatacatagtgaattacactagcaacatcttagcaccaatgggagccaagatttttgccctgcttgccctccttgctctttcagcaagcgctgctacctcgacttttattccacaatgctcacaacaatacctctctccggtgacagccgcgggatttcaatacccaactgtaccatgtaggattgtatagttggttctagatcgcga

SEQ ID NO: 5807 - DNA, 277 bp, Zea mays
  unsure (1)..(277): unsure at all n locations; Clone ID: LIB3061-042-Q1-K1-A9
gacgtatagtagtacatatggtgcattattgcatgtagtgtagacgtatagtagtagatgcaataatgcaccacatgtacgcgtacgcgcgccgagctgtgtggacgccgcagctagcatgcacggccatcgttcctatacgtcgtcgtctgtcgttcgagtactcatgagctgtgtcgtcgacgtccacccatgcatccggccgccacgctttgatgatggtcatgacatcttgacaataaacacgtgcatgcagtattatatacaaaaaanaaaa

SEQ ID NO: 5808 - DNA, 159 bp, Zea mays
  Clone ID: LIB3061-042-Q1-K1-C2
ctgcgacaaacccagcagcgttctacctacaacccatcattggtggtgccctcttttagatttcttatgagttatagttcgataataaagttttttgtctgatgtttgtggcttcccagaaataagaaagtacatttctaatacaacaaccaaatacat

SEQ ID NO: 5809 - DNA, 398 bp, Zea mays
  Clone ID: LIB3061-042-Q1-K1-F9
cagcgagcaacatagaaagtagaatccattagcaacaatagagcaacaatggcgaccaagatattttccctccgtatgctccttgctctttctacatgtgttgctaacgcgacaattttccctcaatgctcacaagctcctatagcttcccttcttcccccataccttccatcaattatagcttcagtatgtgaaaacccagctcttcaaccatataggcttcaacaagcaatcgcagcaagcaacatacctttatcgcccttgttgtttcaacaatcaccagccctatctttggtgcagtcattggtacaaaccatcagggcacaacagctgcagcaactcgtgctacctgtgatcaaccaagtagctctggcaaaacctttctccctactctcagc

SEQ ID NO: 5810 - DNA, 429 bp, Zea mays
  Clone ID: LIB3061-042-Q1-K1-G4
ccgggagccacgcgtccggctgcattgaactctgcttcttatttgcaacaacaacatctaccattcagccagctacgtgctgactgggcgcagcaatctgttgcattgaaccaactggcagcattgaactctcctgcttatttacagcagcaacaactactaccattcagccagctagctggtgtgagccctgctaccttcttgatacaaccacagttgttgccgttctaccagcacgctgcgcctaacgctggcaccctcttacaactgcaacaattgctgacattcaaccaacttgctttgacaaacccagcagcgtgctaccaacaacccatcattggtggtgccctctattagatatcttatgagttatagctcaataataaagttttcagtctgaaaaaaaaaatcgacgaaccaccctgaaac

SEQ ID NO: 5811 - DNA, 363 bp, Zea mays
  Clone ID: LIB3061-043-Q1-K1-A10
gttctgagtacttggcattcaaggaacagctggtggatggacaatccaacaacaactgtgtgcttgagcttgattaggagcccttcaatgcctactttcctcgtccttacatgtcgaagtccatcggacatggaatgcaattccttaaccgacacctgtcgtccaagttgttccaggacaaggagagttcgtaccccttgctgaacttcctcaaggctcataactacaaaggccacgacgatgatgttggatgacagaattccaagccttcgtggtctccaatcatccctgaaaaaggcagaagagtatctactgagtgttccttaagacactccctactcggagttcaaccataggttccaa

SEQ ID NO: 5812 - DNA, 399 bp, Zea mays
  Clone ID: LIB3061-043-Q1-K1-A3
atcgtgctgtcgtgcacttacgctcccctagcatcccaagctcctacctgagaaaacaggagatgggaagagacggggaagagactaggcgccggagcagcaagagatcccgcgacgcctccccctcgacggattccgattccttcgactccccatcctctccgagcagtagccctgagcgacggatccgcagcagtaagcggaatagatcatcctcatcgcaccgccgcagccgcatgaaaagcgaccggtcgcggagatcccgcgacgaggaccgccggcggcggagaagacgggcccaggatagaaagcggcacggtggagatggtggcaggtcctctgactccaaatcgtctgaggaggataggtcggacgaggcgcgggagatcgtccgagata

SEQ ID NO: 5813 - DNA, 216 bp, Zea mays
  Clone ID: LIB3061-043-Q1-K1-C5
aaggcaaaggagaaggtgatgtacaagaagaaggaaggtgttccggatggtctctgcgtgtagccaatctatgtcagtgatgccgaacaagttacccgattgtgtgtgtactagcacatctcttcatcatgggagatatgttaccacattacttgttgcatactgtcctaattggtcagaaaaccctggaataattaaataatccttcaatggctt

SEQ ID NO: 5814 - DNA, 401 bp, Zea mays
  Clone ID: LIB3061-043-Q1-K1-G12
attttgagcattcagaaacacacctagcgaagcgcactagcaacgacctaacaacaatggctaccaagatattaggcctcgttgcgcttcttgccctttttgtgagcgcaacaaatgcgttcattattccacaatgctcacttgctcctagtgccattattccacagttcctccctccagttacttcaatgggcttcgaacacccagctgtgcaagcctacaggctacaacaagcgcttgcggcgagcgtcttacaacaaccaattgcccaattacaacaacaatccttggcacatctaaccatacaaaccatcgcaacgcaacagcaacaacaatttctaccagcactgagccaactagctgtggtgaaccctgtcgcctacttgcaacagcagttgctt

SEQ ID NO: 5815 - DNA, 65 bp, Zea mays
  Clone ID: LIB3061-044-Q1-K1-E1
ttttttgctgatatttgtggcttcccagaaataagaaagtacatttctagattaaaattaataag

SEQ ID NO: 5816 - DNA, 361 bp, Zea mays
  Clone ID: LIB3061-045-Q1-K1-F5
cccacgcgtccggctgatgatccaagtagcagagctagttcccaagcatcacggaaggacaaagaagcaggagccagcgcccaatcccggtggcagttcaaagaacacaaaaggcgggaaaaagaaaaagtgatgcagtatcattgtgttgttttttgttctgttcgtcatcatacactaagcttctgtgaaaaagaaaaagtcttggacgttgttgttatgttgccattgtgccatttttcatgtataagaacttactaagaatcttccaaaaaaaaaaaaaaaataaaaaaaataaaaataagaaaaaaaaaaaaaataataaaaaaaaaagaaaataattacattaaaccaaataaaa

SEQ ID NO: 5817 - DNA, 157 bp, Zea mays
  Clone ID: LIB3061-045-Q1-K1-G6
accaccaatgatgggttgttggtgccctcttttagatttcttatgagttatagttcggtaataaagttgtttatctgatgtttgtggcttcccagaaataagaaagtacatttctagaaaaaaaaaaaaaaaaaaaaaaaacaaaaaacctaacaaa

SEQ ID NO: 5818 - DNA, 367 bp, Zea mays
  Clone ID: LIB3061-046-Q1-K1-A7
cagctctgactcagctagctgtggcaaaccctgctgcctacttacaacaggtgcttggattcaaccaactggctgtgtcaaactctgctgcgtacctacaacagcgacaacagttacttaatccattggcagtggctaacccattggtcgctaccttcctgcagcagcaacaacaattgctgccatacaaccagttctctttgatgaaccctgccttgcagcaacccatcgttggaggtgccatcttttagattacatatgagatgtactcgacaatggtgccctcataccgacatgtgtttcctagaaataatcaatatattgattgagatttatctcgataaaaaaaaaaaaacaagaaaaataa

SEQ ID NO: 5819 - DNA, 277 bp, Zea mays
  Clone ID: LIB3061-046-Q1-K1-B3
tttctaaggaagcgcatctcatctatcatcacctgatgtctgggatgcttctggcaggtcagttgacgtgtagcatggagttctcctttgactttgatgtatctatcagtggtactcaatttttgcgaaaaggtcctctaatgtaatggttaagacttccgagcagcacttataggtctcgggttcgatccctcttgagaacgaatttcgggcttagctaagcaaaattatcttacaacactagatctgattggccctgatgggaagacactgaaac

SEQ ID NO: 5820 - DNA, 420 bp, Zea mays
  Clone ID: LIB3061-047-Q1-K1-B3
ctgagccacctagccgtggtgaaccctgtcacctacttgcaacagcagctgcttgcatccaacccacttgctctggcgaacgtagctgcataccagcaacaacaacagctgcaacagtttatgccagtgctcagtcaactagccatggtgaaccctgccgtctacctacaactactttcatctagcccgctcgcggtgggcaatgcacctacgtacctacaacaacagttgctgcaacaaattgtaccagctctgactcagctagctgtggcaaaccctgctgcctacttacaacagttgcttccattcaaccaactggctgtgtcaaactctgctgcgtacctacaacagcgacaacagttacttaatccattggcagtggctaacccattggtcgctacctttctgcagcagcaacaa

SEQ ID NO: 5821 - DNA, 374 bp, Zea mays
  Clone ID: LIB3061-047-Q1-K1-G12
tacacacgacagatattcaggcagatccacttgctgttgccgtcattctgatacaacctgacttgaggactctcaatgaagctgaaaggtgttgctgccttgcagaatgaagttttgagtccaatacatggaattcatatttggtggtgttgttttggaacttcaaaattttgaagccgtcagcattttccttgtttatctactagatgcctgcctgctctatttcttactcttcagtcttgactggtgcctactgtctgagtgcagattcagtgcgatagttacattctgctgatgtgctcacatgttcattgtaaacaaatttcttgctgagtaacttattaaacatgtgtgatatcttcaaaaatcaaaaa

SEQ ID NO: 5822 - DNA, 454 bp, Zea mays
  Clone ID: LIB3061-048-Q1-K1-A2
cagaaacacaccaagcgaagcgcactagcaacaacctaacaacaatggctaccaagatattatccctccttgcgcgtcttgcgctttttgcgagcgcaacaaatgcgtccattattccacaatgctcacttgctcctagttccattattccacagttcctcccaccagttacttcaatggccttcgaacacccagctgtgcaagcctataggctacaacaagcgattgcggcgagcgtcttacaacaaccaattgcccaattgcaacaacaatccttggcacatctaacaatacaaaccatcgcaacgcaacagcaacaacagttcctaccagcactgagccacctagccatggtgaaccctgtcgcctacttgcaacagcagctgcttgcatccaacccacttgctctagcaaacgtagttgcaaaccagcaacatcaacaactgcaacagtt

SEQ ID NO: 5823 - DNA, 193 bp, Zea mays
  Clone ID: LIB3061-048-Q1-K1-G1
tgttgtaattcaataataagcaatctaaaagtaggcaccaccaatgatgtgttgttgatgggatggggctcgttctgtcaaagcaagttgtacaaagggcatcaattgttgtagttgtaagagggttgcggtgttagccataaactgcttttttaaaggcagcaactgttaatgtgttaacattgaagctctg

SEQ ID NO: 5824 - DNA, 457 bp, Zea mays
  Clone ID: LIB3061-050-B5-F4A
cctagtgacactaccagatacctgtggtagtccaggggcttggtctcggggaactccttgctcttctgcctcatctgttctgttatctcacccatcgccaccagagtctgtcagatcagaggacaggacagggacagggacaaaaagatcataacaaaatacgcacatgatttcatgctagtcgtcaaaacccagccagaagaaagaaaaaaaactactactataaccaagcaagcaataaataagcaccggattgtttgcggcgaggcccccgtcgataacgttgaagctacgcgatgcgccagtgcggtgatccacggtttcaaagtagtgcgcagggaggaccgtcggtgctgcggacgtgccaatgcacacatcagcaagacgagcattcatcaaggcactagatcttgccttgaatgtgctgaatattgttggctttacgcacttgacatcg

SEQ ID NO: 5825 - DNA, 444 bp, Zea mays
  Clone ID: LIB3061-050-B5-F5A
atagatatagtaatacatacatactgagacaaaacgcgaaattctggttaccttgtacataaacaatttagagatagataaaactgagcagtctcagatgggaaatcgtacagatattcgttaaacagctagccatacaaacctgcatgggaagatgcgaggactgtgctcgaggtagaatggcacgatgtccttggcctcatagcatggttgcttggcattgctcagcgacggagctgccagcattgcagcaataagaccacctgtgcttgtgccagcgatgacatcaaagtagttagctatgcgcgcgctgctcccatcaagctcctaaaaaaatgtaaaagaacaccaacgaataaatggcactcaaacttgcatgtatatatgcatttaggctcaaggaacaataaacgtgtagagtttacctggagtttagactcaagg

SEQ ID NO: 5826 - DNA, 181 bp, Zea mays
  Clone ID: LIB3061-050-B5-R6B
gaaacacatatcgatacatccatcttataggagttagagagttcgttcgtgtaggctatctgcaagctgttgtgtgtgtattgcaagttgtgacgacgacgtgagtgtgtacgtaaatggataaggcgatatggtttgctttggagccctgtacgtaaatggagaaaatgtgatgccctgg

SEQ ID NO: 5827 - DNA, 86 bp, Zea mays
  Clone ID: LIB3061-050-Q1-K1-C10
accttcgatgaaagtttttggacaatatttgtggctctctagaaataagaaagtacatctctagaaagaaaggggaaaattataaa

SEQ ID NO: 5828 - DNA, 395 bp, Zea mays
  Clone ID: LIB3061-050-Q1-K1-E7
cggacgcgtgggcagctagctgcggtctaccctcagcaatttcttccattcaaccaacgggcaggattgaactctgctgcttatttacaacagcaacagctaccaccattcatccagctagctgatgtgagccctgttgccttattgacacatcaacagttgttgtcgttctacctgcacgctgcgcctaacgcttgcacccttttacaactggaacaattgctggcattcaacccaattggtttgacaaacccaacaacgttctacccacaacccatcattggtggtgccctcctttagattgcttatgaattatacttcaataatgaagttttttggatgaaggttgcggctttccagaaattagaaagttcatttctagaaaaaaacacaga

SEQ ID NO: 5829 - DNA, 337 bp, Zea mays
  Clone ID: LIB3061-051-Q1-K1-A4
caccggatgaatttttaattaatctaccaaacaatacgtagcgttatgggcacaaaaaaagttagtccgacttttcaatgccgaaatgattagtccgactggatcacacatggtgctcggggtacatgatctgtagcccacaagcaaaatcacagagacacttggcagacaagaagaagagttatccagatctagctttgtttcagggtcttatctggcatatcgctccaactaatctgatcagtacaggccttcctgagcggcgctggttcggatctggcctgatgggctcccctgtgaagggatcaaacttgtaagggtcacctgtgaatggatc

SEQ ID NO: 5830 - DNA, 458 bp, Zea mays
  Clone ID: LIB3061-051-Q1-K1-B1
ctggagatgatttgcaaactcagtgtattattgatcatcaagctcttccccgcctcatgaatctgttgacgcagaaccacaagaaaagcattaagaaagaggcatgctggactatttcaaatattactgctggaaacaaagatcagatacaggctgtcataagtgccggtatcatcgctcctttgttgcaactgcttcaaacagcagagtttgatatcaagaaggaggctgcttgggccatctcaaatgctacctctggtggttctcatgagcaaatcaagtacttggtgtctgagggctgcatcaagccattgtgtgaccttcttgtctgccctgatccgagaattgtaacagtttgtctggagggtcttgagaatattcttaaagtagggcagcatgacaagaccatgggtgcaacaggtgacactaacgtcttagctcagatgatcgatgaaacg

SEQ ID NO: 5831 - DNA, 381 bp, Zea mays
  unsure (1)..(381): unsure at all n locations; Clone ID: LIB3061-051-Q1-K1-H5
cccacgcgtccggctagctgcagctcatgtgcttgtctgagggtgcctctgctcgttggcagccggatcgcctgctgttggtgcatctggtgattaataatactactatgacagagccatgctctgtgaagagtattagtagcagcgctcataaaagctacagttccgtctcttttctcagctatgtaaaacttccaaactgttcatgcttaaaactgagggttttcttggtgtgaggtgtgcatgtcgttgttgaggccattgctgcacattccacctattgaggccctcctcaaattaagcctcgaaaaagctgatatcttttcgtaaaactctagactacggtgaatgcaactgggctggttgcttcaaaaaacanaa

SEQ ID NO: 5832 - DNA, 275 bp, Zea mays
  Clone ID: LIB3061-052-F9-F6A
agcaggggggacatttgaacggtgcttgcttattggtgccaaccaagctgcgagcttcttgtgttttttttttctggccacggtcgcctgcctaccactcgggaaaccgcagcgcccgtccttgtgaaggcatgaaataggatgatcgtgccaccatagaacataactgggaaatgaattcgacatggaactgggacagtttgtctgtatactcacaaaataagatcgcgtggggttttcttcttgaaatgcaaagaaaccactcattcttctcc

SEQ ID NO: 5833 - DNA, 263 bp, Zea mays
  Clone ID: LIB3061-052-F9-R6A
acctcctcgtactccgcggtcgccagcggggcgccacctggctgcgcctgcgcggcggcggcggatgccatggcgcggcggatgatgatgaggtgggcggttggagagaggaggagcaggcgccggaggtgggcggcgagagcgggacgcgagcgcataagcgtcgtggagcaggcgaggggagtgccggtgggagggcggaggtgggggtgggggttggtgacactgccggcggcgccgtggtgggccccacgggcgccgca

SEQ ID NO: 5834 - DNA, 253 bp, Zea mays
  unsure (1)..(253): unsure at all n locations; Clone ID: LIB3061-053-B4-F6B
gccctctgngcttccccaggagaagcgttagatgctccggcctcttgtcggtttcggtacagcctttttagtccctgttcgtcgtcaggtgcacagtatacaccgtcatattctgtcaaatagatgcaatgcaacgactgcgcgccgtgcttgtgttgcaagcgtggataatgcatatatattgtagcattgacatgatgtgcgttattgcattacgtaagggagttggataaataagtgtgatttgtttgtc

SEQ ID NO: 5835 - DNA, 237 bp, Zea mays
  Clone ID: LIB3061-053-B4-R6B
tgcgccgcccgccactcggccgggcgcgtctgccccgccgcgaagctcgcgcgcagctcccgcaccgtctcctccgccatccccgccttccttccttccttccttcctgccttcctccgggtcccggtaacaggagagcacagcaacaacaagagaagcggacgcgaaaggggagtccggtggcggtaggagcgaggcctgcggcggcggcggccgtgtgtatgtatatacacacgc

SEQ ID NO: 5836 - DNA, 421 bp, Zea mays
  Clone ID: LIB3061-053-Q1-K1-B4
gcgggtatatacatacacacggccgtcgtcgcgcaggcctcgctcctaccgcaccggactcctttcgcgtccgcttctcttgtgtgctggctctcctgttaccgggacccggaggaaggcaggaaggaaggaaggaaggaaggcggggatggcggagagacgggcgggagctgacacgagcttccggcgggcagacgcgctcggccgagtgccggccgcgcaactaaggggcttatccggatgatccacgagaaagaagccgagatcaacgcccggcctcacgaggaccttgccaagccccatatggagtccttcctccacgagatatcacttaccaagtcgtcgtgccagtttgcgctcaaggggctcaagaactggatgaagcccgagaaggtacctgcggccataactacattcccgt

SEQ ID NO: 5837 - DNA, 116 bp, Zea mays
  Clone ID: LIB3061-054-Q1-K1-B5
ccaacaacccatcattggtggtgccctcttttagacttcttatgagttatagctcaatactacagctttttgtctgaaacaaacaacaatacttgccacatataacaatacaagcc

SEQ ID NO: 5838 - DNA, 444 bp, Zea mays; identical to SEQ ID NO: 2305
  Clone ID: LIB3061-054-Q1-K1-D2

SEQ ID NO: 5839 - DNA, 451 bp, Zea mays
  Clone ID: LIB3061-054-Q1-K1-F4
gatggagaaactaactcatctaggagtctcagtgtctctgacaataatgatgatagaaaaaaggagacactgggaagtggtgatgataaagaggatcacgaaatacagctcaaacaaataagacaggacatggaacttttgcgtgatgataaatctctcttggagataattttggatgagaagaatgctgaagtgcgcaagatttctagcagattaaatgatcttgatctgcagctaaggaaggagaaagaggaatgccacaggatgacctcaaaaattaaaaagttccttaaagcccatgctcgctttttgaaagcacaggaagaattgaaaaggtcacaagctcgttttgagagactcggtgatttacttgcttcagatattctgaaacgtggtgctaatgaagaagtttctagtatcaatgttgatgaagatccaaatgttccttatg

SEQ ID NO: 5840 - DNA, 433 bp, Zea mays
  Clone ID: LIB3061-055-Q1-K1-D3
tagcaacatagaaagcacaatagtgttctcaacaatggcagccaaaatattttgcctcgttatgctccttggtctttctgcaagtgctgctacggcgaccattttcccgcaatgctcgcaagctcctatagcttcccttcttcccccgtacctctcaccagcggtgtcttcggtatgtgaaaacccaattcttcaaccctacaggatccaacaggcaatcacagctggcatcttacctttatcacccttgttcctccaacaatcatcagccctattacatcagttacctttggtgcatttattggcacaaaacatcagggcacaacaactacaacaacttgtgctagcaaaccttgctgcctactctcagcaacagcagtttcttccattcaaccaactagctgcattgaactctgcttcttatttgcaacaa

SEQ ID NO: 5841 - DNA, 422 bp, Zea mays
  Clone ID: LIB3061-055-Q1-K1-E2
cgctagggttcttgattttagccgccgccgctgctcatctcacatccctcgagaagacgcctgctcctcgccggtcgatacgatggccgtcttctccgacctccacaccgccgacggcctcaagtccctcgaggctcacctcgccggcaaaacctatgtgtctggtgactccattactaaggatgacattaaggtcttcgccgcggtgccgtcgaagcctggcgctgagtttcctaatgccgcccgctggtacgagaccgtctctgcggctgtagcctcaagattccctggtaaggctgttggtgtaaatctgcctgcgggatcagctcctgcggcagctgctcctgcggatgaagctgaagatgatgatgaccttgatctttttggtgatgaaactgaagaagacaagaaagcagctgatg

SEQ ID NO: 5842 - DNA, 204 bp, Zea mays
  Clone ID: LIB3061-055-Q1-K1-E4
acacctacacctactgttgccctttgtccaacttgctttgacataccgagcggactcctaccaacaacacaggattggtggtgccctcttttagattgcttattagttgtaattcaataataaagtcttttggatgatgtatgtggccaaccagaaataagaagttacatttccagattttaatgtgaaaaagctaaccatata

SEQ ID NO: 5843 - DNA, 404 bp, Zea mays
  unsure (1)..(404): unsure at all n locations; Clone ID: LIB3061-055-Q1-K1-F12
cgctgtggttaatgcacctacatacctgcaacaacagttgctgcaacagatggtacgagctctgactcagctagctgtggcaaaccctgctgcctacttgcaacagctgcttccattcaaccaactgactgtgtcgaactctgctgcgtacctacaacagcgacaacagttacttaatccactagcggtggctaacccattggtcgctgccttcctacagcagcaacaattgctgccatacaaccagttctctttgatgaaccctgccttgttgtggcagcaacccatcgttggaggtgccatcttttagattacatatgagatgtactcgataatggtgccctcatagcggcatgtgtttcctagaaataatcaatatattgattgagatttaaaananaaaa

SEQ ID NO: 5844 - DNA, 370 bp, Zea mays
  Clone ID: LIB3061-055-Q1-K1-H6
cacgcgtccgtccgtggccaggaggttcccaagcttgtaatggatgaggtctatgacatggagctctacgagtggaccaaggtcgacatctctgatgaggcccagaaggagcgtgtcaatgccatgatcgaggaccaggaaccctttgagggcgaggccttgcttgacgcgaaatgcttcaagtgagtgtgctttatccagagctgtttagccctcgaattggatgtctatgttgatctggtatatcttgctatgaactggttaaggtttgtgctggtttgagaatttttgtttaccttgtcatcattcaagtgtttcgccgtaacaattttggtcacaaaaatataccaacaacctaacattaaagaat

SEQ ID NO: 5845 - DNA, 422 bp, Zea mays
  Clone ID: LIB3061-056-Q1-K1-E5
gaccatggcgttgctcccgcgcaccgcgcggctggccctcctttccaccccgcgggcgtactccgctggcgctgctgcgggcgcctccccgacgtccccagcgccatacgggggcgcccccccaccggcgatgtcgaagacggccgagttcgtggtctctaaggtggacgacctgatgaactgggcgcgtaagggctcgatctggcccatgaccttcgggctcgcctgctgcgcggtggagatgatgcacgccggcgcgtcccgctacgacttcgaccggttcggcgtcatcttccgtccgtcgccgcgccagtccgattgcatgatcgtcgccggcacgctcaccaacaagatggctccggccctccgcaaggtttatgaccaaatgcctgagcctaagtggggtatttcaatgggcagct

SEQ ID NO: 5846 - DNA, 438 bp, Zea mays
  Clone ID: LIB3061-056-Q1-K1-F12
aagcacaatagtgtaccaacaatggcagccaaaatattttgcttccttatgctccttggtctttgtgcaagtgctgctaccgcaaccattttcccacaatgctcacaagctcctatagcttcctttcttcccccatacctctcaccagcggtgtcttcagtatgtgaaaacccaattcttcaaccctacaggatccaacaggcaatcgcagcaggcatcttacctttatcacccttgttcctccaacaaccgtcagccctattacagcagttacctttggtgcatttgttggcacaaaacatcaaggcacaacaactacaacaacttgtgctaggaaaccttgctgcctactctcagcaacagcagtttcttccattcaaccaactggctgcattgaactctgctgcttatttgcaacaacaactaccattcagtcag

SEQ ID NO: 5847 - DNA, 224 bp, Zea mays
  Clone ID: LIB3061-056-Q1-K1-F9
tagttatcctattatgagtacttggatatattaaatggcagcgacgagtcaagatgatgttgagtgttggttgtctgtgtgcaggcgtggacatgtatgactagcatcctaggtttcaatcctagattaatatgataattttattctttttatataaaaaaaataacctctgactaccacaaagcaattacttacattaaaccaaatagcaaaatagaacaaaa

SEQ ID NO: 5848 - DNA, 364 bp, Zea mays
  Clone ID: LIB3061-056-Q1-K1-H7
gcagcagttgatgggcggcggcacccggcgtgacgcctaaggcgagaggcacgacaagatggacgctcctctaggacgatgagcggagttcgaagagttcgagatcgaccaagaatgggatgaccaggaagaaggcaacgaagccgtccagcagtgggaggatgattgggatgacgatgacgtgaacgatgatttctcgctgcagcttaaggaagagctggacggaagcaacggccagaagagctgaagtattatttctctactttatataaatgatttttatatggcagctacttttggaaccgttgatgtgctttggatgtgaaagtttttggacatcagtcggcacagaaaactaccaact

SEQ ID NO: 5849 - DNA, 251 bp, Zea mays
  Clone ID: LIB3061-057-Q1-K1-A7
tacgcgtgcgcagagctagctacctacctctgtttccagtatgccaatgcatgcaccaaatgcgcagggatgcatgcctgaataaactactgtaattgctaggctgatgaacgtcgatgcgctagtataactactactactacgaggctatctgcgcgctgaacacagcgctgataagtagcgtcggtgtgctaaattcagaatgagtaagtataatctatgctattaccagctaaccaaagcaatcaaag

SEQ ID NO: 5850 - DNA, 240 bp, Zea mays
  Clone ID: LIB3061-057-Q1-K1-A8
aagagctagctacctacctctatttccagtttgccaatgcaagcaccaaatgcggcaggggtgcatgcctgaatagactacggtaattgccaggctgctgatcgtcgatgcgctagtataactactactactacgaggctagctgcgcgctgaacacagcgctgtaaagtagcgtcagtgtgctaaattcagaatgtgtaagtttaatttatgcgattaccagttaaccaaaaaaataaa

SEQ ID NO: 5851 - DNA, 433 bp, Zea mays
  unsure (1)..(433): unsure at all n locations; Clone ID: LIB3061-057-Q1-K1-C1
tgagcatgagaaacacacctacgaacgcnatagcacgacctacatcaatggcttccaagacattatcccgccttgcgcttcttgccctttgtgtgagtgcaacaaatgcgttcattattccacaatgctcacttgctccgagtgccattattccacagttcctccctccagttacttcaatgggcttcgaacacccagctgtgcaagcctataggctacaacaagcgcttgcggcgagcgtcttagaacaaccaattgcccaattacaacaacaatccttggcacatctaaccatacaaaccatcgcaacgcagcagcaacaagcactgagccacctatccgtggtgaaccctatcgnctacttgcaacaacagctgcttgcatccaacccacttgctttggcaaacgtagctgcataccaacaacaacaaca

SEQ ID NO: 5852 - DNA, 246 bp, Zea mays
  Clone ID: LIB3061-057-Q1-K1-C8
gcaacagttgctgcctttctaccagcagtttgcggctaaccccgcaaccctcttacaggtacaacaattgttgccctttgtccaacttgctttgacaaacccagcagcctcctaccaacaacacatcattggtggtgccctcttttagattgcttattagttgtaattcaataataaagttttttggatgatgtatgtggccaaccagaaataagaagttacatttccagattcaaaaaaacaaat

SEQ ID NO: 5853 - DNA, 429 bp, Zea mays
  Clone ID: LIB3061-057-Q1-K1-H6
aggaaggcagaacatcagatattgaagtgcaaccaagatttttagtgctaggggcagttgatgactcgacacgtgtggaaaaactttgagcgttcaatgtagtattcctggaattaactacatgtgcataactacccgaagaatcagaaacatataaaactccaagatcatgctcttccggcaagcctccagtagttgttgaggatgatgaagcttatgagatactcttctgcgtgtatggatgcccatcactaaatacagaagctttcttgccactttgagagaaatgacggcatcggtctggacgaatggcgagctcgacgatctagagtcagatctggtggggaagaagtctggtcggtcattaccgacggcaacgctggctgcagagctgatcgtgccaccagcataagagatcaaggagttttt

SEQ ID NO: 5854 - DNA, 626 bp, Zea mays
  unsure (1)..(626): unsure at all n locations; Clone ID: LIB3061-059-P1-K6-A10
ctagcaacatagnaaagcacaatagtgtaccaacatggcagccaaaatttttgcttccttatgctccttggtctttctgcaagtgttgctaccgcaaccattttcccacaatgctcacaagctcctatagcttcccttcttcccccatacctctcaccagcggtgtcttcaatgtgtgaaaccccaattgttcaaccctacaggatccaacaggcaatcgcaacaggcatcttaccattatcacccttgttcctccaacaaccgtcagccctattacagcagttacctttggtccatttggtggcacaaaacatcagggcacaacaactacaacaacttgtgctagcaaaccttgctgcatactctcagcaacatcagtttcttccattcaaccaactggctgcattgaactctgctgcttatttgcaacaacaattaccattcagccagctagttgctgcctacccccagcaatttcttccattcaaccaactagcagcattgaactctgctgcttatttacagcagcaacaactactaccattcagccagctagctgatgtgagccctgctgccttcttgacacaacaacagttgttgccgttctacctgcacgctatgcctaa

SEQ ID NO: 5855 - DNA, 640 bp, Zea mays
  Clone ID: LIB3061-059-P1-K6-A11
cttctatcagtaccatcaatcatcattcatcttagtagtataggcaccaaatcaaatctgcaacatcaattatctaactccaaaaccatgaagctggtgcttgtggttcttgctttcattgctttagtatcaagtgtttcttgtacacagacaggcggctgcagctgtggtcaacaacaaagccatgagcagcaacatcatccacaacaacatcatccacaaaaacaacaacatcaaccaccaccacaacatcaccagcagcagcaacaccaacaacaacaagttcacatgcaaccacaaaaacatcagcaacaacaagaagttcatgttcaacaacaacaacaacaaccgcagcaccaccaccaacaacaacaacaacagcaccaacaacaacatcaatgtgaaggccaacaacaacatcaccaacaatcacaaggccatgtgcaacaacacgaacagagccatgagcaacaccaaggacagagccatgagcaacaacatcaacaacaattccagggtcatgacaagcagcaacaaccacaacagcctcagcaatatcagcagggccaggaaaaatcacaacagcaacaatgtcattgccaggagcagcaacagactacaaggtgcagctataactact

SEQ ID NO: 5856 - DNA, 617 bp, Zea mays
  unsure (1)..(617): unsure at all n locations; Clone ID: LIB3061-059-P1-K6-A5
agcacatanaagtggnatacagtagcaaaatnagacaacatggcggccaagatattttccatccttatgctccttgctctttctgcatgtgttgctaacgcgaccatttttcctcaatactcacaagctcctatagctgcccttcttcccccataccttccatcaatgaccgctttagtatgtgaaaacccagcccttcaaccctacaggatccagcaagcaatcgcaacaagcaacttacctttatcacacctgttctttcaacaatcgccagccctatctttggtgcagtcattggtacaaaccatcagggcagaacagttgcagcaactcgtgctaccagtgatcagccaagtagctctggcaaacctttccccctactctcagcaacaacaatttcttccattcaaccaactgtctatactgaaccctgctgcttatttgcagcaacaacaactactaccattcagccagctagctactgcctactctcagcagcaacaatttcttccatttaaccaattggccgcactgaacccctctgcttatttccagcagcaaatactactaccatttggccagctagctacaacaagccccgcttccttcttgacaca

SEQ ID NO: 5857 - DNA, 553 bp, Zea mays
  unsure (1)..(553): unsure at all n locations; Clone ID: LIB3061-059-P1-K6-A6
cgcgagacaaagngcacgcctactgcngacccgccaanagcagtggccgtgcgccgcggggcagtagtactacgggcgcggcccgctgcagatctcgtggaactacaactacgggcccgcggggagggccatcggcttcgacgggctcggggaccccggcagggtggcgcgggacgccgtggtggcgttcaaggcggcgctctggttctggatgaacagcgtgcacggggtggtgccgcaggggttcggcgccaccaccagggccatcaacggcgccctcgagtgcggcgggaacaaccccgcccagatgaacgcgcgcgtcggctactacaggcagtactgccgccagctcggcgtcgaccccgggcccaacctcacctgctaggctaggcggcatcggcggacggcgggggccttcaggccttgtgctcggcgtcgcatcgcaccctcgcgcgcgaaaccgagcaatagtgacaataaaacgccggggctagctgagcctgtttgttcgacctgaataatgaagcagctgtgatatgcatgttgtttcgac

SEQ ID NO: 5858 - DNA, 619 bp, Zea mays
  unsure (1)..(619): unsure at all n locations; Clone ID: LIB3061-059-P1-K6-A7
gcccaactagcaacatagnaaagcacatagtgtaccaacatggcagccaaaaattttgcttccttatgctccttggtctttctgcaagtgttgctaccgcaaccattttcccacaatgctcacaagctcctatagcttcccttcttcccccatacctctcaccagcggtgtcttcaatgtgtgaaaccccaattgttcaaccctacaggatccaacaggcaatcgcaacaggcatcttaccattatcacccttgttcctccaacaaccgtcagccctattacagcagttacctttggtccatttggtggcacaaaacatcagggcacaacaactacaacaacttgtgctagcaaaccttgctgcatactctcagcaacatcagtttcttccattcaaccaactggctgcattgaactctgctgcttatttgcaacaacaattaccattcagccagctagttgctgcctacccccagcaatttcttccattcaaccaactagcagcattgaactctgctgcttatttacagcagcaacaactactaccattcagccagctagctgatgtgagccctgctgccttcttgacacaacaacagttgttgccgttctacctgca

SEQ ID NO: 5859 - DNA, 617 bp, Zea mays
  unsure (1)..(617): unsure at all n locations; Clone ID: LIB3061-059-P1-K6-A8
ttcaaaacacccagcgaacgcactacacgacctacaccatggctaccaagnaattagccctccttgcgcttcttgcccttttagtgagcgcaacaaatgcgttcattattccacagtgctcacttgctcctagtgccattattccacagttcctcccaccagttacttcaatgggcttcgaacatccagccgtgcaagcctacaggctacaactagcgcttgcggcgagcgccttacaacaaccaattgcccaattgcaacaacaatccttggcacatctaaccctacaaaccattgcaacgcaacaacaacaacaacaacagtttctgccatcactgagccacctagccgtggtgaaccctgtcacctacttgcaacagcagctgcttgcatccaacccacttgctctggcgaacgtagctgcataccagcaacaacaacagctgcaacagtttatgccagtgctcagtcaactagccatggtgaaccctgccgtctacctacaactactttcatctagcccgctcgcggtgggcaatgcacctacgtacctacaacaacagttgctgcaacaaattgtaccagctctgactcagctagctgtggcaaaccctgct

SEQ ID NO: 5860 - DNA, 631 bp, Zea mays
  unsure (1)..(631): unsure at all n locations; Clone ID: LIB3061-059-P1-K6-B1
nccaacatacatagtgaagtacctagcacatcttacaccaaggcagccaagatttttgcgctccttgccctccttgctctttcagcaagtgttgctaccgcgactattattccacaatgctcacaacaatacctctctccagtgatagccgcgagatttgaatacccatctatacaatcctacaggctacaagaggccatcacagcaagcatcttacggtcgttagcattgaccgtccaacaaccatatgccctattgcaacaaccatccttagtgaatctgtatctccaaagaatcacagcacaacaactacaacaacggttgcttccaacaattaatcaagtagttgcagcgaaccttgctgcttaccttcagcaacaacaatttcttccattcaatcaactagctggggtgaaccctgctgcttacttgcaggcacaacagctactaccattcaaccaacttgtcgggagccctgctgccatcttattgcagcaacagttgctgccattccgtctacaagttgttgcaaacattgctgctttcttgcaacaacaacaattgctgccattttacccacaggttgtgggaaacattaacgccttnttgcaacaacaacaattgctgccat

SEQ ID NO: 5861 - DNA, 639 bp, Zea mays
  unsure (1)..(639): unsure at all n locations; Clone ID: LIB3061-059-P1-K6-B12
cgnatttattgcacatgcttttcgtggttacttagtaattataggtgtgatttaaattagtttgccctactgctgatctctatgctgaaccggaaacccgtatgagctttgcggcaacatttgtgtgagtaatttgagctggcagttgctctatttggagatctgtatttccactaaatctacgaagtagtagatgcatagataaacttaagctgtcatagaaagtcatttaaaacatgggaagagtttgacgtttagacctctgttaagtgctcatgatgtcatattgaaatttcgtacactctaaggggagtaatttggaattggggaaagaattcaacagctgcagttgagatttgctaggaagtcaagttgaaattgggaaggattcaagggctacagaccacctccgtaccttctcctgtaccttctcctgtgtactgtagagtaactgattttaggtctttttgtttgaggactaatctttagttgtcgtttaggggtagctttggaactttattttttcaaaggatttctatttttttaaaggaaaatgaactaattttcttttgaataattttcttttgaaaaatgagaacctttggaaaaagggttcacaaactaacctttaaccttttt

SEQ ID NO: 5862 - DNA, 415 bp, Zea mays
  unsure (1)..(415): unsure at all n locations; Clone ID: LIB3061-059-P1-K6-B2
tgattgactctgcttctnttttgcaacaacaacaactaccattcagccagctatctgctgcctacccccagcaatttcttccattcaaccaactgacagctttgaactctcctgcttatttacagcagcaacaactactaccattcagccagctagctggtgtgagccctgctaccttcttgacacaaccacaattgttgccgttctaccagcacgctgcgcctaacgctggcaccctcttacaactgcaacaattgctgccattcaaccaacttgctttgacaaacccaacagcattctaccaacaacccatcattggtggtgccctcttttagatttcttatgagttatagttcaataataaagttttttgtctgatgtttgtggcttcccagaaataagaaagtacatttct

SEQ ID NO: 5863 - DNA, 82 bp, Zea mays
  unsure (1)..(82): unsure at all n locations; Clone ID: LIB3061-059-P1-K6-B3
aactttcaaattngagtgctgactaatattgttatgtatacctggcaaaagatggtttccttttaattcagtctggttgaac

SEQ ID NO: 5864 - DNA, 630 bp, Zea mays
  unsure (1)..(630): unsure at all n locations; Clone ID: LIB3061-059-P1-K6-B4
gnagacatgatatttccactcccagggaaaaaggaggggnaaaaaaggtagtaggcggcaatccacggcgggggcctccgcccgcctccggcatggaaaaacgccgcgggggccggcgaggggggcagcttcgtcatttccggcgccctcctcctttcctttatctctctccccacgcccccacgtttcgccccccatttcgaagcccaccgaattccctgcgattcctctcccctcgcctcctcgtctccccctaggggatcgtcggagaggaatcgcaaagagggccgtctcatccgagttaaggaagccatggagcacaaggaggctgggtgccaggcccccgagggacccatcctctgcatcaataactgtggcttcttcggcagcgcggcgaccatgaacatgtgctccaagtgccacaaggagatgataacgaagcaggatcaggccaagctggctgcctcctctatcgacagcatcgtgaacggcagcgacgccgtcatggagccggttgttgctggcagcaacacggtagtagctgttgcccaagttgagttgcaaacaatgaacgtgcagcagcccgctgatgttgccggacccagcgagggggtggcggcgatctccaaa

SEQ ID NO: 5865 - DNA, 632 bp, Zea mays
  unsure (1)..(632): unsure at all n locations; Clone ID: LIB3061-059-P1-K6-B5
ccaactagcaacatagnaagcacaatagtgtaccaacatggcagccaaaatttttgcttccttatgctccttggtctttctgcaagtgttgctaccgcnaccattttcccacaatgctcacaagctcctatagcttcccttcttcccccatacctctcaccagcggtgtcttcaatgtgtgaaaccccaattgttcaaccctacaggatccaacaggcaatcgcaacaggcatcttaccattatcacccttgttcctccaacaaccgtcagccctattacagcagttacctttggtccatttggtggcacaaaacatcagggcacaacaactacaacaacttgtgctagcaaaccttgctgcatactctcagcaacatcagtttcttccattcaaccaactggctgcattgaactctgctgcttatttgcaacaacaattaccattcagccagctagttgctgcctacccccagcaatttcttccattcaaccaactagcagcattgaactctgctgcttatttacagcagcaacaactactaccattcagccagctagctgatgtgagccctgctgccttcttgacacaacaacagttgttgccgttctacctgcacgctatgcctaacgc

SEQ ID NO: 5866 - DNA, 614 bp, Zea mays
  Clone ID: LIB3061-059-P1-K6-B6
gcaactcatttgtttcagactgttggacacccagtccaagctcagcctggagaaattttgtacaatgccggataggggaaaactaggcaggaaagtgaaaaagataaaaaaaagatttctagtaaaacaaggcggcacacagatggagcctctggtttagaagcaaagtctcgtggttggaaggatgataaaagaccacgggcaggggcaggggcaccggcgaacgggttgcaggcagcgcagtgtacatggcaaggctagatctactagatggcttcgtcccaggcggcccagttggcggcgctgccaacacggggcatggagttgatcttggtgaaggtgtcgaccttgaaggtggcgccgcacatggcgccctcgctgtcgacgcgcggcatggccttgagcctgttcatggggtgctcgaagctcttgagccctccgtcgctgtggaacatgcagcccgcggggaagggcgcgtaggacttgccgcagccgcgcttgaccaggtcccggtcgtcgctgatcaccgcggacccgtcggccgcgacgccccagtacagcggcaccggcgctcccccggcgtcggcggcgcccgaggcggcgaaagaggcgcc

SEQ ID NO: 5867 - DNA, 624 bp, Zea mays
  unsure (1)..(624): unsure at all n locations; Clone ID: LIB3061-059-P1-K6-B8
gnaagcacaatagtgtaccaacatggcagccaaatattttgcctccttatgctccttggtatttctgcaagtgctgctacggcgaccattttcccgcaatgctcacaagctcctatagcttcccttcttcccccgtacctctcaccagcggtgtcttcggtattgtgaaaacccaattcttcaaccctacaggatccaacaggcaatcgcagctggcatcttacctttatcacccttgttcctccaacaatcatcagccctattacagcagttacctttggtgcatttattggcacaaaacatcagggcacaacaactacaacaacttgtgctagcaaaccttgctgcctactctcagcaacagcagtttcttccattcaaccaactagctgcattgaactctgcttcttatttgcaacaacaacaactaccattcagccagctacctgttgcctacccccaacaatttcttccattcaaccaactggcagcattgaactctcctgcttatttacagcagcaacaactactaccattcagccagctagctggtgtgagccctgctaccttcttgacacaaccacagttgttgccgttctaccagcacgctgcgcctaacgctgg

SEQ ID NO: 5868 - DNA, 634 bp, Zea mays
  unsure (1)..(634): unsure at all n locations; Clone ID: LIB3061-059-P1-K6-B9
ggngnacttgggcaaagggaacccatannacagnatctcctcaagnatggnaaacccccaattaggatttctatactaagtggntaccatgaaagaaattgaatctatgtgcaataatagattgattaatgagagacacagacgttacaatatataggggtgaggagatcttgggcaaaaggaaacacatagacaagatctcctcaaagatggaaacacccagtcaggatttctcaggatttctatactaaggaaactccaaatcaggatcatatacaaagcaagccctcaatcaggatcatatacaaagcaagccctcaatcaggatctcactaaccataatactctacactgcctactaggccggctggctatagagccacgcgcaggtcctgtatatggtagggaatcagctgtctaacatataggctattgatttctgttccatccatcttgttcaatattttccaggatcaactggctgctcagatgcccagttctcagtgcagcacttattccgtaagttgggaaatgatgaattcattggtcagcgggtaatccttgtagtttctcaaaagaatccaacgtatctgaaagatgttcttggctgatccgtttgctgatgctttccctg

SEQ ID NO: 5869 - DNA, 480 bp, Zea mays
  Clone ID: LIB3061-059-P1-K6-C10
gtgctagcaaccttgctgcatactctcagcaacatcagtttcttccattcaaccaactggctgcattgaactctgctgcttatttgcaacaacaattaccattcagccagctagttgctgcctacccccagcaatttcttccattcaaccaactagcagcattgaactctgctgcttatttacagcagcaacaactactaccattcagccagctagctgatgtgagccctgctgccttcttgacacaacaacagttgttgccgttctacctgcacgctatgcctaacgctggcaccctcttacaactgcaacaattgctgccattcaaccaacttgctttgacaaactcaacagtgttctaccaacaacccatcattggtggtgccctcttttagattgcttatgagttatagttcaataatgaagttttttggatgatgtttgtggcgtcccagaaataagaaagtacatttctagatt

SEQ ID NO: 5870 - DNA, 492 bp, Zea mays
  unsure (1)..(492): unsure at all n locations; Clone ID: LIB3061-059-P1-K6-C11
ctctccttgnaaggcgaacatatgaaccgccttgttacatacaaccttttgaaaggngagtggcagaggttcctgattgcatgctaccatggagtcgaaaaagcaatggataacatgtggcacagcatttgatccggtcccctgcgccttggtctgacatggaattttaccttctttgtctgagcactataatattttagtcctttcatatcattggcctatctttagatctttctatgttgttgtgacaagttctgcgaaaacgcattactgtggtttgctttgtataacgccgccgaaacaatcgaacggtttcctttatcacctgctgttctgttaagcttgtaatctttctgaacgtgcagttacctgcccagagctgagttcattatacaataaataccgggatgttaatgtttggactctggtgcatggagatgcagtggtgcttgttattaccatgaaaataatgtttttaattattgtgcatgg

SEQ ID NO: 5871 - DNA, 651 bp, Zea mays
  unsure (1)..(651): unsure at all n locations; Clone ID: LIB3061-059-P1-K6-C12
gngnaccaacagcaacatagnaagtggnatacagtagcaacaatagagcaacaatggcggccaagnaattttccatccttatgctccttgctctttctgcatgtgttgctaacgcgaccatttttcctcaatactcacaagctcctatagctgcccttcttcccccataccttccatcaatgaccgcttcagtttgtgaaaacccagcccttcaaccctacaggctccaacaagcaatcgcaacaagcaacttacctttatcacccctgttctttcaacaatcgccagccctatctttggtgcagtcattggtacaaaccatcagggcacaacagctgcaacaactcgtgctaccagtgatcagccaagtagctctggcaaacctttctccctactctcagcaacaacaatttcttccattcaaccaactgtctacactgaaccctgctgcttatttacaacaacaacaactactaccattcagccagctagctactgcctactctcagcagcaacaatttcttccatttaaccaattggccgcactgaacccctctgcttatttccagcagcaaatactactaccatttggccagctagctacaacaagccccacttcctttttgaaacaacaacaattgcttccgttct

SEQ ID NO: 5872 - DNA, 637 bp, Zea mays
  unsure (1)..(637): unsure at all n locations; Clone ID: LIB3061-059-P1-K6-C2
gcaagtttgtccattcgcattggtcntgatactgtagctactagcgcgagtgccactgtgccgcagctgcctgctcgccattactgcaagctgtgttcaatcaaagcttaattaggctccctctacatctgatccagctaagtagctagccagcactacagaagggcgtggcaagaatcaggagagagatagcaggggggctagctagctgagctcgtgcgacgaagaaggccggaattggcaggaacatggtggcgccgctcctggtgctcaacctcatcatgtacatcatcgtcatcggcttcgcgagctggaacctgaaccacttcatcaacgggcagaccaactaccccggcgtggccggcaacggcgcgacgttctacttcctggtgttcgccatcctggccggcgtggtgggcgcggcgtccaagctggcgggcgtgcaccacgtgcgcgcctggcgccacgacagcctggccaccaacgccgcgtcgtcgctcatcgcctgggccatcacggcgctcgccttcgggctggcctgcaaggagatccacatcggcggacaccgcggctggcgcctgcgcgtgctggaggccttcgtcatcatcctcgccttcacgcagctcctctacgtgct

SEQ ID NO: 5873 - DNA, 633 bp, Zea mays
  unsure (1)..(633): unsure at all n locations; Clone ID: LIB3061-059-P1-K6-C3
tggnaagaccatagtgtaccaacatggcagccaaaatttttgcctccttatgctccttggtctttctgcaagtgctgctacggcgaccattttcccacaatgctcacaagctcctatagcttcccttcttcccccgtacctctcaccagcggtgtcttcggtattgtgaaaacccaattcttcaaccctataggatccaacaggcaatcgcagctggcatcttacctttatcacccttgttcctccaacaatcatcagccctattacagcagttacctttggtgcatttattggcacaaaacatcagggcacaacaactacaacaacttgtgctagcaaaccttgctgcctactctcagcaacaacagtttcttccattcaaccaactagctgcattgaactctgcttcttatttgcaacaacaacaactaccattcagccagctatctgctgcctacccccagcaatttcttccattcaaccaactgacagctttgaactctcctgcttatttacagcagcaacaactactaccattcagccagctagnctggtgtgagccctgctaccttcttgacacanaccacaattgttgccgttctaccagcacgctgcgcctaacgctggcaccct

SEQ ID NO: 5874 - DNA, 618 bp, Zea mays
  Clone ID: LIB3061-059-P1-K6-C5
gttctaggacgcgggcgggcgccctttttttttttttttttttttttatttactccaccactacaggtccatttatttactcgcaatataaaattaccgatcggtacttaactacacacgcaagcaattagttcatgcgcttattaggttgtgccactggccaccactacactacattacactagcacaagcaagcagctacacatacttgtccatatcacataaacgaaacagcatatataagaagatgtcccaacatctttgcaccacgcgcgagatcaggggccctgcaggccgaactcttcagggcgcggccacgttctccttggcgagcggcgcgatctcctcgccttcgacccctggctcgccgccggcgaccccgaggctgagcagcacgttctcccagttcttggcagggcccttccaggagagatcctggatcatgcagttcctcaccatctcctcgtacgccggcgtgccgaccaccttgatggcgcgctgcaatgtggtggccaccttcttgacgtccgccggctccacgacgttacagtcgacgctgaggcggcccatgtggaacccggtcttgccttcgatgatggtgtcgacgagtccaccggt

SEQ ID NO: 5875 - DNA, 592 bp, Zea mays
  unsure (1)..(592): unsure at all n locations; Clone ID: LIB3061-059-P1-K6-C6
cacctgacaatagctcacgnctccanatggnanactcgncaccagnaagtgctngacgttgcccttgctctcctggcgctcgctgcgagcgccgcctccagtacaagcggcggctgtggctgccagacaccaccgtttcatctaccgcctccgttctatatgccgcctccgttctatctgccgccgcagcagcagccgcagccatggcaataccccactcaaccaccgcagctaagcccgtgccagcagttcggatcctgcggcgtcggcagcgtcggcagcccgttcctgggccagtgcgtcgagttcctgaggcaccagtgcagcccggcggcgacgccctacggctcgccacagtgccaggcgctgcagcagcagtgctgccaccagatcaggcaggtggagccgctgcaccggtaccaggcgacatacggtgtggtcctgcagtccttcctgcagcagcagccgcagggcgagctcgcggcgcttgaggcggcccaagtagcgcagcagctgacgncgatgtgcggtctgcagctgcagcagccaggtccctgcccttgcaacgcagctgcgggcggtgtctactact

SEQ ID NO: 5876 - DNA, 619 bp, Zea mays
  unsure (1)..(619): unsure at all n locations; Clone ID: LIB3061-059-P1-K6-C7
ggaccacagcacatanaagtgngatccagtagcaacaacagagcaacaatggcgaccaagnaattttccctccttatgctccttgctctttctgcatgtgttgctaacgcgacaattttccctcaatgctcacaagctcctatagcttcccttcttcccccataccttccatcaatgatagcttcagtatgtgaaaaacccagctcttcagccctataggctccaacaagcaatcgcagcaagcaacatacctttatcacccttgttgtttcaacaatcgccagccctatctttggtgcagtcattggtacaaaccatcagggcacagcagctgcagcaactcgtgctacctgtgatcaaccaagtagctctggcaaacctttctccctactctcagcaacaacaatttcttccattcaaccaactgtctacactgaaccctgctgcttatttgcagcaacaactattaccattcagccagctagctactgcctactctcagcaacaacaacttcttccatttaaccaattggccgcactgaaccccgctgcttatttgcagcagcaaatactactaccatttagccagctagctgcagcaaaccgtgcttccttcttg

SEQ ID NO: 5877 - DNA, 616 bp, Zea mays
  unsure (1)..(616): unsure at all n locations; Clone ID: LIB3061-059-P1-K6-D1
naaacatccttatagctcctaactgtaaaaacgcagttggaggtgaagtaattgattttggatcagtgtgcatggagggtaaaaccatttattcatatattcagagccgttattacaggtctccagaagtacttcttggttatccatatactactgccattgatatgtggtcattcggttgcatcgttgctgagctatatatagggctgcctttatttcctggtgcatcagaatatgatgttctttgccgtatgattgagattattggtgggcaaccaccagatgatctgctacgtgaggctaaaaacactgggaaattttttaagcatgttggaagtatctatcctagtagtgaggctcggaatggcgctagcagtgcatacagaattttaagtgaagatgagatcgaagcaagggactccaagaaaccgaaggttgggagatggtatttccctcgtggaaggcttgacagactcatatatacatacccctggaagaatttgagcgagggaaacttgccagagacagaaaaggctgattgcttggcattagttgatttnttgagaggacttgttgagtttgatcctaataagaggtggtcaccgttgcaggcctc

SEQ ID NO: 5878 - DNA, 649 bp, Zea mays
  Clone ID: LIB3061-059-P1-K6-D10
caggtttagtgttcgcatggcggccttcaacaagcttggtggccttctaaggcacagtgctctggtgagcggtatcactggtggctcttctcctgcagtgttcaatgctgcacggctcatgtctaccaagctatttattggtggtcttgactggggtgttgatgacgtgaaactaagagaagcatttagcagctttggagaggttactgaagcgagggtgatcacagacagggagactgggaggtcaagaggctttggctttgtgaactactccgacagtgatgctgccaaggaagctatttctgcaatggatggcaaggaaattgatgggcggcaggtacgtgtcaacatggctaatgagagacctgctgggaaccgtggtggtggtggctatggcggcggcggctatggaggtggtggctacggaggtggcggcggctacggaggtggtggctatggtggtggcagccaaagctatgatgcttgaggggggcaggatcctattaggtgcattatcaaccaagatatttgaaataatgaactttaggacttggtatgacgttttatgttaagcgttgtcaggttttgctattcgtgttatgctgaattgttggaactcctagatgcagaatcttacgtattggttttg

SEQ ID NO: 5879 - DNA, 614 bp, Zea mays
  Clone ID: LIB3061-059-P1-K6-D2
ccagttccagcaccaccgcagcatccaacgttgtcaggtctgacgccggcgccggtggtggcaacccgcccggcaccgccgcgcccagcacggctgcggccccgacaacaacagccggatctttcttgggcatggtccagtgatcgatccatccacacgcgtatcccaagcattattcctcccggtgatgactactctatcctcctcttgccgatggcttcttttctttctctcgcttgtgacatttgtatctacctacctgtcgcctccatgctcgcgtccatatatctgatctactccacaaatcctaaaaccacaacaactatccccctctcctctctattctccggcgattctccatattcttcatgcaggtcgtagccacacctcgatccatgtcgtgtcgtcgtcgctgttgcccaccctcctatttctccattcgttgctgcgctagttacagtggtcgccctcttagatgttacagtaaaaaaaaattggtggtgatatggttatttattgattcgttagggtaattaataagaaccctcaaaagcttggggtcttcacggagtggttgaatcgatgcggtgaaaacgcacgtgaagggtaataag

SEQ ID NO: 5880 - DNA, 633 bp, Zea mays
  unsure (1)..(633): unsure at all n locations; Clone ID: LIB3061-059-P1-K6-D3
gggnaagcccccttcccttgggtcagcttcgccctgcaggacagaccagaagcttactatgtgtcatccaattttcggcatggtgccgtgccaagtctctggacgatttggcccgaatgttcagagcgtattccttcggggnaaatcatgtcgttggaagatctgtttgcacgagcttcaccaccaatctgtgcggagtggttccctaggcactcatctttggcctttgggcacctgctgaggctcctggagagaggccctctggattaccagcgggtggttcttctgatgcttaaatcgctgctgcagcaaacccctgtggatccgtcacagataccccaggtgtacaacttcgtgtcgcagctggtggagagcacattatgctcggaggcgctgaatgtgctggaggcgctgctgcggagctgcggcggcggcgggcaaggcgaggaggctgggtttggtgataacggcgggcatgggagcggggagaaggtcctccagagcatgctgcttcctcagtcgtctttcaggcaaggagtgggccgctgcagtaccgctgcggggtcgggttggggtccttgatggggcaaggcggcggtggcagcagcagcgccgcagtagcgggttggtggc

SEQ ID NO: 5881 - DNA, 625 bp, Zea mays
  unsure (1)..(625): unsure at all n locations; Clone ID: LIB3061-059-P1-K6-D4
cactagcaactnanaagcacaatatgtaccaacatggcagccaaaatttttgcctccttatgctccttggtctttctgcagtgctgctacggcgaccattttcccgcatgctcgcaagctcctatagcttcccttcttcccccgtacctctcaccagcggtgtcttcggtattgtgaaaacccaattcttcaaccctacaggatccaacaggcaatcacagctggcatcttacctttatcacccttgttcctccaacaatcatcagccctattacatcagttacctttggtgcatttattggcacaaaacatcagggcacaacaactacaacaacttgtgctagcaaaccttgctgcctactctcagcaacagcagtttcttccattcaaccaactagctgcattgaactctgcttcttatttgcaacaacaacaactaccattcagccagctacctgctgcctacccccagcaatttcttccattcaaccaactggcagcattgaactctcctgcttatttacagcagcaacaactactaccattcagccagctagctggtgtgagccctgctaccttcttgatacaaccacagttgttgccgttctaccagcacgctgcgcct

SEQ ID NO: 5882 - DNA, 647 bp, Zea mays
  unsure (1)..(647): unsure at all n locations; Clone ID: LIB3061-059-P1-K6-D6
ttgnanaccaactagcaacanagnaagcacaatagtgtaccaacatggcagccaaaatttttgcctccttatgctccttggtctttctgcaagtgctgctacggcgaccattttcccacaatgctcacaagctcctatagcttcccttcttcccccgtacctctcaccagcggtgtcttcggtattgtgaaaacccaattcttcaaccctataggatccaacaggcaatcgcagctggcatcttacctttatcacccttgttcctccaacaatcatcagccctattacagcagttacctttggtgcatttattggcacaaaacatcagggcacaacaactacaacaacttgtgctagcaaaccttgctgcctactctcagcaacaacagtttcttccattcaaccaactagctgcattgaactctgcttcttatttgcaacaacaacaactaccattcagccagctatctgctgcctacccccagcaatttcttccattcaaccaactgacagctttgaactctcctgcttatttacagcagcaacaactactaccattcagccagctagctggtgtgagccctgctaccttcttgacacaaccacaattgttgccgttctaccagcacgctgcgcctaacgctggc

SEQ ID NO: 5883 - DNA, 591 bp, Zea mays
  unsure (1)..(591): unsure at all n locations; Clone ID: LIB3061-059-P1-K6-D7
cctcctcctcctcctcctcctcctcggctgcaaccctcactcgccaggaccgccgccgccgcctgtcggggctctacaccaggcttctcccctgcgcgaaactctcccctcagaatagaagcaacccggntgtcgatagccagtacttggcggagctgctggcggaacaccagaagctggggccgttcatgcaggtgctgcccatatgcaacaagctgctgagccaaganaatatgcgggtgtcaagcattgtccacaaccatggatttggcgatcatgacaggcatcggtttagaagtcctagtccgatgtcttctccgaaccctagagctaatctccctggcaatgggttcagtacttggagcggactacaagagagattaggttttcctcaacgagctagcatggactggcaaggagcaccaccaagtcctagcacccaagttgtgaagaagattcttcgtctggaggttccggttgattcttatccgaatttcaattttgtggggcgcattttaggacctagaggtaattctctaaagcgtgtagaagcatccactgggtgnccgtgttttcattagaggaaaggtt

SEQ ID NO: 5884 - DNA, 629 bp, Zea mays
  unsure (1)..(629): unsure at all n locations; Clone ID: LIB3061-059-P1-K6-D8
gnaagcacaatatgtaccaacatggcagccaaatattttgcctccttatgctccttggtctttctgcaagtgctgctacggcgaccattttcccgcaatgctcgcaagctcctatagcttcccttcttcccccgtacctctcaccagcggtgtcttcggtatgtgaaaacccaattcttcaaccctacaggatccaacaggcaatcacagctggcatcttacctttatcacccttgttcctccaacaatcatcagccctattacatcagttacctttggtgcatttattggcacaaaacatcagggcacaacaactacaacaacttgtgctagcaaaccttgctgcctactctcagcaacagcagtttcttccattcaaccaactagctgcattgaactctgcttcttatttgcaacaacaacaactaccattcagccagctacctgctgcctacccccagcaatttcttccattcaaccaactggcagcattgaactctcctgcttatttacagcagcaacaactactaccattcagccagctagctggtgtgagccctgctaccttcttgatacaaccacagttgttgccgttctaccagcacgctgcgcctaacgctggcaccctc

SEQ ID NO: 5885 - DNA, 454 bp, Zea mays
  unsure (1)..(454): unsure at all n locations; Clone ID: LIB3061-059-P1-K6-D9
ctagcctggtngaacctgccgcctacgtacaacaacaacaactgctttcatctagcccgctcgctgtgggcaatgcacctacatacctgcaacaacaattgttgcaacagattgtaccagctctgactcaactagctgtggcaaaccctgttgcctacttgcaacagctgcttccattcaaccaactgactctgtcgaactctgctgcgtacctacaacagcgacaacagttacttaatccattggtagtggctaacccattggtcgccgccttcctacagcagcaacaattgctgccatacaaccagttctctttgatgaatcctgtcttgtcgaggcagcaacccatcgttggaggtgccatcttttagattacatatgagatgtactcgataatggtgccctcataccgacgtgtgtttcctagaaataatcaatatattgattgagattt

SEQ ID NO: 5886 - DNA, 623 bp, Zea mays
  unsure (1)..(623): unsure at all n locations; Clone ID: LIB3061-059-P1-K6-E1
gngcccaacaagcaacatagnaagtggnatacagtagcaacaataggacaacaatggcggccaaaaattttccataccttatgctccttgctctttctgcatgtgttgctaacgcgaccatttttcctcaatactcacaagctcctatagctgcccttcttcccccataccttccatcaatgaccgcttcagtttgtgaaaacccagcccttcaaccctacaggctccaacaagcaatcgcaacaagcaacttacctttatcacccctgttctttcaacaatcgccagccctatctttggtgcagtcattggtacaaaccatcagggcacaacagctgcaacaactcgtgctaccagtgatcagccaagtagctctggcaaacctttctccctactctcagcaacaacaatttcttccattcaatcaactgtctacactgaaccctgctgcttatttacaacaacaacaactactaccattcagccagctagctactgcctactctcagcagcaacaatttctttcatttaaccaattggccggactgaacccctctgcttatttncagcagcaaatactactaccatttggccagctagctacaacaagccccacttccttt

SEQ ID NO: 5887 - DNA, 620 bp, Zea mays
  unsure (1)..(620): unsure at all n locations; Clone ID: LIB3061-059-P1-K6-E10
ctgggntccaggtttgtgccttccctgtgtattcacaattgagaggctgtcgaatgcttcggagtcaatcagatctgctgcaactggaaagcttcgtgtggtggaagagaacttatgcagcaaatgctcaacttttactggacgaagctgcttcctggtcacttctttggcacatatatggcaaagaacatgaggagctttctggagagctgttggtgccgccaattacatctcatcaggaggcttgccgctttgttgcagcagacattacagcacaactgtgtctgcggatcatactttggcttgaaggtcttgcttctgaagctcttgatttggagaagaaggtgagaggacctcatgttggttcgtacctaccaagttctggtgtttggcaccgtacacagaggtacctaaaaaggaacaatgctgattctactatagtgaagcatgtggattttgatgctccaactcgtgaaggggcccaacttcttcctgatgacaagaagcaagatgaattgcttctagaagatatatggactcttttaagagcaggaagattagaagaggcatctgacttgtgccgttctgctggccaggcatggagagttgccactctttgt

SEQ ID NO: 5888 - DNA, 630 bp, Zea mays
  unsure (1)..(630): unsure at all n locations; Clone ID: LIB3061-059-P1-K6-E11
aggatcagaccgtgagttgggngcttctgggctgacctgccgaacctaagaggggaagaggccaaatcagcctcggcgttgtcgagcccaagtcggctcccacatctccgaggtcaccggcatcccctgtcagagcaacgagttcgtccaggagctgctccgcggtgtccgcctccacttcgaccgtttcatcaacgagcttaaggattctgacttggagaaggcccaacttggcctggggcatagctacagcagggctaaggtgaagttcaatgtgaatcgtgttgataacatggtgatccaagcaatatttctgctggatacacttgacaaggacatcaattccttctccatgagagtcagggaatggttctcatggcacttccctgagcttgtcaagattgtgaatgacaattacctttatgccaagcttgctaagtttattgtgaacaaatctgatttggcggaaaaagattcccagctttggctgatatagttggtgatgaggacaaggctaaagaaattgttgaagcagcaaaggcttcaatgggccaggatctgtcaccagttgatttgatcaatgtccagcaatttgcccaaagggttatgaatctctctgagtatcgcaaa

SEQ ID NO: 5889 - DNA, 558 bp, Zea mays
  unsure (1)..(558): unsure at all n locations; Clone ID: LIB3061-059-P1-K6-E12
ttgtatccaacaagcaacatataagtggtatacagtagcaacaatagagcaacaatcgcggccaagtaattttccatccttatgctccttgctctttctgcatgtgttgctaacgcgaccatttttcctcaatactcacaagctcctatagctgcccttcttcccccatacctgccatgagatgaccgcttcagtttgtgaaaacccagcccttcaaccctacaggctccaacaagcaatcgcaacaagcaacttacctttatcacccctgttctttcaacaatcatcagccctatctttggtgcagacattggtacaaaccatcagggcacaacagctgcaacaactcgtgctaccagtgatcagccaagtagctctggcaaacctttttncttactctcagcaacaacaatttcttccattcaaccaactgtctacactgaaccctgctgcttatttacaacaacaacaactactaccattcacgccgctagctactgcctactctcaacatcaacaatctcttccatctaaaatattgcacccactttaacccct

SEQ ID NO: 5890 - DNA, 624 bp, Zea mays
  unsure (1)..(624): unsure at all n locations; Clone ID: LIB3061-059-P1-K6-E2
nataagtgaccatgtgagnattatggagtaccttgntgtagagcgattcatgncccctactgtgccgacaaagtagcaccctctttcgtctagctgctgttgtagtgcacattggcatgggatccttgaagtccggacactacattgcgtacgttagagcaagaaacttggatgtcagcaagaggaggcctcatggttttgtgcagacgacagtcagatcagacgagtcactattgaacaagttctcaacagtcaggcctatattcttttctatgagaggatggaagaccaggacgtttctggcatgacacgtcagaactgaagaatgcagtgatagaacaagcagatgagtgagataagcagaccttctctctcgaccgcaaggatctagtctagtcagtgttcatagtaagacaggctcttgaccaagctcatttttgtcgctgggcttgaaacttactctgtaactttgtaccaaatcggaggttctttctgatcttgtcaactcagctgatctggtctttccgttgcttcgcatttgaggatgaaactgtgaatagaatagtggtgagatcggtgatacgggctttgtaaagtttctgtcggatgatattgttacatgat

SEQ ID NO: 5891 - DNA, 631 bp, Zea mays
  unsure (1)..(631): unsure at all n locations; Clone ID: LIB3061-059-P1-K6-E3
gggcgctctcggtctcggcctggnggccgcaagcaatcaggagccggggagatgcggcggcgacgacgacgaggcgaagaggagggaggcagagcttgcgtcaagcaggctcctcgacccggggttcaagccctccaaactatcccaggaccggctcgacaagtttaaggaattacacaagaaacggttacagataactgaaaagccgaagtataaaagaaaaccgaaaggaaccactgagagaagtatcaaagtaaccagcaattataaattcactgataaggatgcatctgctgatagttctccaagagatgtgcatcatatgtcatcagttacaggaattcaaggggatcctgcatcaggcctgtcctcgaggaacaaaaggaaactacattgggggcttgacattaaagaacgatgggaaagaaaggcaaacatgtaaaanatatctgaagatccaacaacaaaagcatatccacaccgcactcatttgaaatttgaaagctgagggacaaaacaaagcggccgaccttttccacggatcatcatgttgctggtaaaggtttgtcagctagcagaactgatcagtaagctagtatctaatttttcagtgttttgtctaacgttttct

SEQ ID NO: 5892 - DNA, 629 bp, Zea mays
  unsure (1)..(629): unsure at all n locations; Clone ID: LIB3061-059-P1-K6-E4
gtaggggntacaacatttgngnatcatagtgctggcagnatgcctgacatggatcataccagtacaaatatgtattctttagatactgaaatgccaagtgatacccgagagtcatcaggcccagaggaaagttgcctgcctgaaactgaagaggatgcttacgccatcaatcagtgcaataaaggtagtgctcgagaacattcaagtgatgagaacaactttgatgatattcaaatgcagtctgaaatagttcagggtttagctgaggaaaacagattggacgattgttgcatgtctgccatctctgaggaggatgtgttgatttctggacgagaagccgacataagggaacttccgaacgatgaagaattttgtgcggaggtagaaggatcaaggaaacaaatccaaagatgcttcacattggaagaagctgctgatacaattctcttctgtagttctattgtccacgaccttgcatacaaggctgcgactattgcattggaaaatgagaaggaatcagagtttgttgaccctattcgcccaactgttagaatagttggaggatctttttctaaggatgagagtttaccaaagctgactcacagacgaactccaaatcgtaaggtcaa

SEQ ID NO: 5893 - DNA, 604 bp, Zea mays
  unsure (1)..(604): unsure at all n locations; Clone ID: LIB3061-059-P1-K6-E8
gcgaacgcactacacgacctaacacatggctaccaanatttatccctctttgcgcttcttgccctttttgtgagcgcaacaaatgcgttcattattccacaatgctcacttgctcctagtgccattattccacagttcctccctccattcttcaagggcttcgaacacccagctgtgcaagcctacaggctacaacaagcgcttgcggcgagcgtcttacaacaaccaattgcccaattacaacaacaatccttggcacatctaaccatacaaaccatcgcaacgcaacagcaacaacaatttctaccagcactgagccaactagctgtggtgaaccctgtcgcctacttgcaacagcagttgcttgcatccaacccacttgctctggcaaacatagttgcataccaacaacaacaacaattgcaacagtttctaccagcgctcagtcaactagccatggtgaaccctgccgcctacctacaacagcaacaactgatttcatctagccctctcgctgtggttaatgcacctacatacctgcaacaacagttgctgcaacagattgtaccagctctgactcagctagctgtggcaaaccctgctg

SEQ ID NO: 5894 - DNA, 283 bp, Zea mays
  Clone ID: LIB3061-059-P1-K6-E9
ttccattcaaccaacctaactatgtcgactctgttgcgtacctacaacagcgacaacagttacttaatccattggcagtggctaacccattggtcgctgccttcctacagcagcaacaattgctgccatacaaccggttctctttgatgaatcctgtcttgtcgaggcagcaacccatcgttggaggtgccatcttttagattacatatgagatgtactcgataatggtgccctcataccggcatgtgtttcctagaaataatcaatatattggttgagattt

SEQ ID NO: 5895 - DNA, 309 bp, Zea mays
  unsure (1)..(309): unsure at all n locations; Clone ID: LIB3061-059-P1-K6-F1
gccgcctgaacattggattctgactggaatcgaaaaaggcgatactccctaggcantccactagactctanatacatncgagggggaagcgagcagatcgatggcgatggctgagaaggtgaaggagaagagctgatgctccgcagnagcgacaaccaggagttggaggtgaaggagttggtggngatgcaatngatgaccatgaagaaaatggttgaggacggatgtgccgacaaaggaattatgtttatcaaagttacctattacatgcttgtgaaggttatggagtattgtaataagaatgttgag

SEQ ID NO: 5896 - DNA, 622 bp, Zea mays
  unsure (1)..(622): unsure at all n locations; Clone ID: LIB3061-059-P1-K6-F10
acaatccaggtcatgnacagcagcaacaaccacaacagcctcagcatatcagcagggccaggaaaaacacaacagcaacaatgtcattgccaggagcagcaacagactacaaggtgcagctataactactatagcagtagctcaaatctaaaaaatgtcatgaattcctaaggcagcagtgcagccctttggtaatgccttttctccaatcacgtttgatacaaccaagtagctgccaggtattgcagcaacaatgttgtcatgatcttaggcagattgagccacaatacattcaccaagcaatctacaacatggttcaatccataatccaggaggagcaacaacaacaaccatgtgagttatgtggatctcaacaagctactcaaagtgcggtggcaatcttgacagcagcacaatacctaccatcaatgtgcggcttgtaccactcatactaccaaaataatccatgcagcagcaatgacattagtggtgtttgcaattgaagaattgtgtctacctagccgttatactcctataacggtgttaagcaataaagtaccatacattatgatgtttgtactatgatatttgaataagaatactaattgtaattataatgcta

SEQ ID NO: 5897 - DNA, 636 bp, Zea mays
  Clone ID: LIB3061-059-P1-K6-F11
tattttcagcattcaaaaccacaccaagcgaacgcactagcaacgacctaacaccaatggctaccaagatattagccctccttgcgcttcttgcccttttagtgagcgcaacaaatgcgttcattattccacagtgctcacttgctcctagtgccattattccacagttcctcccaccagttacttcaatgggcttcgaacatccagccgtgcaagcctacaggctacaactagcgcttgcggcgagcgccttacaacaaccaattgcccaattgcaacaacaatccttggcacatctaaccctacaaaccattgcaacgcaacaacaacaacaacaacagtttctgccatcactgagccacctagccgtggtgaaccctgtcacctacttgcaacagcagctgcttgcatccaacccacttgctctggcgaacgtagctgcataccagcaacaacaacagctgcaacagtttatgccagtgctcagtcaactagccatggtgaaccctgccgtctacctacaactactttcatctagcccgctcgcggtgggcaatgcacctacgtacctacaacaacagttgctgcaacaaattgtaccagctctgactcagctagctgtggcaaaccctgctg

SEQ ID NO: 5898 - DNA, 636 bp, Zea mays
  unsure (1)..(636): unsure at all n locations; Clone ID: LIB3061-059-P1-K6-F12
ttgagaccaacagcaacatanaagtggnatacagtagcaacaatagagcaacaatggcggccaagatattttccatccttatgctccttgctctttctgcatgtgttgctaacgcgaccatttttcctcaatactcacaagctcctatagctgcccttcttcccccataccttccatcaatgaccgcttcagtttgtgaaaacccagcccttcaaccctacaggctccaacaagcaatcgcaacaagcaacttacctttatcacccctgttctttcaacaatcgccagccctatctttggtgcagtcattggtacaaaccatcagggcacaacagctgcaacaactcgtgctaccagtgatcagccaagtagctctggcaaacctttctccctactctcagcaacaacaatttcttccattcaaccaactgtctacactgaaccctgctgcttatttacaacaacaacaactactaccattcagccagctagctactgcctactctcagcagcaacaatttcttccatttaaccaattggccgcactgaacccctctgcttatttccagcagcaaatactactaccatttggccagctagctacaacaagccccacttccttttttgaaacaacaa

SEQ ID NO: 5899 - DNA, 614 bp, Zea mays
  unsure (1)..(614): unsure at all n locations; Clone ID: LIB3061-059-P1-K6-F2
catgttggngagtcatcaattattaacactactacggtcgagggtgtctgcaggttgctccaatcctggagagcaaagtgtggcagtacatcactctcactaaaaagaatttttgattgattgtcccggtgttgtatatcaaaacaatgattcagaaactgatatagttctgaagggtgtggtccgggtgacaaatttggcggatgctgctgagcacattggtgaagttcttaggcgtgttaaaaaggagcatctccaaagagcgtacaaaattcaagattggtctgatgataacgattttcttgtccagctgtgcaggaccactggaaaacttctcaagggcggggagcctgatctgacaacagcagccaagatggtacttcatgactggcagaggggtaaaatccccttctttgtaccccctccgcagcaaagcgacggcggtgcatctgaaagtgctgaacaacctattgggattaccaaagaggacggagtaagcagcgacaggactgccgcagccatgaaagccattgcaggaataatctcgtcacagcagaacatgaatgtgccctgccataaggaaaacatgcagacaatgaagacactgaaaatgc

SEQ ID NO: 5900 - DNA, 280 bp, Zea mays
  unsure (1)..(280): unsure at all n locations; Clone ID: LIB3061-059-P1-K6-F3
gtcttgntcgggcagcaacctctcgttggnggtgccatcttttagaattacatatgagagtactcgataatggtgccctcattccggcatgtgtttcctagaaataatcaatatattgattgagatttatctcaaaaaaaaaaaaaaaaaaaaaaaaaaaaaaaaaaaaaaaaaaaaaaaaaaaaaaaaaaccaaaaaaaaaaaaaaaaaaaaaccaaaaaaaaaaaaaaaggggcgggcggttttaaaagaaccaaagtttacttccccgtccttgcaa

SEQ ID NO: 5901 - DNA, 625 bp, Zea mays
  Clone ID: LIB3061-059-P1-K6-F4
ctctctcgcacttaaccgcctgctctctctgtctgccgcgccggcgccgccctcgcgatcgatgatggcagctgcggcgtggttgtgtggactcctctcgctcctggccctcgccggcgctgcgtcggctgcggatggggcggagggtgagtgggagccgctgatacggatgccgacggcgaaggggagtgacgctgcttctgctccggctgctgaggatgatgaagtggggacgaggtgggccgtgctcgtcgccggatccttcggttatgggaactaccggcaccaggccgatgtgtgccatgcgtaccagatactgcagaagggaggagtgaagaaggagaacattgtggtgttcatgtatgatgatattgcccacaacattctgaaccctaggcctggagttatcattaaccatcctaaaggagcaaatgtttatgatggtgttccaaaggattacacaggtgatcaggtcactactgaaaacttctttgctgtcctcttgggcaatagaagtgctaccactggagggagtaagaaggtgatagacagcaaacctaatgaccacatcttcatctattactcagatcatgggggtcctggagttcttggtatgccgaacctg

SEQ ID NO: 5902 - DNA, 654 bp, Zea mays
  unsure (1)..(654): unsure at all n locations; Clone ID: LIB3061-059-P1-K6-F5
gtngaacccctgnccggcaagnctatcacccttgnggtggagtcttcagacaccatcgacaacgtcaaggccaagatccaggacaaggagggcatcccaccggaccagcagcgtttgatcttcgctggcaagcagctggaggatggccgcacccttgcggattacaacatccagaaggagagcaccctccacctggtgctccgtctcaggggtggcatgcagatctttgtgaagacactcactggcaagacaatcacccttgaggtggagtcttcggataccattgacaatgtcaaggccaagatccaggacaaggagggcatcccaccggaccagcagcgcctcatcttcgccggcaagcagctggaggatggccgcaccctggcggattacaacatccagaaggagagcactctccacctggtgctccgcctcaggggtggcatgcagatttttgtgaagacattgactggcaagactatcaccttggaggtggagagctctgacaccattgacaatgtgaaggccaagatccaggacaaggagggcattcccccagaccagcagcgtctgatctttgcgggcaagcagctggaggatggccgcactctcgcggactacaacatccagaaggagagcacccttcaccttgtt

SEQ ID NO: 5903 - DNA, 605 bp, Zea mays
  Clone ID: LIB3061-059-P1-K6-F6
ctcatctcagccgtgcaggaccaagtagttttgcttcactccggcattccatccatatccatccatcagaattctcagtctccacagcagcaaggcgcacgaccagcaccagcagccggcaacaaaagacacagcagcgatggcgttcgtgccggtgtgcgtgcagtgcgggacgcggagcaacccgtgccggtgcaaggtggtcgggccgacgctggggttcgtcgcgttcgtggtggccggggtcatcgagtggccgctgggggccgccgtgtacctgttccgccaccgcaagggacgacgcatcatggcgcacccggccaccgtcgtgtacccgcgcgttaccagggccatcccgatctaatcggccgaccgatcagccaggtcgcggtttcatgtccgggtttgtgtcgccaacgtactgagatgtcgtcagtccaaatttgtgaatccttttacacccgcctgcctttctttctcaataagagtcgcaaatgtgtgtggtttcagtttgcgtacatttgtactccgattgtaagcatcgccgtcaatgtacgtaatactatgtatgtcatctcagtctatccgagtaacttcctattact

SEQ ID NO: 5904 - DNA, 581 bp, Zea mays
  unsure (1)..(581): unsure at all n locations; Clone ID: LIB3061-059-P1-K6-F7
gtgnaaaaccacntcttcgccctntaggctccaacaagcaatcgcagcaggcaacatacctttatcacccttgttgtttcaacaatcgccagccctatctttggtgcagtcattggtacaaaccatcagggcacagcagctgcagcaactcgtgctacctgtgatcaaccaagtagctctggcaaacctttctccctactctcagcaacaacaatttcttccattcaaccaactgtctacacctgaaccctgctgcttatttgcagcaacaactattaccattcagccagctagctactgcctactctcagcaacaacaacttcttccatttaacccaattggccgcacctgaaccccgctgcttatttgcagcagcaaatactactaccatttagccagctagctgcagcaaaccgtgcttccttcttgacacagcaacagttgctgcctttctaccagcagtttgcggctaaccccgcaaccctcttacaactacaacaattgttgccctttgtccaacttgctttgacagaccgagcggcctcctaccaacaacacatcattggtggtgccctctttt

SEQ ID NO: 5905 - DNA, 634 bp, Zea mays
  unsure (1)..(634): unsure at all n locations; Clone ID: LIB3061-059-P1-K6-F8
gcaacatagnaagtggnatacagtagcaaaatagnacaacatggcggccaagnaattttccatccttatgctccttgctctttctgcatgtgttgctaacgcgaccatttttcctcaatactcacaagctcctatagctgcccttcttcccccataccttccatcaatgaccgctttagtatgtgaaaacccagcccttcaaccctacaggatccagcaagcaatcgcaacaagcaacttacctttatcacacctgttctttcaacaatcgccagccctatctttggtgcagtcattggtacaaaccatcagggcagaacagttgcagcaactcgtgctaccagtgatcagccaagtagctctggcaaacctttccccctactctcagcaacaacaatttcttccattcaaccaactgtctatactgaaccctgctgcttatttgcagcaacaacaactactaccattcagccagctagctactgcctactctcagcagcaacaatttcttccatttaaccaattggccgcactgaacccctctgcttatttccagcagcaaatactactaccatttggccagctagctacaacaagccccgcttccttcttgacacaacaacaagtgcttccg

SEQ ID NO: 5906 - DNA, 631 bp, Zea mays
  unsure (1)..(631): unsure at all n locations; Clone ID: LIB3061-059-P1-K6-F9
gtgagggtgatgggattgacaggttgngaaaattaagtattgggggcagaagcaggagaagctttgagaataggtgctttggtggtagagttgctgcaactacacaatgtattcttacctcagatgcttgtcctgaaactcttcattctcaaacacagtcctctaggaaaaatatgctgatgcaaaccgtgtatctgctatcattttgggcggaggcactggatctcagctctttcctctgacaagcacaagagctacgcctgctgtacctgttggaggatgttacaggcttattgatatccctatgagtaactgcttcaacagtggtataaataagatatttgtgatgagtcagttcaattctacttcgcttaaccgccatattcatcgtacataccttgaaggcgggatcaactttgctgatggatctgtacaggtattagcggctacacaaatgcctgaagagccagctggatggttccagggtacagcagactctatcagaaaatttatctgggtactcgaggatgttggaacaatcaaatcattctttgatgcaaacttggccctcactgagcagccttccaagtttgatttttatgatccaaaaacacctttcttcactgcaccc

SEQ ID NO: 5907 - DNA, 628 bp, Zea mays
  Clone ID: LIB3061-059-P1-K6-G10
gccgcctccgttctatagaacggcggcggtctgtctcccggcgcagcagcgagccgcagcgcatggcaataccccagtcaaccacgcgcagctaagcccgtgccagcagttcggatcctgcggcgtcggcagcgtcggcagcccgttcctgggccagtgcgtcgagttcctgaggcaccagtgcagcccggcggcgacgccctacggctcgccacagtgccaggcgctgcagcagcagtgctgccaccagatcaggcaggtggagccgctgcaccggtaccaggcgacatacggtgtggtcctgcagtccttcctgcagcagcagccgcagggcgagctcgcggcgctgatggcggcccaggtagcgcagcagctgacggcgatgtgcggcctgcagctgcagcagccaggtccctgcccttgcaacgcagctgccggcggtgtctactactgaggaaactatgtactgtagtaataatgtaatggagccgctgactagctacctagctcgctagtttactcatttagcggcgatgagtaacgtagtgtcacccatcaccatgggtggcagtgtgagcaatgacctgaatgaaccattgaaatggaaaggaataatatataaggaaaa

SEQ ID NO: 5908 - DNA, 652 bp, Zea mays
  unsure (1)..(652): unsure at all n locations; Clone ID: LIB3061-059-P1-K6-G11
gcaacatagnaagcacaatagtgtaccaacatggcagccaaaatttttgcctccttatgctccttggtctttctgcaagtgctgctacggcgaccattttcccgcaatgctcgcaagctcctatagcttcccttcttcccccgtacctctcaccagcggtgtcttcggtatgtgaaaacccaattcttcaaccctacaggatccaacaggcaatcgcagctggcatcttacctttatcacccttgttcctccaacaatcatcagccctattacaacagttacctttggtgcatttattggcacaaaacatcagggcacaacaactacaacaacttgtgctagcaaaccttgctgcctactctcagcaacagcagtttcttccattcaaccaactaggttcattgaactctgcttcttatttgcaacaacaacaactaccattcagccagctacctgctgcctacccccagcaatttcttccattcaaccaactagcagcattgaactctcctgcttatttacagcagcaacaactactaccattcagccagctagctggtgtgagccctgctaccttcttgacacaaccacagttgttgccgttctaccagcacgttgcgcctaacgctggcaccctcttacaactgcaaca

SEQ ID NO: 5909 - DNA, 623 bp, Zea mays
  Clone ID: LIB3061-059-P1-K6-G2
cttccccctacttcctcatgaccgcttcatttgtgaaaacccacccttcaacctctacagctccaacaagcaatcgcaacaagcaacttacctttatcacccctgttctttcaacaatcgccagccctatctttggtgcagtcattggtacaaaccatcagggcacaacagctgcaacaactcgtgctaccagtgatcagccaagtagctctggcaaacctttctccctactctcagcaacaacaatttcttccattcaaccaactgtctacactgaaccctgctgcttatttacaacaacaacaactactaccattcagccagctagctactgcctactctcagcagcaacaatttcttccatttaaccaattggccgcactgaacccctctgcttatttccagcagcaaatactactaccatttggccagctagctacaacaagccccacttcctttttgaaacaacaacaattgcttccgttctaccagcagtttgtggctaaccccgcaaccctcttacaactgcaacagttgctgccctttgtccaacttgctttgacaaacccagcagccttctaccaacaacacatcattggcggtgccatcttttagaatacata

SEQ ID NO: 5910 - DNA, 651 bp, Zea mays
  Clone ID: LIB3061-059-P1-K6-G4
gcacaatagtgtaccaacatggcagccaaatattttgcttccttatgctccttggtctttctgcaagtgttgctaccgcaaccattttcccacaatgctcacaagctcctatagcttcccttcttcccccatacctctcaccagcggtgtcttcaatgtgtgaaaccccaattgttcaaccctacaggatccaacaggcaatcgcaacaggcatcttaccattatcacccttgttcctccaacaaccgtcagccctattacagcagttacctttggtccatttggtggcacaaaacatcagggcacaacaactacaacaacttgtgctagcaaaccttgctgcatactctcagcaacatcagtttcttccattcaaccaactggctgcattgaactctgctgcttatttgcaacaacaattaccattcagccagctagttgctgcctacccccagcaatttcttccattcaaccaactagcagcattgaactctgctgcttatttacagcagcaacaactactaccattcagccagctagctgatgtgagccctgctgccttcttgacacaacaacagttgttgccgttctacctgcacgctatgcctaacgctggcaccctcttacaactgcaacaattgctgccattca

SEQ ID NO: 5911 - DNA, 628 bp, Zea mays
  unsure (1)..(628): unsure at all n locations; Clone ID: LIB3061-059-P1-K6-G5
gcaacatanaagcacaatagtgtaccaacatggcagccaaaatttttgcctccttatgctccttggtctttctgcaagtgctgctacggcgaccattttcccacaatgctcacaagctcctatagcttcccttcttcccccgtacctctcaccagcggtgtcttcggtattgtgaaaacccaattcttcaaccctataggatccaacaggcaatcgcagctggcatcttacctttatcacccttgttcctccaacaatcatcagccctattacagcagttacctttggtgcatttattggcacaaaacatcagggcacaacaactacaacaacttgtgctagcaaaccttgctgcctactctcagcaacaacagtttcttccattcaaccaactagctgcattgaactctgcttcttatttgcaacaacaacaactaccattcagccagctatctgctgcctacccccagcaatttcttccattcaaccaactgacagctttgaactctcctgcttatttacagcagcaacaactactaccattcagccagctagctggtgtgagccctgctaccttcttgacacaaccacaattgttgccgttctaccagcacgctgcgcctaacgc

SEQ ID NO: 5912 - DNA, 634 bp, Zea mays
  unsure (1)..(634): unsure at all n locations; Clone ID: LIB3061-059-P1-K6-G6
gccggntcagnctagcgagccaagccaccgacggccgacgtcgagcctccgcggccgagcctccgcctagcaccaactccgtcgtcgatcgtcctatgcgaccacgcccccgtccgccttccgtctcctgcctccactgagtcgcgggcgcgacatcggggaacgccaaggctgagcttcgcccatacgcctaccgccctgttatgccccgaaccgccgtgctgaggtccgcccaggccgggccaggagcttctcccggcagacccacccccgcccaacggagctccatgcctccgcccagggccattgtccgagctacgccccacgctcctgtccagtgccctggccacttagatggttctgctcagtcatggtattgtaagtgtaggttctcttgtaataattgctttaattgtgtattagtgggtattgtgaatttctagggaaaattatcactagattttgaggagaatttactagtgatgtgtggatctggtgcctatctagttgtaggcttgctatggggcatggaaattgcttgtagcatgatcacattcagtaactttggttttgaatttattttggttgttgatgacttaagaagtaaggactatggatgcgttctagaggtctg

SEQ ID NO: 5913 - DNA, 582 bp, Zea mays
  Clone ID: LIB3061-059-P1-K6-G9
cccagcgtccgaaacaactcgatcgacgatcaaaagaccggccggcgaggctctagctccagaccgacaatgccgtacgcagccacaaggacgtcgccgcagcagcacagccgcgtggccagcaacgggagggccgtggcggcgtgcgcgggccacgcgggcgtgccggacgaggtggcgcggcaccacgagcacgcggtggccgcggggcagtgctgctctgtgatggtgcagtccatcgcggcgccggcggacgcggtgtggtcgctggtgcgccgcttcgaccagccgcaggggtacaagcgcttcatcaggagctgccacctggtggacggcgacggcgtcaaggtggggtccgtgcgggagctcctggtcgtgtccgggctgcccgccgagaacagccgcgagcggcttgagatccgggacgacaagcggcgggtgatcagcttccggatcctgggcggcgaccaccgcctcgccaactaccgttccgtgaccaccgtgcacgaggcggcctcagagggcgggccgctcaccatggtcgtcgagtcctatgtggtggacgtgccgccggggaacacc

SEQ ID NO: 5914 - DNA, 628 bp, Zea mays
  Clone ID: LIB3061-059-P1-K6-H10
caattgcaacaacaatccttggcacatctaaccctacaaaccattgcaacgcaacaacaacaacaacaacagtttctgccatcactgagccacctagccgtggtgaaccctgtcacctacttgcaacagcagctgcttgcatccaacccacttgctctggcgaacgtagctgcataccagcaacaacaacagctgcaacagtttatgccagtgctcagtcaactagccatggtgaaccctgccgtctacctacaactactttcatctagcccgctcgcggtgggcaatgcacctacgtacctacaacaacagttgctgcaacaaattgtaccagctctgactcagctagctgtggcaaaccctgctgcctacttacaacagttgcttccattcaaccaactggctgtgtcaaactctgctgcgtacctacaacagcgacaacagttacttaatccattggcagtggctaacccattggtcgctaccttcctgcagcagcaacaacaattgctgccatacaaccagttctctttgatgaaccctgccttgcagcaacccatcgttggaggtgccatcttttagattacatatgagatgtactcgacaatggtgccctcataccgacatg

SEQ ID NO: 5915 - DNA, 637 bp, Zea mays
  unsure (1)..(637): unsure at all n locations; Clone ID: LIB3061-059-P1-K6-H11
tgtttgcaaagctcctcctcgnatcgaccatcgatcactgcaccggccggcggcaccgcgctcgcaggggctagccaacgagacggcagcaatggcggaccgtgaccgcagcggcatctacggcggcgcccacgccacctacgggcagcagcagcagcagggaggaggcgggcgcccgatgggtgagcaggtgaaaaaggcatgctccacgacaaggggccgacggcgtcgcaggcgctgacggtggcgacgctgttcccgctgggcgggctgctgctggtgctgtcggggctggcgctgacggcctccgtggtggggctggccgtggccacgccggtgttcctgatcttcagccccgtgctggtccccgccgcgctgctcatcgggacggccgtcatggggttcctcacgtcgggcgcgctggggctcgggggcctgtcctcgctcacgtgcctcgccaacacggcgcggcaggcgttccagcgcaccccggactacgtggaggaggcgcgccgcaagatggcggaggccgcggcgcaagcgggccacaagaccgcgcaggcaggccaggccatccagggcagggcgcaggaggccggcgccgggggaggtgcangtgccggcgctggcggcggcg

SEQ ID NO: 5916 - DNA, 636 bp, Zea mays
  unsure (1)..(636): unsure at all n locations; Clone ID: LIB3061-059-P1-K6-H12
nttgcaccagnaaaccatcgaggggccgtcgncaggggnaattaatggcgtcgtcgtctagcagcagccaccgccgcctcatcctcgcagccgccgtcctgctctccgtgctcgcggctgccagcgccagcgccgggacctcctgcgtgccggggtgggccatcccgcacaacccgctcccgagctgccgctggtacgtgaccagccggacctgcggcatcgggccgcgcctcccgtggccggagctgaagaggagatgctgccgggagctggcggacatcccggcgtactgccggtgcacggcgctgagcatcctcatggacggcgcgatcccgccgggcccggacgcgcagctggagggccgcctagaggacctgccgggctgcccgcgggaggtgcagaggggattcgccgccaccctcgtcacggaggccgagtgcaacctggccaccatcagcggcgtcgccgaatgcccctggattctcggcggcggaacgatgccctccaagtaactgcgaagagcatagtgcatgaggaatgagcttgtagctagctcatatgtctgaataataagcacagcaagaagatgaatgcatttctcggatcgttcatccggaacaataattaagggggatc

SEQ ID NO: 5917 - DNA, 624 bp, Zea mays
  unsure (1)..(624): unsure at all n locations; Clone ID: LIB3061-059-P1-K6-H2
ccatcgtcctcattattattctcactggtcgatctgctaacacaaacagcagcagctcctcctcactagctagccttctctatttttgctactganagtgtccaagtctgcgacgacgtccgagatgtcgacggtgagccgtgcatcccttgaccagaagcttgccctcgccaagcgctgctcccgagaggcgactcttgccggagctaaggcggcagcagtggcgactatcgcctccgcgattcccaccctcgcgagcgtgcggatgctgccgtgggccaaggccaacatcaaccccaccggccaggcgctcatcgtctccacggtggccgggatggcctacttcatcgccgccgacaagaagatcctgtcgctggcgaggcgccactcgttcgaggaagctccggagcaccttaagaacacctccttccagggcaccggacgcccccacccggctttcttcaggccatgatgagatcagatatatatatgacacatccgtcgacctcatcagtcatagagcccagccagccagtcagtcagtcagcacaagcacaagcaccagagatgatgccatccatgtctgcatgtatgcatttataaaaaataaactgctaggctgat

SEQ ID NO: 5918 - DNA, 638 bp, Zea mays
  unsure (1)..(638): unsure at all n locations; Clone ID: LIB3061-059-P1-K6-H4
caacaagcaacatagnaagtggnatccagtagcaacaacagnacaacaatggcgaccaagatattttccctccttatgctccttgctctttctgcatgtgttgctaacgcgacaattttccctcaatgctcacaagctcctatagcttcccttcttcccccataccttccatcaatgatagcttcnagtatgtgaaaacccagctcttcagccctataggctccaacaagcaatcgcagcaagcaacatacctttatcacccttgttgtttcaacaatcgccagccctatctttggtgcagtcattggtacaaaccatcagggcacagcagctgcagcaactcgtgctacctgtgatcaaccaagtagctctggcaaacctttctccctactctcagcaacaacaatttcttccattcaaccaactgtctacactgaaccctgctgcttatttgcagcaacaactattaccattcagccagctagctactgcctactctcagcaacaacaacttcttccatttaaccaattggccgcactgaaccccgctgcttatttgcagcagcaaatactactaccatttagccagctagctgcagcaaaccgtgcttncttcttgacacagcaacagttgctgc

SEQ ID NO: 5919 - DNA, 398 bp, Zea mays
  Clone ID: LIB3061-059-P1-K6-H5
gacatagcaagcacatagtgtaccaacagggcagccaaatattttgcttccttatgctccttggtctttctgcaagtgttggtaccgtgaccatatttccacaatgactcacaagctcctatagcttcacttttttcgctatacatgtcaccagcggtgtgtagaatgtgtgtaaagagcaattgttcaaccctacggggtgtcaatcagcaatagcaacagggatattaccattattacaattgttgctacaagaactgtgagcattattagggtagtatatattagatgcatttggtggaagagacatgatggcgcaactactaccacagcttgtgctatcaatctttgttgaatagtctaagttgaatgaggttcttgaattgaaccaattggtt

SEQ ID NO: 5920 - DNA, 607 bp, Zea mays
  Clone ID: LIB3061-059-P1-K6-H6
aacatacaagcacatagtgcaccaacatggcagccaaaatttttgctcacgtttgctccttggacttgctgcaagtgttggtaccgtaaccattctaccacaatgctcacaagctcctatagcttcccttcttaccccatacctcttaccagcggagcattaaatgtgtgaaaccccaattgttcaacccttacagatccaacacgcaatcgcaacatgcataacaaccattattacccttgctcctacaacaaccttcagacctattacagctactacctcagctccatttggtggaacaaatcataagggtacaacaactacaacaacttgagctagcaaaccttgctcaatactctcagcaacatcaatttattccattcaaccaactggcatgcattgaactatgctgctcatctgcaacaacaactaccattcagccagctagatgctgtctacctggaaaatcttttgcattcaaccaactagcagcattgaactatgctgcttatgtacagcaacaacaactactaccattcagacagctagctgatgtgagccctagtgccttgtttacacaacaacagttgttgccgttttacctgca

SEQ ID NO: 5921 - DNA, 612 bp, Zea mays
  unsure (1)..(612): unsure at all n locations; Clone ID: LIB3061-059-P1-K6-H7
cacattcctccctccattcttcaagggcttcngacacccagctgtgcaagcctacaggctacaacaagcgcttgcggcgagcgtcttacaacaaccaattgcccaattacaacaacaatccttggcacatctaaccatacaaaccatcgcaacgcaacagcaacaacaatttctaccagcactgagccaactagctgtggtgaaccctgtcgcctacttgcaacagcagttgcttgcatccaacccacttgctctggcaaacatagttgcataccaacaacaacaacaattgcaacagtttctaccagcgctcagtcaactagccatggtgaaccctgccgcctacctacaacagcaacaactgatttcatctagccctctcgctgtggttaatgcacctacatacctgcaacaacagttgctgcaacagattgtaccagctctgactcagctagctgtggcaaaccctgctgcctacttgcaacagctgcttccattcaaccaactgactgtgtcgaactctgctgcgtacctacaacagcgacaacagttacttaatccactagcggtggctaacccattggtcgctgccttcctacagcagcaacaatc

SEQ ID NO: 5922 - DNA, 638 bp, Zea mays
  unsure (1)..(638): unsure at all n locations; Clone ID: LIB3061-059-P1-K6-H9
gnaaagcacatagtgtaccaacatggcagccaaaatttttgcttccttatgctccttggtctttctgcaagtgttgctaccgcaaccattttcccacaatgctcacaagctcctatagcttcccttcttcccccatacctctcaccagcggtgtcttcaatgtgtgaaaccccaattgttcaaccctacaggatccaacaggcaatcgcaacaggcatcttaccattatcacccttgttcctccaacaaccgtcagccctattacagcagttacctttggtccatttggtggcacaaaacatcagggcacaacaactacaacaacttgtgctagcaaaccttgctgcatactctcagcaacatcagtttcttccattcaaccaactggctgcattgaactctgctgcttatttgcaacaacaattaccattcagccagctagttgctgcctacccccagcaatttcttccattcaaccaactagcagcattgaactctgctgcttatttacagcagcaacaactactaccattcagccagctagctgatgtgagccctgctgccttcttgacacaacaacagttgttgccgttctacctgcacgctatgcctaacgctggcaccctcttacaactgca

SEQ ID NO: 5923 - DNA, 544 bp, Zea mays
  Clone ID: LIB3061-059-P1-N6-A8
cgagataaatctcaatcaatatattgattatttctaggaaacacatgtcggtatgagggcaccattgtcgagtacatctcatatgtaatctaaaagatggcacctccaacgatgggttgctgcaaggcagggttcatcaaagagaactggttgtatggcagcaattgttgttgctgctgcaggaaggtagcgaccaatgggttagccactgccaatggattaagtaactgttgtcgctgttgtaggtacgcagcagagtttgacacagccagttggttgaatggaagcaactgttgtaagtaggcagcagggtttgccacagctagctgagtcagagctggtacaatttgttgcagcaactgttgttgtaggtacgtaggtgcattgcccaccgcgagcgggctagatgaaagtagttgtaggtagacggcagggttcaccatggctagttgactgagcactggcataaactgttgcagctgttgttgttgctggtatgcagctacgttcgccagaacaagtgggttggatgcaagcagctgct

SEQ ID NO: 5924 - DNA, 544 bp, Zea mays
  Clone ID: LIB3061-059-P1-N6-C11
ttttttttttttttttttttttttttttttttttttttttttttttttttttttttttttttttttttttttttttttttttttttcccaggcccaaaaaaaaaaaacatttttttaaggggaaaaaaaagccccattggttttccaggccccagagtcaaaaaattaacatccgggtttttatgggaaaaaaaacccagcttggggcaggaaacggcccgttaaaaaagattacaagcttaaaaaaacagggggggaaaaaggaaaccgttcgattgtttggggggggttttaaaaagaaaaccacagtaaggggttttcgaaaaacttgtcacaacaccataaaaggatctaaagatgggccaatgttttgaaaggcctaaaattttttggggcccaaaaaaaaaagggaaaattccatgtaaaaccaaggggcaggggaccggaaaaaatgctgggccaaatgttatccatggcctttttcaaccccaggggagcatgcaaaaaggaaccttttgccactcccttttaaaaagggtgtatg

SEQ ID NO: 5925 - DNA, 576 bp, Zea mays
  Clone ID: LIB3061-059-P1-N6-C12
ggaaatgtaacttcttatttctaggaggccacatacatcagccaaaaaacttcattattgaattacaactaataagcaatctaaaagatggcaccgccaatgatgtgttgttggtagaaggctgctgggtttgtcaaagcaagttggacaaagggcagcaactgttgcagttgtaagagggttgcggggttagccacaaactgctggtagaacggaagcaattgttgttgtttcaaaaaggaagtggggcttgttgtagctagctggccaaatggtagtagtatttgctgctggaaataagcagaggggttcagtgcggccaattggttaaatggaagaaattgttgctgctgagagtaggcagtagctagctggctgaatggtagtagttgttgttgttgtaaataagcagcagggttcagtgtagacagttggttgaatggaagaaattgttgttgctgagagtagggagaaaggtttgccagagctacttggctgatcactggtagcacgagttgttgcagctgttgtgccctgatggtttgtaccaatgactgcaccaaagatagggctggc

SEQ ID NO: 5926 - DNA, 500 bp, Zea mays
  Clone ID: LIB3061-059-P1-N6-C2
gacgaaatacatttgacacgggatacatgcatgcacgtactgatgtacaaaccagaaccgagatgatctgatgacctgacgatgatgagcagacgatggactgactagctagctactaggtacaccaacgtacgtagtatacgtggtacgtcaacacacaccatatatatatatatggggtactacttaattaaccgtcatcacactccagcagcgcctgatatggtgacacatgtacgagctgcatcgatcagaatcctcagaccctggtgacccccttgggctcgccggccgcgccgccgacgccgtagtcgtggtcccggtagccaccgctgccgccgaagaggcccgtgtggagcatgagcacgtagaggagctgcgtgaaggcgaggatgatgacgaagggctccagcacgcgcaggcgccagccggggtgtccgccgattgtggatctccttgcaggccagcccgaaggcagcgccgtgatggcccaggcgatg

SEQ ID NO: 5927 - DNA, 398 bp, Zea mays
  unsure (1)..(398): unsure at all n locations; Clone ID: LIB3061-059-P1-N6-D1
tttttttttttttttttttttttttttttttttttttttttttttttttttttttttttttttttttttttttttttttttttttttttttttttttttttttttttttttttnnnnnnnnnntttttttttttttttattnngggggtttgtttggaaaagggtttttttttttttttttgggtttttttttatttttaaaaaaaaatattgttagaaaaattggaaaaaaaaaaaattttttatttttgggggggnaagaaaaaataaataaangggattttttttgaaaaaaaaaaatggagtttatttttttggggttaggattttttngggaaaaaataaaaaaaaaaattttnaaaaatttttttaaaaataggggggggggnntttttttt

SEQ ID NO: 5928 - DNA, 366 bp, Zea mays
  Clone ID: LIB3061-059-P1-N6-D9
aaatctcaatcaatatattgattatttctagagaacacacgtcggtatgatggcaccattatcgagtacatctcatatgtaatctaaaagatggcacctccaacgatgggttgctgcctcgacaagacaggattcatcatagagaactcggttgtatggcagcaattgttgctgctgtaggaatgcggcgaccaatgggttagccactaccaatggattaagtaactgttgtcgctgttgtaggtacccaacaaagttcgacagagtcagttggttgaatggaagcagctgttgcaagtaggcaacagggtttgccacaactagttgagtcaaagctggtacaatctgttgaacaattgttgttgc

SEQ ID NO: 5929 - DNA, 494 bp, Zea mays
  Clone ID: LIB3061-059-P1-N6-F12
gtcatggactcccccacagaggaacaatggccccgaacggccaagattacgggaaaagaactgtcacaaactcttgagggccaatcagcaatataaatggggaaaactgactcatggttaacgggggcgccgattcatcagccaaaaaactttttttttggaattccagccaaaagcctttctaaaagagggctccgccaacgaattcttgcagggcaaaaggctgctggcttttcaaaatcatggtgataaaagggcactaactgaaacagttataagagggcagggggatacaccacaaactgctggagaaacgaaagcaatggctgtggttccaaaagggaaggggggcttgtattaactggctggccaaaagggagtagtttttggtgcggaaaataagcaggggggttcagggcggccaattggttaaatggaaaaaattgttgcttgtgaaagtaggcactatctcgctggctaaatgggaaaagttg

SEQ ID NO: 5930 - DNA, 142 bp, Zea mays
  Clone ID: LIB3061-059-P1-N6-F3
ggaaaaaaatctaaaacaaaattttgattatttttagaaaacacatcccggaatgagggccccattttcgagtacatttcatttttaatctaaaaaatggcccctccaacaatgggttgtttccttaacaaaacccaaccct

SEQ ID NO: 5931 - DNA, 404 bp, Zea mays
  Clone ID: LIB3061-059-P1-N6-F7
ccccccccccccccccctttccttttttcatccaattcctttattattggtttccaactatataagcaatctaagagttgcaccaccaatgatgtgttgttggtagaatgccgctcggtctgtcaaagcaatttggacaaagggcaacaattgttgtagttgtaagagtgttgcggggttagccgcaaactgctggtagaaaggcagcaactgttgctgtgtcaagaaggaagcacggtttgctgcagctagctggctaaatggtagtagtatttgctgctgcaaataagcagcggggttcagtgcggccaattggttaaatggaaaaagtttgttgttgctgagagtaggcagtacctagctggctgaatggtaataagttgttgctgcaaataagcagcagg

SEQ ID NO: 5932 - DNA, 57 bp, Zea mays
  Clone ID: LIB3061-059-P1-N6-G10
ccaatcatcttttttccttatatattattcctttccatttcaatggttcattcaggt

SEQ ID NO: 5933 - DNA, 516 bp, Zea mays
  unsure (1)..(516): unsure at all n locations; Clone ID: LIB3061-059-P1-N6-G11
cagataaaaaactttattattgaactataactcataagaaatctaaaagagggcaccaccaatgatgggttgttggtagaacactgctgggtttgtcaaagcaagttggttgaatggcagcaattgttgcagttgtaagagggtgccagcgttaggcgcaacgtgctggtagaacggcaacaactgtggttgtgtcaagaaggtagcagggctcacaccagctagctggctgaatggtagtagttgttgctgctgtaaataagcaggagagttcaatgctgctagttggttgaatggaagaaattgctgggggtaggcagcaggtagctggctgaatggtagttgttgttgttgcaaataagaagcagagttcaatgaacctagttggttgaatggaagaaactgctgttgctgagagtaggcagcaaggtttgctagcacaagttgttgtagttgttgtgccctgatgttttgtgccaataaatgcancaaaggtaactgttgtaatagggctga

SEQ ID NO: 5934 - DNA, 513 bp, Zea mays
  Clone ID: LIB3061-060-P1-N6-A3
ctgttcccaatcaactacattactcagtaattttaattgtgcactgaaaaccaaaaccgcatataggtctcaaaaaactctaaacattggtaaaacaggaaccgatacgactgccagcaacataaaagtttccagcgcagagtgcaccaggatacaagctccgttcaacggttggccttggcaacacgctcaatctcgtccttcttcttgatggcgtaactgttggatgagcccttggcagcgttgatcagctcatctgcaaggcactcggcaatggttttgatgttccggaaagcactctccctggcaccagtggtgaggaggtagatggcctggttcaccctcctcaggggtgagatatccacggcctgcctcctcacaacaccagcggaaccaatacgggtggcatcctcacggggtccactgttgatgatcgcgtcgacgacgacctggatggggttggcatcggtgagcaggtgaatgatctccagggtatgcttgatgatgcggaca

SEQ ID NO: 5935 - DNA, 565 bp, Zea mays
  Clone ID: LIB3061-060-P1-N6-A8
acgacttggaaacacggatccagaaaaaggttttctgagcccagctcacacagcacaccatctgactggattagtacatcaaacaaacgtatccatatttttcttcaccaatctatgcccaaattccttgaggtgaaaaggtcatcaacatagcagattactggagctgatgacctgacaaagttctgcatttggacctttgctgattcctcatcttcattcaatttcttcaacagctgggactttgagggaagggcgtacattccagcagaaactgctttccttattgcccatccatggtgaggagcaaagacctgagcataagccaccgatgctgcatcccttagtgagttgccctctgtgacaagaatttgctcaaacaggactttaaccatatcaatcccgcgcttcactctaagcagattccttgtatggctccctggtttcctgacagtgtcggtctgaatgtctcgctcaaccatagaaggcaatgttgaaattgacttggacgcctccaccaaatcatcaaccttggcgacgtagtccatctccgcgaacttgaaag

SEQ ID NO: 5936 - DNA, 138 bp, Zea mays
  unsure (1)..(138): unsure at all n locations; Clone ID: LIB3061-060-P1-N6-C4
aagaatctagaaatgtactttcttatttctgggaagcccacaaacatcagaccaaaaactttattattgaactataactcataagaaatctaaaagagggcaccaccaatgatgngtttgttggtagaacgctgctgg

SEQ ID NO: 5937 - DNA, 139 bp, Zea mays
  Clone ID: LIB3061-060-P1-N6-D1
agacatccatatataaaatttcgacaacatcttctttgcaaaatagcataaaggagggggcaacagtgtataaacatgtatcatgacaaaaaacatactaagtattattaaacggcttgcagtggacagttataacata

SEQ ID NO: 5938 - DNA, 460 bp, Zea mays
  Clone ID: LIB3061-060-P1-N6-D10
attattattaatactatttattgctgtcacgttacatgacaccacattacatgcatgcacggtacgtaggttgtgcacagctagccaagggtgttacttagtactactagagttcagttctggcaagccaagggtgtttgaagatctttgcttagcacgccttctggcacctgcagtagcggaggtggcagtagccggcggtccacccgccgtcctccttgacgcactcgttgctgcagaggcggtcggagatgcaggggaacgagtggtgctggctcttgcccatgcacacccgggcctccgccaccatcgtcgtcgtcgtcccgccgtcgtagtgtgagagcaggagcagcgccaggaggagcgcgcacacggtcgccctggacttgatgagctccatcgccggccggcgtggatcggatcagtgttattacggacgggaccggagacgcgcgcggac

SEQ ID NO: 5939 - DNA, 386 bp, Zea mays
  Clone ID: LIB3061-060-P1-N6-D2
agaaatggacctttcttatttctgggaagccacaaacatcagacaaaaaactttattattggactataactcataagaaatctaaaagagggcaccaccaatgatggggttggtgggtagaatggctggctgggtttggcaaaagcaaggttggttgaaatggcagcaattggtggcagttgtaagaaagggcccagcgttagggcgcaacgtgctggtagaaacggcaacaactggtgggtgtgtcaagaaggtagcagggctcacaccagctagctggctgaatggtagtagttgttgctgctgtaaataagcaggagagttcaaatgctgtcagtgggttgaatggaagaaattgctgggggtaggcagcagatagcctgctg

SEQ ID NO: 5940 - DNA, 427 bp, Zea mays
  Clone ID: LIB3061-060-P1-N6-D5
ccaatcatcttttttccttatatattattcctttccatttcaatggttcattcaggtcattgctcacactgccacccatggtgatgggtgacactacgttactcatcgccgctaaatgagtaaactagcgagctaggtagctagtcagcggctccattacattattactacagtacatagtttcctcagtagtagacaccgccggcagctgcgttgcaagggcagggacctggctgctgcagctgcaggccgcacatcgccgtcagctgctgcgctacctgggccgccatcagcgccgcgagctcgccctgcggctgctgctgcaggaaggactgcaggaccacaccgtatgtcgcctggtaccggtgcagcggctccacctgcctgatctggtggcagcactgctgctgcagcgcctggcactgtg

SEQ ID NO: 5941 - DNA, 420 bp, Zea mays
  Clone ID: LIB3061-060-P1-N6-D8
ctattatgtcattttttgtcatggacttctccacagagaaacaagggccccgaaagaacatgataacgccagaagtaccgtcaccaaggaattggggttagccaacagaaacagcggtgctgtctgaataatgggggattcccaagataaaccccaatgcaaataccgaccaaaaaggggcccgaaaaaaagaaccaaagccaaattttctgagggtgccaatcccgcaaggataagccctgtccccagtgttaaaaaaccaaaataggcgcaaactgtggggcccagatgtccaataacaaacctgcacaacttttaaaacccctgcttagagaggaaagtccggagtgtctaaaaagtgggcgcaaaaaaaaaaaccgaaggtaaattactgacgggttgcaaaaccccaagcgggcc

SEQ ID NO: 5942 - DNA, 535 bp, Zea mays
  unsure (1)..(535): unsure at all n locations; Clone ID: LIB3061-060-P1-N6-E1
cttcaattgcaaacaccactaatgtcattgctgctgcatggattattttggtagtatgagtggtacaagccgcacattgatggtaggtattgtgctgctgtcaagattgccaccgcactttgagtagcttgttgagatccacataactcacatggttgttgttgttgctcctcctggattatggattgaaccatgttgtagattgcttggtgaatgtattgtggctcaatctgcctaagatcatgacaacattgttgctgcaatacctggcagctacttggttgtatcaaacgtgattggagaaaaggcattaccaaagggctgcactgctgccttaggaattcatgacaattttttagatttgagctactgctatagtagttatagctgcaccttgtagtctgttgctgctcctggcaatgacattgttgctgttgtgattnttcctggccctgctgatattgctgaggctgttggggttgttgctgcttgtcatgaccctggaattgntgttgatgttgttgctcatggctct

SEQ ID NO: 5943 - DNA, 500 bp, Zea mays
  unsure (1)..(500): unsure at all n locations; Clone ID: LIB3061-060-P1-N6-E5
aaacagggtagctaagcaaattttcaagcaaatacttcatgtgagtagtcctgtattcactcaatgggaatagaatggcgtcttgcatttgcacttctcgaaggaaccaaaaccaatacgtaaggttctgcatctaggagttccaacaattcagcataacacgaatagcaaaacctgacaacgcttaacaataaaacgtcataccaagtcctaaagttcattatttncaaatatcttggttgataatgcacctaaataggatcctgcccccctcaagcatcatagctttggctgccaccaccatagccaccacctccgtagccgccgccacctccgtagccaccacctccatagccgccgccgccatagccaccaccaccacggttcccagcaggtctctcattagccatgttgacacgtacctgccgcccatcaatttccttgccatccattgcagaaatagcttccttggcagcatcactggcggaggagttcacaaa

SEQ ID NO: 5944 - DNA, 396 bp, Zea mays
  Clone ID: LIB3061-060-P1-N6-G6
gagtacatacctgcagtgtacaattttcgtccaaatagttcgacatttttaccaggcacgcacttactgccaggattatatctctagcatgatttcatggatcaacagcacgggcagctacatcactgagcttaatgggtggttttgggaaatattatatgaaaaagggccatactggaacaaccaaaccagccccagtcgtcattctacggcagcgttcccgtcgattggggcagcgatgccagccagccagggcctgaaccgggcggcgggaaaagtcagtttccttggcggagaagcagcccagcgtctacctctggggatcagggtccaccagcccgaagaaccccccagccgaatgggtcccctaccccgagccgctaggagtggtgggcg

SEQ ID NO: 5945 - DNA, 57 bp, Zea mays
  unsure (1)..(57): unsure at all n locations; Clone ID: LIB3061-060-P1-N6-H11
agaaatatatcgagataaatctcaatcaatatatttgattatntctaggaaacacat

SEQ ID NO: 5946 - DNA, 551 bp, Zea mays
  Clone ID: LIB3061-060-P1-N6-H2
cgacaacacggttcaacaatatatagaaagtcgaattaaagcattacagctagctgcaaacgctgttcaagaaccaaaagcaacaaaacatgatgataaaacgtcttgggaaggtagctctatatccttgcagataaaaataaaactagacatagcaaaaagctccaagcagcacattcagagaacttatgccttggcagcagcctgggcagcaaagtcgcgcctcctctgctcctcgatgatgctgagcttgatacccttgcccttgggcaggctcacccacggcttgttgcccttgccaatggtgaacacgttgcccatgcgggtggcgaactggtggcccatggagtcctcgacgtggatggtatcgaagccgcccttgtgcttctccctgttcttgatcacacctacacgcccggtgttcctcccgccggtcaccatgaccacgttgccgacgtcaaacttgatgaagtccatgatcttgttggtctccagatcgatcttgatggtgtcgttggccttgatgagcgggtcggggtagcggatggtac

SEQ ID NO: 5947 - DNA, 57 bp, Zea mays
  Clone ID: LIB3061-060-P1-N6-H4
tttttttttttattttttttttttttttttttttttttttttttttttttttttttt

SEQ ID NO: 5948 - DNA, 518 bp, Zea mays
  unsure (1)..(518): unsure at all n locations; Clone ID: LIB3061-060-P1-N6-H6
aaagcttgttactcccaatcttaggaaaagtaattatcgaacacccttggagaccaatatcacattagaatctggaaatgtaacttcttatttctggttggccacatacatcatccaaaaaactttattattgaattacaactaataatcaatctaaaagagggcaccaccaatgatgtgttgttggtaggaggctgctgggtttgtcaaagcaagttggacaaagggcaacaattgttgtagttgtaagagggttgcggggttagccgcaaactgcttgtagaaaggcagcaactgttgctgtgtcaagaaggaagcacgacttgctgcagctagctcgctaaatggcagtagtatttgctgctgcaaataagcagcggggttcagtgcggccaattggttaaatggaagaagttgttgttgctgagagtaggcagtagctagctggctaaatggntaatagttgttgctgcaaataagcagcagggtttcagtgtagacagttagttgaatggaag

SEQ ID NO: 5949 - DNA, 602 bp, Zea mays
  unsure (1)..(602): unsure at all n locations; Clone ID: LIB3061-062-Q1-K6-A1
gtgcccaactagcaacatagnaaagcacaatagtgtaccaacaatggcagccaaaatattttgcttccttatgctccttggtctttctgcaagtgttgctaccgcaaccattttcccacaatgctcacaagctcctatagcttcccttcttcccccatacctctcaccagcggtgtcttcaatgtgtgaaaacccaattgttcaaccctacaggatccaacaggcaatcgcaacaggcatcttaccattatcacccttgttcctccaacaaccgtcagccctattacagcagttacctttggtccatttggtggcacaaaacatcagggcacaacaactacaacaacttgtgctagcaaaccttgctgcatactctcagcaacatcagtttcttccattcaaccaactggctgcattgaactctgctgcttatttgcaacaacaattaccattcagccagctagttgctgcctacccccagcaatttcttccattcaaccaactagcagcattgaactctgctgcttatttacagcagcaacaactactaccattcagccagctagctgatgtgagccctgctgccttcttgacacaacaac

SEQ ID NO: 5950 - DNA, 591 bp, Zea mays
  unsure (1)..(591): unsure at all n locations; Clone ID: LIB3061-062-Q1-K6-A10
gcttctgcttgctctggggggaaggagagagagagagcgagagagagagagagatctagtagagaggctagtaggtggtcctcgacgaantgttggcggtgttcagcgggcaggtggtggaggtgccggcggagctggtggcggcgggcagccggacgccgtcgcccaagacgaaggcgtcgcagctcgtggggcgcttcctggccgcgtccgagccggccgtgtccgtgcagctcggcgaccacggccacctcgcctactcccacaccaaccaggcgctcctccgccccaggtcgttcgcggccaaggacgaggtgttctgcctgttcgaaggggtgctggacaacctgggtcggctgagccagcagcacgggctgtcaagcaagggcgccaacgaggtgctcctcgtcatcgaggcctacaagacgctgcgcgaccgcgcgccctacccggccagcttcatgctcgcccagctcaccggctcctacgccttcgtcctcttcgacaagtccaccaactccctgctcgtcgcatctgaccccgagggcagggtgccgctcttctgggggatcaccgccgacggctgcgtcg

SEQ ID NO: 5951 - DNA, 602 bp, Zea mays
  unsure (1)..(602): unsure at all n locations; Clone ID: LIB3061-062-Q1-K6-A11
ttttgnaaacccagctcttcagccctataggctccaacaagcaatcgcagcaagcaacatacctttatcacccttgttgtttcaacaatcgccagccctatctttggtgcagtcattggtacaaaccatcagggcacagcagctgcagcaactcgtgctacctgtgatcaaccaagtagctggggcggacctttctccctactctcagcaacaacaatttcttccattcaaccaactgtctacactgaaccctgctgcttatttgcagcaacaactattaccattcagccagctagctactgcctactctcagcaacaacaacttcttccatttaaccaattggccgcactgaaccccgctgcttatttgcagcagcaaatactactaccatttagccagctagctgcagcaaaccgtgcttccttcttgacacagcaacagttgctgcctttctaccagcagtttgcggctaaccccgcaaccctcttacaactacaacaattgttgccctttgtccaacttgctttgacagaccgagcggcctcctaccaacaacacatcattggtggtgccctcttttagattgcttattagttgtaat

SEQ ID NO: 5952 - DNA, 127 bp, Zea mays
  Clone ID: LIB3061-062-Q1-K6-A12
tccacacattgtatatgtggaagggccaaaattgaggatgttgattttttggatgcgatgatttacgaggcaaaaacgactagtgaaatggaagaggtgatgctcaaaggtctgaatagagtttcat

SEQ ID NO: 5953 - DNA, 610 bp, Zea mays
  unsure (1)..(610): unsure at all n locations; Clone ID: LIB3061-062-Q1-K6-A2
gcgtttttctanaaacacaccaagcgagcgcactagcaacaacctaacaacaatggctaccaagnaattatccctccttgcgcttcttgcgctttttgcgagcgcaacaaatgcgtccattattccacaatgctcacttgctcctagttccattattccacagttcctcccaccagttacttcaatggccttcgaacacccagctgtgcaagcctataggctacaacaagcgattgcggcgagcgtcttacaacaaccaattgcccaattgcaacaacaatccttggcacatctaacaatacaaaccatcgcaacgcaacagcaacaacagttcctaccagcactgagccacctagccatggtgaaccctgtcgcctacttgcaacagcagctgcttgcatccaacccacttgctctagcaaacgtagttgcaaaccagcaacaacaacaactgcaacagtttctgccagcgcttagtcaactagccatggtgaaccctgccgcctacctacaacagcaacaactgctttcatctagcccgctcgctgtggccaatgcacctacatacctgcaacaagaattgttgcaacagattgtaccagctctaact

SEQ ID NO: 5954 - DNA, 628 bp, Zea mays
  Clone ID: LIB3061-062-Q1-K6-A6
ctcaatgatagtttaacaccatcttcgaatcatgattccattaccgagggagtggactctagtagcaaaattaatttttcgtatgatgaagaacagaaggtctggatcccacaagataaaaaggatgaaattgtcttgattcttgttcagaggcagaaagaactgcaagcacatatgcatgactggacagactgggcccagcagaaagtgatgcaggtcgcacaccgacttgcaaaggagaaggatgaacttcagtcactcaggaaagagaaggaagaggctgaccgcctgcaagaggagaggcaccatttggaagagagtactcggaaaaagcttctggagatggagtctgcaatttctagggcaaatgctcagctggagaaagcagaagcttctgctcgcagacgtgaggttgagaatgcacaactcacgttacagatggaagctgcaaagcgacatgcagcagagtcagcaacaaatatttcagagcttttaaagaaagacgagaacagccgtaaaaggtctcagcgttgggaatctgatagagccctattacaagaggaacttgcagcacaaaagagcaggttattttcgggttcaagaacaactccagcatgctaaagaacta

SEQ ID NO: 5955 - DNA, 428 bp, Zea mays
  Clone ID: LIB3061-062-Q1-K6-A9
cttggttgtgaaacccaatcttcaaccctacaggatccaacaggcaatcgcagctggcatcttacctttatcacccttgttcctccaacaatcatcagccctattacagcagttacctttggtgcatttattggcacaaaacatcagggcacaacaactacaacaacttgtgctagcaaaccttgctgcctactctcagcaacagcagtttcttccattcaaccaactagctgcattgaactctgcttcttatttgcaacaacaacaactaccattcagccagctatctgctgcctacccccagcaatttcttccattcaacccatcattggtggtgccctcttttagatttcttatgagttatagttcaataataaagttttttgtctgatgtttgtggcttcccagaaataagaaagtacatttct

SEQ ID NO: 5956 - DNA, 463 bp, Zea mays
  unsure (1)..(463): unsure at all n locations; Clone ID: LIB3061-062-Q1-K6-B1
ccgggtcgnacccacgccgttctgtcnacactgnaaccctgctgcttatttgcagcaacaactattaccattcagccagctagctactgcctactctcagcaacaacaacttcttccatttaaccaattggccgcactgaaccccgctgcttatttgcagcagcaaatactactaccatttagccagctagctgcagcaaaccgtgcttccttcttgacacagcaacagttgctgcctttctaccagcagtttgcggctaaccccgcaaccctcttacaactacaacaattgttgccctttgtccaacttgctttgacagaccgagcggcctcctaccaacaacacatcattggtggtgccctcttttagattgcttattagttgtaattcaataataaagttttttggatgatgtatgtggccaaccagaaataagaagttacatttccagattttaatgtg

SEQ ID NO: 5957 - DNA, 565 bp, Zea mays
  Clone ID: LIB3061-062-Q1-K6-B11
catcaatcatcattcatcttagtagtgtaggcaccaaatcaaatctgcaacatcaattatctaactccaaaaaccatgaagctggtgcttgtggttcttgctttcattgctttagtatcaagtgtttcttgtacacagacaggcggctgcagctgtggtcaacaacaaagccatgagcagcgacgtgatccacaacaacatcatccacaaaaacaacaacatcaaccaccaccacaacatcaccagcagcagcaacaccaacaacaacaagttcacatgcaaccacaaaaacatcagcaacaacaagaagttcatgttcaacaacaacaacaacaaccgcagcaccaccaccaacaacaacaacaacagcaccaacaacaacatcaatgtgaaggccaacaacaacatcaccaacaatcacaaggccatgtgcaacaacacgaacagagccatgagcaacaccaaggacagagccatgagccacaacatcaacaacaattccagggtcatgacaagcagcaacaacccacacagccttaagaatatcagcagggccaggaaaaat

SEQ ID NO: 5958 - DNA, 608 bp, Zea mays
  unsure (1)..(608): unsure at all n locations; Clone ID: LIB3061-062-Q1-K6-B12
gcgttcgtttttgagcttcanaacacaccaagcgaagcgcactagcaacgacctaacaacaatggctaccaagatattagccctccttgcgcttcttgccctttttgtgagcgcaacaaatgcgttcattattccacaatgctcacttgctcctagtgccattattccacagttcctcccaccaggggcgggaatgggcttcgaacacctagctgtgcaagccaacatgcaacaacaagcgcttgcggcgagcgtcttacaacaaccaattgcccaattgcaacaacaatccttgcgccatctaacaatacaagccatcacaacgcaacagcaacaacagttcctaccagcactgagccacctagccatggtgaaccctgccgcctacttgcaagagcagctgcttgcatccaacccacttgctctggcgaacgtagttgcaaaccagcaacaacaacagctacaacagtttctgccaacgctcagtcaactagccatggtgaaccctgccgcctacgtacaacaacaacaactgctttcatctagcccgctcgctgtgggcaatgcacctacatacctgcaacaacaattgttgcaacagattgtac

SEQ ID NO: 5959 - DNA, 582 bp, Zea mays
  Clone ID: LIB3061-062-Q1-K6-B4
gaagcacaatagtgtaccaacaatggcagccaaaaattttgcctccttatgctccttggtatttctgcaagtgctgctacggcgaccattttcccgcaatgctcacaagctcctatagcttcccttcttcccccgtacctctcaccagcggtgtcttcggtatgtgaaaaacccaattcttcaaccctacaggatccaacaggcaatcgcagctggcatcttacctttatcacccttgttcctccaacaatcatcagccctattacagcagttacctttggtgcatttattggcacaaaacatcagggcacaacaactacaacaacttgtgctagcaaaccttgctgcctactctcagcaacagcagtttcttccattcaaccaactagctgcattgaactctgcttcttatttgcaacaacaacaactaccattcagccagctacctgttgcctacccccaacaatttcttccattcaaccaactggcagcattgaactctcctgcttatttacagcagcaacaactactaccattcagccagctagctggtgtgagccctgctaccttcttgacacaacc

SEQ ID NO: 5960 - DNA, 586 bp, Zea mays
  unsure (1)..(586): unsure at all n locations; Clone ID: LIB3061-062-Q1-K6-B5
ttctttaacatagnaaagcacaatagtgtaccagcgagggcagccaaaaattttgcctccttatgctccttggtctttctgcaagtgctgctacggcgaccattttcccgcaatgctcgcaagctcctatagcttcccttcttcccccgtacctctcaccagcggtgtcttcggtatgtgaaaacccaagggttcaaccctacaggatccaacaggcaatcacagctggcatcttacctttatcacccttgttcctccaacaatcatcagccctattacatcagttacctttggtgcatttattggcacaaaacatcagggcacaacaactacaacaacttgtgctagcaaaccttgctgcctactctcagcaacagcagtttcttccattcaaccaactagctgcattgaactctgcttcttatttgcaacaacaacaactaccattcaaccagctacctgctgcctacccccagcaatttcttccattcaaccaactggcagcattgaactctcctgcttatttacagcagcaaccactactaccattcagccagctagctggtgtgagccctgctaccttttt

SEQ ID NO: 5961 - DNA, 597 bp, Zea mays
  Clone ID: LIB3061-062-Q1-K6-B6
gttcatcaaacggcagtgcgtagagaggatcgtcgaacagaacagtcatgaagaggtcatcgttctcgtcgtgtgcctggctctgtcagctgccagcgcctctgcaatgcagatgccctgcccctgcgcggggctgcagggcttgtacggcgctggcgccggcctgacgaccatgatgggcgccggcgggctgtacccctacgcggagtacctgaggcagccgcagtgcaacccgctggcggcggcgccctactacgccgggtgtgggcagccgagcgccatgttccaaccgctccggcaacagtgctgccagcagcagatgaggatgatggacgtgcagtccgtcgcgcagcagctgcagatgatgatgcagcttgagcgtgccgctgccgccagcagcagcctgtacgagccagctctgatgcagcagcagcagcagctgctggcagcccagggtctcaaccccatggccatgatgatggcgcagaacatgccggccatgggtggactctaccagtaccagctgcccagctaccgcaccaacccctgtggcgtctccgctgccattccgccctactactgattcatgatatttgg

SEQ ID NO: 5962 - DNA, 588 bp, Zea mays
  unsure (1)..(588): unsure at all n locations; Clone ID: LIB3061-062-Q1-K6-B7
tgctgttgtttgccgtgatttgagccgggtggaggtgtctcgcttcttgatcttgagaggtgttcctagttgattgttgggagcgaagaaggcatgataccttctgtgaggatctctcctggctctgcagccttctctggctccagcctacgcttaaaattacattcaattccatccatctctagtctcaaaccctccaaatatgtggtctcctcgctgaaaccactctacctagcaccgctagatggtccacacacttctgagcttaagtcttggagacaaccacttgagttccgttgtgctgcttctgctgccgatgacaaggagtcaaagactcaggtggtgccagttcagttggaaggcgcacagaggttaaagatctccatctatttcgcgacctggtgggcgcttaatgtgatatttaacatttacaacaagaagggtctcaatgctttcccttacccctggctcacctncacactctcccttgcctgcggctctgcgatgatgcttttctcgtgggccactcgtcttgttgaggcccccaagaccgacctagacttctggaaaatcctttttccggttgct

SEQ ID NO: 5963 - DNA, 584 bp, Zea mays
  unsure (1)..(584): unsure at all n locations; Clone ID: LIB3061-062-Q1-K6-B8
cttctcacagcacatanaagtggaatccagtagcaacaacagagcaacaatggcgaccaagatattttccctccttatgctccttgctctttctgcatgtgttgctaacgcgacaattttccctcaatgctcacaagctcctatagcttcccttcttcccccataccttccatcaatgatagcttcagtatgtgaaaacccagctcttcagccctataggctccaacaagcaatcgcagcaagcaacatacctttatcacccttgttgtttcaacaatcgccagccctatctttggtgcagtcattggtacaaaccatcagggcacagcagctgcagcaactcgtgctacctgtgatcaaccaagtagctctggcaaacctttctccctactctcagcaacaacaatttcttccattcaaccaactggctacactgaaccctgctgcttatttgcagcaacaactattaccattcagccagctagctactgcctactctcagcaacaacaacttcttccatttaacccaattggccgcactgaaccccgctgcttatttgcagcagcaaatactactaccattt

SEQ ID NO: 5964 - DNA, 599 bp, Zea mays
  Clone ID: LIB3061-062-Q1-K6-B9
ttttgagcttcataaacacaccaagcgaagcgcactagcaacaacctaacaacaatggctaccaagatattatccctccttgcgcttcttgcgctttttgcgagcgcaacaaatgcgtccattattccacaatgctcacttgctcctagttccattattccacagttcctcccaccagttacttcaatggccttcgaacacccagctgtgcaagcctataggctacaacaagcgattgcggggagcgtcttacaacaaccaattgcccaattgcaacaacaatccttggcacatctaacaatacaaaccatcgcaacgcaacagcaacaacagttcctaccagcactgagccacctagccatggtgaaccctgtcgcctacttgcaacagcagctgcttgcatccaacccacttgctctagcaaacgtagttgcaaaccagcaacaacaacaactgcaacagtttctgccagcgcttagtcaactagccatggtgaaccctgccgcctacctacaacagcaacaactgctttcatctagcccgctcgctggggccaatgcacctacatacctgcaacaagaattgttgcaacagattgt

SEQ ID NO: 5965 - DNA, 148 bp, Zea mays
  unsure (1)..(148): unsure at all n locations; Clone ID: LIB3061-062-Q1-K6-C1
caatnacattagtggtgtttgcaattgaagaatgtgtctacctagccgttatactcatataacggtgttaagcaataaagtaccatacattatgatgtttgtactatgatatttgaataagaatactaattgtaattataatgctact

SEQ ID NO: 5966 - DNA, 605 bp, Zea mays
  Clone ID: LIB3061-062-Q1-K6-C11
ttaacacaccaagcgaacgcactagcaacgacctaacaccaatggctaccaagatattagccctccttgcgcttcttgcccttttagtgagcgcaacaaatgcgttcattattccacagtgctcacttgctcctagtgccagtattccacagttcctcccaccagttacttcaatgggctgggagacatccagccgtgcaagcctacaggctacaactagcgcttgcggcgagcgccttacaacaaccaattgcccaattgcaacaacaatccttggcacatctaaccctacaaaccattgcaacgcaacaacaacaacaacagtttctgccatcactgagccacctagccgtggtgaaccctgtcacctacttgcaacagcagctgcttgcatccaacccacttgctctggcgaacgtagctgcataccagcaacaacaacagctgcaacagtttatgccagtgctcagtcaactagccatggtgaaccctgccgtctacctacaactactttcatctagcccgctcgcggtgggcaatgcacctacgtacctacaacaacagttgctgcaacaaattgtaccagctctgactcagctagctga

SEQ ID NO: 5967 - DNA, 617 bp, Zea mays
  Clone ID: LIB3061-062-Q1-K6-C12
cggtcggcgacgcatacgttcggggagggagaggaagaagtcagtaaagtaaattctgtcgctccaattcggacgaggagatgccgcggatccctctgatcaggttccccaagcggaatctcaaagccccatctccatccgcgccagcggcgtcgcaacccgcagaccagcgggcggccctcatgttccggttaggggctaaagcagaggcaccatcttctggagagattaaaaattaccgctttagatctgatgtgccttgtccaccttctcatactgctgtaggaggtccagcttcactccttcctaagcgcaaacccctgactgaagaagagattgaggctattatgctggggggctccatttgatatcacctcatatgaattggaaattctaggaacatcaataagattgtatacccgaacttattgcctttgacctctgaaagagtgttattgaagccatgtcgatatggaagtgtgtgttttttttaattcagtctggaagttggctgttgagacatccatttccagtactccgcacatgtaactgagcaaaccgtgaacacatttagttccttgcagaagtgttgagcatggaatggttttgcttttgca

SEQ ID NO: 5968 - DNA, 612 bp, Zea mays
  unsure (1)..(612): unsure at all n locations; Clone ID: LIB3061-062-Q1-K6-C4
nagccaacatagnaagtagaatccattagcaacaatagagcaacaatggcgaccaagatattttccctccttatgctccttgctctttctacatgtgttgctaacgcgacaattttccctcaatgctcacaagctcctatagcttcccttcttcccccataccttccatcaattatagcttcagtatgtgaaaacccagctcttcaaccatataggcttcaacaagcaatcgcagcaagcaacatacctttatcgcccttgttgtttcaacaatcaccagccctatctttggtgcagtcattggtacaaaccatcagggcacaacagctgcagcaactcgtgctacctgtgatcaaccaagtagctctggcaaacctttctccctactctcagcaacaacaatttcttccattcaaccaactgtctacactgaaccctgctgcttatttgcagcaacaactattaccatttagccagctagctactgcctactctcagcaacaacaacttcttccatttaaccaattggccgcactgaaccccgctgcttatttgcagcagcaaatactactgccatttagcgagctagctgcagcaagtcgtgcttccttc

SEQ ID NO: 5969 - DNA, 595 bp, Zea mays
  Clone ID: LIB3061-062-Q1-K6-C5
tccgattcccaggcagcaggtcggcgaggagggcaggaagaccgaagaccgagccgtgcgggggctcgggacgggaacgggacaggaccccaaaatctcagatccttcctgcccgcccgcccgtgcccgtcgacgcgtcgttcttgccggccgcgcctcacctccgccctctcctcctccaggggatcggatacgccacaggctgcgcgatggtgctgtgggtcttcggctacggctccctcatctggaaccccggcttcgacttcgacgacaaaatcctcggcttcatcaagggctacaagcgcacctttaatctcgcttgcattgaccacagaggcacaccggagcatccggcgaggacctgcacgcttgaaaccgacgacgaggccatatgctggggaattgcatattgtgtcaagggtggtccagaaaaagagctaaaagcaatgcagtacttggagagaagagagtgtgagtacgaccagaagatatccattgatttctacaaggaaggagatcccttgaaaccagctgtgacaggcgtcttagtgttcgtttccactccagatccaattggcaacaagtactatcttgg

SEQ ID NO: 5970 - DNA, 626 bp, Zea mays
  Clone ID: LIB3061-062-Q1-K6-C6
tatttatacccaactaccaacatacatagtgaagtacactagcaacatcttagcaccaatggcagccaagatttttgcgctccttgccctccttgctctttcagcaagtgttgctaccgcgactattattccacaatgctcacaacaatacctctctccagtgatagccgcgagatttgaatacccatctatacaatcctacaggctacaagaggccatcacagcaagcatcttacggtcgttagcattgaccgtccaacaaccatatgccctattgcaacaaccatccttagtgaatctgtatctccaaagaatcacagcacaacaactacaacaacggttgcttccaacaattaatcaagtagttgcagcgaaccttgctgcttaccttcagcaacaacaatttcttccattcaatcaactagctggggtgaaccctgctgcttacttgcaggcacaacagctactaccattcaaccaacttgtcgggagccctgctgccatcttattgcagcaacagttgctgccattccgtctacaagttgttgcaaacattgctgctttcttgcaacaacaacaattgctgccattttacccacaggttgtgggaaacattaacgccttct

SEQ ID NO: 5971 - DNA, 607 bp, Zea mays
  unsure (1)..(607): unsure at all n locations; Clone ID: LIB3061-062-Q1-K6-C7
agcaagcaacatagnaagtagaatccattagcaacaatagagcaacaatggcgaccaagatattttccctccttatgctccttgctctttctacatgtgttgctaacgcgacaattttccctcaatgctcacaagctcctatagcttcccttcttcccccataccttccatcaattatagcttcagtatgtgaaaacccagctcttcaaccatataggcttcaacaagcaatcgcagcaagcaacatacctttatcgcccttgttgtttcaacaatcaccagccctatctttggtgcagtcattggtacaaaccatcagggcacaacagctgcagcaactcgtgctacctgtgatcaaccaagtagctctggcaaacctttctccctactctcagcaacaacaatttcttccattcaaccaactgtctacactgaaccctgctgcttatttgcagcaacaactattaccatttagccagctagctactgcctactctcagcaacaacaacttcttccatttaaccaattggccgcactgaaccccgctgcttatttgcagcagcaaatactactgccatttagcgagctagctgcagcaagtcgtgc

SEQ ID NO: 5972 - DNA, 603 bp, Zea mays
  unsure (1)..(603): unsure at all n locations; Clone ID: LIB3061-062-Q1-K6-C8
cantacagaaatttctgtgagggtgagcctattaagagggaggatgaggaaagactcgatgaagttggctacgatgatgttggtggagttagaaagcagatggcccaaatcagagaactggttgaacttcccctgcgtcacccccagcttttcaagtctattggtgtgaagccaccaaagggaatattgctgtatgggcctcctggctctggcaagacccttattgctagagctgtagctaatgagacaggtgctttcttctttttgatcaatggaccagaaatcatgtcaaagctagcaggagaaagtgaaagcaatctcagaaaggcatttgaagaagctgagaaaaatgcaccttcaatcatttttattatcggtgcaactaacagaccggacatcattgacccagccttgctgaggcctgggcgtcttgatcagcttatctatattcctctgcccgatgagcagtccaggcttcagatcttcaaagcctgtctcaggaagtctcctgtggccaaggatgttgacttgaatgctctcgccaaatacacccagggtttcagaggtgcagatatcacagagatctggcagcgcgcatgcaag

SEQ ID NO: 5973 - DNA, 630 bp, Zea mays
  Clone ID: LIB3061-062-Q1-K6-C9
gcgttctgcttcttgcccttttagtgagcgcaacaaatgcgttcattattccacagtgctcacttgctcctagtgccagtattccacagttcctcccaccagttacttcaatgggcttcgaacatccagccgtgcaagcctacaggctacaactagcgcttgcggcgagcgccttacaacaaccaattgcccaattgcaacaacaatccttggcacatctaaccctacaaaccattgcaacgcaacaacaacaacaacagtttctgccatcactgagccacctagccgtggtgaaccctgtcacctacttgcaacagcagctgcttgcatccaacccacttgctctggcgaacgtagctgcataccagcaacaacaacagctgcaacagtttatgccagtgctcagtcaactagccatggtgaaccctgccgtctacctacaactactttcatctagcccgctcgcggtgggcaatgcacctacgtacctacaacaacagttgctgcaacaaattgtaccagctctgactcagctagctgtggcaaaccctgctgcctacttacaacagttgcttccattcaaccaactggctgtgtcaaactctgctgcgtacctacaacagcgacaac

SEQ ID NO: 5974 - DNA, 621 bp, Zea mays
  unsure (1)..(621): unsure at all n locations; Clone ID: LIB3061-062-Q1-K6-D12
gcgttcttaatgctggntctgcccaagggcagcaggatcccctcctgctaccaacactaggagtactacagcaggtggcccaggagggttgggttcagcagattttggaagtactcttggtgccagtggtggtggctctgatgctaccttcttgactcaagttttgcaaaacccaactatgatgcgggtgatgcagaacattatgtctaatcctcagtccatgaatcagctgcttaatatgaatccaaatgtacgtaacatgatggaatccaatactcaaatgagagaaatgattcagaatccagaatttattcgccagttgacgtctcctgaaacattgcagcaattaatttcattccagcagtctttgatgtcacaacttggccaacaacaaactggacaggagcggacacaatcagcctctggtgcaggcaatgtgaacctcaacaccttgatgaacatgttcagtgggcttggtgctggtggtggcctangtgttccaaatgctcctaatgtgccaccagaagaactgtatgcaacacaattagctcagctccaagaaatgggtttttttgacacacaggagaacatccgagccttggccgccactgctggaaatgt

SEQ ID NO: 5975 - DNA, 616 bp, Zea mays
  unsure (1)..(616): unsure at all n locations; Clone ID: LIB3061-062-Q1-K6-D2
attgcttatggattgtgggngatggaaccactctgttcaacagcaattctgtttggcaaaatattgtcaaggacacaagggatagaggttgttttttaaatgccactgatgagaaggagttgttgaatgcaattttcaagcttgctgttgagtatcctcacgcggacaatttagctggcgaggagacaaggcagcgattgagtaccaggatgagtctattcaatgtcgctgaggcaacaattacaagatcctagaagaaaacccgtggcagctctacactacaataagggtgataaatatgtctcgcccaatggaagatatcatatttagacatgatcaaggtagcaagatgttgaccccatgggtccttttggtggaataatgatagagtgcggcaccaatcaacctattgagaaagtgcttgcagctgaagatgcagcgcgaggatgctgcagcattcgaacagtgccaacgagctgctcttgcgccggaagctggaggagcagcagcaggctgccgaacttcagcacgccattgagctccagagccgccgcctcatggatctccagctgctcggcctcaaggctcgcgcagctgcgacagcagcagcggcatc

SEQ ID NO: 5976 - DNA, 618 bp, Zea mays
  Clone ID: LIB3061-062-Q1-K6-D3
atctccaactcgtcacttcgcttccccacttctccattccattgcggttctgcgagcccctacctccctgtggtgcttggccatggcggactaccacttcgtgtataaggacgtggagggggcgagcacagagtgggacgacatccagcgccgcctcgggaacttgcccccgaagccggagcccttcaagccgccgcccttcgccccgaaggttgacgccgacgagcagcccaagtccaaggaatggcttgacgtgcgcgagcccgaagagctcgaggaactagaggacgatctggatgacgaccgcttcctcgagaagtacaggaagatgaggctcgcagagctgagggaagccgcaaaagccgcgcgatttggtactatacttcccatcactggctccgacttcgtgcgggaggtatcgcaggcacaatcagatgtttgggttgtggtcttcctctacaaggatgggatacctgaatgtggattgcttcagaattgtttggaagaattggctactaggtatccagcgacgaagtttgttaaaattatctccacagactgcatccccaactacccagataggaatgttcctacaatactggtgtataacaacagtgc

SEQ ID NO: 5977 - DNA, 611 bp, Zea mays
  unsure (1)..(611): unsure at all n locations; Clone ID: LIB3061-062-Q1-K6-D5
gttccggcccaccacgcggntgggctcgggcgacccggcggccgaccccctttcttccttcctccgccaccccggcgcgttctccttctcccgtcgcgtcgccatggcgcgcgacgccaccgccacatccgtgccagcgctccgcccctggcttgttgacctcctcccgctcctcgtcgtcctcctcatcgccgcccacgtcctcgctctcggttactggatctacaggctcgccacggacgggtccaggcagcccgcgcggagcaagaagcactaaggggacggcgcccgcggccggatgcttgaaaccagtttgttatttcagtcctgcatccttggcttgttgatctccaagccttccaacgtcagatgatggcgtggaaagttcctgaaagaactagaacagggaaccgatcttatccaatggtttgttcagatgttggtgtcaaaagtgacgatagctgaatagctgatatgtggaaggaggcccttttgagcataaatagttttcggttgctggataggtttgacatctctcgacctctccgtgtaaagaacagtagctagacagatgtgccgtttcataatgttgtggcctggcgggcttttgt

SEQ ID NO: 5978 - DNA, 111 bp, Zea mays
  unsure (1)..(111): unsure at all n locations; Clone ID: LIB3061-062-Q1-K6-E1
ctagcacatanaagcacaatatgtaccaacaatggcagctaaaatattttgcctccttatgctccttggtctttctgcaagtgctgctacggcgaccattttcccacaatg

SEQ ID NO: 5979 - DNA, 601 bp, Zea mays
  Clone ID: LIB3061-062-Q1-K6-E11
gcgttctttggagctggaaatcaacccacgggtcatgtcgagctaacaaattccgatgagaaactggccaatcttgcagaagacaagaatcggcgactttcagatgcaagccagttaagaacaggttcaaacccaatggttgatgttgagctaacaaatttcgatgagaaactggccaatcttgggggaaggcaagaatcagcgactttcagatgcaagccagttaagaacagggtcaaacccaatgggtgatgttgagctaacaaatttcgatgagaaactggccaatcttgcagaagacaagaatcagcgactttcagatgccaaccagttaagaacagggaggcttggtgaagaactggtcgagaaatatttggccaaacagctaggttccaacaatgtgaggtgggtgaacaacagaattgaaaccggactgccttatgatattgttataacacacccagagggtgtcacagagtatgtggaggttaaaacaactgtatcttcaagaaaagataggtttgacgtctcagcaagggaatggcagtttgccttggagaaaggggattcatttagcattgctcgtgtcatcttaggtaca

SEQ ID NO: 5980 - DNA, 594 bp, Zea mays
  unsure (1)..(594): unsure at all n locations; Clone ID: LIB3061-062-Q1-K6-E2
tggcaacatagnaaagcacaatagtgtaccaacatggcagccaaaaattttgcctccttatgctccttggtctttctgcaagtgctgctacggcgaccattttcccgcaatgctcgcaagctcctatagcttcccttcttcccccgtacctctcaccagcggtgtcttcggtatgtgaaaacccaattcttcaaccctacaggatccaacaggcaatcacagctggcatcttacctttatcacccttgttcctccaacaatcatcagccctattacatcagttacctttggtgcatttattggcacaaaacatcagggcacaacaactacaacaacttgtgctagcaaaccttgctgcctactctcagcaacagcagtttcttccattcaaccaactagctgcattgaactctgcttcttatttgcaacaacaacaactaccattcagccagctacctgctgcctacccccagcaatttcttccattcaaccaactggcagcattgaactctcctgcttatttacagcagcaacaactactaccattcagccagctagctggtgtgagccctgctaccttcttgatacaaccac

SEQ ID NO: 5981 - DNA, 586 bp, Zea mays
  unsure (1)..(586): unsure at all n locations; Clone ID: LIB3061-062-Q1-K6-E5
gagcttcanaacacacctagcgaagcgcactagcaacgacctaacaacaatggcttccaanacattatccctccttgcgcttcttgccctttttgtgagtgcaacaaatgcgttcattattccacaatgctcacttgctccgagtgccattattccacagttcctccctccagttacttcaatgggcttcgaacacccagctgtgcaagcctataggctacaacaagcgcttgcggcgagcgtcttagaacaaccaattgcccaattacaacaacaatccttggcacatctaaccatacaaaccatcgcaacgcagcagcaacaagcactgagccacctagccgtggtgaaccctatcgcctacttgcaacaacagctgcttgcatccaacccacttgctttggcaaacgtagctgtataccaacaacaacaacagttgcaacagtttctaccagcgctcagtcaactagccatggtgaaccctatcgcctacctacaacagcaacaacttcttttatctagcccgctcgctatgggcaatgcacctacatacctgcaacaacagttgttgcaacaacagttgctg

SEQ ID NO: 5982 - DNA, 232 bp, Zea mays
  unsure (1)..(232): unsure at all n locations; Clone ID: LIB3061-062-Q1-K6-E7
tcgcctggnctggctgtccagcaacattgcgagcaagcttgaggccntaccttgatgtcaaccgcgaactgactaggagctccggatgtatcatgngaaactcaggacagaatcgcagttgcaacctgttagatgtcttctaccggcactatatatattttttgtttgatgtgtaatgatgttactgttcaacgtttattaccctactatactgttggatgttctttggacc

SEQ ID NO: 5983 - DNA, 588 bp, Zea mays
  unsure (1)..(588): unsure at all n locations; Clone ID: LIB3061-062-Q1-K6-E8
actggatctcagctctttcctctgncaagcacaagagctacgcctgctgtacctgttggaggatgttacaggcttattgatatccctatgagtaactgcttcaacagtggtataaataagatatttgtgatgagtcagttcaattctacttcgcttaaccgccatattcatcgtacataccttgaaggcgggatcaactttgctgatggatctgtacaggtattagcggctacacaaatgcctgaagagccagctggatgggtccaggggacagcagactctatcagaaaatttatctgggtactcgagggttattacagtcacaaatccattgacaacattgtaatcttgagtggcgatcagctttatcggatgaattacatggaacttgtgcagaaacatgtcgaggacgatgctgatatcactatatcatgtgctcctgttgatgagagccgagcttctaaaaatgggctagtgaagattgatcatactggacgtgtacttcaattctttgaaaaaccaaaggtgctgatttgaattctatgagagttgagaccaacttcctgagctatgctatagatgatgcac

SEQ ID NO: 5984 - DNA, 609 bp, Zea mays
  Clone ID: LIB3061-062-Q1-K6-E9
gttggcttctcctccccctccggttcgggttcgggttcgtgaggttctccggggttcggtttcgtgggtgagcggatcgagatggcggcgtcggatgttgagtaccgctgcttcgtcggcggcctcgcctgggccacggacgaccactccctccacaacgccttcagcacctacggcgaggtcctcgagtccaagatcatcctcgatcgggagacgcagaggtcccgcggcttcggcttcgtcaccttctccacggaggaggcgatgcggaacgccatcgagggcatgaacggcaaggagctggacggccgcaacatcaccgtcaacgaggcccagtcccgcggcggccgtggaggcggcggcggcggcgggtacggtggtggccgtggaggcggcggctacggcggtggcgggcgccgtgatggcggcggcggctacggcggtggcggcggctacggtggtggcggcggcggctacggtggtggtggcggcggctacggcggtggcaaccgtggcggcggctacggcaactccgacgggaactggaggaactgagcggtggggcccgcgcggccaagttatcctgttcgctaccgtgttgtttaccct

SEQ ID NO: 5985 - DNA, 538 bp, Zea mays
  Clone ID: LIB3061-062-Q1-K6-F11
gcgttctttttggtgcatttattggcacaaaaatgagggcgcaacaactacaacaacttgtgctagcaaaccttgctgcctactctcagcaacagcagtttcttccattcaaccaactagctgcattgaactctgcttcttatttgcaacaacaacaactaccattcagccagctacctgtggccggcccccaacaatttcttccattcaaccaactggcagcattgaactctcctgcttatttacagcagcaacaactactaccattcagccagctagctggtgtgagccctgctaccttcttgacacaaccacagttgttgccgttctaccagcacgctgcgcctaacgctggcaccctcttacaactgcaacaattgctgccattcaaccaacttgctttgacaaacctagcagtgttctaccaacaacccatcattggtggtgccctcttttagatttcttatgagttatagttcaataataaagttttttgtctgatgtttgtggcttcccagaaataagaaagtacatttct

SEQ ID NO: 5986 - DNA, 619 bp, Zea mays
  unsure (1)..(619): unsure at all n locations; Clone ID: LIB3061-062-Q1-K6-F3
ttattgnanaaccaactagcaacatagcaaagcacaatagtgtaccaacaatggcagccaaaaattttgcctccttatgctccttggtctttctgcaagtgctgctacggcgaccattttcccgcaatgctcgcaagctcctatagcttcccttcttcccccgtacctctcaccagcggtgtcttcggtatgtgaaaacccaattcttcaaccctacaggatccaacaggcaatcacagctggcatcttacctttatcacccttgttcctccaacaatcatcagccctattacatcagttacctttggtgcatttattggcacaaaacatcagggcacaacaactacaacaacttgtgctagcaaaccttgctgcctactctcagcaacagcagtttcttccattcaaccaactagctgcattgaactctgcttcttatttgcaacaacaacaactaccattcagccagctacctgctgcctacccccagcaatttcttccattcaaccaactggcagcattgaactctcctgcttatttacagcagcaacaactactaccattcagccagctagctggtgtgagccctgctaccttcttgatacaaccacagttgttg

SEQ ID NO: 5987 - DNA, 615 bp, Zea mays
  unsure (1)..(615): unsure at all n locations; Clone ID: LIB3061-062-Q1-K6-F5
ccaactagcaacatagnaaagcacaatagtgtaccaacaatggcagccaaaaattttgcctccttatgctccttggtctttctgcaagtgctgctacggcgaccattttcccgcaatgctcgcaagctcctatagcttcccttcttcccccgtacctctcaccagcggtgtcttcggtatgtgaaaacccaattcttcaaccctacaggatccaacaggcaatcacagctggcatcttacctttatcacccttgttcctccaacaatcatcagccctattacatcagttacctttggtgcatttattggcacaaaacatcagggcacaacaactacaacaacttgtgctagcaaaccttgctgcctactctcagcaacagcagtttcttccattcaaccaactagctgcattgaactctgcttcttatttgcaacaacaacaactaccattcagccagctacctgctgcctacccccagcaatttcttccattcaaccaactggcagcattgaactctcctgcttatttacagcagcaacaactactaccattcagccagctagctggtgtgagccctgctaccttcttgatacaaccacagttgttgccgttct

SEQ ID NO: 5988 - DNA, 608 bp, Zea mays
  unsure (1)..(608): unsure at all n locations; Clone ID: LIB3061-062-Q1-K6-F6
accaacagcacatanaagtggaatccagtagcaacaatagagcaacaatggcgaccaagatattttccctccttatgctccttgctctttctacatgtgttgctaacgcgacaattttccctcaatgctcacaagctcctatagcttcccttcttcccccataccttccatcaattatagcttcaatatgtgaaaacccagctcttcaaccatataggcttcaacaagcaatcgcagcaagcaacatacctttatcgcccttgttgtttcaacaatcgccagccctatctttggtgcagtcattggtacaaaccatcagggcacaacagctgcagcaactcgtgctacctctgatcaaccaagtagctctggcaaacctttctccctactctcagcaacaacaatttcttccattcaaccaactgtctacactgaaccctgctgcttatttgcagcaacaactattaccatttagccagctagctactgcctactctcagcaacaacaacttcttccatttaaccaattggccgcactgaaccccgctgcttatttgcagcagcaaatactactaccatttagccagctagctgcagcaaaccgtgct

SEQ ID NO: 5989 - DNA, 618 bp, Zea mays
  unsure (1)..(618): unsure at all n locations; Clone ID: LIB3061-062-Q1-K6-F8
gnacgaggggtttgggccatttatctatacaaaaggtgactactatcatgctgagatccgtgataacaacaacattcaatgcagacatgttgtgaaggcagaacagagatattgttcttgtcttgaatggcaacacacaggggaaaccctgccagcacggcctagtggtcattatagcgcaacaaatgcgagacgttggaatggagcactttgtggacgactacttttcggttgacaaatttaaaaaggcttacgcacgaaggattgaaagtgtaggcgacaagtccttttggccacaagtggccatagccaacgaagttaatgcacctattggtaagaggagtgttgggaggcaaaggaagaatcggatgaaaagttgcctagaaggtggcgctggtaagaagaaagagtccatacctcaggaggaaaaggagaagaaggtacttagaggcaaaattaaatgcccgaactgtggccaacttggacataggaaggctagcccaaaatgccctctaaatgggtccaaaaaaaggaaaaggaaacctcgaaaaaatgtcacaaaacaatggtttccaaaaaatatgggccgaatcacctatacatcaagatgacaaccca

SEQ ID NO: 5990 - DNA, 620 bp, Zea mays
  unsure (1)..(620): unsure at all n locations; Clone ID: LIB3061-062-Q1-K6-F9
ggcagcttttgtgttcggngnatgagcgactaaaacaagccttggnaaanacaaatagaacaatcagtggttaagcttagacaatccgaagagaaggttatcagcctgagcaaagagaaggagcagttgatgaaggaaagagatgctgcatttcaggaggctcatatgtggcgcattgaactagtaaaagccagggagcaagcagtgatacaggaagcaactattgcccgagcagaggagaaggctagagtttctgaagcagatgccgcagctcggatcaaggaagctgctgaaaagttgcatactgttgagaaagaaaaggaggagcttctagccctggttggtgttctccaatcacaagtcctgagagagcagagcagcacaaagcaagtatgcgaggagaggtctgaatcatgctcaggcgccgataattcacctctgttgacaaagcatgttgacgcatcagacgatgatgtggacaaagcctgcgtaagtgactctagatcggtcccggtttcgagcgatagcactgaggtccagctggctgtggatggggtggacatccgtcctgttggcgatgcagagtggagtagcttccagcagccagaagcgctgatcgc

SEQ ID NO: 5991 - DNA, 609 bp, Zea mays
  unsure (1)..(609): unsure at all n locations; Clone ID: LIB3061-062-Q1-K6-G11
gcgtttttagaacaagnanaatggaaaaagcatgcttgtggacatgatgctcacacaacgatgcttcttggggcagctaaattgcttcatgctcggaaggatgatctgaagggtaccgtgaagcttgtcttccagcccaggagaagaaggctacggcggcgcttaccatgttctcagagaaggtgtgctggatgacgtgtctgccattttcggcttgcatgtggatccaggacttcctgtaggcaccgtttcgtccaggccagggccgtttctagcagcagcaggtagatttctggtgacggtcactggaaaaggcggacatgctgcagggccacaggatgctgtggatcccattgttgcggcatcctctgccatcgtcagccttcagcttcttgttgcccgcgaaattgatcccctccaggctgcagtggtctcggtcacgttcatgaaaggaggtgatgcttacaacgtcattccagagtcagcatccttcggcgggaccttcaggagcttgacaacagaaggcttttcgtatctcatgaagaggatcaaagagatcatagaaggtcatgccgccgtccaccgctgcaccgccgccgtcgacttcat

SEQ ID NO: 5992 - DNA, 625 bp, Zea mays
  unsure (1)..(625): unsure at all n locations; Clone ID: LIB3061-062-Q1-K6-G2
tctctacnatcgagcacacacaagcacgaagactcgtttnaggagaaaccacaaaccaccaatcggtgcaagcatcatggagtacggtcagcaggggcagcgcggccacggcgccactggccatgtcgaccagtacggcaacccagtcggcggcgtcgagcacggcaccggcggcatgaggcacggcacgggaaccgccggcggcatgggccagctgggtgagcacggcggcgctggcatgggtggcgggcagttccagcctgcgagggaggagcacaagaccggcggcatcctgcatcgctccggcagctccagctccagctcgtcggaggacgacggcatgggcggaaggaggaagaagggaatcaaggagaagatcaaggagaagctgcccggaggccacaaggacgaccagcacgccacggcgacgaccggcggcgcctacgggcagcagggacacaccggcagcgcctacgggcagcagggacacaccggcggctcctacgccaccggcaccgagggcaccggcgagaagaaaggcattatggacaagatcaaggagaagctgcccggacagcactgagcggcgcctatacgtggctgtgctgggctgtgctggcgcgtc

SEQ ID NO: 5993 - DNA, 617 bp, Zea mays
  unsure (1)..(617): unsure at all n locations; Clone ID: LIB3061-062-Q1-K6-G5
gcgtttgcagcacatanaagtagaatccatgagcggcagtagagcacaatggcgaccaagaattttccctccttatgctccttgctctttctacatgtgttgctaacgcgacaattttccctcaatgctcacaagctcctatagcttcccttcttcccccataccttccatcaattatagcttcagtatgtgaaaacccagctcttcaaccatataggcttcaacaagcaatcgcagcaagcaacatacctttatcgcccttgttgtttcaacaatcaccagccctatctttggtgcagtcattggtacaaaccatcagggcacaacagctgcagcaactcgtgctacctgtgatcaaccaagtagctctggcaaacctttctccctactctcagcaacaacaatttcttccattcaaccaactgtctacactgaaccctgctgcttatttgcagcaacaactattaccatttagccagctagctactgcctactctcagcaacaacaacttcttccatttaaccaattggccgcactgaaccccgctgcttatttgcagcagcaaatactactgccatttagcgagctagctgcagcaagtcgtgcttccttcttg

SEQ ID NO: 5994 - DNA, 630 bp, Zea mays
  Clone ID: LIB3061-062-Q1-K6-G6
gcgttcttatctctctcggccccgtgcccagcgctccggaaccctagcgccgccgcgggtgccaggccgcgagcgtcgccatgggcatcgtgtttacgcggctcttctcgtcggtcttcggtaaccgcgaggctcgcatcctcgtcctcggcctggacaatgctggcaagaccaccatactctatagactgcaaatgggagaggtcgtctccacgatcccgacaattggattcaacgttgagacggtgcagtacaacaacatcaagttccaagtatgggatcttggtggtcaaacaagcatcaggccatactggcggtgctactttccaaacacccaggctatcatatatgttgttgattcaagcgatacagataggcttgtaacagcaaaagaagaattccatgccatccttgaggaggatgaacttaaaggtgcagttgtccttgtgtatgcaaataagcaggatcttccaggtgcactcgatgatgctgccattacagagtcattagaactacacaaaattaagagccgccaatgggcgattttcaaaacatctgcaataaagggagaggggctcttcgaaggtttggactggctcagtaacacgctcaaatctggaagcagctaag

SEQ ID NO: 5995 - DNA, 606 bp, Zea mays
  unsure (1)..(606): unsure at all n locations; Clone ID: LIB3061-062-Q1-K6-G7
cttctgggtgtacacgtacaagtggnccggtgcccgttccggggcaaccacgtgtggacgacgtgcccgtacgcgcactggggggagcgcgcgcgccgccgcgaccccagccgctacgcgtacgccgccgcgacgtgcccggactacgccgactccaagcgccggaaccgcctggccgggtccagcgcgccgcccacctgcgcgcgcggcctccgctgcggcttcgcgcacggcgtcttcgagacgtggctgcaccccaccaggttccgcacccgcatgtgcgaggccggcgccgggtgcagccgccgggtctgcttcttcgcgcactgcctcgcgcagcgcaggcgcgaggacgacctggtcctgccgctcgtcgtcttccccgccatcaccatgccgcccccgctaccgctaccgctgccgctgccgccgctggccttcgttgtcccgaacaacccgctgccgcccgtaccacccgccctcccctgcccccgctcggtctcggtcgtcgcccatcaggttgatcgcgtcacgcaggccatgcagcagggccgcagcgtgcgcctgcttacgcgcgccgatgccgatgccgcttcgtcgtcgtcg

SEQ ID NO: 5996 - DNA, 198 bp, Zea mays
  unsure (1)..(198): unsure at all n locations; Clone ID: LIB3061-062-Q1-K6-G9
ccaagcgtccgtctagaatcgcgaggcgcgcccttttttttttttttttttttttttttttttttttttttttttttttttttttttttttttttttttttttttattttttttttttttttttttttttttttttttttttttttttttttttttttttttttttttatttttgggggggggtgggggggntttttt

SEQ ID NO: 5997 - DNA, 596 bp, Zea mays
  Clone ID: LIB3061-062-Q1-K6-H1
gcgtttctctcttttcgcccttgttgtttcaacaatcaccagccctatctttggtgcagtcattggtacaaaccatcagggcacaacagctgcagcaactcgtgctacctgtgatcaaccaagtagctctggcaaacctttctccctactctcagcaacaacaatttcttccattcaaccaactgtctacactgaaccctgctgcttatttgcagcaacaactattaccatttagccagctagctactgcctactctcagcaacaacaacttcttccatttaaccaattggccgcactgaaccccgctgcttatttgcagcagcaaatactactgccatttagcgagctagctgcagcaagtcgtgcttccttcttgacacagcaacagttgctgcctttctacaagcagtttgcggctaaccccgcaaccctcttacaactacaacaattgttgccctttgtccaacttgctttgacaaacccagcagcctcctaccaacaacacatcattggtggtgccctcttttagattgattattagttgtaattcaataataaagttttttggatgatgtatgtggccaaccagaaataa

SEQ ID NO: 5998 - DNA, 620 bp, Zea mays
  Clone ID: LIB3061-062-Q1-K6-H12
gcgttcgttttcccacatgctcacagctccttagcttcccttcttcccccatacctctcaccagcggtgtcttcaatgtgtgaaaccccaattgttcaaccctacaggatccaacaggcaatcgcaacaggcatcttaccattatcacccttgttcctccaacaaccgtcagccctattacagcgggtacctttggtccatttggtggcacaaaacatcagggcacaacaactacaacaacttgtgctagcaaaccttgctgcatactctcagcaacatcagtttcttccattcaaccaactggctgcattgaactctgctgcttatttgcaacaacaattaccattcagccagctagttgctgcctacccccagcaatttcttccattcaaccaactagcagcattgaactctgctgcttatttacagcagcaacaactactaccattcagccagctagctgatgtgagccctgctgccttcttgacacaacaacagttgttgccgttctacctgcacgctatgcctaacgctggcaccctcttacaactgcaacaattgctgccattcaaccaacttgctttgacaaacccaacagtgttctaccaacaacccatcat

SEQ ID NO: 5999 - DNA, 609 bp, Zea mays
  unsure (1)..(609): unsure at all n locations; Clone ID: LIB3061-062-Q1-K6-H5
cagnaaacacaccaagcgaacacattagcaacaacctaacaacaatggctaccaagatattatccctccttgcgcttcttgcgctttttgcgagcgcaacaaatgcgttcattattccacaatgctcacttgctccaagttccattattacacagttcctcccaccagttacttcaatgggcttcgaacacccagctgtgcaagcctataggctacaacaagcaattgcggcgagcgtcttacaacaaccaatttcccagttgcaacaacaatccttggcacatctaacaatacaaaccatcgcaacgcaacagcaacaacaattcctaccagcactgagccacctagccatggtgaaccctgccgcctacttgcaacagcagttgcttgcatcaaacccacttgctctggcaaacgtagttgcaaaccagccacaacaacagctgcaacagtttctgccagcgctcagtcaactagccatggtgaaccctgccgcctacctacaacagcaacaactgctttcatctagcccgctcgctgtggccaatgcacctacatacctgcaacaacaattgttgcaacagattgtaccagctctgactcagctag

SEQ ID NO: 6000 - DNA, 612 bp, Zea mays
  unsure (1)..(612): unsure at all n locations; Clone ID: LIB3061-062-Q1-K6-H6
tagcaacatagnaaagcacaatagtgtaccaacaatggcagctaaaatttttgcctccttatgctccttggtctttctgcaagtgctgctacggcgaccattttcccacaatgctcacaagctcctatagcttcccttcttcccccgtacctctcaccaacggtgtcttcggtatgtgaaaacccaattcttcaaccctacaggatccaacaggcaatcgcagctggcatcttacctttatcacccttgttcctccaacaatcatcagccctattacagcagttacctttggtgcatttattggcacaaaacatcagggcacaacaactacaacaacttgtgctagcaaaccttgctgcctactctcagcaacagcagtttcttccattcaaccaactagctgcattgaactctgcttcttatttgcaacaacaacaactaccattcagccagctatctgctgcctacccccagcaatttcttccattcaaccaactgacagcattgaactctcctgcttatttacagcagcaacaactactaccattcagccagctagctggtgtgagccctgctaccttcttgacacaaccacagttgttgccgttctac

SEQ ID NO: 6001 - DNA, 596 bp, Zea mays
  unsure (1)..(596): unsure at all n locations; Clone ID: LIB3061-062-Q1-K6-H7
gcgttcggcacatanaagtagaatccattagcaacaatagagcaacaatggcgaccaagatattttccctccttatgctccttgctctttctacatgtgttgctaacgcgacaattttccctcaatgctcacaagctcctatagcttcccttcttcccccataccttccatcaattatagcttcagtgtgtgaaaacccagctcttcaaccatataggcttcaacaagcaatcgcagcaagcaacatacctttatcgcccttgttgtttcaacaatcaccagccctatctttggtgcagtcattggtacaaaccatcagggcacaacagctgcagcaactcgtgctacctgtgatcaaccaagtagctctggcaaacctttctccctactctcagcaacaacaatttcttccattcaaccaactgtctacactgaaccctgctgcttatttgcagcaacaactattaccatttagccagctagctactgcctactctcagcaacaacaacttcttccatttaaccaattggccgcactgaaccccgctgcttatttgcagcagcaaatactactgccatttagcgagctagctgca

SEQ ID NO: 6002 - DNA, 528 bp, Zea mays
  Clone ID: LIB3061-062-Q1-N6-A1
catccaaaaacttcattattgaactataactcataagcaatctaaaaaaggcaccaccaatgatgggttgttggtagaacactgttgagtttgtcaaagcaagttggttgaatggcagcaattgttgcagttgtaagagggtgccagcgttaggcatagcgtgcaggtagaacggcaacaactgttgttgtgtcaagaaggcagcagggctcacatcagctagctggctgaatggtagtagttgttgctgctgtaaataagcagcagagttcaatgctgctagttggttgaatggaagaaattgctgggggtaggcagcaactagctggctgaatggtaattgttgttgcaaataagcagcagagttcaatgcagccagttggttgaatggaagaaactgatgttgctgagagtatgcagcaaggtttgctagcacaagttgttgtagttgttgtgccctgatgttttgtgccaccaaatggaccaaaggtaactgctgtaatagggctgacggttgttggaggaaca

SEQ ID NO: 6003 - DNA, 550 bp, Zea mays
  Clone ID: LIB3061-062-Q1-N6-A10
gtttggtttttttttttttttttttttttttttttttttttttttttttttttttttttttttttttttttttttttttttttttttttttttttttttttttttttttttttttttttttttttttttttttgggggaaaaaaaggggggggggggggaaaaaaaacaaaattgggggggattcaaaaccccccccaccgaataggaaaatttcccccttttttaaaccccccctttttattacccttttgggggggggggggttgggataaaaaaaaaccccaaatgggggcgaaaaaaaaaaaaaaattcatggggttaaaaaaaaagggttttttcccccccctttttttaccccccccccccttgacaaaagtttttttttggaaaatccccccccccgaaaaaaaaaaaaaaaggggagggcgggaagaaaaaaaaaccctcccccccccttaaaaaggggcacccaaaaattttttttttgggggggggaaaaggggggaccttgggtggggggtttttaaaaaaaaaaacccccccaggggg

SEQ ID NO: 6004 - DNA, 481 bp, Zea mays
  Clone ID: LIB3061-062-Q1-N6-A11
ctgggaaagtaacttcttatttctggggggccacatacatcatccaaaaactttattattgaattacaactaataagcaatctaaaagagggccccgccgagaggatgtgttgttggtaggaggcccctcggtctgtcaaagcaagttggacaaagggcaacaattgttgtagttgtaagagggttgcggggttagccccaaactgctggtaaaaaggcagcaactgttgctgtgtcaaaaaggaagcacggtttgctgcagctagctggctaaatggtagtagtatttgctgctgcaaataagcagcggggttcagtgcggccaattggttaaatggaaaaagttgttgttgctgaaagtaggcagtagctagctggctgaatggtaatagttgttgctgcaaataagcagcagggttcagtgtaaacagttggttaaatggaaaaaatgttgttgctgaaagtagggagaaagtttccc

SEQ ID NO: 6005 - DNA, 366 bp, Zea mays
  Clone ID: LIB3061-062-Q1-N6-A12
gttgtggggggtttcgcacaaatttttgttttggagacaaatctggtccaattgagtacaaacactgagatttgattctgaaaggggagaaagacctaacggcccaaattagcaagaagggtgagagacaagatgcgcggggggcactttacagtgggttctactccttcagtataactctagtcctgtcttcagaacaagaagatttcccacatgttcctctttggccgagaatcgatccacaaagagaacttggtaccaacttagtacacccatctcaataaacaaaatgggcgatcatgtgggtgatcacgtcagctccatcggagttcaagaaataggtcttgacctgaatagagttttcat

SEQ ID NO: 6006 - DNA, 457 bp, Zea mays
  Clone ID: LIB3061-062-Q1-N6-A2
ggggggggggggggaaaaggggggggggaaaaaggggggaaaaaaaaaaaggggggaaaaaaaagggggggggggggggggggggggggggggaaaaaaaaaaaaaggggggggggggggggagaagggggggggggggggggggggggggggggggggggggggggggggggggggggggggggggggggggggggggggggggggggggggggggggggggaaaaaaggggggggggggggggggggggaaaaaggggggggggggggggggggggaaaagggggggaacgccgggaaaagggaaaaaaaaaaggggggggggggggggggggcccaaaagagaggaaaaaaggggggggggggaagggaaaggggggggggggggggagaaggggggggcaaaaagggggggggaggaagggggggaaaaaggggggaaaaaaaaggggggggg

SEQ ID NO: 6007 - DNA, 484 bp, Zea mays
  Clone ID: LIB3061-062-Q1-N6-A3
ggagggcaaagccccataaataaaatctggaatagtaaaataaaattcaagtccccaaggggtagaagacaattctagggttacaaacttgtttatcttgcaagggagcatgttacataaacatattatctcagtacagccaacgggtgcgatgtcagcgcctttggtcgggtatttactttttggcatctctggggacaacgtagttggggccggtcggcttctggatcttcgaaattttcttcaaaatttcagcaaatgcattcttggcctttgcacctcgaagcctaaacttgaatctggataccaaatcttggggggggactggggccactgcaagaagaacactcctggattcatcccctgggacaggggatacccttggcccactttttgatgcaacaagagggctttgatgcagggtttgccaaaaatgatgcctcctctttgaggcctgatgctttcgcatccaattccacctttg

SEQ ID NO: 6008 - DNA, 521 bp, Zea mays
  Clone ID: LIB3061-062-Q1-N6-A6
cagaagcaaccggtatagccatataacaaaccaaaccagtacccactgtctgctggggcttgtttggtgtttaacgatgtattattgtcacagtttcaaccactcacaccacctgattattctctccaatcttccatcaacttaagctgagcaatcaaagtgaaaaaaagaagaaaagtaaaatccaaatagtatatgtgaaatctagcaaccggcagggcgggcgcgcaccctgcgctggatgggggcccggcacgaagggcattccttcatcccttgcttctcatggaggtcgctgcatttggcacagacgacctggtgggcgcaggggaggaacaccacggacatctcctcgctcaagcacatgacgcactcccggtcgcgctgtatatcgtcaaaatcgagaccttggggtactgctgtgttggacaaaacttgggcattgttgttctttctcccttcaaaaagatgcaatgcataggatttattgtcggctccccacttgggggcagcaacccttg

SEQ ID NO: 6009 - DNA, 532 bp, Zea mays
  Clone ID: LIB3061-062-Q1-N6-A8
atcgaacacccttgcaggccaatagcacattagaatttggaaatgtaacttcttatttctaggaggccacatacatcagccaaaaaacttcattattgaattacaactaataagcaatctaaaagaggcaccgccaatgatgtgttgttggtagaaggctgctgggtttgtcaaagcaagttggacaaagggcagcaactgttgcagttgtaagagggttgcggggttagccacaaactgctggtagaacggaagcaattgttgttgtttcaaaaaggaagtggggcttgttgtagctagctggccaaatggtagtagtatttgctgctggaaataagcagaggggttcagtgcggccaattggttaaatggaagaaattgttgctgctgagagtaggcagtagctagctggctgaatggtagtagttgttgttgttgtaaataagcagcagggttcagtgtagacagttggttgaatggaagaaattgttgttgctgagagtagggagaaaggtttgccagagctacttga

SEQ ID NO: 6010 - DNA, 430 bp, Zea mays
  Clone ID: LIB3061-062-Q1-N6-A9
aaaaatgtactttcttatttctgggaagccacaaacatcagacaaaaactttattattgaactataactcataagaaatctaaaagagggcaccaccaatgatgggttgaatggaagaaatgctgggggtaggcagcagatagctggctgaatggtagttgttgttgttgcaaataagaagcagagttcaatgcagctagttggttgaatggaagaaactgctgttgctgagagtaggcagcaaggtttgctagcacaagttgttgtagttgttgtgccctgatgttttgtgccaataaatgcaccaaaggtaactgctgtaatagggctgatgattgttggaggaacaagggtgataaaggtaagatgccagctgcgattgcctgttggatcctgtagggttgaagaattgggttttcacataccgaag

SEQ ID NO: 6011 - DNA, 437 bp, Zea mays
  Clone ID: LIB3061-062-Q1-N6-B1
cacattaaaaatctgggaaagtaacttcttatttctggttggccacatacatcatccaaaaactttattattgaattacaactaataagcaatctaaaaaaggcaccaccaatgatgtgttgttggtaggaggccgctcggtctgtcaaagcaagttggacaaagggcaacaattgttgtagttgtaagagggttgcggggttagccgcaaactgctggtagaaaggcagcaactgttgctgtgtcaagaaggaagcacggtttgctgcagctagctggctaaatggtagtagtatttgctgctgcaaataagcagcggggttcagtgcggccaattggttaaatggaagaagttgttgttgctgagagtaggcagtagctagctggctgaatggtaatagttgttgctgcaaataagcagcagggttcagtgtaga

SEQ ID NO: 6012 - DNA, 549 bp, Zea mays
  Clone ID: LIB3061-062-Q1-N6-B11
gcgtttgtttgggtttttttttttttttttttttatttttttttttttttttttttttttttttttttttttttttttttttttttttttttttttttttttttttttttttttttttttttttttttttttttttttttttttttttttgggggggggggggggggtttttttaaaaaattttaaaccccacccttatggggggggggtttttttgggccccccccctttggggggtaaagggggggggggaccccttttttttttgggccacccccccttttttttttgggggcggggggtttttttgggggggggggggggcccccccccccctttgggggggggttttggggttttaaaaaaaaccccccccccttttggggggttggggggaccccccaaacccccggggggggggggggggccccccccggggttgggggggaccccctttttaaaattttgggggaaatttttgggggtaaaatccccaaaaaaaaaaaaaaaatttgggggggaaaacccggggggtttttggggggtaaa

SEQ ID NO: 6013 - DNA, 548 bp, Zea mays
  unsure (1)..(548): unsure at all n locations; Clone ID: LIB3061-062-Q1-N6-B12
taaatctcaatcaatatattgattatttctagggaacacacgtcggtatgagggcaccattatcgagtacatctcatatgtaatctaaaagaggcacctccaacgatgggttgctgcctcnacaagacangattcagggggggggggtggttgtatggcagcaattgttgctgctgtaggaaggcggcgaccaatgggttagccactaccaatggattaagtaactgttgtcgctgttgtaggtacccagcagagttcgacagagtcagttggttgaatggaagcagctgttgcaagtaggcaacagggtttgccacagctagttgagtcagagctggtacaatctgttgcaacaattgttgttgcaggtatgtaggtgcattgcccacagcgagcgggctagatgaaagcagttgttgttgttgtacgtaggcggcagggttcaccatggctagttgactgagcgttggcagaaactgttgtagctgttgttgttgctggtttgcaactaccttcgccagagcaagtgggttggatgcaagcagctg

SEQ ID NO: 6014 - DNA, 522 bp, Zea mays
  Clone ID: LIB3061-062-Q1-N6-B2
agaatctgggaaagtaacttcttatttctggttggccacatacatcatccaaaaactttattattgaattacaactaataatcaatctaaaaggggcaccaccaatgatgtgttgttggtaggaggctgctgggtttgtcaaagcaagttggacaaagggcaacaattgttgtagttgtaggagggttgcggggttagccgcaaactgcttgtagaaaggcagcaactgttgctgtgtcaagaaggaagcacgacttgctgcagctagctcgctaaatggcagtagtatttgctgctgcaaataagcagcggggttcagtgcggccaattggttaaatggaagaagttgttgttgctgagagtaggcagtagctagctggctaaatggtaatagttgttgctgcaaataagcagcagggttcagtgtagacagttggttgaatggaagaaattgttgttgctgagagtagggagaaaggtttgccagagctacttggttgatcacaggtagcacgagttgct

SEQ ID NO: 6015 - DNA, 534 bp, Zea mays
  Clone ID: LIB3061-062-Q1-N6-B3
cacattaaaatctggaaaagtaacttcttatttctggttggccacatacatcatccaaaaactttattattgaattacaactaataagcaatctaaaaggggcaccaccaatgatgtgttgttggtaggaggccgctcggtctgtcaaagcaagttggacaaagggcaacaattgttgtagttgtaagagggttgcggggttagccgcaaactgctggtagaaaggcagcaactgttgctgtgtcaagaaggaagcacggtttgctgcagctagctggctaaatggtagtagtatttgctgctgcaaataagcagcggggttcagtgcggccaattggttaaatggaaaaagttgttgttgctgagagtaggcagtagctagctggctgaatggtaatagttgttgctgcaaataagcagcagggttcagtgtaaacagttggttgaatggaaaaaattgttgttgctgagagtagggagaaaggtttgccagagctacttggttgatcacaggtagcacgagttgctgcagct

SEQ ID NO: 6016 - DNA, 526 bp, Zea mays
  Clone ID: LIB3061-062-Q1-N6-B4
aagaatctagaaagtactttcttatttctgggaagccacaaacatcagacaaaaactttattattgaactataactcataagaaatctaaaagagggcaccaccaatgatgggttgttggtagaacactgctaggtttgtcaaagcaagttggttgaatggcagcaattgttgcagttgtaagagggtgccagcgttaggcgcagcgtgctggtagaacggcaacaactgtggttgtgtcaagaaggtagcagggctcacaccagctagctggctgaatggtagtagttgttgctgctgtaaataagcaggagagttcaatgctgccagttggttgaatggaagaaattgttgggggtaggcaacaggtagctggctgaatggtagttgttgttgttgcaaataagaagcagagttcaatgcagctagttggttgaatggaagaaactgctgttgctgagagtaggcagcaaggtttgctagcacaagttgttgtagttgttgtgccctgatgttttgtgccaata

SEQ ID NO: 6017 - DNA, 530 bp, Zea mays
  Clone ID: LIB3061-062-Q1-N6-B5
aaaaactaaaaagtctttcttattctgggaagcccaaactcagacaaaaactttattattgaactataactcataagaaactaaaagaggcaccaccaatgatgggttgttggtagaacgctgctgggttgggcaaagcaagttggttgaatggcagcaattgttgcagttgtaagagggtgccagcgttaggcgcagcgtgctggtagaacggcaacaactgtggttgtatcaagaaggtagcagggctcacaccagctagctggctgaatggtagtagttgttgctgctgtaaataagcaggagagttcaatgctgccagttggttgaatggaagaaattgctgggggtaggcagcaggtagctggctgaatggtagttgttgttgttgcaaataagaagcagatttcaatgcagctagttggttgaatggaagaaactgctgttgctgagagtaggcagcaaggtttgctagcacaagttgttgtagttgttgtgccctgatgttttgtgccaataaatgcaccaac

SEQ ID NO: 6018 - DNA, 556 bp, Zea mays
  Clone ID: LIB3061-062-Q1-N6-B6
ggtgggtttttttttttttttttttttttttttttttttttttttttttttttttttttttaggatcattaaaaccaaaactttattatgaccatgcctatattattgggcataccacacatgaaaatggggggcggcttactggatttttacatatatagatagagagagatgggtagaggggatttcccaaatattatgaatcaatagtaggggggaatgggaggggaaaccccacagggggtggggcgggagctgggcagctggtactgggagagtccacccatgggcgggatggtttgggccattattatgggcatgggggtgaaaccctggggtgccaacaactggtggtggtgctgcataaaaactgggttgtacagggtggtggtggggggagcggcaccctcaaactggattattatttgcagctggtgggcgaaggactggacctccataaacctcatttggtggtgggaaaactgttgccggagcgggtggaacatggggcttgggtggccacacccggggtaatagggggccccccccagggggc

SEQ ID NO: 6019 - DNA, 393 bp, Zea mays
  Clone ID: LIB3061-062-Q1-N6-B7
gtgggggggggaaaaaacaacttaaagggggggaaaagaaaaaaaatgggaaaaaaccccaaaaaaaaaaggggaaaaccccccaaaaaaaaaaaaaagggggggaaaaacctcaaagggatgaccccccccgggaaaaaaaaaggcccaagattttttttaaaaaaaaaaaaaggggaaaaaaaaaaaaaagggaaaaaaaaaaaaaaaaaattttatttttggggaacaaccccgaaaaaaatttgaaaacgggaggaaaaaaaaattttaaaacccctaaaaaaattaaaatttggggggaaaaaaaaaaattggggaaaggcaaaaacccaaaaagggggggggggaaaaacctttaagggaaggggaagggttaaaaaaaaaacccca

SEQ ID NO: 6020 - DNA, 534 bp, Zea mays
  Clone ID: LIB3061-062-Q1-N6-B8
ggtgggttttttttttttttttttttttttttttttttttttttttttttttttttttttttttttttttttttttttttttttttggccccatccctcatccaaaaaactttttttttggattccaactaaaaagcaatctaaaagagggccccccccaagatgggttgttgggagggggcccctcggtctgtcaaagcaagggggccaaagggcaacaattggtggagttgaaaaagggggggggggttacccccaaaccgctgggaaaaagggagcaactgttgctgggtcaaaaaggaagcccgggttgctgcacctagctggctaaaggggagaagtatttgctggtgcaaaaaaaccgggggggtcaaggcggccaattggttaaaaggaaaaagttgttgttgctgaaagtaggcaaaacctacccggctgaaagggaaaaattgttgctgcaaaaaaacagcagggttcaaggtaaacagttggttgaaaggaaaaaatgttttttcttaaaaagggaaaaaggtt

SEQ ID NO: 6021 - DNA, 545 bp, Zea mays
  Clone ID: LIB3061-062-Q1-N6-B9
atcgagaaaaatctcaaccaatatattgattatttctaggaaaccatgccggtatgagggcaccattatcgagtacatctcatatgtaatctaaaagaggcacctccaacgatgggttgctgcctcgacaagacaggattcatcaaagagaaccggttgtatggcagcaattgttgctgctgtaggaaggcagcgaccaatgggttagccactgccaatggattaagtaactgttgtcgctgttgtaggtacgcaacagagttcgacatagttagttggttgaatggaagcagctgttgcaagtaggcaacagggtttgccacagctagctgagttagagctggtacaatctgttgcaacaattcttgttgcaggtatgtaggtgcattggccacagcgagcgggctagatgaaagcagttgttgctgttgtaggtaggcggcagggttcaccatggctagttgactaagcgctggcagaaactgttgcagttgttgttgttgctggtttgcaactacgtttgctagagcaagtgggttggatgc

SEQ ID NO: 6022 - DNA, 149 bp, Zea mays
  Clone ID: LIB3061-062-Q1-N6-C1
agtagcattataattacaattagtattcttattcaaatatcatagtacaaacatcataatgtatggtactttattgcttaacaccgttatatgagtataacggctaggtagacacaattcttcaattgcaaacaccactaatgtcattg

SEQ ID NO: 6023 - DNA, 497 bp, Zea mays
  Clone ID: LIB3061-062-Q1-N6-C11
atcgagataaatctcaatcaatatattgattatttctaggaaacacatgtcggtatgagggcaccattgtcgagtacatctcatatgtaatctaaaaaaggcacctccaacgatggggggctgcaaggcagggttcatcaaagagaactggttgtatggcagcaattgttgttgctgctgcaggaaggtagcgaccaatgggttagccactgccaatggattaagtaactgttgtcgctgttgtaggtacccagcaaagtttgacacaaccagttggttgaatggaagcaactgttgtaagtaggcagcagggtttgccacagctagctgagtcagagctggtacaatttgttgcagcaactgttgttgtaggtacctaggtgcattgcccaccgcgagcgggctagatgaaagtagttgtaggtagacggcagggttcaccatggctagttgactgagcactggcataaactgttgcagctgttgttgttgctggt

SEQ ID NO: 6024 - DNA, 516 bp, Zea mays
  Clone ID: LIB3061-062-Q1-N6-C12
gcaaaagcaaaaccattccatgctcaacacttttgcaagggaactaaatgtgttcacggtttgctcagttacatgtgcggagtactggaaatgggtgtctcaacagccaacttccagactgaattaaaaaaaacacacacttccatatcgacatggcttcaataacactctttcagagggcaaaggcaataagttcgggtatacaatcttattgatgttcctagaatttccaattcatatgaggggatatcaaatggagccccccagcataatagcctcaatctcttcttcagtcaggggtttgcgcttaggaaggagtgaagctggacctcctacagcagtatgagaaggtggacaaggcacatcaaatctaaagcggtaatttttaatctctccaaaaaatggggcctttgctttagcccctaaccggaacatgagggtcgcgtgctggtctgcgggttgcgacccccctggcccggatggagatggggctttgagattccgcttggggaacct

SEQ ID NO: 6025 - DNA, 519 bp, Zea mays
  Clone ID: LIB3061-062-Q1-N6-C3
atagaaaaacacatataaattgttgtataaacctattaaaaggttaaaacgtttaatttggaacaatacttttttcttttcatttcaattgttcattcaggtcattgctcacactgacactgccacccatggtgatgcgtgacacattattactcaatcatcgccgctaaatgactcaactagctagctagccagcggctatactacagcacatagtttcttcagtgggggacaccgccggcagcagcgtaggggcatggagtcggctgctgcaggccgcacatcgccgtcagttgctgcgctatctgcgccgccaacagccccgcgacctggccgctttgcggctgctgctgcaggatggactggaggaccaagccgaagatcgcctggtaccggtgctgcggctccacctgcctgagctgctggcaacactgctgccgcaacgactggcactgaggcgagcagtagggcgtcgccgtcgggctgcactgatgcctcagaaactcgacgcactggccc

SEQ ID NO: 6026 - DNA, 496 bp, Zea mays
  Clone ID: LIB3061-062-Q1-N6-C4
ggttggccacatacatcatccaaaaaatttattattgaattacaactaataatcaatctaaaagggggccccaccaatgatgtgttgttggtaggaggctgctgggtttgtcaaagcaagttggacaaagggcaacaattgttgtagttgtaaaagggttgcggggttagccccaaactgcttgtaaaaaggcagcaactgttgctgtgtcaaaaaggaagcacgacttgctgcagctagctcgctaaatggcagtagtatttgctgctgcaaataaacagcggggttcaatgcggccaattggttaaatggaaaaagttgttgttgctgaaagtaggcagtagctagctggctaaatggtaatagttgttgctgcaaataaacagcagggttcaatgtaaacagttggttgaatggaaaaaattgttgttgctgaaagtagggaaaaaggtttgccaaagctacttggttgatcacaggtagcaccagttgctgc

SEQ ID NO: 6027 - DNA, 439 bp, Zea mays
  Clone ID: LIB3061-062-Q1-N6-C5
aacagccccacgacaacgggggaaagaggggaaaaaaaaacagggggggcaaaaacaggcaagagcgggaaggagatcccggggggggggccaacggcaaaggggctcggtatttgggggccaaaagggggcctttgggaagcgggggcgggggccaaagggggggatgggatttaagggaagcatgggccccagggaactggggcccctttgggcgggggggcaccttcccaacctgggggggaaggctaaagaacgaaaaattttggggggaaagggggggaaaggccttctccaagggaaaaagggaatccctattaaagccaggggggccatgggggggaaaaaattgcctggccaaaacccggaaaggggcggggccaaaaaaggactgggggccaaaggggccggggggggaaaaaaaaacaaaaacccccgg

SEQ ID NO: 6028 - DNA, 532 bp, Zea mays
  Clone ID: LIB3061-062-Q1-N6-C6
gaacttaaaaatagatctctaatcttttattactgagaagttgcacatatcagtatgagaaatttattattacagtataaagcataaaaaatctagaagatggtaccaccaatggtgggctgatgcaataaggtggtaggattcgtcaaagcgagttggctaaatggcagcaattgctgttgttgtaagaaggcgacaatgtttgccacatcctgtgggtagaatggcagcaattgttgttgttgcaagaaggcgttaatgtttcccacaacctgtgggtaaaatggcagcaattgttgttgttgcaagaaagcagcaatgtttgcaacaacttgtagacggaatggcagcaactgttgctgcaataagatggcagcagggctcccgacaagttggttgaatggtagtagctgttgtgcctgcaagtaagcagcagggttcaccccagctagttgattgaatggaagaaattgttgttgctgaaggtaagcagcaaggttcgctgcaactacttgattaattgttggaagca

SEQ ID NO: 6029 - DNA, 513 bp, Zea mays
  Clone ID: LIB3061-062-Q1-N6-C7
ggaaatgtaacttcttatttctggttggccacatacatcatccaaaaactttattattgaattacaactaataatcaatctaaaaggggcaccaccaatgatgtgttgttggtaggaggctgctgggtttgtcaaagcaagttggacaaagggcaacaattgttgtagttgtaagagggttgcggggttagccgcaaactgcttgtagaaaggcagcaactgttgctgtgtcaagaaggaagcacgacttgctgcagctagctcgctaaatggcagtagtatttgctgctgcaaataagcagcggggttcagtgcggccaattggttaaatggaagaagttgttgttgctgagagtaggcagtagctagctggctaaatggtaatagttgttgctgcaaataagcagcagggttcagtgtaaacagttggttgaatggaagaaattgttgttgctgagagtagggagaaaggtttgccagagctacttggttgatcacaggtagcacgagttg

SEQ ID NO: 6030 - DNA, 523 bp, Zea mays
  Clone ID: LIB3061-062-Q1-N6-C8
ggctcatggcacgattcaagagatcgtaccaaaatttacttaagtattatatataggtacagcgactccgcgtcttgcacgtagtctactataataagcatatataacgaagcaaagtactcaatatgcgtcacaacacaggactgctaatttaactgtataagtcatcatcgtcagctgctgctccagcggatgcgaagggatcggccgcagcagcagctgccgtcggttggtcggggaaccggaactcgctgccaaacccgcgggactgctggagtgtctgggcgaaggcctggtacttgcggatgtcggcgtcactcacgctgcgacgggcgtacttcatggactcctcgaagtgagcagccttgatctcagcgatgtcgtctacctcgtcttcctccatagcctcggggttgtctttcctgcgcctctccctctcgatatccttctcgatgttctccctgatggcatacttgcatgcgcgctggcagatctctgtgatatctgcaccgctgaaaccctg

SEQ ID NO: 6031 - DNA, 533 bp, Zea mays
  Clone ID: LIB3061-062-Q1-N6-C9
atcgaggaaaatctcaatcaatatattgattatttctaggaaacacatgtcggtatgagggcaccattgtcgagtacatctcatatgtaatctaaaagaggcacctccaacgatgggttgctgcaaggcagggttcatcaaagagaactggttgtatggcagcaattgttgttgctgctgcaggaaggtagcgaccaatgggttagccactgccaatggattaagtaactgttgtcgctgttgtaggtacgcagcagagtttgacacagccagttggttgaatggaagcaactgttgtaagtaggcagcagggtttgccacagctagctgagtcagagctggtacaatttgttgcagcaactgttgttgtaggtacgtaggtgcattgcccaccgcgagcgggctagatgaaagtagttgtaggtagacggcagggttcaccatggctagttgactgagcactggcataaactgttgcagctgttgttgttgctggtatgcagctacgttcgccagagcaagtgggttggatg

SEQ ID NO: 6032 - DNA, 523 bp, Zea mays
  Clone ID: LIB3061-062-Q1-N6-D10
agaactggaaatgtaacttcttatttctggttggccacatacatcatccaaaaactttattattgaattacaactaataatcaatctaaaagaggcaccaccaatgatgtgttgttggtaggaggctgctgggtttgtcaaagcaagttggacaaagggcaacaattgttgtagttgtaagagggttgcggggttagccgcaaactgcttgtagaaaggcagcaactgttgctgtgtcaagaaggaagcacgacttgctgcagctagctcgctaaatggcagtagtatttgctgctgcaaataagcagcggggttcagtgcggccaattggttaaatggaagaagttgttgttgctgagagtaggcagtagctagctggctaaatggtaatagttgttgctgcaaataagcagcagggttcagtgtagacagttggttgaatggaagaaattgttgttgctgagagtagggagaaaggtttgccagagctacttggttgatcacaggtagcacgagttgctgc

SEQ ID NO: 6033 - DNA, 543 bp, Zea mays
  Clone ID: LIB3061-062-Q1-N6-D12
gggggggggtttttttttttttttttttttttttttttttttttttttttttttttttttttaagatggcaaaagaaccatatgtacaggaacccaatggaccaacaacaacaattttaaccatgacacccgcccacatttatatgtaagggggcgggggggcactctttattcatccttaaacacaaaatctagaggccgcctttcaatctcagggctaaaaccaatggaccagacataatctcacaatgccaactacagatcggatgggtcaaaacacaggtatgttcgtcatcatattctattggcccatgtttccaaaaaggcgctccactggagcatgaacatttccagcagtgggggccaagggtcggatgttctcctggggggaaaaaaaacccattttttggagctgagctaattggggtgcatacaggtcttctgggggcacattaggagcatttggaacacctaggccaccaccagcaccaagcccactgaacatgttcatcaagggggggagggtcacattgcctgcaccaa

SEQ ID NO: 6034 - DNA, 534 bp, Zea mays
  Clone ID: LIB3061-062-Q1-N6-D2
agagtcgatcacacttcttctcacacaaatagctacatttgcacgtgttataatccactgttgacatggaacaggcaacgatcaggttttgacatgctcaaatgttgttgaactttctagaactgattaatatcaatatacatataggatcatgattcatgaaaggcaagcgtgggaatcataactaacaaggaagaagaatgatgaaatgggttgtttaatccacctttggtcgctatcagcggcgtcagggctcgcctcgcaagcagattcttccttgtcgccaccgttgagcttcccctccagagcaaacccactgctcagcttgagctgctctccggactctagtggcgactcgactgccatggtgctcaaaggatggttggacgcaaaggcattggcaactggtgttggcagtgccgatgccgctgctgctgtcgcagctgcgcgagccttgaggccgagcagctggagatccatgaggcggcggctctggagctcaatggcgtgctgaagttcggcagcctgctgctg

SEQ ID NO: 6035 - DNA, 541 bp, Zea mays
  unsure (1)..(541): unsure at all n locations; Clone ID: LIB3061-062-Q1-N6-D3
ggattcaaagtttggctggattttttctcatgcaattatacaagtgcactaatcatctctgatctcttaacaatataataatggagctgtgttacagctngaaggtaggcaataagacccgtgaactttcaaaaacttcagccgcacagccaggtatcagaaaactctggcaaatttcacccacaaaaatcacataagatcagtaaacattggaaccaaattggatccgccagctgcggaaaacaaacacaagtattagcttagtcactgtcctcttcttcccgctcttcatgctgggccacaaccttctctatgaacttcctgcgaacaccttcgaagacattgccccgagatgaatcgctgccaccatgcccatcattcagtaccgggtctgactggcaaagggctaacgcaacagattcaggtgtgcatctctttccaccaaacttctgcaaaccaacataagtccctttgacagcactgttgttatacaccagtattgtaggaacattcctatctgggtagttggggatgcagtctg

SEQ ID NO: 6036 - DNA, 509 bp, Zea mays
  Clone ID: LIB3061-062-Q1-N6-D4
agaaagtactttcttatttctgggaagccacaaacatcagacaaaaacactttattattgaactataactcataagaaatctaaaagagggcaccaccaatgatgggttgttggtagaatgctgctgggtttgtcaaagcaagttggttgaatggcagcaattgttgcagttgtaagagggtgccagcgttaggcgcagcgtgctggtagaacggcaacaactgtggttgtgtcaagaaggtagcagggctcacaccagctagctggctgaatggtagtagttgttgctgctgtaaataagcaggagagttcaatgctgtcagttggttgaatggaaaaaattgctgggggtaggcagcaaatagctggctgaatggtagttgttgttgttgcaaataagaagcagagttcaatgcagctagttggttgaatggaagaaactgctgttgctgagagtaggcagcaaggtttgctagcacaagttgttgtagttgttgtgccctgatgtt

SEQ ID NO: 6037 - DNA, 471 bp, Zea mays
  Clone ID: LIB3061-062-Q1-N6-D5
ggccccggtaactaaattgcccagaaaaaaaaggggggtcaagaattaaaaaagcccccccggccacaaaaaatgaaacgggccatttggctagctacgggtctttacccggggggggcgagagatggcaaacctatccagcaaccgaaaactttttatgcccaaaagggcccccttccaaaaaaaaactattcagctatcggcacttttgacaccaacatttgaacaaaccattggataaaaacgggtccctggtctaggtttttaaggaactttccaccccatcatttgacgttggaagggttggaaaacaaaaagccaagggggccggactgaaataacaaactgggttaaaaaatccgggcgggggcgccggccccttagggctttttggtccgggcgggctgcctggacccctccggggggagcctgttaatcccgtaacccaaagcgaggacctgggcggcaaaa

SEQ ID NO: 6038 - DNA, 409 bp, Zea mays
  Clone ID: LIB3061-062-Q1-N6-D6
aaaggggggggggggggtgaagggagggtgggggggggggggggggggggggtggggggggggggaaggggggggggggggggggggggggggggggggggggaaaaaaggggaagggggggggaaaaaaaaaaggaaagaaaagggggggaaaaaaaaaggggggggggggggaggggggggggggggggaaaaaaaaaggggggaaaaaaaaaaaaaaaaaggagaaaaaaaaaaaagggggggggagaaaaaaaaacggggggaaaaaaaaaaaaaaagggggggggaaaaaaaaaaaaaaaggggggggggaaaaaaggggggggaaaaagaaaaaaaattggggggaaaaaaaaaaaaaggggggaaagggggacaccagcaaaaaaaaaaaaaaaggtggggg

SEQ ID NO: 6039 - DNA, 529 bp, Zea mays
  Clone ID: LIB3061-062-Q1-N6-D7
ggaaaataacttcttatttctaggaggccacatacatcagccaaaaacttcattattgaattacaactaataagcaatctaaaagaggcaccgccaatgatgtgttgttggtagaaggctgctgggtttgtcaaagcaagttggacaaagggcagcaactgttgcagttgtaagagggttgcggggttagccacaaactgctggtagaacggaagcacttgttgttgtgtcaagaaggaagcggggcttgttgtagctagctggccaaatggtagtagtatttgctgctggaaataagcagaggggttcagtgcggccaattggttaaatggaagaaattgttgctgctgagagtaggcagtagctagctggctgaatggtagtagttgttgttgctgcaaataagcagcagggttcagtatagacagttggttgaatggaagaaattgttgttgctgagagtagggggaaaggtttgccagagctacttggctgatcactggtagcacgagttgctgcaactgttctg

SEQ ID NO: 6040 - DNA, 550 bp, Zea mays
  Clone ID: LIB3061-062-Q1-N6-D8
agaaatgtactttcttatttctgggaagccacaaacatcatccaaaaaattcattattgaagtataactcataagcaatctaaaagagggcaccaccaatgatgggttgttggtagaacgctgttgggtttgtcaaagcaagttggttgaatggcagcaattgttgcagttgtaagagggtgccagcgttaggcgcagcgtgcaggtagaacggcaacaactgttgttgtgtcaagaaggcaacagggctcacatcagctagctggctgaatggtggtagctgttgctgttgtaaataagcagcagagttcaatgctgccagttggttgaatggaagaaattgctgggggtaggcagcagctagctgactgaatggtagttgttgttgcaaataagcagcagagttcaatgcagccagttggttgaatggaagaaactgctgttgctgagagtaggcagcaaggtttcctagcacaagttgttgtagttgttgtgccttgatgttttgtgccaacaaatgcaccaaaggtaactgctgtaatagggctga

SEQ ID NO: 6041 - DNA, 516 bp, Zea mays
  Clone ID: LIB3061-062-Q1-N6-D9
agatctataatacttatttactgagggggcgcacatatcagcatgagaactttattattacagtataaatcataaaaaatctagaagatggcaccaccaatggtgggcgattgcaataagggggtaggattcgtcaaagcatgttggctaaatggcagcaattgttgttgttgtaagaaggcaacaatgtttgccacattatgtgggtagaatggcagcaattgttgctgttgcaagaaggcattaatgtttcccacaacctgtgggtaaaatggcaacaattgttgttgtcgcaagaaagaagcaatgttttccacagcttgcaaatggaatggcagaagctgttgttgcagtaagaaggcatcagggctcccgacaagttggttaaatggtagtagttgttgtgcctgcaagtagacagcagggttcaccccagctagttgattgaatggaagaaattgttgttgctggagataagcagcaaggttcgctgcaactacttgattgattggtggg

SEQ ID NO: 6042 - DNA, 539 bp, Zea mays
  Clone ID: LIB3061-062-Q1-N6-E1
aaaaatgtctttcttattctgggagcccaacatcagacaaaaactttattattgaactataactcataagaaactaaaagaggcaccaccaatgatgggttgttggtagaatgctgctgggtttgtcaaagcaagttggttgaatggcagcaattgttgcagttgtaagagggtgccagcgttaggcgcagcgtgctggtagaacggcaacaactgtggttgtgtcaagaaggtagcagggctcacaccagctagctggctgaatggtagtagttgttgctgctgtaaataagcaggagagttcaatgctgtcagttggttgaatggaagaaattgctgggggtaggcagcagatagctggctgaatggtagttgttgttgttgcaaataagaagcagagttcaatgcagctagttggttgaatggaagaaactgctgttgctgagagtaggcagcaaggtttgctagcacaagttgttgtagttgttgtgccctgatgttttgtgccaataaatgcaccaaaggtaactgctgtaata

SEQ ID NO: 6043 - DNA, 480 bp, Zea mays
  Clone ID: LIB3061-062-Q1-N6-E11
gacaaaatacatacattatgcaacaaaataccagaatgggttacaaaggcagagcgtaagttgtatgtaacaagagacatggtaaaaagcccccattgggagaaattacccgagttagaataatagaaagaggagcctactatagagcggctcaactgtatgttgtcttgcactcatgccgtacccggtaccccatctttttccaaaaaaaaaaatctgctaacttggatcagcaaatacctatcaagatgcaaatgctcactccagttcatgttgattattagtcagagtaatcataacaatctgcaaaaggatgatcggtgctagcctcaacaaaaccgacattttagtctaggttgctgccgatctggatatcaggaaagcaagccccaatgctttctgcttacaaagcttgggtgggtttttcaacatttctatacttgctttctttggacctaaaatgacaccagcaatgctaaa

SEQ ID NO: 6044 - DNA, 560 bp, Zea mays
  Clone ID: LIB3061-062-Q1-N6-E12
ctctatacggccgggcttgttttgggtttttaatctaaaaagtactttcttatttctgggacgccacaaactcatccaaaaacttcattattgaactataactcataagcaatctaaaaggggcaccaccaatgatgggttgttggtagaacactgttgggttgggggggggggttggttgaatggcagcaattgttgcagttgtaagagggtgccagcgttaggcatagcgtgcaggtagaacggcaacaactgttgttgtgtcaagaaggcagcagggctcacatcagctagctggctgaatggtagtagttgttgctgctgtaaataagcagcagagttcaatgctgctagttggttgaatggaagaaattgctgggggtaggcagcaactagctggctgaatggtaattgttgttgcaaataagcagcagagttcaatgcagccagttggttgaatggaagaaactgatgttgctgagagtatgcagcaaggtttgctagcacaagttgttgtagttgttgtgccctgatgttttgtgccaccaaatggaccaaag

SEQ ID NO: 6045 - DNA, 511 bp, Zea mays
  Clone ID: LIB3061-062-Q1-N6-E2
agaaagtactttcttatttctgggaagccacaaacatcagacaaaaactttattattgaactataactcataagaaatctaaaagagggcaccaccaatgatgggttgttggtagaacgctgctgggtttgtcaaagcaagttggttgaatggcagcaattgttgcagttgtaagagggtgccagcgttaggcgcagcgtgctggtagaacggcaacaactgtggttgtatcaagaaggtagcagggctcacaccagctagctggctgaatggtagtagttgttgctgctgtaaataagcaggagagttcaatgctgccagttggttgaatggaagaaattgctgggggtaggcagcaggtagctggctgaatggtagttgttgttgttgcaaataagaagcagagttcaatgcagctagttggttgaatggaagaaactgctgttgctgagagtaggcagcaaggtttgctagcacaagttgttgtagttgttgtgccctgatgttttgt

SEQ ID NO: 6046 - DNA, 514 bp, Zea mays
  Clone ID: LIB3061-062-Q1-N6-E5
ggagaaaatctcaatcaatatattgattatttttaggaaacacatgccgctatgagggcaccattatcgagtacatctcatatgtaatctaaaagaggcaccaccaacgatgggttgctgccacgacaaggcaggggtcatcaaagagaactggttgtatggcagcaattgttgctgctgtaggaaggcagcgaccaatgggttagccaccgctagtggattaagtaactgttgtcgctgttgtaggtacgcagcagagttcgacacagtcagttggttgaatggaagtagttgttgcaagtaggcagcagggtttgccacagctagctgagtaagagctggtacaatttgttgcagcaactgttgttgcaacaactgttgttgcaggtatgtaggtgcattgcccatagcgagcgggctagatgaaagaagttgttgctgttgtaggtaggcgatagggttcaccatggctagttgactgagcgctggtagaaactgttgcaactgttgttgt

SEQ ID NO: 6047 - DNA, 228 bp, Zea mays
  Clone ID: LIB3061-062-Q1-N6-E7
ggtccaaagacatccaacagtatagtagggtaataaacgttgaacagtaacatcattacacatcaaacaaaaaattatatagtgccggtagaagacatctaacaggttgcaactgcgattctgtcctgagtttccatgatacatccggagctcctagtcagttcgcggttgacattcaaggtaggcctcaagccttgctcgcaatgttgctggacagccagtccaggc

SEQ ID NO: 6048 - DNA, 493 bp, Zea mays
  Clone ID: LIB3061-062-Q1-N6-E8
ggaaatacaaaggttcataaaaagggttgctgcaacttctagggcagcttataacagtacatactagcagcacaaatggtcaaggaacagcatgccagacaacgcatcttgcgcccgaacgctcgacttcctgtcaagcggctcttaccataccaagggtacacgatccatcgatgcaataccattgtaggttcttgttttgtagacccaaacccagccgatctatatgacagacccatcgttgatgggtgcattcttcaagatcaccacgattccagaccttatgtagtacccttcttccgggtgatcagcctcttggatgcccttactgtttgggatcaccacgttcttcccaatcctagcattcatgtcaatgatacagttccttatctttgggttccttcctattccaactgggaccttcccagctaacagtagctttgaagcttcttcttcagtttcataggggtccgctcccatcatcacggagtcc

SEQ ID NO: 6049 - DNA, 425 bp, Zea mays
  Clone ID: LIB3061-062-Q1-N6-E9
gcagcaccaataagcccatttttttccttaggatttaacttataataaagcctgacgggggtaacagcacccatcgatccgcagtccatgctggttgatgcatgggtctgctggagccgaggatgaacacagcactaacaactgacacagagcgaccttcaatcaaaaacacagatgggcaacaacaaacacgagacgaacgaagataaacactctggactagggtaaacaacacggtagcgaacaggataacttggccgcgcgggccccaccgctcagttcctccagttcccgtcggagttgccgtaaccgccgccactgttgccaccgacgtagccgccgccaccaccaccgtagccgccgccgccaccaccgtagccgccggcacctccgtaacctccgcccacatcacggaacccgccacc

SEQ ID NO: 6050 - DNA, 193 bp, Zea mays
  unsure (1)..(193): unsure at all n locations; Clone ID: LIB3061-062-Q1-N6-F1
aaaaatagatctctaatactttattactgagaggtcgcacatatcagcatgagaactttattattacagtatgaaatcatagaaaaatctanaagatggcaccaccaatggtgggcggttgcaataaggtggtaggattcgtcaaagcatgttggctaaatggtagcaattgttgttgttgtaagaaggcaac

SEQ ID NO: 6051 - DNA, 533 bp, Zea mays
  Clone ID: LIB3061-062-Q1-N6-F10
caattgttcattcaggtcattgctcacactgacactgccacccatggtgatgcgtgacacattattactcaatcatcgccgctaaatgactcaactagctagctagccagcggctatactacagcacatagtttcttcagtgggggacaccgccggcagcagcgtaggggcatggagtcggctgctgcaggccgcacatcgccgtcagttgctgcgctatctgcgccgccaacagccccgcgacctggccgctttgcggctgctgctgcaggatggactggaggaccaagccgaagatcgcctggtaccggtgctgcggctccacctgcctgagctgctggcaacactgctgccgcaacgactggcactgaggcgagcagtagggcgtcgccgtcgggctgcactgatgcctcaggaactcgacgcactggcccaggatcggggtgctgccaacgccgcaggttccctgcagctggcacgggcttggatgcggctgttggcacgggcatgggtgtggctggggatgaggctgc

SEQ ID NO: 6052 - DNA, 427 bp, Zea mays
  Clone ID: LIB3061-062-Q1-N6-F11
aaaaaaggccttttttttttgggggggggcaaaaacataaaaaaaaaaattttttttgggcctttaacccaaaaaaaaataaaagaggggggccccccaaggggggggggggggaaaaaaaccggtggggttgaaaaaaaaagggggggaaaggggaaaaattggggcaattaaaaaagggggccccctttagggccaagggtctggaaaaaacgaaaaaactgggggggggaaaaaaagggggaagggctaaaaccaactagctgggaaaaggggaaaaattttggcttctaaaaaaaaacgggaaagtccaatgccccccatggggaaaaaaaaaaaaaattggggggggaggaaaaagggacctggcaaaaagggaatttttgttttccaaaaaaaaaaacagaattaaaggccctttgtgggg

SEQ ID NO: 6053 - DNA, 566 bp, Zea mays
  Clone ID: LIB3061-062-Q1-N6-F12
ggggtgtttttttaaacatcctttagttggatgctactaaaactggcggtttctatttcactgaaccatgtcaaacaaatgatccaattctcttaacaaaatcaaaaccagtcatcgtgacgtgtttgttccgagtcatgaacttgtctttattggggcatatttttcgcctatggttccacctttctgcttctgaaattcaatgtaccgcaaagtgctagaaaaagaatgcctctgtagatggatcagctacagagttatcactttgcttctccgttctaatcaattcaatcaaatcttgaatcacagtgtttgtgatttgtggaattcctttctcaaagaagtacaagtacttgttcaaaatttcaataaatagggttacagatccactgctcccccttgtagcactagccatctgttgagcagcatttgcgattctcaaggcacgcttcaaacaaaggagaaccctttcaccatccattataccatcttggtcatcagtccaaaaaagatgtgaacacgcatatactgctcggcattgatcaggcttcttgagaagtttgctg

SEQ ID NO: 6054 - DNA, 522 bp, Zea mays
  Clone ID: LIB3061-062-Q1-N6-F2
ttttttttttttattttttttttttttttgtttttttttttttttttttttttttttttttttttttttttttaatttttttttttttttttttttttttttttttttttttaatttttttttaaaacccaaacaaaaaatttaatttttttaagaaaacaaatttcggtttagggcccccattgccggaccccttcaaaattaaataaaaaaaagggcccccccaacaaggggtttttcaaaggaagggttaaaaaaaaaaaactggtttaatggaaaaaattttttttttttttcaaaaaaggaaccccccaaggggtaaccccctcccaagggataaaaaaacttttgccccttttgaaggcccccacaaaattttaccacacccatttgtttaaatgaaaacaactttttaaaaaagccaaaaggttttcccaaaattagctaataaaaacctggaacaatttgttccaaaaactttttttgaaggccccaagggccattgcccacccgaggcggcct

SEQ ID NO: 6055 - DNA, 526 bp, Zea mays
  Clone ID: LIB3061-062-Q1-N6-F3
cagacaaaaactttattattgaactataactcataagaaatctaaaagagggcaccaccaatgatgggttgttggtagaacgctgctgggtttgtcaaagcaagttggttgaatggcagcaattgttgcagttgtaagagggtgccagcgttaggcgcagcgtgctggtagaacggcaacaactgtggttgtatcaagaaggtagcagggctcacaccagctagctggctgaatggtagtagttgttgctgctgtaaataagcaggagagttcaatgctgccagttggttgaatggaaaaaattgctgggggtaggcagcaggtagctggctgaatggtagttgttgttgttgcaaataaaaagcagagttcaatgcagctagttggttgaatggaaaaaactgctgttgctgaaagtaggcagcaaggtttgctagcacaagttgttgtagttgttgtgccctgatgttttgtgccaataaatgcaccaaaggtaactgatgtaatagggctgatgattgttgga

SEQ ID NO: 6056 - DNA, 535 bp, Zea mays
  Clone ID: LIB3061-062-Q1-N6-F5
aagaatctagaaagtactttcttatttctgggaagccacaaacatcagacaaaaactttattattgaactataactcataagaaatctaaaagagggcaccaccaatgatgggttgttggtagaacgctgctgggtttgtcaaagcaagttggttgaatggcagcaattgttgcagttgtaagagggtgccagcgttaggcgcagcgtgctggtagaacggcaacaactgtggttgtatcaagaaggtagcagggctcacaccagctagctggctgaatggtagtagttgttgctgctgtaaataagcaggagagttcaatgctgccagttggttgaatggaagaaattgctgggggtaggcagcaggtagctggctgaatggtagttgttgttgttgcaaataagaagcagagttcaatgcagctagttggttgaatggaagaaactgctgttgctgagagtaggcagcaaggtttgctagcacaagttgttgtagttgttgtgccctgatgttttgtgccaataaatgcacca

SEQ ID NO: 6057 - DNA, 527 bp, Zea mays
  Clone ID: LIB3061-062-Q1-N6-F6
ggaaatgtaacttcttatttctggttggccacatacatcatccaaaaactttattattgaattacaactaataagcaatctaaaaggggcaccaccaatgatgtgttgttggtaggaggccgctgggtctgtcaaagcaagttggacaaagggcaacaattgttgtagttgtaagagggttgcggggttagccgcaaactgctggtagaaaggcagcaactgttgctgtgtcaagaaggaagcacggtttgctgcagctagctggctaaatggtagtagtatttgctgctgcaaataagcagcggggttcagtgcggccaattggttaaatggaagaagttgttgttgctgagagtaggcagtagctagctggctaaatggtaatagttgttgctgcaaataagcagcagggttcagtgtagacagttggttgaatggaagaaattgttgttgctgagagtagggagaaaggtttgccagagctacttggttgatcagaggtagcacgagttgctgcagctgttgtg

SEQ ID NO: 6058 - DNA, 533 bp, Zea mays
  Clone ID: LIB3061-062-Q1-N6-F7
gagccacacacacacacttgcatataacatcagtaggaataaagcagtacaatttcaaagcgggggaagagcaatgccagttccctctataaaagtagacaaactatgatccaccattgctttactatctgatacatctcaggactcattagcacatacttagctggtattattgcaagaaagcaaccacttgctgctgtcctcagatatacattttttttggcagaatacaagtggactacctgcgccttagatctcttctcgggccacggtctgtaaccagtgttgctctgctccctatattatctgcttgctgaatcatctgtgcactatcgtgcttatagaatgcctgcaaagttctcaccatgaaagggcggacaatgttcacttccattgcagagagatttttgagctttacggcatgggtgcgtccagatatcgtctctaatccagtctcaaccttgtgaaatctgacatctctgatgtcctcaattagagatcttaccaggtatgcatctgagatgtcatcacga

SEQ ID NO: 6059 - DNA, 536 bp, Zea mays
  Clone ID: LIB3061-062-Q1-N6-F8
gaaacaaaacagacacattgtctggccacaaacagaaactagtagcagttcacacattgtctggccacaaacagaaacaaaaacagtctcacacatacaggaacacaactgatttgtctcacacaaacagaaacaaatacagtctcacacatagtctcacacatacaggaacacacaaagtctcacacatacaggaacacattcagtttcagttcagttactttcaagcatttttcttcttcggcgtcaacttctttcctattgctcttttttttatccttggtggggttaagtggccaacatcaggaactgaagttgtggcgcccaacagaagccttggggctgttaagtggccgacagcaactccctcggactcctgcggcacaacatcaactccctctgctgtcaaatacagttcgtccccaccaccatcaactccctgtgctgtcacttcagttcgtccgggaacgtctggtgggttgtcatcttgatgtataggtgattcggccatattttttggaaaccattgttttgtg

SEQ ID NO: 6060 - DNA, 505 bp, Zea mays
  Clone ID: LIB3061-062-Q1-N6-F9
acaatcccacagccaaacacaggtgggatctttttattcgggcttatactccggaaacaaggggcatacaatccggatacactctcaacgggacttttctccagatttagacatccctatctatgggggtctcagcaaccacaccaatctcgggggggggcagcaacctcaggccttcagggggggggtgcgcccccgcctccctggatatgaacactgactgggggggggttgaccacaggaatatccaagctggcgccggccgcctttggggggacctcccggacatcagcgatcagcgcttttgggtggtggaagctactccactttggatcggcaacaggacgggggtccaccccatccacaggcaggtgggcctcagtggtatcgctcgaaaccgggaccgatctaaagtcacttacgcaggctttggccacatcatcggctgatgcgtaaacatgctttgtcaacagaggggaattatcggcgcctgagcatgattcaa

SEQ ID NO: 6061 - DNA, 413 bp, Zea mays
  Clone ID: LIB3061-062-Q1-N6-G10
aaaagaacaatttattatcatcaattagaactaaatctactcacaagtgaagtatattgatcatggtacagaggggggttctgcaagcttcaggaaaaactgtacaccctctcatgtctttccccatatcaaataagaggggaaccaaaattttttaaggaaccttgaagtaagcttgctagctatgcccgtcatcatgtatagatccattcccgggctagccatgtttgatatcataaggcaatatacagagattaaactttcctatacgttcccgagacttgccaagattaaaagcaatcaattctggaagcaggcatagaaaagtattgacgaggaaatgccacgttgcagatgtcaaagaatgaatctcccattactcctcatcctcagaatcagatcggacatcgtct

SEQ ID NO: 6062 - DNA, 576 bp, Zea mays
  unsure (1)..(576): unsure at all n locations; Clone ID: LIB3061-062-Q1-N6-G11
ctctanacggccggcgggggggggttttttgagcaaggagaactgtatttattccatgggcacaatgcagactttcttttgtgcaacatgacctcggcatggtaacccttattacaagcaataatctatcacagctcaatgcgcagcagctcagtttgccgggtcgggggggatttgttcaggtactccatcgctactgcagagtggaaggcagctcctacaggcagaacgtcctcatctatcacgaagtacggggagtggagaggatgcattgcctcctccatgctcttgttgcggactccgatcatgaagaacgcccctgcaaacttctccgcgtagaaggagaaatcctcggcgcccatcatctgcgcgcctacactcaccttgtcctgcccaagcatgggctctgccacttctctggcgtgacggtacatcccttcgtcgttcacggtggctgggtacgggcggagcttctcctgcatgaagtcgacggcggcggtgcancggtggacggcggcatgaccttctatgatctctttgatcctcttcatgagatacgaaaagccttctgttgtc

SEQ ID NO: 6063 - DNA, 536 bp, Zea mays
  Clone ID: LIB3061-062-Q1-N6-G2
catcacaagggtcatatttactgatggaggtaatatcgacacttttaggaagtgcacacaagtaaagccactcgcaagtgctgtactatatacgtaggaaaacgtagcatgaacagtacacggacccagttaccgtatcacacgtacaaattcaccccacaagtacaggaaactgtccctgtccctgtcacatgatcaagggtagggacacttattcatgggtttatcttattatctatggaacactgaacattacggctttgacgcgccagcacagcccagcacagccacgtataggcgccgctcagtgctgtccgggcagcttctccttgatcttgtccataatgcctttcttctcgccggtgccctcggtgccggtggcgtaggagccgccggtgtgtccctgctgcccgtaggcgctgccggtgtgtccctgctgcccgtaggcgccgccggtcgtcgccgtggcgtgctggtcgtccttgtggcctccgggcagcttctccttgatcttctccttgattcccttcttcctc

SEQ ID NO: 6064 - DNA, 465 bp, Zea mays
  Clone ID: LIB3061-062-Q1-N6-G3
aaaaaaaaaatttttttttttatctttttttatatttttttttaaaatagtcccccccaatttttttttgtggggggtaacattttcaaaaaaaaaaaaaaaagttggaaaaaaaacaaaaaaaaaaaaaaaaaaaagccccccccaacgggggggatggggaaaaaaaaaaacggtacaccaaaaaaaggggggaagaaaggaccaaatctcacaaaaaaaaaaagggggccccccaaaaaaaaatccccccaaaaaaaaacaaaaaaatttattgtttcaaaaaagagaaaggggaaaaaaaactgggggtgggaaaaaaaaaaaaggctggaagggtttttaaaaaaacaaaaaacccccccctttaaatgcgcccaaaggaaaaaaaggaagaagggggggccccaaaaagtttccaaaaaggattttttccaaaaaaaaaaaaaacagttcccccccccc

SEQ ID NO: 6065 - DNA, 555 bp, Zea mays
  Clone ID: LIB3061-062-Q1-N6-G4
gggggggggtttttttttttttttttttttttttttttttttttttttttttaccgacgaactttgaatacatacactagaaaaaacacaccggggttttgggggctgcagaaaaagggagggctttttggctgggggatcaactgaattaaagagggggggggggggctggcacagactgggtcggcgtttttggtcctcaagaaactcggcagggggggggctatttactagtcaaggggggttcagattttggtttgattttatggtccggaaaaagggggcccaatgatattcattaacatttatttattcgatgcatgagatacaggcgacgttttcaaggacgcacacaaagggggcaacctccttacttttatttaatgacggggagggaaccaaacttttattggctactacgacgagggtactacgcgggggcttttggttcccattaattcccatggggggatacgtacccgtatactatttagttggggaccttgacgagcttaggacgggacatgggctctggtatttgatcagggggcgagc

SEQ ID NO: 6066 - DNA, 527 bp, Zea mays
  Clone ID: LIB3061-062-Q1-N6-G5
gggaaagtaacttcttatttctggttggccacatacatcatccaaaaactttattattgaattacaactaataatcaatctaaaagaggcaccaccaatgatgtgttgttggtaggaggctgctgggtttgtcaaagcaagttggacaaagggcaacaattgttgtagttgtaagagggttgcggggttagccgcaaactgcttgtagaaaggcagcaactgttgctgtgtcaagaaggaagcacgacttgctgcagctagctcgctaaatggcagtagtatttgctgctgcaaataagcagcggggttcagtgcggccaattggttaaatggaagaagttgttgttgctgagagtaggcagtagctagctggctaaatggtaatagttgttgctgcaaataagcagcagggttcagtgtaaacagttggttgaatggaagaaattgttgttgctgagagtagggagaaaggtttgccagagctacttggttgatcacaggtagcacgagttgctgcagctgttgtg

SEQ ID NO: 6067 - DNA, 529 bp, Zea mays
  Clone ID: LIB3061-062-Q1-N6-G6
gggataagtttaatcatattggggtacaaaaaaaacttgtcatgatccatgagatttacgggtaaagacagtagcacagtttgctcgtcattttccacagacctattcttgatctcaacctgggggtacatctaatgtagtatccaaaaaattaacacgcactttacagataattgatggcggtgtagaacttctggagttaaaacaaagagaatgggatttgcgcgctgacttgcaagcatcggctattctttaccatccagcaaatgattcatgacgaggcggaggctccttagctgcttccagatttgagcgtgttactgagccagtccaaaccttcgaagagcccctctccctttattgcagatgttttgaaaatcgcccattggcggctcttaattttgtgtagttctaatgactctgtaatggcagcatcatcgagtgcacctggaagatcctgcttatttgcatacacaaggacaactgcacctttaagttcatcctcctcaaggatggcatggaattcttc

SEQ ID NO: 6068 - DNA, 540 bp, Zea mays
  Clone ID: LIB3061-062-Q1-N6-G7
gttaattcacatattattcatcattccacaaaattcatacaagcccacaaatagctacagacacatatatagatccatcacatatatagctagacggatccaacaccacaatacatgtccaaaactccatctggtactaatccagttaagttcaaaataaaggacatgacaccttacattatactagtataataatatgtattatacgatactgccgtgccagtgtatactagctagctaggggcacgaggcgatgatgcttgctgctgcggctggcgtcccgtccctcctttcggcggggcctcctccacctgtcgcggcgccgaaccatccaagcgcacgcatggacgccatgcactggcaggtatatctttaatttgtagctagctagttcatcctgacgatgtccatgatgaggttgaggtccaagtgcgggtagtcgccgccgccggcagccttagattcttcctcggaggcgaggcagcagccggtgacaatggcgacgatgtcgatatcctcgtcgtcgcccggcgccgtggc

SEQ ID NO: 6069 - DNA, 133 bp, Zea mays
  unsure (1)..(133): unsure at all n locations; Clone ID: LIB3061-062-Q1-N6-G9
ggggggtgtggggggtttnaaaaanttntnnttttttttttttattttttaaaaaaaaaaaaaatttatttttggggtnttttttggggatgtttttattttgtgtttggaaaagggtgtttgtgggaggggg

SEQ ID NO: 6070 - DNA, 543 bp, Zea mays
  Clone ID: LIB3061-062-Q1-N6-H1
gtgtgtgtttttttttttttttttttttttttttttttttttttttaaaatctggaaatgtaactttttatttctgggtggccacatacatcatccaaaaaatttattattgaattacaactaataatcaatctaaaagagggcccccccaagggggggttgttggtaggaggctgctgggtttgtcaaagcaaggtggacaaagggcaacaattggtgtagttgtaaaagggttgcggggttagccccaaactgcttgtaaaaagggagcaactgttgctgtgtcaaaaaggaagcacgacttgctgcagctagctcgctaaatggcagtagtatttgctggtgcaaataaacaggggggttcagggcggccaattggttaaatggaaaaagttgttgttgctgaaagtaggcaatagctagctggctaaatgggaatagttgttgctgcaaataagcagcagggttcaatgtaaacagttggttgaatggaaaaaatgttgttgctgaaagtaggaaaaagtttgccaaaacacttggttg

SEQ ID NO: 6071 - DNA, 548 bp, Zea mays
  Clone ID: LIB3061-062-Q1-N6-H11
ggcttgttggggtttttttttcacaattaaaatctgggaaagtaacttcttatttctgggtggccacatacatcatccaaaaactttattattgaattacaactaataatcaatctaaaagaggcaccaccaatgatgtgttgttgggggggggggggggggtttgtcaaagcaagttggacaaagggcaacaattgttgtagttgtaagagggttgcggggttagccgcaaactgcttgtagaaaggcagcaactgttgctgtgtcaagaaggaagcacgacttgctgcagctagctcgctaaatggcagtagtatttgctgctgcaaataagcagcggggttcagtgcggccaattggttaaatggaagaagttgttgttgctgagagtaggcagtagctagctggctaaatggtaatagttgttgctgcaaataagcagcagggttcagtgtaaacagttggttgaatggaagaaattgttgttgctgagagtagggagaaaagtttgccaaagctacttggttgatcacaggtagcacgagttg

SEQ ID NO: 6072 - DNA, 524 bp, Zea mays
  unsure (1)..(524): unsure at all n locations; Clone ID: LIB3061-062-Q1-N6-H12
taaaaagtactttcttatttctgggacgccnacaaacatcatccaaaaaacttcattattgaactataactcataagcaatctaaaagaggcaccaccaatgatgggttgttggtagaacactgttggggggtgaggggaagttnnttgaatggcagcaattgttgcagttgtaagagggtgccagcgttaggcatagcgtgcaggtagaacggcaacaactgttgttgtgtcaagaaggcagcagggctcacatcagctagctggctgaatgggagtagttgttgctgctgtaaataagcagcagagttcaatgctgctagttggttgaatggaagaaattgctgggggtaggcagcaactagctggctgaatggtaattgttgttgcaaataagcagcagagttcaatgcagccagttggttgaatggaagaaactgatgttgctgagagtatgcagcaaggtttgctagcacaagttgttgtagttgttgtgccctgatgttttgtgccaccaaatggacc

SEQ ID NO: 6073 - DNA, 530 bp, Zea mays
  Clone ID: LIB3061-062-Q1-N6-H3
aacaagcaatccaatcttgggcagttttttctcaaacaaacccttttgagttcaattcaaccaggacaactatagttgtggatataacaatagtacatagatagtacccaacatgggtaactaatctcgccgcaagcctagcacttgatctccttaagaccatgagagaaatagaggaatgtcggattagtggcaccatccttgtaataggcgaataccacggacgcatcatccttcatgctctcaccaacaaaaaattgaaggtccttcagcttgctaaggagaaacttggttgcaccctcgacaccctttttgaactcatccgctttctctggctccaacacagcagtgagattcttgatgtattttttaatgtaagagacaaatgatttcttgtcaaaaggaggttgctcctgtagacggaatgtgtcaacaatatcaaccaccttcacggctgtgtcatcaacgctttcgtcctcaccaccctcggcggatggattggcaccaatgtctacatcaacaggaccttg

SEQ ID NO: 6074 - DNA, 542 bp, Zea mays
  Clone ID: LIB3061-062-Q1-N6-H5
gttgtgttttttttttttttcaaaaattattgagaaaaatctcaatcaatatattgattatttctaggaaaccatgccggaatgagggcaccattatcgagtacatctcatatgtaatctaaaaaaggcacctccaacgatgggttgctgcctcgacaagacagggtttatcaaagagaactggttgtatggcagcaattgttgctgctgtaggaaggcagcgaccaatgggttagccactgctagtggattaagtaactgttgtcgctgttgtaggtacccagcaaagttcgacatagtcagttggttgaatggaagcagctgttgcaagtaggcagcagggtttgccacaactagctgagtcaaagctggtacaatctgttgcaacaattgttgttgcaggtatgtaggtgcattggccacagcgagcgggctaaataaaagcagttgttgctgttgtaggtaggcggcagggttcaccatggctagttgactgagcgctggcaaaaactgttgcagctgttgttgtggctggtttgcaa

SEQ ID NO: 6075 - DNA, 547 bp, Zea mays
  Clone ID: LIB3061-062-Q1-N6-H6
gccgggggggggggggttttttttaaaaatgtactttcttatttctgggaagccacaaacatcagacaaaaactttattattgaactataactcataagaaactaaagggggcaccaccaatgatgggttgttggtagaatgctgctgggtttggcaagggaggttggttgaatggcagcaattgttgcagttgtaagagggtgccagcgttaggcgcagcgtgctggtagaacggcaacaactgtggttgtgtcaagaaggtagcagggctcacaccagctagctggctgaatggtagtagttgttgctgctgtaaataagcaggagagttcaatgctgtcagttggttgaatggaagaaattgctgggggtaggcagcagatagctggctgaatggtagttgttgttgttgcaaataagaagcagagttcaatgcagctagttggttgaatggaagaaactgctgttgctgagagtaggcagcaaggtttgctagcacaagttgttgtagttgttgtgccctgatgttttgtgccaataaatgca

SEQ ID NO: 6076 - DNA, 539 bp, Zea mays
  Clone ID: LIB3061-062-Q1-N6-H7
cacattagaaatctgggaaagtaacttcttatttctggttggccacatacatcatccaaaaactttattattgaattacaactaataatcaatctaaagggggcaccaccaatgatgtgttgttggtaggaggctgctgggtttgtcaaagcaagttggacaaagggcaacaattgttgtagttgtaagagggttgcggggttagccgcaaactgcttgtagaaaggcagcaactgttgctgtgtcaagaaggaagcacgacttgctgcagctagctcgctaaatggcagtagtatttgctgctgcaaataagcagcggggttcagtgcggccaattggttaaatggaagaagttgttgttgctgagagtaggcagtagctagctggctaaatggtaatagttgttgctgcaaataagcagcagggttcagtgtagacagttggttgaatggaagaaattgttgttgctgagagtagggagaaaggtttgccagagctacttggttgatcacaggtagcacgagttgctgcagctgttg

SEQ ID NO: 6077 - DNA, 597 bp, Zea mays
  unsure (1)..(597): unsure at all n locations; Clone ID: LIB3061-063-Q1-K6-A1
tatgnanaccaactagcaacatagnaaagcacaatagtgtaccaacaatggcagccaaaatttttgcttccttatgctccttggtctttctgcaagtgttgctaccgcaaccattttcccacaatgctcacaagctcctatagcttcccttcttcccccatacctctcaccagcggtgtcttcaatgtgtgaaaccccaattgttcaaccctacaggatccaacaggcaatcgcaacaggcatcttaccattatcacccttgttcctccaacaaccgtcagccctattacagcagttacctttggtccatttggtggcacaaaacatcagggcacaacaactacaacaacttgtgctagcaaaccttgctgcatactctcagcaacatcagtttcttccattcaaccaactggctgcattgaactctgctgcttatttgcaacaacaattaccattcagccagctagttgctgcctacccccagcaatttcttccattcaaccaactagcagcattgaactctgctgcttatttacagcagcaacaactactaccattcagccagctagctgatgtgagccctgctgccttcttgac

SEQ ID NO: 6078 - DNA, 596 bp, Zea mays
  Clone ID: LIB3061-063-Q1-K6-A12
gcgtttttgcaacgcaacagcaacaacaatttctaccagcgctgagccaactagctgtggtgaaccctgtcgcctacttgcaacagcagttgcttgcatccaacccacttgctctggcaaacatagttgcataccaacaacaacaacaattgcaacagtttctaccagcgctcagtcaactagccatggggagccctgccgcctacctacaacagcaacaactgatttcatctagccctctcgctgtggttaatgcacctacatacctgcaacaacagttgctgcaacagattgtaccagctctgactcagctagctgtggcaaaccctgctgcctacttgcaacagctgcttccattcaaccaactgactgtgtcgaactctgctgcgtacctacaacagcgacaacagttacttaatccactagcggtggctaacccattggtcgctgccttcctacagcagcaacaattgctgccatacaaccagttctctttgatgaaccctgccttgttgtggcagcaacccatcgttggaggtgccatcttttagattacatatgagatgtactcgataatggtgccctcatagcggcat

SEQ ID NO: 6079 - DNA, 434 bp, Zea mays
  unsure (1)..(434): unsure at all n locations; Clone ID: LIB3061-063-Q1-K6-A4
gcanaanaaacagnaaaggaatacagaagtggaaagcaaaatacttctcttgtgtggggacacttgctttcagctgcgaaggagcattgcttgcatcggggtcggctgactgtactgttaagctctgggatgtcgctttcagcacaaaagccctgaagacagaggacaccaaaggcagctcatcagctaaccgactgagactgcttaaatctctgcctacaaaatcagctcctgtctatagcctgcggttttctcggaggaaccttctgtttgcctccggtgctctcgcgtaagctgcgtgtttcgtagaatacagctagaactgttccggttttgacatggagtagtgaagttggcatttcgcagactccgctgtggatcctattgtagagctaatattttcgttagcaatctcaacggcccagcatgtntgc

SEQ ID NO: 6080 - DNA, 502 bp, Zea mays
  Clone ID: LIB3061-063-Q1-K6-A5
cccccgggtcgacccagcgttctcttgtgctagcaaaccttgctgcatactctcagcaacatcagtttcttccattcaaccaactggctgcattgaactctgctgcttatttgcaacaacaattaccattcagccagctagttgctgcctacccccagcaatttcttccattcaaccaactagcagcattgaactctgctgcttatttacagcagcaacaactactaccattcagccagctagctgatgtgagccctgctgccttcttgacacaacaacagttgttgccgttctacctgcacgctatgcctaacgctggcaccctcttacaactgcaacaattgctgccattcaaccaacttgctttgacaaacccaacagtgttctaccaacaacccatcattggtggtgccctcttttagattgcttatgagttatagttcaataatgaagttttttggatgatgtttgtggcgtcccagaaataagaaagtacatttct

SEQ ID NO: 6081 - DNA, 602 bp, Zea mays
  unsure (1)..(602): unsure at all n locations; Clone ID: LIB3061-063-Q1-K6-A6
tcgtttggntttggnaaggnaggcaagggaagtctacttcagggatatatggccctcaacagaagaaattgcgcaggttgtccaatccagtgtgctgcctgacatgttcaagggcacctatgaggctatcacaaaaggcaacccaatgtggaaccagctaactgtcccagaagcgtcactctactcatgggattccaaatccacttacattcatgagcccccttactttaaggacatgaccatgtccccacctggcccctctacagtgaaagatgcctactgcttgctgaacttcggggacagcatcactacagatcacatttcacctgcaggaagcatacacaaagacagtcctgctgctaagtatttgatggagcgtggtgtggaccggaaggacttcaactcatatggtagccgtcgtggtaatgatgaagtaatggcaaggggaacgtttgcaaacattaggatcgtgaacaagtttttgaacggagaagttggacccaagaccattcatgttcctactgnggagaagctttctgtttttgatgcggccatgagatacaaatctgagggccatgctactataatcctcgctggtgctg

SEQ ID NO: 6082 - DNA, 596 bp, Zea mays
  unsure (1)..(596): unsure at all n locations; Clone ID: LIB3061-063-Q1-K6-A7
gcaacatagnaagcacaatagtgtaccaacaatggcagccaaaaattttgcctccttatgctccttggtctttctgcaagtgctgctacggcgaccattttcccacaatgctcacaagctcctatagcttcccttcttcccccgtacctctcaccagcggtgtcttcggtatgtgaaaacccaattcttcaaccctataggatccaacaggcaatcgcagctggcatcttacctttatcacccttgttcctccaacaatcatcagccctattacagcagttacctttggtgcatttattggcacaaaacatcagggcacaacaactacaacaacttgtgctagcaaaccttgctgcctactctcagcaacaacagtttcttccattcaaccaactagctgcattgaactctgcttcttatttgcaacaacaacaactaccattcagccagctatctgctgcctacccccagcaatttcttccattcaaccaactgacagctttgaactctcctgcttatttacagcagcaacaactactaccattcagccagctagctggtgtgagccctgctaccttcttgacacaaccacaatt

SEQ ID NO: 6083 - DNA, 604 bp, Zea mays
  unsure (1)..(604): unsure at all n locations; Clone ID: LIB3061-063-Q1-K6-A8
tccggcaacatanaagtgngatacagtagcaacaatagagcaacaatggcggccaagatattttccatccttatgctccttgctctttctgcatgtgttgctaacgcgaccatttttcctcaatactcacaagctcctatagctgcccttcttcccccataccttccatcaatgaccgcttcagtttgtgaaaacccagcccttcaaccctacaggctccaacaagcaatcgcaacaagcaacttacctttatcacccctgttctttcaacaatcgccagccctatctttggtgcagtcattggtacaaaccatcagggcacaacagctgcaacaactcgtgctaccagtgatcagccaagtagctctggcaaacctttctccctactctcagcaacaacaatttcttccattcaaccaactgtctacactgaaccctgctgcttatttacaacaacaacaactactaccattcagccagctagctactgcctactctcagcagcaacaatttcttccatttaaccaattggccgcactgaacccctctgcttatttccagcagcaaatactactaccatttggccagctagctacaacaagcc

SEQ ID NO: 6084 - DNA, 577 bp, Zea mays
  unsure (1)..(577): unsure at all n locations; Clone ID: LIB3061-063-Q1-K6-B1
tcgctgngcgtcttacaacaaccaattgcccaattgcaacaacaatccttgccacatctaacaatacaagccatcacaacgcaacagcaacaacagttcctaccagcactgagccacctagccatggtgaaccctgccgcctacttgcaagagcagctgcttgcatccaacccacttgctctggcgaacgtagttgcaaaccagcaacaacaacagctacaacagtttctgccaacgctcagtcaactagccatggtgaaccctgccgcctacgtacaacaacaacaactgctttcatctagcccgctcgctgtgggcaatgcacctacatacctgcaacaacaattgttgcaacagattgtaccagctctgactcaactagctgtggcaaaccctgttgcctacttgcaacagctgcttccattcaaccaactgactctgtcgaactctgctgcgtacctacaacagcgacaacagttacttaatccattggtagtggctaacccattggtcgccgccttcctacagcagcaacaattgctgccatacaaccagttctcttttgatgaatcctgtc

SEQ ID NO: 6085 - DNA, 616 bp, Zea mays
  unsure (1)..(616): unsure at all n locations; Clone ID: LIB3061-063-Q1-K6-B11
agctccgacaattatgcacataaaactgctgttgatgccaggaatgagagtggctctgatattgttattgtggcaaggacagattctcgtcaagctgtgtctcttaatgaagcattatggagagtacgggcctttgctgatgctggagcagatgttctattcattgatgccctcgcctcaaggggaagaaatgaaggcattttgcgctatcgcgcctggagttccaaaaatggccaacatgttagaaggtggtggtaaaactcctatactngagccctgtgtgaactgggaagaaataggttataaaatcatagcctatccattatctctaattggtgtatcgatgcgtgcaatggaggtttgtttttcatttatatatgtgaatagaatgtttttcatttatatatgcaaacaatatgattgtttttcatttatacatgtcagtatttcattgcacgactaactgcatctcagtggatcatgcacattgtttgccattagcatttgggcaaaaggaggaatcaacatttgtgtatgcatgccatacgaaacttgtggtatagaagcaagaatgagcccttgtgtagttgttaaatttgctgtgcacatatttgct

SEQ ID NO: 6086 - DNA, 608 bp, Zea mays
  unsure (1)..(608): unsure at all n locations; Clone ID: LIB3061-063-Q1-K6-B2
cagcaagcaacatagnaagtagaatccattagcaacaatagagcaacaatggcgaccaagatattttccctccttatgctccttgctctttctacatgtgttgctaacgcgacaattttccctcaatgctcacaagctcctatagcttcccttcttcccccataccttccatcaattatagcttcagtatgtgaaaacccagctcttcaaccatataggcttcaacaagcaatcgcagcaagcaacatacctttatcgcccttgttgtttcaacaatcaccagccctatctttggtgcagtcattggtacaaaccatcagggcacaacagctgcagcaactcgtgctacctgtgatcaaccaagtagctctggcaaacctttctccctactctcagcaacaacaatttcttccattcaaccaactgtctacactgaaccctgctgcttatttgcagcaacaactattaccatttagccagctagctactgcctactctcagcaacaacaacttcttccatttaaccaattggccgcactgaaccccgctgcttatttgcagcagcaaatactactgccatttagcgagctagctgcagcaagtcgtgc

SEQ ID NO: 6087 - DNA, 142 bp, Zea mays
  Clone ID: LIB3061-063-Q1-K6-B5
cttgctttgacaaacccagcagcgttctaccaacaacccatcattggtggtgccctcttttagatttcttatgagttatagttcaataataaagttttttgtctgatgtttgtggcttcccagaataagaaagtacatttct

SEQ ID NO: 6088 - DNA, 576 bp, Zea mays
  Clone ID: LIB3061-063-Q1-K6-B6
tttttttttttcatttcaattgttcattgaggcctcggtcgtgctgctctgccaccatggtgccccgtgctcacaagctcctcaagcttccctgcttccgccgtccctctgcccacggcgtgtggcggttgtgcagaaccctattcttcagcggggggggggccatcaggcactcgcagctggcctcttacctttgtcacccttggtcctccaacactcatcacccctcttacagcagttacctttggtgcatttatcggcccacaacatcagggcgcagcatctacaacaacttgtgctagcacaccttgctgcctgctctcagcaacagcagtttcttctcttcgcccaactggctgccttgcactctgcttcttatttgctgcatcctcggctaccattcagcccgctatctgctgcctaccccgcgcggtttctttcattcagccatctggcagccttggactctcctgcttcttttctgctgctccagctcctaccattcagcctgcttgctggggggagccctgctaccgtttgggcccatccaccggtgttgcccttctaccagcacac

SEQ ID NO: 6089 - DNA, 606 bp, Zea mays
  Clone ID: LIB3061-063-Q1-K6-B8
gctcccgctacggttgaggcgttgctggtgcacacaggaagggaagggaagggagagctgcacacagctttgctctggctcttggctcccctgtccagctgtcctgtccgtccatcatggaggaaacgcccagcccgcagctctagccgccgtcaatctcgtctcgtatcggagtcgaaggaagtaagaggcgggatggcatgaagcgacctaccaagaatgagaggctgggcaacccccggcacaagtaggaggaagaacccgagcaaccgagccacagggaggaggaggagatgggcaactgcggcacacgggaggagaatgccgtcgtcgctgcgcacgcgcaagttcagcaactccacttgttacaacagccttccaagaacgccaatgcagataggaagcacacctgcatgtcatcagatataagtgacccttccacacctaggaaagttgaagatgccaagaacatttccatatacaacgatgtgattgccttcacattgtttgagctagagacaatcacaaagagcttccgtgttgattatgttcttggcgaaggaggatttgggaccgtttacaagggttacatagatgaaaatgtca

SEQ ID NO: 6090 - DNA, 612 bp, Zea mays
  Clone ID: LIB3061-063-Q1-K6-C12
gcgttcgcacaacaatacctctctccggtgacaggcgcggggatgcaacacccaactatacaatcctacatgctacatgaggccatcgtagcaagcatcttacggtcattagcattaaccctccaacagccatatgccctattgcaacaaccatccttagtgcatctgtatctccaaagaatcgcgaggcaacaactacaacaacagttgctaccaacaatcaatcaagtagttgcagcgaaccttgctgcttatctccagcaacaacaatttcttccattcaatcaactagctggggtgaaccctgctgtctacttgcaggcacaacaactactaccatttaaccaacttgtcgggagccctgatgccttcttactgcaacaacagcttctgccattccatctgcaagctgtggaaaacattgcttctttcttgcgacaacaacaattgttgccattttacccacaggttgtgggaaacattaatgccttcttgcaacagcaacaattgctgccattctacccacataatgtggcaaacattgttgccttcttacaacaacaacaattgctgccatttagccaacatgctttgacgaatcctaccacctta

SEQ ID NO: 6091 - DNA, 584 bp, Zea mays
  Clone ID: LIB3061-063-Q1-K6-C2
taacacaccaagcgaacgcactagcaacgacctaacaccaatggctaccaagatttagccctccttgcgcttcttgcccttttagtgagcgcaacaaatgcgttcattattccacagtgctcacttgctcctagtgccattattccacagttcctcccaccagttacttcaatgggcttcgaacatccagccgtgcaagcctacaggctacaactagcgcttgcggcgagcgccttacaacaaccaattgcccaattgcaacaacaatccttggcacatctaaccctacaaaccattgcaacgcaacaacaacaacaacaacagtttctgccatcactgagccacctagccgtggtgaaccctgtcacctacttgcaacagcagctgcttgcatccaacccacttgctctggcgaacgtagctgcataccagcaacaacaacagctgcaacagtttatgccagtgctcaatcaactagccatgggtgaaccctgccgtctacctacaactaccttcatctagcccgctcgcggtgggcaatgcacctacgtacctacaacaacaggtgctgcaacaaattgtac

SEQ ID NO: 6092 - DNA, 304 bp, Zea mays
  Clone ID: LIB3061-063-Q1-K6-C3
ctacacccactgtgcaagcctataggctacaacaagcaattgcggcgagcgtcttacaacaaccaatttcccagttgcaacaacaatccttggcacatctaacaatacaaaccatcgcaacgcaacagcaacaacaattcctaccagcactgagccacctagcctggtgaaccctgccgcctacttgcaacagcagttgcttgcatcaaacccacttgctctggcaaacgtagttgcaaaccagccacaacaacagctgcaacagtttctgccagcgctcagtcaactagccatggtgaaccct

SEQ ID NO: 6093 - DNA, 592 bp, Zea mays
  unsure (1)..(592): unsure at all n locations; Clone ID: LIB3061-063-Q1-K6-C5
ccaactagcaacatagnaaagcacaatagtgtaccaacaatggcagccaaaaattttgcttccttatgctccttggtctttctgcaagtgttgctaccgcaaccattttcccacaatgctcacaagctcctatagcttcccttcttcccccatacctctcaccagcggtgtcttcaatgtgtgaaaccccaattgttcaaccctacaggatccaacaggcaatcgcaacaggcatcttaccattatcacccttgttcctccaacaaccgtcagccctattacagcagttacctttggtccatttggtggcacaaaacatcagggcacaacaactacaacaacttgtgctagcaaaccttgctgcatactctcagcaacatcagtttcttccattcaaccaactggctgcattgaactctgctgcttatttgcaacaacaattaccattcagccagctagttgctgcctacccccaacaatttcttccattcaaccaactagcaacattggaactctgctggttatttacagcaacaacaactactaccatttcaaccagctagcttgatgtgagccctgctgcctttttgac

SEQ ID NO: 6094 - DNA, 402 bp, Zea mays
  Clone ID: LIB3061-063-Q1-K6-C6
gcgttcggcaacaacaacaactaccattcagccagctatctgctgcctacccccagcaatttcttccattcaaccaactgacagctttgaactctcctgcttatttacagcagcaacaactactaccattcagccagctagctggtgtgagccctgctaccttcttgacacaaccacaattgttgccgttctaccagcacgctgcgcctaacgctggcaccctcttacaactgcaacaattgctgccattcaaccaacttgctttgacaaacccaacagcattctaccaacaacccatcattggtggtgccctcttttagatttcttatgagttatagttcaataataaagttttttgtctgatgtttgtggcttcccagaaataagaaagtacatttctag

SEQ ID NO: 6095 - DNA, 490 bp, Zea mays
  unsure (1)..(490): unsure at all n locations; Clone ID: LIB3061-063-Q1-K6-C8
anagctcaaaactgatctcactgatccagtatggctatggcaaaggcaggcgcgccgagggtctcggcggcccagctggtgactctcgggctatcactcctctgcgctgtcgccggcccggccgccgcgcagaactgcggctgccagccaaacgtatgctgcagcaagtttggctactgcggcacgaccgacgagtactgcggcgacgggtgccagtcgggcccgtgccgctcgggcggcggcggcagcagtggcggcggtggtgcgaacgtggctagcgtcgtcaccggctccttcttcaacggcatcaagagccaggccgggagcgggtgcgagggcaagaacttctacacccggagcgcgttcctgagcgccgtcaaggcgtacccaggcttcgcccatggcgggtcgcaggtgcagggcaagcgcgagatcgccgcctttttcgcgcacgccacgcacgagaccgggcatttctgctacatcagcg

SEQ ID NO: 6096 - DNA, 613 bp, Zea mays
  Clone ID: LIB3061-063-Q1-K6-C9
gcgttcgcctggctctcgctgcgagcgccacctccacgcatacaagcggcggctgcggctgccagccaccgccgccggttcatctaccgccgccggtgcatctgccacctccggttcacctgccacctccggtgcatctcccaccgccggtccacctgccgccgccggtccacctgccaccgccggtccatgtgccgccgccggttcatctgccgccgccaccatgccactaccctactcaaccgccccggcctcagcctcatccccagccacacccatgcccgtgccaacagccgcatccaagcccgtgccagctgcagggaacctgcggcgttggcagcaccccgatcctgggccagtgcgtcgagtttctgaggcatcagtgcagcccgacggcgacgccctactgctcgcctcagtgccagtcgttgcggcagcagtgttgccagcagctcaggcaggtggagccgcagcaccggtaccaggcgatcttcggcttggtcctccagtccatcctgcagcagcagccgcaaagcggccaggtcgcggggctgttggcggcgcagatagcgcagcaactgacggcgatgtgcggcctgcagcagccgactcc

SEQ ID NO: 6097 - DNA, 613 bp, Zea mays
  Clone ID: LIB3061-063-Q1-K6-D11
gcgttctgtgaggttctccggggttcggtttcgtgggtgagcggatcgagatggcggcgtcggatgttgagtaccgctgcttcgtcggcggcctcgcctgggccacggacgaccactccctccacaacgccttcagcacctacggcgaggtcctcgagtccaagatcatcctcgatcgggagacgcagaggtgccgcggcttcggcttcgtcaccttctccacggaggaggcgatgcggaacgccatcgagggcatgaacggcaaggagctggacggccgcaacatcaccgtcaacgaggcccagtcccgcggcggccgtggaggcggcggcggcggcgggtacggtggtggccgtggaggcggcggctacggcggtggcgggcgccgtgatggcggcggcggctacggcggtggcggcggctacggtggtggcggcggcggctacggtggtggtggcggcggctacggcggtggcaaccgtggcggcggctacggcaactccgacgggaactggaggaactgagcggtggggcccgcgcggccaagttatcctgttcgctaccgtgttgtttaccctagtccagagtgtttatcttcgttcgtctcgtgttt

SEQ ID NO: 6098 - DNA, 615 bp, Zea mays
  Clone ID: LIB3061-063-Q1-K6-D12
gcactgccgctcgccgcatcaggggggggggggctgagctagccatggctcgcgtcgccgccatggtggtggtgatggtgctcctccagcagttggcctcctcgtactcgtacaccgtcgcggcccacgccgatgctgctggcgtgcttggccgcaaggcgggcgtcgtcgtcgagggggcgggggtggataatatcgccggctgggccggggaggtacgcagtcatcttcgacgccggcagtacggggagtcgggtgtacatcttccggttcggcaggcagatggacctcctccgcatcggcgacgagatcgaattttttgccaagttgaagccaggtctgagctcgtatgctgggcgaccccaggaggccgcaaagtccattctgcctcttctcgagaaggccaagagcattgtcccctcatggcttatgaaaagaacccctgttaagcttggagcgactgctggattacgccttatcggaaaccaacaagcagacgaaatcctcgatgcggtcagagacctggtccacaagaagagcaaattccagtacaagcccaactggatcaatgttcttgaggggtctcaggaagcatcctacctatgggtcgctctg

SEQ ID NO: 6099 - DNA, 150 bp, Zea mays
  Clone ID: LIB3061-063-Q1-K6-D5
agcgtccgcttgctttgacaaacccagcagcgttgtaccaacaacccatcattggtggtgccctcttttagatttcttatgagttatagttcaataataaagctgtttgtctgatgtttgtggcttcccagaaataagaagtacatttct

SEQ ID NO: 6100 - DNA, 606 bp, Zea mays
  unsure (1)..(606): unsure at all n locations; Clone ID: LIB3061-063-Q1-K6-D8
ggaccagcagcacatanaagtagaatccattagcaacaatagagcaacaatggcgaccaagatattttccctccttatgctccttgctctttctacatgtgttgctaacgcgacaattttccctcaatgctcacaagctcctatagcttcccttcttcccccataccttccatcaattatagcttcagtatgtgaaaacccagctcttcaaccatataggcttcaacaagcaatcgcagcaagcaacatacctttatcgcccttgttgtttcaacaatcaccagccctatctttggtgcagtcattggtacaaaccatcagggcacaacagctgcagcaactcgtgctacctgtgatcaaccaagtagctctggcaaacctttctccctactctcagcaacaacaatttcttccattcaaccaactgtctacactgaaccctgctgcttatttgcagcaacaactattaccatttagccagctagctactgcctactctcagcaacaacaacttcttccatttaaccaattggccgcactgaaccccgctgcttatttgcagcagcaaatactactgccatttagcgagctagctgcagcaagtcg

SEQ ID NO: 6101 - DNA, 615 bp, Zea mays
  Clone ID: LIB3061-063-Q1-K6-D9
gcgagccgtgcaccaggcctgtcctgccggggcagcacgagcgggaaggccggtggtggtgggaggacgccaaggccaaggagtgcggcctccacaagggcaacatcgacaaggacggccaggcggcggcggcggcggcggcggcccccaggactgccaacggcaacggctcggcgggcgccccggacatcttcgagagccccgccgtcgtgtccctcacccgcgccggggtcgagaacctgctgcgcctggagagccgcgccgagccgtggctcgtggtgctgtacgcgccctggtgcccgttctgccaggccatggaggcctcctacgtggagctggccgagaggctggcggggtccggcggcgtgaaggtggcccggttccgcgccgacggcgagcagaagccgttcgctcaggccgagctgcagctgcagagcttccccaccgtgctcctgttcccgagccgcaccgcccggcccatcaagtacccgtccgagaagagggacgtcgactcgctcctcgccttcgtcaacagcctccggtgaggcccgccagtgagcgagaaccatcgttctctgtcagtatgtaccgtgttacatgttggtgtccatctag

SEQ ID NO: 6102 - DNA, 561 bp, Zea mays
  unsure (1)..(561): unsure at all n locations; Clone ID: LIB3061-063-Q1-K6-E2
cagccctnatacatcagttacctttggtgcatttattggcacaaaacatcagggcacaacaactacaacaacttgtgctagcaaaccttgctgcctactctcagcaacagcagtttcttccattcaaccaactagctgcattgaactctgcttcttatttgcaacaacaacaactaccattcagccagctacctgctgcctacccccagcaatttcttccattcaaccaactggcagcattgaactctcctgcttatttacagcagcaacaactactaccattcagccagctagctggtgtgagccctgctaccttcttgatacaaccacagttgttgccgttctaccagcacgctgcgcctaacgctggcaccctcttacaactgcaacaattgctgccattcaaccaacttgctttgacaaacccagcagcgttctaccaacaacccatcattggtggtgccctcttttagatttcttatgagttatagttcaataataaagttttttgtctgatgtttgtggcttcccagaaataagaaagtacatttctagattctt

SEQ ID NO: 6103 - DNA, 403 bp, Zea mays
  Clone ID: LIB3061-063-Q1-K6-E3
gcagctagcacatcaaacagtggcgacagacaaagattgtgagggtgatccgcgctgagaagagaggctaagatcgccgcggcggcggcggcggcgctgtgcttcgcggccctggtggccgtggccgtctgccaaggcgaggtcgagcggcagaggctcagggacctgcagtgctggcaggaggtccaggagagcccgctcgacgcgtgccgccaggtcctcgaccggcagctaaccggcggcggcggcggcggcggcgttggcccgttccggtggggcaccgggctccggatgcggtgctgccagcagctccaggacgtgagccgcgagtgccgctgcgccgccatccggagcatggtcaggggatacgaggaggccatgccgccgctggagaaaggctggt

SEQ ID NO: 6104 - DNA, 604 bp, Zea mays
  unsure (1)..(604): unsure at all n locations; Clone ID: LIB3061-063-Q1-K6-E4
ctcccgcccccagctgaggcaatggggtcctcgtcctcgccgtcgccgccgccgccgcccatgatcgggcgggccgggaacctcaccgtcttcatcacgccgccgtctcctgctagcacgccgcggggcgctttgcgcacgccgccgcccgagtctccgcgctcggatttctctacacccacccgacagaggatagccccgtcgccctccccttctccctcgccgcagaaacacgagagcccgttcgcggcgcctgcggtggtgttcaccccgcccccgccgtcggctcctgtgaaggtcgcgccgccgccggtgcaggtgccgccgccgcagtacgagaaggcgtccgcgggaggcaagcacgacggatcggcgtttggcttcttctgggacgccgtcgcgcgcgtccaggaagcgcacgccagcctcgacgagtacatggctacctggttcgggttggatcagtccaagtaccagtgggcgctcaacgactactacgaggccacaggcaaggacgtggattgtgtaaagggtagtaagctgnaagagcttactactaaagtgcagaaagtctggaaaaaaaagcaactttgtttttgtgttg

SEQ ID NO: 6105 - DNA, 613 bp, Zea mays
  unsure (1)..(613): unsure at all n locations; Clone ID: LIB3061-063-Q1-K6-E5
attgagaaccaatagcaacatagnaaagcacaatagtgtaccaacaatggcagccaaaatattttgcttccttatgctccttggtctttctgcaagtgttgctaccgcaaccattttcccacaatgctcacaagctcctatagcttcccttcttcccccatacctctcaccagcggtgtcttcaatgtgtgaaaacccaattgttcaaccctacaggatccaacaggcaatcgcaacaggcatcttaccattatcacccttgttcctccaacaaccgtcagccctattacagcagttacctttggtccatttggtggcacaaaacatcagggcacaacaactacaacaacttgtgctagcaaaccttgctgcatactctcagcaacatcagtttcttccattcaaccaactggctgcattgaactctgctgcttatttgcaacaacaattaccattcagccagctagttgctgcctacccccagcaatttcttccattcaaccaactagcagcattgaactctgctgcttatttacagcagcaacaactactaccattcagccagctagctgatgtgagccctgctgccttcttgacacaacaacagttgttg

SEQ ID NO: 6106 - DNA, 612 bp, Zea mays
  unsure (1)..(612): unsure at all n locations; Clone ID: LIB3061-063-Q1-K6-E6
gcgttcgacgaatccaanagcacagcagcagtacaatatcgagggagggaggaagacagacagacagacagacagagagatggagcggatgagctcgtcggtgcagtcctgggtggaggaacacaagctctcgtccatcggagccgtgtgggcgacggcggtgggcgcgtcggtggcgtacagccggcggagggcgccggcgcgggccacgagcctgcgcctcatccacgccaggatgcacgcccaggcgctcacgctcgccgtgctcgggggagccgcgctcgcgcaccgctattacggcagcagcgagaggaggcagaggcaggaggacctggactacggcttctactcccagctgccgccggccaccgacgccgagggcaacgagaacgagcgctggagctggtagtggcagggcagactagcagtgagtgaccagtgagccagtgacttccgccttcagatgcatacatcagatcagagagaaggaaggaagagggacaataaatagattaattagtactagtagcaataataataattgcttgcctgtttgccaatcaatgatacatgacgtggcgcctgatcctgttcgtcacggcccataaaccc

SEQ ID NO: 6107 - DNA, 505 bp, Zea mays
  Clone ID: LIB3061-063-Q1-K6-E7
gcacaacaactacaacaacttgtgctagcaaaccttgctgcctactctcagcaacagcagtttcttccattcaaccaactaggttcattgaactctgcttcttatttgcaacaacaacaactaccattcagccagctacctgctgcctacccccagcaatttcttccattcaaccaactagcagcattgaactctcctgcttatttacagcagcaacaactactaccattcagccagctagctggtgtgagccctgctaccttcttgacacaaccacagttgttgccgttctaccagcacgttgcgcctaacgctggcaccctcttacaactgcaacaattgctgccattcaaccaacttgctttgacaaacccagcagtgttctaccaacaacccatcattggtggtgccctcttttagatttcttatgagttatagttcaataataaagttttttatctgatgtttgtggcttcccagaaataagaaagtacatttctagatt

SEQ ID NO: 6108 - DNA, 608 bp, Zea mays
  unsure (1)..(608): unsure at all n locations; Clone ID: LIB3061-063-Q1-K6-E8
gnagcattcagaaaacacacctagcgaacgcactagcaacgacctaacaacaatggctaccaagatattatccctctttgcgcttcttgccctttttgtgagcgcaacaaatgcgttcattattccacaatgctcacttgctcctagtgccattattccacagttcctccctccagttacttcaatgggcttcgaacacccagctgtgcaagcctacaggctacaacaagcgcttgcggcgagcgtcttacaacaaccaattgcccaattacaacaacaatccttggcacatctaaccatacaaaccatcgcaacgcaacagcaacaacaatttctaccagcactgagccaactagctgtggtgaaccctgtcgcctacttgcaacagcagttgcttgcatccaacccacttgctctggcaaacatagttgcataccaacaacaacaattgcaacagtttctaccagcgctcagtcaactagccatggtgaaccctgccgcctacctacaacagcaacaactgatttcatctagccctctcgctgtggttaatgcacctacatacctgcaacaacagttgctgcaacagattgtaccagctctgactc

SEQ ID NO: 6109 - DNA, 605 bp, Zea mays
  unsure (1)..(605): unsure at all n locations; Clone ID: LIB3061-063-Q1-K6-F10
tcttcatacactgtggtgcatgatgtcaggggggcaagaggacaacccacagcacccttagataaagtctgcctgctcggttgtggtgttcctactggtcttggagcggtgtggaatactgcaaaggttgaatctggctcagttgttgctgtttttggccttggaacagttggacttgcgaggggcggggggagcaaaagctgctggtgcttctcgagttattggcattgacatcgacaataaaaagtttgatgttgcaaagaactttggagttacagaatttgttaacccaaaagagcatgacaaaccgatacagcaggtcctggtcgatcttacagatggcggcgtggattacagctttgagtgcattggaaatgtttcggttatgagggctgcactggaatgctgccacaagggctggggaacctccgtcatcgtcggcgtcgccgcctctggccaggagatcgccacacgaccattccagctcgtgactgggcgtgtctggaagggaaccgcntttcggggcttcaagagccggacccaggtcccatggcttggtgacaagtacatgaaaaaggaaattaagtggacgagtacattacgca

SEQ ID NO: 6110 - DNA, 609 bp, Zea mays
  Clone ID: LIB3061-063-Q1-K6-F12
gcgttctcggccgcgtgggcggccgcgtgggggacgtgaggctagcaattagctcatcgactccagatggagaactcgacaccatgaaggtgctgatcgttgcccttgctctcctggcgctcgctgcgagcgccgcctccagtacaagcggcggctgtggctgccagacaccaccgtttcatctaccgggtgcgttctatatgccgcctccgttctatctgccgccgcagcagcagccgcagccatggcaataccccactcaaccaccgcagctaagcccgtgccagcagttcggatcctgcggcgtcggcagcgtcggcagcccgttcctgggccagtgcgtcgagttcctgaggcaccagtgcagcccggcggcgacgccctacggctcgccacagtgccaggcgctgcagcagcagtgctgccaccagatcaggcaggtggagccgctgcaccggtaccaggcgacatacggtgtggtcctgcagtccttcctgcagcagcagccgcagggcgagctcgcggcgctgatggcggcccatgtagcgcagcagctgacggcgatgtgcggtctgcagctgcagcagccaggtccctgcccttgcaacg

SEQ ID NO: 6111 - DNA, 610 bp, Zea mays
  unsure (1)..(610): unsure at all n locations; Clone ID: LIB3061-063-Q1-K6-F2
tccgcagnacattagctttatctactccagagcgcanaagaacccgatcgacaccatgagggtgttgctcgttgccctcgctctcctggctctcgctgcgagcgccacctccacgcatacaagcggcggctgcggctgccagccaccgccgccggttcatctaccgccgccggtgcatctgccacctccggttcacctgccacctccggtgcatctcccaccgccggtccacctgccgccgccggtccacctgccaccgccggtccatgtgccgccgccggttcatctgccgccgccaccatgccactaccctactcaaccgccccggcctcagcctcatccccagccacacccatgcccgtgccaacagccgcatccaagcccgtgccagctgcagggaacctgcggcgttggcagcaccccgatcctgggccagtgcgtcgagttcctgaggcatcagtgcagcccgacggcgacgccctactgctcgcctcagtgccagtcgttgcggcagcagtgttgccagcagctcaggcaggtggagccgcagcaccggtaccaggcgatcttcggcttggtcctccagtccatcctgcagcagcagccgcaa

SEQ ID NO: 6112 - DNA, 369 bp, Zea mays
  Clone ID: LIB3061-063-Q1-K6-F3
gaaaaaaaaactgatgtcatttcgggtattctcaaccaccgcttcatgacaaacggacagtccttctttgatccatttactgaaatctactaattcttgacgaccgcaccacatgttatgtttgtgacaagtgattaaatgtctttttttatgggtgtgcacatttcttgccgttgcgatgcggaacgctgctggtaaccaatcgtcggtagtgcctgacccttcatccctcttgcccctcttacctacaggggcccttatgggctcgctgtggctcggctcgctcgctaacgcctcaggctctgcggcgcctagggctctccttttgcgccccgttctttctggcgttcctgcctctctcctcttagc

SEQ ID NO: 6113 - DNA, 604 bp, Zea mays
  unsure (1)..(604): unsure at all n locations; Clone ID: LIB3061-063-Q1-K6-F5
cacagcacatanaagtagaatccattagcaacaatagagcaacaatggcgaccaagatattttccctccttatgctccttgctctttctacatgtgttgctaacgcgacaattttccctcaatgctcacaagctcctatagcttcccttcttcccccataccttccatcaattatagcttcagtatgtgaaaacccagctcttcaaccatataggcttcaacaagcaatcgcagcaagcaacatacctttatcgcccttgttgtttcaacaatcaccagccctatctttggtgcagtcattggtacaaaccatcagggcacaacagctgcagcaactcgtgctacctgtgatcaaccaagtagctctggcaaacctttctccctactctcagcaacaacaatttcttccattcaaccaactgtctacactgaaccctgctgcttatttgcagcaacaactattaccatttagccagctagctactgcctactctcagcaacaacaacttcttccatttaaccaattggccgcactgaaccccgctgcttatttgcagcagcaaatactactgccatttagcgagctagctgcagcaagtcgtgc

SEQ ID NO: 6114 - DNA, 608 bp, Zea mays
  Clone ID: LIB3061-063-Q1-K6-F6
ttcagcattcaaaaacacaccaagcgaacgcactagcaacgacctaacaccaatggctaccaagatattagccctccttgcgcttcttgcccttttagtgagcgcaacaaatgcgttcattattccacagtgctcacttgctcctagtgccagtattccacagttcctcccaccagttacttcaatgggcttcgaacatccagccgtgcaagcctacaggctacaactagcgcttgcggcgagcgccttacaacaaccaattgcccaattgcaacaacaatccttggcacatctaaccctacaaaccattgcaacgcaacaacaacaacaacagtttctgccatcactgagccacctagccgtggtgaaccctgtcacctacttgcaacagcagctgcttgcatccaacccacttgctctggcgaacgtagctgcataccagcaacaacaacagctgcaacagtttatgccagtgctcagtcaactagccatggtgaaccctgccgtctacctacaactactttcatctagcccgctcgcggtgggcaatgcacctacgtacctacaacaacagttgctgcaacaaattgtaccagctctgactcagc

SEQ ID NO: 6115 - DNA, 606 bp, Zea mays
  unsure (1)..(606): unsure at all n locations; Clone ID: LIB3061-063-Q1-K6-F9
cgcagcaccaacaacaacaacaacaacaacagcaccaacaacaacatcaatgtgaaggccaacaacaacatcaccaacaatcacaaggccatgtgcaacaacacgaacagagccatgagcaacaccaaggacagagccatgagcaacaacatcaacaacaattccagggtcatgacaagcagcaacaaccacaacagcctcagcaatatcagcagggccagngaaaaatcacaacagcaacaatgtcattgccaggagcagcaacagactacaaggtgcagctataactactatagcagtagctcaaatctaaaaaattgtcatgaattcctaaggcagcagtgcagccctttggtaatgccttttctccaatcacgtttgatacaaccaagtagctgccaggtattgcagcaacaatgttgtcatgatcttaggcagattgagccacaatacattcaccaagcaatctacaacatggttcaatccataatccaggaggagcaacaacaacaaccatgtgagttatgtggatctcaacaagctactcaaagtgcggtggcaatcttgacagcagcacaatacctaccatcaatgtgcggcttgtac

SEQ ID NO: 6116 - DNA, 603 bp, Zea mays
  Clone ID: LIB3061-063-Q1-K6-G10
cacatcctaatcgactcgcgaccccgtttcccgggaagccgcgacggtgcgacgccgaactccctaaccctaagtccctaagcgtagacggcggggggcggcggtgcgaggcaagctgcacagcaacacgggccacgggcgcggcctccgcctccgcctccacgcttctgctgctaggctgcaagggcggcggcgcggcgcggtgggcggcggacagctggccaggtccagcccagtagtccaggtgacgaggtccgcactccgcaacggttctggcgttctgcagctgaggatagacgagagaggaagtgaggatttatattagtgatttacaaggcaacttgaaagacagcagggttgcatcccacaatgtcagctcccaacagtgatagcaacatgcagcagctagtccctatagcaccaccaggaaaggcttctggtggtgacagtgggaaggagctggttgtggcagatcctgcaggtaagagatcatgaggtgtaaaactgcgagaggatgaggaagacctggaggtgaagctcaggcgcatcatggagaatgtccctgtgcgtgtcagtaacacatcagggtcatctgctggctct

SEQ ID NO: 6117 - DNA, 586 bp, Zea mays
  Clone ID: LIB3061-063-Q1-K6-G12
gcgttttgggtcttcagaacattagctttatctactccagacgcagaagaacccgatcgacaccatgagggtgttgctcgttgccctcgctctcctggctctcgctgcgagcgccacctccacgcatacaagcggcggctgcggctgccagccaccgccgccggttcatctaccgccgccggtgcatctgccacctccggttcacctgccacctccggtgcatctcccaccgccggtccacctgccgccgccggtccacctgccaccgccggtccatgtgccgccgccggttcatctgccgccgccaccatgccactaccctactcaaccgccccggcctcagcctcatccccagccacacccatgcccgtgccaacagccgcatccaagcccgtgccagctgcagggaacctgcggcgttggcagcaccccgatcctgggccagtgcgtcgagtttctgaggcatcagtgcagcccgacggcgacgccctactgctcgcctcagtgccagtcgttgcggcagcagtgttgccagcagctcaggcaggtggagccgcagcaccggtaccaggcgatcttcggcttg

SEQ ID NO: 6118 - DNA, 298 bp, Zea mays
  unsure (1)..(298): unsure at all n locations; Clone ID: LIB3061-063-Q1-K6-G4
tccgtnccttcctcaagatagcttcnagtatgtgaaaacccagctcttcaaccctataggctccaacaagcaatcgcagcaagcaacatacctttatcacccttgtttcaacaatcgccagccctatctttggtgcagtcattggtacaaaccatcaaggcacagcagctgcagcaactcgtgctacctgtgatcaaccaagtagctctggcaaacctttctccctactatcagcaacaacaattttnncttccatttcaaccaactatctacactgaaccctgctgcttatttgcag

SEQ ID NO: 6119 - DNA, 600 bp, Zea mays
  unsure (1)..(600): unsure at all n locations; Clone ID: LIB3061-063-Q1-K6-G7
ttgagcttcanaacacaccaagcgaagcgcactagcaacgacctaacaacaatggctaccaagatattagccctccttgcgcttcttgccctttttgtgagcgcaacaaatgcgttcattattccacaatgctcacttgctcctagtgccattattccacagttcctcccaccagttacttcaatgggcttcgaacacctagctgtgcaagccaacatgcaacaacaagcgcttgcggcgagcgtcttacaacaaccaattgcccaattgcaacaacaatccttgccacatctaacaatacaagccatcacaacgcaacagcaacaacagttcctaccagcactgagccacctagccatggtgaaccctgccgcctacttgcaagagcagctgcttgcatccaacccacttgctctggcaaacgtagttgcaaaccagcaacaacaacagctacaacagtttctgccaacgctcagtcaactagccatggtgaaccctgccgcctacgtacaacaacaacaactgctttcatctagcccgctcgctgtgggcaatgcacctacatacctgcaacaacaattgttgcaacagattgtacca

SEQ ID NO: 6120 - DNA, 621 bp, Zea mays
  Clone ID: LIB3061-063-Q1-K6-G8
gcgttcgggtgggttggcttctcctccccctccggttcgggttcgggttcgtgaggttctccggggttcggtttcgtgggtgagcggatcgagatggcggcgtcggatgttgagtaccgctgcttcgtcggcggcctcgcctgggccacggacgaccactccctccacaacgccttcagcacctacggggaggtcctcgagtccaagatcatcctcgatcgggagacgcagaggtcccgcggcttcggcttcgtcaccttctccacggaggaggcgatgcggaacgccatcgagggcatgaacggcaaggagctggacggccgcaacatcaccgtcaacgaggcccagtcccgcggcggccgtggaggcggcggcggcggcgggtacggtggtggccgtggaggcggcggctacggcggtggcgggcgccgtgatggcggcggcggctacggcggtggcggcggctacggtggtggcggcggcggctacggtggtggtggcggcggctacggcggtggcaaccgtggcggcggctacggcaactccgacgggaactggaggaactgagcggtggggcccgcgcggccaagttatcctgttcgctaccgtgttgtttaccct

SEQ ID NO: 6121 - DNA, 580 bp, Zea mays
  Clone ID: LIB3061-063-Q1-K6-G9
gcacaatagtgtaccaacatggcagccaaaatttttgcttccttatgctccttggtctttctgcaagtgttgctaccgcaaccattttcccacaatgctcacaagctcctatagcttcccttcttcccccatacctctcaccagcggtgtcttcaatgtgtgaaaccccaattgttcaaccctacaggatccaacaggcaatcgcaacaggcatcttaccattatcacccttgttcctccaacaaccgtcagccctattacagcagttacctttggtccatttggtggcacaaaacatcagggcacaacaactacaacaacttgtgctagcaaaccttgctgcatactctcagcaacatcagtttcttccattcaaccaactggctgcattgaactctgctgcttatttgcaacaacaattaccattcagccagctagttgctgcctacccccagcaatttcttccattcaaccaactagcagcattgaactctgctgcttatttacagcagcaacaactactaccattcagccagctagctgatgtgagccctgctgccttcttgacacaacaacagtt

SEQ ID NO: 6122 - DNA, 614 bp, Zea mays
  unsure (1)..(614): unsure at all n locations; Clone ID: LIB3061-063-Q1-K6-H5
caactagcaacatagnaaagcacaatagtgtaccaacaatggcagccaaaatttttgcttccttatgctccttggtctttctgcaagtgctgctaccgcaaccattttcccacaatgctcacaagctcctatagcttcctttcttcccccatacctctcaccagcggtgtcttcagtatgtgaaaacccaattcttcaaccctacaggatccaacaggcaatcgcagcaggcatcttacctttatcacccttgttcctccaacaaccgtcagccctattacagcagttacctttggtgcatttgttggcacaaaacatcaaggcacaacaactacaacaacttgtgctaggaaaccttgctgcctactctcagcaacagcagtttcttccattcaaccaactggctgcattgaactctgctgcttatttgcaacaacaactaccattcagtcagctagctgctgcctacccccagcaatttcttccattcaaccaactggcagcattgaactctgctgcttatttacaacagcaacagctaccaccattcagccagctagctgatgtgagccctgttgccttcttgacacaacaacagttgttgccgttctacc

SEQ ID NO: 6123 - DNA, 567 bp, Zea mays
  unsure (1)..(567): unsure at all n locations; Clone ID: LIB3061-063-Q1-K6-H7
tgttcatgatgctgataaccaacatctagtatcaccgtgagccatagattttctcgataagctcctgcgctatgatcaccaagataggctcactgcacgtgaagctatggcacatccctacttcctccaagtcagagctgtggagaacagtagaacgagaccacaataatcgttgtctacaccctcgaaatgaagttgttgctaatttctggaacatcataggctaaaaccgttcaataagcatctcgctccaggaatctgggccatgactccgtggcagtgaatcagatagtatgggtcgcatcatgtgggcaaccttggcagatgtttttattgttgtctttaatcttgggactactgtagctttaaacctacaggctgtgcttgaatgacatgatattcatatcatatcgtctcctgtggtgggatatgaaattgtatgttatctttaaacataaacatactggttgtattatggtgtgctattatgtatgtatgattcttatttnaaaaaaaaaaaanaaaaaaaaaaaaaaaaanaaaaaaaannaaaaaaaaaaanaaaaa

SEQ ID NO: 6124 - DNA, 533 bp, Zea mays
  Clone ID: LIB3061-063-Q1-N6-A1
agaaatgtactttcttatttctgggacgccacaaacacatccaaaaacttcattattgaactataactcataagcaatctaaaagaggcaccaccaatgatgggttgttggtagaacactgttgggtttgtcaaagcaagttggttgaatggcagcaattgttgcagttgtaagagggtgccagcgttaggcatagcgtgcaggtagaacggcaacaactgttgttgtgtcaagaaggcagcagggctcacatcagctagctggctgaatggtagtagttgttgctgctgtaaataagcagcagagttcaatgctgctagttggttgaatggaagaaattgctgggggtaggcagcaactagctggctgaatggtaattgttgttgcaaataagcagcagagttcaatgcagccagttggttgaatggaagaaactgatgttgctgagagtatgcagcaaggtttgctagcacaagttgttgtagttgttgtgccctgatgttttgtgccaccaaatggaccaaaggtaactg

SEQ ID NO: 6125 - DNA, 553 bp, Zea mays
  Clone ID: LIB3061-063-Q1-N6-A10
gtgggggtttttttttcagaaaatattgagataaatctcaatcaatatattgattatttctaggaaacacatgccggaatgagggcaccattatcgagtacatctcatatgtaatctaaaagaggcacctccaacgatgggttgctgcctcgacgaggacggggtttatcaaagagaactggttgtatggcagcaattgttgctgctgtaggaaggcagcgaccaatgggttagccactgctagtggattaagtaactgttgtcgctgttgtaggtacgcagcagagttcgacatagtcagttggttgaatggaagcagctgttgcaagtaggcagcagggtttgccacaactagctgagtcagagctggtacaatctgttgcaacaattgttgttgcaggtatgtaggtgcattggccacagcgagcgggctagatgaaagcagttgttgctgttgtaggtaggcggcagggttcaccatggctagttgactgagcgctggcagaaactgttgcagctgttgttgtggctggtttgcaactacgtttgccag

SEQ ID NO: 6126 - DNA, 547 bp, Zea mays
  unsure (1)..(547): unsure at all n locations; Clone ID: LIB3061-063-Q1-N6-A12
gtntttgggttatttttttttaatcnagaaaaatctcaatcaatatattgattatttctaggaaaccatgccgctatgagggcaccattatcgagtacatctcatatgtaatctaaaagaggcacctccaacgatgggttgctgccgcggggggggggggttcatcaaagagaactggttgtatggcagcaattgttgctgctgtaggaaggcagcgaccaatgggttagccaccgctagtggattaagtaactgttgtcgctgttgtaggtacgcagcagagttcgacacagtcagttggttgaatggaagcagctgttgcaagtaggcagcagggtttgccacagctagctgagtcagagctggtacaatctgttgcagcaactgttgttgcaggtatgtaggtgcattaaccacagcgagagggctagatgaaatcagttgttgctgttgtaggtaggcggcagggttcaccatggctagttgactgagcgctggtagaaactgttgcaattgttgttgttgttggtatgcaactatgtttgcc

SEQ ID NO: 6127 - DNA, 523 bp, Zea mays
  unsure (1)..(523): unsure at all n locations; Clone ID: LIB3061-063-Q1-N6-A2
agaactanaaagtactttcttatttctgggaagccacaaacatcagataaaaactttattattgaactataactcataagaaactaaagggggcaccaccaatgatgggttgttggtagaacactgctgggtttgtcaaagcaagttggttgaatggcagcaattgttgcagttgtaagagggtgccagcgttaggcgcaacgtgctggtagaacggcaacaactgtggttgtgtcaagaaggtagcagggctcacaccagctagctggctgaatggtagtagttgttgctgctgtaaataagcaggagagttcaatgctgctagttggttgaatggaagaaattgctgggggtaggcagcaggtagctggctgaatggtagttgttgttgttgcaaataagaagcagagttcaatgaacctagttggttgaatggaagaaactgctgttgctgagagtaggcagcaaggtttgctagcacaagttgttgtagttgttgtgccctgatgttttgtgccaataa

SEQ ID NO: 6128 - DNA, 526 bp, Zea mays
  Clone ID: LIB3061-063-Q1-N6-A3
agaatctggaaagttaacttcttatttctggttggccacatacatcatccaaaaaactttattatttgattacaactaataatcaatctaaaagagggcaccaccaatgatgtgttgttggtaggaggctgctgggtttgtcaaagcaagttggacaaagggcaacaattgttgaagttgtaagagggttgcggggttagccgcaaactgcttgtagaaaggcagcaactgttgctgtgtcaagaaggaagcacgacttgctgcaactagctcgctaaatggcagtagtatttgctgctgcaaataagcagcggggttcagtgcggccaattggttaaatggaagaagttgttgttgctgagagtaggcagtagctagctggctaaatggtaatagttgttgctgcaaataagcagcagggttcaatgtaaacagttggttgaatggaaaaaattgttgttgctgaaagtagggagaaaggtttgccagagctacttggttgatcacaggtagcacgagttgctgc

SEQ ID NO: 6129 - DNA, 414 bp, Zea mays
  Clone ID: LIB3061-063-Q1-N6-A4
ggcaaaaaagcggggccggggggaagggcaaaaaaaaattacccccacaaaggggcccaaagggggggcggggaaaggccaacttaactcccccagggaaaaaccgggacaggtctagggggatttaaaaaaaaaccccacttacccggggagccccggggggaaaaaaaagggccccccgaaaaaaaccgggggtaaaaaaaggggccgattttggggggaaaaaataaaacacccccaaccgggaagcggaaaaacccccctggggggcccctggctaaaggggttttgggccaaaagggaccccccaaaggtaaaaaggacaggcggccccccccgaggaaagaaaaggcccttcgaaggggaaaggaaggggccccaaaaaaaaaaaagatttgggttccccccctcggg

SEQ ID NO: 6130 - DNA, 483 bp, Zea mays
  Clone ID: LIB3061-063-Q1-N6-A5
aaaaagtactttcttatttctgggaccccacaaacatcatccaaaaaacttcattattgaactataactcataagcaatctaaaagagggcccccccaatgatgggttgttggtaaaacactgttgggtttgtcaaagcaagttggttgaatggcagcaattgttgcagttgtaaaagggggccagcgttaggcatagcgtgcaggtagaacggcaacaactgttgttgtgtcaaaaaggcagcagggctcacatcaactagctggctgaatggtagtagttgttgctgctgtaaataagcagcaaagttcaatgctgctagttggttgaatggaaaaaattgctgggggtaggcagcaactagctggctgaatggtaattgttgttgcaaataagcagcaaagttcaatgcacccagttggttgaatggaaaaaactgatgttgctgaaagtatgcaacaaggtttgctagcacaagcggac

SEQ ID NO: 6131 - DNA, 439 bp, Zea mays
  Clone ID: LIB3061-063-Q1-N6-A6
gggcaaaaaaaaacccgggggggcccagcaaaaaaaatttggcgaaacgaacagcacaggaagcatttaccccaggccctacaaattggggaaacaaaaaattaagggaaccaaacacagggaaaacgggcccccaaaaaaaaagggtcccgcccccaccggggggttttatttcacactttatttaggggcggaaacgacaaaaaaacccctaaacccaacaaaaagggcactaccttgaaaaccaggtccctagccctgggaaaaaggagcccgccactgccattggggggaaaacggggggggaacttgcccaaattatgcccaactgccaagggggggaaaaaaaaaggggggaggcccccatgggggaaggaccccaccccccccccagggtcaaagcgaaccatgcaagggaaaaatttcccattggggggag

SEQ ID NO: 6132 - DNA, 545 bp, Zea mays
  Clone ID: LIB3061-063-Q1-N6-A7
gttttgtttttttagaaagtctttcttattctgggagcccaaactcagacaaaaactttattattgaactataactcataagaaactaaaagaggcaccaccaatgatgggttgttggtagaatgctgttgggtttgtcaaagcaagttggttgaatggcagcaattgttgcagttgtaagagggtgccagcgttaggcgcagcgtgctggtagaacggcaacaattgtggttgtgtcaagaaggtagcagggctcacaccagctagctggctgaatggtagtagttgttgctgctgtaaataagcaggagagttcaaagctgtcagttggttgaatggaagaaattgctgggggtaggcagcagatagctggctgaatggtagttgttgttgttgcaaataagaagcagagttcaatgcagctagttggttgaatggaagaaactgttgttgctgagagtaggcagcaaggtttgctagcacaagttgttgtagttgttgtgccctgatgttttgtgccaataaatgcaccaaaggtaactgct

SEQ ID NO: 6133 - DNA, 502 bp, Zea mays
  Clone ID: LIB3061-063-Q1-N6-A8
ggaaatgtaacttcttatttctagggaggccacatacatcagccaaaaaattcattattgaattacaactaataagcaatctaaaaaaggcacccccaatgatgtgttgttggtagaaggctgctgggtttgtcaaagcaagttggacaaagggcagcaactgttgcagttgtaaaagggttgcggggttagccacaaactgctggtaaaacggaagcaattgttgttgtttcaaaaaggaagtggggcttgttgtagctagctggccaaatggtagtagtatttgctgctggaaataagcaaaggggttcagtgcggccaattggttaaatggaaaaaattgttgctgctgaaagtaggcagtaactagctggctgaatggtagtagttgttgttgttgtaaataaacagcagggttcaatgtaaacagttggttgaatggaaaaaatgttgttgctgaaagtagggaaaaaggtttgccaaagctacttggctgatcact

SEQ ID NO: 6134 - DNA, 543 bp, Zea mays
  unsure (1)..(543): unsure at all n locations; Clone ID: LIB3061-063-Q1-N6-B1
tcgnaccaaagcgaagcgcactagcaacgacctaacaacaatggctaccaagatttagccctccttgcgcttcttgccctttttgtgagcgcaacaaatgcgttcattattccacaatgctcacttgctcctagtgccattattccacagttcctcccaccagttacttcaatgggcttcgaacacctagctgtgcaagccaacatgcaacaacaagcgcttgcggcgagcgtcttacaacaaccaattgcccaattgcaacaacaatccttgccacatctaacaatacaagccatcacaacgcaacagcaacaacagttcctaccagcactgagccacctagccatggtgaaccctgccgcctacttgcaagagcagctgcttgcatccaacccacttgctctggcgaacgtagttgcaaaccagcaacaacaacagctacaacagtttctgccaacgctcagtcaactagccatggtgaaccctgccgcctacgtacaacaacaacaactgctttcatctagcccgctcgctgtgggcaat

SEQ ID NO: 6135 - DNA, 539 bp, Zea mays
  Clone ID: LIB3061-063-Q1-N6-B10
ctaaaaagtactttcttatttctgggaagccacaaacatcagataaaaactttattattgaactataactcataagaaatctaaaagagggcaccaccaatgatgggttgttggtagaacactgctgggtttgtcaaagcaagttggttgaatggcagcaattgttgcagttgtaagagggtgccagcgttaggcgcaacgtgctggtagaacggcaacaactgtggttgtgtcaagaaggtagcagggctcacaccagctagctggctgaatggtagtagttgttgctgctgtaaataagcaggagagttcaatgctgctagttggttgaatggaagaaattgctgggggtaggcagcaggtagctggctgaatggtagttgttgttgttgcaaataagaagcagagttcaatgaacctagttggttgaatggaagaaactgctgttgctgagagtaggcagcaaggtttgctagcacaagttgttgtagttgttgtgccctgatgttttgtgccaataaatgcaccaaaggtaactg

SEQ ID NO: 6136 - DNA, 512 bp, Zea mays
  Clone ID: LIB3061-063-Q1-N6-B11
aactcaacaagggtttacttctttatttctattcaacttcaggggtttttttcaacacagaaacaacgctacggggaaaaaacttatcccgcagtccccagctgtgttttaatgggatcccaacggtgtacacccagcctcgatgaataggaacaagtctgttatttgtaaatactagttcgccaagatataatcgatgtccaaattatctaattcaactactagataggggtgcgccaatagcaagatgcatgtaccctgatgctacttgaaacgaccatgcttccagagtttgctgggcacgagcattctagcaaagacaccgtcagctcatgcaataaacacctggatcctatctcccatggcgtcctcaaaatcaagcagtatttgaccattctggggggtgtctgtatcaacaggagcattccgaagcctttccataatattagctccagccaagcctggaataattcttggcatcccttctaagaacccagcaggtatcctggcat

SEQ ID NO: 6137 - DNA, 506 bp, Zea mays
  Clone ID: LIB3061-063-Q1-N6-B2
atctggaaaagtaacttcttatttctggttggccacatacatcatccaaaaactttattattgaattacaactaataatcaatctaaaagggggcaccaccaatgatgtgttgttggtaggaggctgctgggtttgtcaaagcaagttggacaaagggcaacaattgttgtagttgtaagagggttgcggggttagccgcaaactgcttgtagaaaggcagcaactgttgctgtgtcaagaaggaagcacgacttgctgcagctagctcgctaaatggcagtagtatttgctgctgcaaataagcagcggggttcagtgcggccaattggttaaatggaaaaagttgttgttgctgaaagtaggcagtagctagctggctaaatggtaatagttgttgctgcaaataagcagcagggttcagtgtaaacagttggttgaatggaaaaaattgttgttgctgaaagtagggagaaaggtttgccaaagctacttggttgatcacagg

SEQ ID NO: 6138 - DNA, 503 bp, Zea mays
  Clone ID: LIB3061-063-Q1-N6-B3
gaactaaaaagtactttcttatttctgggaagccacaaacatcagataaaaactttattattgaactataactcataagaaactaaagggggcaccaccaatgatgggttgttggtagaacactgctgggtttgtcaaagcaagttggttgaatggcagcaattgttgcagttgtaagagggtgccagcgttaggcgcaacgtgctggtagaacggcaacaactgtggttgtgtcaagaaggtagcagggctcacaccagctagctggctgaatggtagtagttgttgctgctgtaaataagcaggagagttcaatgctgctagttggttgaatggaagaaattgctgggggtaggcagcaggtagctggctgaatggtagttgttgttgttgcaaataagaagcagagttcaatgaacctagttggttgaatggaagaaactgctgttgctgagagtaggcagcaaggtttgctagcacaagttgttgtagttgttgtgccc

SEQ ID NO: 6139 - DNA, 142 bp, Zea mays
  Clone ID: LIB3061-063-Q1-N6-B5
agaaatgtactttcttatttctgggaagccacaaacatcagacaaaaactttattattgaactataactcataagaaatctaaaagagggcaccaccaatgatgggttgttggtagaacgctgctgggtttgtcaaagcaag

SEQ ID NO: 6140 - DNA, 412 bp, Zea mays
  Clone ID: LIB3061-063-Q1-N6-B6
attattgatcaataactcataagaaatctaaaagagggcaccaccaatgatgggttgttggtagaaagctgctgggttgggggggggggggggctgaatgggagcaattgttgcagctgtaaggagggggccagcgttaggcgcagcgggctggtagaacggcaacaacggcgggtgggtcaagaagggagcagggctcacaccaacgagctggctgaatgggagaaggtggtgctgccggaaataagcggggagttcaatgctgtcagctggtcgaacggaagaaaaggcctgggggcaggcaggaaaaagctggctggatgggagaggtggctgacgcaaataagaagcagaggtcaatgcagccagctgggcgaatggaaaaaactgctgtcgctgagagtaggcagaa

SEQ ID NO: 6141 - DNA, 526 bp, Zea mays
  Clone ID: LIB3061-063-Q1-N6-B7
aaggagacattaaggagatataatataaccatgagtctctgaccataaatacggttaagagacaatatatatagaaagtcagaagctactgttcattcatatttcgccacagctcagtcacgacaacaaacaggcataacaacagtgaatccttgtttacattgaacagtagcagcataaactatgtggtcccgtcacaaccaaacaaccaccttactcttccgtgaaggttggaggtgggcgctttgatctattgctcagagatgaccgcgaaaaatgtatttggagaagcttgtacgacagggcaagattatgttgacgtcggagcagatttcggtgtagctgcagtggctgcacgactgacgctcgacccagtgcgaggtagtacttgtgtagggtacacctcggtgacctcttcgatcccttcgtctacatatatgacatcctgcatagtgagctggtgatactcaactatttcccgcaggaatctgttttctcgtgcatatactgagttctcatgcgcaag

SEQ ID NO: 6142 - DNA, 392 bp, Zea mays
  Clone ID: LIB3061-063-Q1-N6-B8
gggaaaaaaaaggggggccccccccaaaaaaaacaaaaggggggaaaaaaaaaacccccccccccccgggggaaaaaaaaaaaccgaacccttcccaaaaggttaaaaagaagggggaaaaaaaccccccccttttaaaagggggaaaaaaaggggccccttggggggggggggggccccaaaaaggaaaaacctttgggggggaaaaccggggggggcctttgaaaaaaaaaggggggggggaccgttttttccccccccccccccctttttaaaagggggggggggtttaaaaaaccctttaaaaaagggccccgccctgggggttttggccaaagaaaaaaaaccggggggtcaaaaaattgggaggggtttgggcaaaaaaccccccc

SEQ ID NO: 6143 - DNA, 456 bp, Zea mays
  Clone ID: LIB3061-063-Q1-N6-B9
ggttggggccaaaaactgggggcggggaactgatcctaaaaaccttgtttaaaaggggggaaaaaaaaacttaagccaaaactgggggggcgaaaccggttaaacaaaagcccaaactgggactggggggggccacccccgaaagcctaaccgaaactgggggggcgggaaccataacactacaaggtcactgggcctataacccctgggaaaggggggggccttttaaaccccgggtggtgactgaaaaccccactttgacagggccgccctgaagttacgacggggtcatggttttgggcttttggagggacttggcgttttgaaatttgacaggggaaaaaccacgggaacccccggtttttttggggacgggaaaacttaccgaggcaatttttgacggccccaaaaaaacttccaaggggttttcccccacgttccatgaaagggtgccaa

SEQ ID NO: 6144 - DNA, 413 bp, Zea mays
  Clone ID: LIB3061-063-Q1-N6-C1
aaaaagggaaactggttttatggaaaaaaagggggaacccccggggggggggaaaccaaatttggggaaaaaaaaaaattttttttttaaaagggggcccccaaaaaggggggggggaaaaaaaagggggggaaccccgggggccagggggggaaaaaaaaaggggaacggggggggaaaaaaaaatggggaaaggggggccaaaggaaatgggggaaaaaaaattgggaaaaaaaggcccggaaaaaccatgggggaaaaaaggcgggggaaaaaaaagggggaaaaaaggggggggggaaaaaaggggggaaaaaaaacggggatccctggaaggggaagggcaaaaaggggggggggaatcggggggggccaccccataaagggggaaagcccctggggaaaaaagaaaa

SEQ ID NO: 6145 - DNA, 522 bp, Zea mays
  Clone ID: LIB3061-063-Q1-N6-C11
aaaaccaaactttattatgaccatgcatatattattggtcataccacacatgataatgtgtgtcgtcttactgcattattacatatatagatagagagagatggatagaggagatttcccaaatatcatgaatcagtagtagggcggaatggcagcggagacgccacaggggttggtgcggtagctgggcagctggtactggtagagtccacccatggccggcatgttctgcgccatcatcatggccatggggttgagaccctgggctgccagcagctgctgctgctgctgcatcaaagctggctcgtacaggctgctgctggcggcagcggcacgctcaagctgcatcatcatctgcagctgctgcgcgacggactgcacgtccatcatcctcatctgctgctggcagcactgttgccggagcggctggaacatggcgctcggctgcccacacccggcgtagtagggcgccgccgccagcgggctgcactgcggctgcctcaggtactccgcgtaggggta

SEQ ID NO: 6146 - DNA, 562 bp, Zea mays
  unsure (1)..(562): unsure at all n locations; Clone ID: LIB3061-063-Q1-N6-C12
gtgttttttttttttttgatttaaaatttaggactataatactttattactgaggggtcgcacatatcagcatgagaactttattattacagtnataaatcataaaaaatctagaagatggcaccaccaatggtgggcgattgcaataaggggggggggttcgtcaaagcatgttggctaaatggcagcaattgttgttgttgtaagaaggcaacaatgtttgccacattatgtgggtagaatggcagcaattgttgctgttgcaagaaggcattaatgtttcccacaacctgtgggtaaaatggcaacaattgttgttgtcgcaagaaagaagcaatgttttccacagcttgcagatggaatggcagaagctgttgttgcagtaagaaggcatcagggctcccgacaagttggttaaatggtagtagttgttgtgcctgcaagtagacagcagggttcaccccagctagttgattgaatggaagaaattgttgttgctggagataagcagcaaggttcgctgcaactacttgattgattgttggtagcaactgttgttgta

SEQ ID NO: 6147 - DNA, 499 bp, Zea mays
  Clone ID: LIB3061-063-Q1-N6-C2
aaaattatgatttgatgttttcaattatttatatgatgaacatagttcagaaatatatcgagataaatctcaatcaatatattgattatttctaggaaacacatgtcggtatgggggcaccattgtcgagtacatctcatatgtaatctaaaagaggcacctccaacgatgggttgctgcaaggcagggttcatcaaagagaactggttgtatggcagcaattgttgttgctgctgcaggaaggtagcgaccaatgggttagccactgccaatggattaagtaactgttgtcgctgttgtaggtacccagcagagtttgacacagccagttggttgaatggaagcaactgttgtaagtaggcagcagggtttgccacagctagctgagtcagagctggtacaatttgttgcagcaactgttgttgtaggtacctaggtgcattgcccaccgcgagcgggctagatgaaagtagttgtaggtagacggcagggttcacca

SEQ ID NO: 6148 - DNA, 536 bp, Zea mays
  Clone ID: LIB3061-063-Q1-N6-C3
cagaaatatattgagaaaatctcaatcaatatattgattatttctaggaaacacatgccggaatgagggcaccattatcgagtacatctcatatgtaatctaaaagaggcacctccaacgatgggttgctgcctcgacaagacagggtttatcaaagagaactggttgtatggcagcaattgttgctgctgtaggaaggcagcgaccaatgggttagccactgctagtggattaagtaactgttgtcgctgttgtaggtacgcagcagagttcgacatagtcagttggttgaatggaagcagctgttgcaagtaggcagcagggtttgccacaactagctgagtcagagctggtacaatctgttgcaacaattgttgttgcaggtatgtaggtgcattggccacagcgagcgggctagatgaaagcagttgttgctgttgtaggtaggcggcagggttcaccatggctagttgactgagcgctggcagaaactgttgcagctgttgttgtggctggtttgcaactacgtttgccag

SEQ ID NO: 6149 - DNA, 522 bp, Zea mays
  unsure (1)..(522): unsure at all n locations; Clone ID: LIB3061-063-Q1-N6-C4
atcacaanaacaaatccggatcccctttaattattgttccggatgaacgatccgagaaagcattcatcttcttgctgtgcttattattcagacatatgagctagctacaagctcattcctcatgcactatgctcttcgcagttacttggagggcatcgttccgccgccgagaatccaggggcattcggcgacgccgctgatggtggccaggttgcactcggcctccgtgacgagggtggcggcgaatcccctctgcacctcccgcgggcagcccggcaggtcctctaggcggccctccagctgcgcgtccgggcccggcgggatcgcgccgtccatgaggatgctcagcgccgtgcaccggcagtacgccgggatgtccgccagctcccggcagcatctcctcttcagctccggccacgggaggcgcggcccgatgccgcaggtccggctggtcacgtaccagcggcagctcgggagcgggttgtgcgggatggcccaccccggcacgcaggaggtcccggc

SEQ ID NO: 6150 - DNA, 459 bp, Zea mays
  Clone ID: LIB3061-063-Q1-N6-C5
ggggccccccaaacattatccaaaaacttcatttttgaactttaacccataagcaatctaaaaggggccccccccatgatgggttgttggtaaaacactgttgggtttgtcaaaacaaggtggttgaatggcaacaattgttgcagttgtaaaagggggcccccgttaggcataacgtgcaggtaaaacggcccaactgttgttgtgtcaaaaaggcaacagggctcacatcaactaactggctgaatgggaaaaattgttgctgctgtaaaaaaacagcaaagttcaatgctgctagttggttgaaaggaaaaaaatgctgggggtaggcaacaactaactggctgaatgggaattgttgttgcaaataaacagcaaagttcaatgccccccgttggttgaatggaaaaaactgattttgcttgaaaatattcaacaagggttgctaacacaaattgt

SEQ ID NO: 6151 - DNA, 394 bp, Zea mays
  Clone ID: LIB3061-063-Q1-N6-C6
ctagaaagtactttcttatttctgggaagccacaaacatcagacaaaaaactttattattgaactataactcataagaaatctaaaagagggcaccaccaatgatgggttgttggtagaatgctgttgggtttgtcaaagcaagttggttgaatggcagcaattgttgcagttgtaagagggtgccagcgttaggcgcagcgtgctggtagaacggcaacaattgtggttgtgtcaagaaggtagcagggctcacaccagctagctggctgaatggtagtagttgttgctgctgtaaataagcaggagagttcaaagctgtcagttggttgaatggaaaaaattgctgggggtaggcagcaaatagctggctgaatggtagttgttgttgttgc

SEQ ID NO: 6152 - DNA, 468 bp, Zea mays
  Clone ID: LIB3061-063-Q1-N6-C8
atcacagctgcttcattattcagggcgaagtcgaacaaacaggctcagctagccccggggttttattggcactattgctcggtttcgcgcccgagggggccatgcgacccccagcccaaggcctgaaggcccccgccgccccccgatgccccctagcctaacaggggagggtgggcccggggtccacccccagctgggggcagtactgcctgtagtagcccacccccccgttcatttgggcgggggtgttccccccccactccagggcccccttgatggccctggggggggggccaaacccctgggggacccccccgggcaccctgttcatccaaaaccaaagcgcccccttgaaccccaccacggggtcccgcgccaccctgccggggtccccgagcccctcaaaaccgatggccccccccgcgggcccctagttgtagttccacaaaatctgcagcgggccccccc

SEQ ID NO: 6153 - DNA, 543 bp, Zea mays
  unsure (1)..(543): unsure at all n locations; Clone ID: LIB3061-063-Q1-N6-C9
gngaacatacttttttcttttcatttcaattgttcattcaggtcattgctcacactgacactgccacccatggtgatgcgtgacacattattactcaatcatcgccgctaaatgactcaactagctagctagccagcggctatactacagcacatagtttcttcagtgggggacaccgccggcagcagcgtaggggcatggagtcggctgctgcaggccgcacatcgccgtcagttgctgcgctatctgcgccgccaacagccccgcgacctggccgctttgcggctgctgctgcaggatggactggaggaccaagccgaagatcgcctggtaccggtgctgcggctccacctgcctgagctgctggcaacactgctgccgcaacgactggcactgaggcgagcagtagggcgtcgccgtcgggctgcactgatgcctcagaaactcgacgcactggcccaggatcggggtgctgccaacgccgcaggttccctgcagctggcacgggcttggatgcggctgttggcacgggcatgggtgtgg

SEQ ID NO: 6154 - DNA, 309 bp, Zea mays
  Clone ID: LIB3061-063-Q1-N6-D1
aaaaaaaaccgggggggagattcattcatttcaacccaacccaccccccccaaggggaggcggccccctggccaacccgccagcccccccggggggggccccccaccccccccccccccccggggggggcccgccaaagaccttgctatgcccccccccccaacccaccccccccccccccccaggaaacccccccggggggcccccccccccccccaaaaaacaccccggagggttagtcccatcagacgaaccaaccccccccccccccccaagaacccgcccccccgtccccggccccggggcccc

SEQ ID NO: 6155 - DNA, 506 bp, Zea mays
  Clone ID: LIB3061-063-Q1-N6-D10
gcaaagaacatatatacagtggataatccaaacaacagggggagttaaggggctcttctgttatttttgcttaaaacaccaaacgggaagcaaaccatcagaactgatgcgctctcaggacaactgagtaagaaagcactgcagacgtatatcctaggtggagtggagtgaaagcacatgtgcacagagagcgcccaaaggtcgcttcttcgttggtggtatcaggcaggtttcacaagaagatgcgtcaaagacgtggcgtagcttgctagtgagctccactggttgtgccatgggcactgctaatggagccccagtgagaatctccggtccccatctgcacagcaatgctgtccacggactccgaggtcccgcttctgtgaccccaacttgatcgcctcgaatgcataccagccctcccttccacaagctcaggaagggcatctctgctcagatccggggacgcatgggctatcctgccttctttctcgtccagtagaccccct

SEQ ID NO: 6156 - DNA, 532 bp, Zea mays
  Clone ID: LIB3061-063-Q1-N6-D11
gtttggggttttttttttttttttgtttgaaaaatggcaacctttgccttggttcgcactcaaagcgagagtatgtagtttttcaaatgagcacaaccattttgcagcaccaagaagcaccatttttttccttaggatttaacttagagataggggcggacgggggtaacagcacccatcgatccgcagtccatgctggttgatgcatgggtctgctggagccgaggatgaacacagcactaacaactgacacagagcgaccttcaatcaaaaacacagatgggcaacaacaaacacgagacgaacgaagataaacactctggactagggtaaacaacacggtagcgaacaggataacttggccgcgcgggccccaccgctcagttcctccagttcccgtcggagttgccgtagccgccgccacggttgccaccgccgtagccgccgccaccaccaccgtagccgccgccgccaccaccgtagccgccgccaccgccgtagccgccgccgccatcacggcgcccgccaccgc

SEQ ID NO: 6157 - DNA, 538 bp, Zea mays
  unsure (1)..(538): unsure at all n locations; Clone ID: LIB3061-063-Q1-N6-D12
gttgggttttttttttttttttttttttttttttttttttttttttttttttttttttttttttttttttttttttttttttttttttttttttttttttttttttttttttttttttttttttttttttttttttttttttttttttggggtgcgggggcccccccacacccaaaaaattttcccccccaaaatttttaaacaaaaccccccccccaaaaccctataaaccccccccaaaacccaaattcccttcatccccacccccccccccttttttccccccccctttttccccaaacccccccctaaaacccccccccaaaaccccctttctttttctttatttttcccccccccccccccttaaaaaaaaataaaattttttaaatttctcnaaacccaacccccaaaaaaaaaaatttcccccttaaaaaaaacccccccccaaattnccccccacatttaaaaaaaaaattttttaccccccttttttttttttcccacaaaaattaaaaccccttttacccccccccct

SEQ ID NO: 6158 - DNA, 542 bp, Zea mays
  unsure (1)..(542): unsure at all n locations; Clone ID: LIB3061-063-Q1-N6-D3
cacattaaaatctgngaaagtaacttcttatttctggttggccacatacatcatccaaaaactttattattgaattacaactaataagcaatctaaaagaggcaccaccaatgatgtgttgttggtaggaggccgctcggtctgtcaaagcaagttggacaaagggcaacaattgttgtagttgtaagagggttgcggggttagccgcaaactgctggtagaaaggcagcaactgttgctgtgtcaagaaggaagcacggtttgctgcagctagctggctaaatggtagtagtatttgctgctgcaaataagcagcggggttcagtgcggccaattggttaaatggaagaagttgttgttgctgagagtaggcagtagctagctggctgaatggtaatagttgttgctgcaaataagcagcagggttcagtgtagacagttggttgaatggaagaaattgttgttgctgagagtagggagaaaggtttgccagagctacttggttgatcacaggtagcacgagttgctgcagctgctgtgcc

SEQ ID NO: 6159 - DNA, 246 bp, Zea mays
  unsure (1)..(246): unsure at all n locations; Clone ID: LIB3061-063-Q1-N6-D4
acaagccacgcgcgcgccggcttccgccagccgcagtgcngagtggcggcccagtccgctataggcgccggtgaccagcgcggtcttggatttcaggtcttcaaacatcggtgcgtctcctttgtttgtctgccggcggcattacgccgcctcacgggtcgcggcctggctggcgggatgaagttccaccagcgcatccaccgccaccgcgccctgccccaccgcgccgaccatcaccgggttgat

SEQ ID NO: 6160 - DNA, 539 bp, Zea mays
  Clone ID: LIB3061-063-Q1-N6-D7
gcgggggggtggtttttttttttttttttttttttttttttttttttttttttttttttttttttttttttggagcgcctacacaccggttattggttcagcctttaaacccttggtggatacaaggcaatcgaaaagtacaagcgatgtgcaagggggcacgttgggtgcaaaacaacatgcatataaaagggggttaattattcagggggaaaaaacagggtcagctagccccggggttttattggcactattggtcggtttcccccgcgagggggcaaagcgacccccaacacaagggctgaaggcccccgccgtccgccgatgccccctaacctaacaggggagggggggcccggggtcaaccccgagctggggggagtactgcctgtagtaaccgacccccccgttcatttgggggggggtgttccccccgaactcaagggcccccttgatggccctggggggggggccaaacccctgggggaccaccccgggcacgctgttaatccaaaaccaaagcgccgccttgaaccccc

SEQ ID NO: 6161 - DNA, 519 bp, Zea mays
  Clone ID: LIB3061-063-Q1-N6-D8
agaaatctggaaagtaacttcttatttctggttggccacatacatcatccaaaaactttattattgaattacaactaataatcaatctaaaagagggcaccaccaatgatgtgttgttggtaggaggctgctgggtttgtcaaagcaagttggacaaagggcaacaattgttgtagttgtaagagggttgggggttagccgcaaactgcttgtagaaaggcagcaactgttgctgtgtcaagaaggaagcacgacttgctgcagctagctcgctaaatggcagtagtatttgctgctgcaaataagcagcggggttcagtgcggccaattggttaaatggaagaagttgttgttgctgagagtaggcagtagctagctggctaaatggtaatagttgttgctgcaaataagcagcagggttcagtgtagacagttggttgaatggaagaaattgttgttgctgagagtagggagaaaggtttgccagagctacttggttgatcacaggtagcacgagtt

SEQ ID NO: 6162 - DNA, 540 bp, Zea mays
  Clone ID: LIB3061-063-Q1-N6-D9
ctcaaaattcgattcttatttgattttccttagaaatactccatcgccactagctacaactacaagcacacacaaataacctctgcctccctcagctgccaaataacacaggatctcagacttcgggcatacctaccatcattctgcagttacaagcaacagctgcatctgtttttctagcatcccagttccctccgcctccctctctacgtacagcacacctagatggacaccaacatgtaacacggtacatactgacagagaacgatggttctcgctcactggcgggcctcaccggaggctgttgacgaaggcgaggagcgagtcgacgtccctcttctcggacgggtacttgatgggccgggcggtgcggctcgggaacaggagcacggtggggaagctctgcagctgcagctcggcctgagcgaacggcttctgctcgccgtcggcgcggaaccgggccaccttcacgccgccggaccccgccagcctctcggccagctccacgtaggaggcctccatggcctggcagaacgggca

SEQ ID NO: 6163 - DNA, 435 bp, Zea mays
  Clone ID: LIB3061-063-Q1-N6-E1
aaaaaaaaaaaaaaaaaaaaaaaaaaaaaaaaaaaaaaaaaaaaaaaaaaaaaaaaaaaaaaaaaaaaaaaaaaaaaaaaaaaaaaaaaaaaaaaaaaaaaaaaaaacccccaaaaaaaaaaaaaaaaaaaaaaaaaaaaaaaaaaaaaaaaaaaaaaaaaaaaaaaaaaaaaaaaaaaaaaaaaaaaaaaaaaaaaaaaaaaaaaaaaaaaaaaaaaaaaaaaaaaaaaaaaaaaaaaaaaaaaaaaaaaaaaaaaaaaaacccccctaataaaaaaaaaaaaaaaaaaaaaaaaaaaaacaacaaaaaaaaaaaaaaaaaggaaagggggccccttttttcaaaggttttaacctgaaggggggccacacctccaaaaaaagggaaaaaaaaaaaaaaaaaaacctcccgggggaggaaaaaacaccccaaaa

SEQ ID NO: 6164 - DNA, 423 bp, Zea mays
  Clone ID: LIB3061-063-Q1-N6-E10
aatgggggaaaaaaccaaaaaaaaatttgggtttttttagggaaaaaaaccccctttggggggccccattttgggggccatttaaaaggaaaaaaaaaagagaggggccccccaaaggggggggggggccccaaaaggggggggttaaaaaaaaaaaacggggggtggggaaaaaattgttgtttttgggggaggggaccaacaaaggggtaacccccccgggggggaaaaaaaaacggggggccctgggggggggccccaaaaaaattcaacaaaaccattgggtaaaaagaaaaaattttttaaaaaaaggaaaaagggtttcccaaaatttggtgaaaaaaagcgggaaaaaattggggaaaaaactggggggaaaaaaacggttgttccaggtttttaggggaattccccaaaaggggg

SEQ ID NO: 6165 - DNA, 528 bp, Zea mays
  Clone ID: LIB3061-063-Q1-N6-E2
aagaatctagaaagtactttcttatttctgggaagccacaaacatcagacaaaaactttattattgaactataactcataagaaatctaaaagagggcaccaccaatgatgggttgttggtagaacgctgctgggtttgtcaaagcaagttggttgaatggcagcaattgttgcagttgtaagagggtgccagcgttaggcgcagcgtgctggtagaacggcaacaactgtggttgtatcaagaaggtagcagggctcacaccagctagctggctgaatggtagtagttgttgctgctgtaaataagcaggagagttcaatgctgccagttggttgaatggaagaaattgctgggggtaggcagcaggtagctggctgaatggtagttgttgttgttgcaaataagaagcagagttcaatgcagctagttggttgaatggaagaaactgctgttgctgagagtaggcagcaaggtttgctagcacaagttgttgtagttgttgtgccctgatgttttgtgccaataaa

SEQ ID NO: 6166 - DNA, 489 bp, Zea mays
  Clone ID: LIB3061-063-Q1-N6-E3
aaaccggggccagtactatctggcaacattcccatatttattccgcatagttattatcattattggaacacccgacaatgcgagcccacgtcaaaactaccccattctggacttgcacccccacagaacaaatgctgggttttgcaccccgcgccgactcgcattttttttaaccatgggagctagtactgggcgcccccggaaaaaagctgcactcctgggggtccgacaggcggcacataattggaaaccccggggggtactcccgggcctttgaaagcctaacgcggccgatccttggcccgggggggccgggaccacacgggggatacatctgggttggggatccctctcctgcccgggtggaggggtagtaataacccccctggcctcctcctccctgcggggggggttgttgcccccccccccatggccaccagcctttttccaggggggggatggcctccttgtatcccctgaccatgctcc

SEQ ID NO: 6167 - DNA, 525 bp, Zea mays
  Clone ID: LIB3061-063-Q1-N6-E4
ggcggtaagcaacggacagcatccagattagaaccattgcaaataagacccattctgtgttttgacataaccttaggattacagcagatcctaaacaccggaacgaaacaacggccgctcctttgattcaaccgcggcctccagttgtccaactgcctggcgaagcagagatggccacttttcaagaaggcccccaccaaaatgtaactaatggaacatgcttctccagacatacgctacaagctacacctcttcaacacaaaacaaagttgcttttttttcagactttctgcactttagtagtaagctccttcagcttactaccctttacacaatccacgtccttgcctgtggcctcgtagtagtcgttgagcgcccactggtacttggactgatccaacccgaaccaggtagccatgtactcgtcgaggctggcgtgcgcttcctggacgcgcgcgacggcgtcccagaagaagccaaacgccgatccgtcgtgcttgcctcccgcggacgccttctcgtact

SEQ ID NO: 6168 - DNA, 526 bp, Zea mays
  Clone ID: LIB3061-063-Q1-N6-E5
ctaaaaagtactttcttatttctgggacgccacaaactcatccaaaaacttcattattgaactataactcataagcaatctaaaagagggcaccaccaatgatgggttgttggtagaacactgttgagtttgtcaaagcaagttggttgaatggcagcaattgttgcagttgtaagagggtgccagcgttaggcatagcgtgcaggtagaacggcaacaactgttgttgtgtcaagaaggcagcagggctcacatcagctagctggctgaatggtagtagttgttgctgctgtaaataagcagcagagttcaatgctgctagttggttgaatggaagaaattgctgggggtaggcagcaactagctggctgaatggtaattgttgttgcaaataagcagcagagttcaatgcagccagttggttgaatggaagaaactgatgttgctgagagtatgcagcaaggtttgctagcacaagttgttgtagttgttgtgccctgatgttttgtgccaccaaatggaccaa

SEQ ID NO: 6169 - DNA, 474 bp, Zea mays
  Clone ID: LIB3061-063-Q1-N6-E6
gggcccaaagggctttttttaaaatcccttaaacaggggttacaaaaaaggggactttttttttgaaatccaaagggcttttaacgggggaaaaccaagtccgggaacccataacaaaccccccatacctgggctagctgcttcctggggttatgggcccggaccaacaggatcaggccccccgtcatgtttcattggttggcaaacaggccacccatttttattattgctcccaggcccaaataaactatttattggccctcttccttccttttttttgaactgaggtatgcctctgaagggggaaggcactggctcactgggcactcactggtagtttgccctgccactaccaactccagggcttgtttttgttgccccccgcgtcgggggcccgcggcaactgggaataaaaaccctaatccaaggccccctgcctttgcctcctttcgctggtgccgaaaaaacggggcc

SEQ ID NO: 6170 - DNA, 503 bp, Zea mays
  Clone ID: LIB3061-063-Q1-N6-E7
aatctagaaagtactttcttatttctgggaagccacaaacatcagataaaaactttattattgaactataactcataagaaatctaaaagagggcaccaccaatgatgggttgttggtagaacactgctgggtttgtcaaagcaagttggttgaatggcagcaattgttgcagttgtaagagggtgccagcgttaggcgcaacgtgctggtagaacggcaacaactgtggttgtgtcaagaaggtagcagggctcacaccagctagctggctgaatggtagtagttgttgctgctgtaaataagcaggagagttcaatgctgctagttggttgaatggaagaaattgctgggggtaggcagcaggtagctggctgaatggtagttgttgttgttgcaaataagaagcagagttcaatgaacctagttggttgaatggaagaaactgctgttgctgagagtaggcagcaaggtttgctagcacaagttgttgtagttgttgtgc

SEQ ID NO: 6171 - DNA, 464 bp, Zea mays
  Clone ID: LIB3061-063-Q1-N6-E8
atcgggataaaccccaaccaaaatatgggttatttctaggaaacccatgcccctttgggggccccattatcggggccctcccaaatggaaacaaaaaaaggcccccccaacgggggggggcggccccaacaaggggggggtcaacaaaaaaaaccgggtggagggcaacaattggtgctgctgggggaaggccccccccaaggggttacccccccctgggggataaaaaaaccggggcccctgttggagggccccaccaaagttccacccaaccagttggttgaaaggaaacacctgttgcaaggaggcaacagggtttgccacaactagctgagtcaaagctgggccaaactggtgcaacaaccggtgttgcaggtatgtaggggccttaaccacagcgggggggctaaaaaaaaacacttgttgctgttgtagggaggcggcagggttcaccctggctagtt

SEQ ID NO: 6172 - DNA, 460 bp, Zea mays
  Clone ID: LIB3061-063-Q1-N6-E9
aaaaattaaatataaaaaaaaaaaaaaaaaaataaaaaaaaaaaaaaaaaagaaagggggaaaaaggggggggggggggggaaaaagaatgaaaaaaaaaaaaaaaaaaaaaaaaaaaaaaaaaaaaaaaaaaggaagaaaaaaaccaacaaaagaaaaaagaggcgaaaaaaaagagggggggggggggggaaaaaggaagggggaggggggggggggggagaaaaaaaaaagggggggggggaaggaagaggggaaaaaaaggggggggggggcgggggaaaggggggagggacagggggggggggagggaaaaccgaccggaagggggggcgagggggagggggggaaaaagggcgggggggggaaaaaagggggggaggaaagggagcgggcgagggaccccaccgaggcaagggggagaccggagggcgccggggagcggcaaggggcggcgaaa

SEQ ID NO: 6173 - DNA, 495 bp, Zea mays
  Clone ID: LIB3061-063-Q1-N6-F1
gggagaaaagcacagtagtatccctatattctcacaggtcctgacaaaatcagatgcggggaaacacttacaaaggggtctttctttcggggaaaaaggcaaaaataatccaactcaaaaaaaaattgtaaaggaaatttagagcacaaatcgctgagaaggcaacaacgatgctatgacctggcagggaacagcaaccgtcccaacaagcacagaaaaagaaagaagtttattccaatgaatagcaaagacattctcaatgcccaccaaaataatgagtaacctattactccaccaccttccaaacacgaatgcaagcatcctcgccgggaggcaccaaagtatcattctccaggaagggtaaaccatgaactccacccaaatgagctcccttgatagggacccgactggctactggcttggctatctcgtaaacaattgcacaggggtccagggagccaggggcaaccaatcgactggccggggaccaaaccc

SEQ ID NO: 6174 - DNA, 557 bp, Zea mays
  Clone ID: LIB3061-063-Q1-N6-F10
gtggggggttttttttttacagatcaagtaccacattgctagcaacacagcagtaaccatcgtcagccatccaacacaacatagcattatacagcgggtccaggcctaacgaggcaaaaggagttctagttccaaaacaaaaactgcttagcttaggaatttcaaatctgcattgccagcacacaacgcagacagccaccttcgtgcagcaggtggaaggcgtcgttgatgtcagccaggttcatgttgtgcgtaatgtactcgtccaccttaatttcctttttcatgtacttgtcaacaagccatgggacctgggtccggctcttgaagccaccgaaagcggttcccttccagacacgcccagtcacgagctggaatggtcgtgtggcgatctcctggccagaggcggcgacgccgacgatgacggaggttccccagcccttgtggcagcattccagtgcagccctcataaccgaaacatttccaatgcactcaaagctgtaatccacgccgccatctgtaagatcgaccaggacctgctgtatcggtttgtcatg

SEQ ID NO: 6175 - DNA, 525 bp, Zea mays
  Clone ID: LIB3061-063-Q1-N6-F2
caattgttcattcaggtcattgctcacactgacactgccacccatggtgatgcgtgacacattattactcaatcatcgccgctaaatgactcaactagctagctagccagcggctatactacagcacatagtttcttcagtgggggacaccgccggcagcagcgtaggggcatggagtcggctgctgcaggccgcacatcgccgtcagttgctgcgctatctgcgccgccaacagccccgcgacctggccgctttgcggctgctgctgcaggatggactggaggaccaagccgaagatcgcctggtaccggtgctgcggctccacctgcctgagctgctggcaacactgctgccgcaacgactggcactgaggcgagcagtagggcgtcgccgtcgggctgcactgatgcctcaggaactcgacgcactggcccaggatcggggtgctgccaacgccgcaggttccctgcagctggcacgggcttggatgcggctgttggcacgggcatgggtgtggctggggat

SEQ ID NO: 6176 - DNA, 508 bp, Zea mays
  Clone ID: LIB3061-063-Q1-N6-F3
gggaagttatattctatggtataataaaatttattttagatctttaacggaaaggaaaaagaaaagagggcaccaccaaagaagggtagaaggtagaatgctgctgggggggggggaggaggttggttgaaaggcagcaatcggtgcaggtgtaagagggggccagcgttaggcgcagcgtgctggtagaacggcaacaacagtggttgtgtcaagaaggtagcagggctcacaccagctagctggctgaatggtagtagttggggctgctgtaaataagcaggagagttcaatgctgtcagttggttgaatggaagaaattgctgggggtaggcagcagatagctggctgaatggtagttgttgctgttgcaaataagaagcagagttcaatgcagctagttggttgaaaggaagaaactgctgttgctgagagtaggcagcaaggtttgctagcacaagttgttgtagttggtgggccctggaggttttgggccaaaaaaagcacc

SEQ ID NO: 6177 - DNA, 501 bp, Zea mays
  Clone ID: LIB3061-063-Q1-N6-F5
aaaactggaaagtaacttcttatttctggttggccacatacatcatcccaaaaaactttattattgaattacaactaataatcaatctaaaagagggccccaccaatgatgtgttgttggtaggaggctgctgggtttgtcaaagcaagttggacaaagggcaacaattgttgtagttgtaagagggttgcggggttagccgcaaactgcttgtaaaaaggcagcaactgttgctgtgtcaagaaggaagcacgacttgctgcagctagctcgctaaatggcagtagtatttgctgctgcaaataagcagcggggttcagtgcggccaattggttaaatggaaaaagttgttgttgctgaaagtaggcagtacctagctggctaaatggtaatagttgttgctgcaaataagcagcagggttcagtgtaaacagttggttgaatggaaaaaattgttgttgctgaaagtagggagaaaggtttgccaaagctacttggttg

SEQ ID NO: 6178 - DNA, 528 bp, Zea mays
  Clone ID: LIB3061-063-Q1-N6-F6
atcgagaaaaatctcaatcaatatattgattatttctaggaaacacatgtcggtatgagggcaccattgtcgagtacatctcatatgtaatctaaaagaggcacctccaacgatgggttgctgcaaggcagggttcatcaaagagaactggttgtatggcagcaattgttgttgctgctgcaggaaggtagcgaccaatgggttagccactgccaatggattaagtaactgttgtcgctgttgtaggtacgcagcagagtttgacacagccagttggttgaatggaagcaactgttgtaagtaggcagcagggtttgccacagctagctgagtcagagctggtacaatttgttgcagcaactgttgttgtaggtacgtaggtgcattgcccaccgcgagcgggctagatgaaagtagttgtaggtagacggcagggttcaccatggctagttgactgagcactggcataaactgttgcagctgttgttgttgctggtatgcagctacgttcgccagagcaagtgggtt

SEQ ID NO: 6179 - DNA, 517 bp, Zea mays
  Clone ID: LIB3061-063-Q1-N6-F8
aaaaatagatctctaatcttttattactgagaagttgcacatatcagtatgagaactttattattacagtataaagcataaaaaaactagaagatggcaccaccaatggtgggctgctgcaataagggggtaggattcgtcaaagcaagttggttaaatggcagcaattgttgttgttgtaagaaggcgacattgtttgccacatcctgtgggtagaatggtagcaactgttgctgttgcaagaaggcgttaatgtttcccacaacctgtgggtaaaatggcagcaattgttgttgttgttgcaagaaagcagcaatgtttgccacaacttgtagatggaatggaagcaactgttgctgcagtaagaaggcagcagggctcctgacaagttggttgaatggtagtagctgttgtgcctgcaagtaagcagcagggttcaccccagctagttgattgaatggaagaaattgttgttgctggaggtaagcagcaaggttcgctgcaactacttgattga

SEQ ID NO: 6180 - DNA, 530 bp, Zea mays
  Clone ID: LIB3061-063-Q1-N6-F9
ttttttttttttttttttttttttttttttttttttttttttttttttttttttttttttttttttttttttttttttttttttttttttttttttttttttttttttttttttttttttttttttttttttttttttttttttttttttttttttgaaaaaaaaaaaaggggggggggtttatggggaaaaacccgggtagggaaaaaagggggggggaaaaaaaaattttaaaagggaaaaccccaaaaaggtcttgggggggggggggttttttggggggggggggggggaaaaagcccaaaaaggggggggggattggggggggaaaaaaaaggccccccccctttggaaggttgggggaaaaccaaaaaaaaaaaaagggggggggggggggcccccccggaattggggggaaaaaagggtttaaaatgggggggaaaaaatttgggggaaaaaatggcaaaaaaaaaaaaaaaaaggggggggaaaaaacggggaaatttttggggggaaaaaaacgggggggg

SEQ ID NO: 6181 - DNA, 545 bp, Zea mays
  unsure (1)..(545): unsure at all n locations; Clone ID: LIB3061-063-Q1-N6-G1
gntcctatccgtcgcgctgccgtctgacaccggccgtgtgctcagcatccagtcccacaccgtccaggggtatgttggcaacaaatcggccgtctttcccctgcagctccttggctttgatgtggatccaataaactctgtacagttttctaatcatacaggatacccaacatttagaggtcaggttcttaatggcaaacagctctgggaccttattgaaggactggaggaaaatcagttgcttcattatacccatttattaacaggttatataggctcagtttcctttttagatactgtgctacaagttgttgagaaattgcgatcagttaatcctgatcttgtatatgtttgtgacccagttctaggtgatgaaggaaaactatatgttcctcaggagctaatatctgtttatcaacagaaggttgttccagttgcttcaatgcttacacctaaccaatttgaagttgaactacttactggattgaggatcacctccgaagaagatggtttgacagcttgtaataccctccacagtgccggac

SEQ ID NO: 6182 - DNA, 474 bp, Zea mays
  Clone ID: LIB3061-063-Q1-N6-G10
ttttttttttttttttttttttttttttttttttttttttttttttttttttttttttttttttttttttttttttttttttttttttttttttttttttttttttttttttttttttttttttttttattttttttttttttttttaaagggggggcaaaaaggggggataaaaaaaaaaaccacccaaaaaagggggccggcccggggcctttttccaaaggggggaaaccaaaaaaaaaaattttcaaggggccaaaaaagcggaaaaaacaaaaaaacccttaaaaaaaaaaagaacaaatcggcccgggaaacggaaaaaaaaaccggaaaaaaatggggttatttccccaaaaaaacaagaaaaccaaaaaaaaccttgggggaaaaaaagaggcgtattttgggggggttttaaaaaaaaatagaaccccttaaaaggaaaaaaaaacccccacgggggggggttct

SEQ ID NO: 6183 - DNA, 536 bp, Zea mays
  Clone ID: LIB3061-063-Q1-N6-G11
gtttgggggttttttttttttttttttttttttttttttttttttttttttttttttttttttttttttttttttttttttttttttttcccacaaccatcaaaaaaaaactttattatggacctaaaccccaaaaaaaatcaaaaggggggggcccccgaagaggggttttgggaaaaaccctggggggtttgaaaaaccaagggggtggaagggcaacaattggggcagttgaaaaaggggcccaccgttaggcccaacgggctggaaaaacggaaacaactggggttgggaaaaaaagggagcagggcccaccccacctacctggctaaagggaaaaaattgttgctgctgaaaaaaaccgggaaagtccaaggctgctagtggggaaaaagaaaaaaattgcgggggggaggcaaaaggaacctggctaaaggggatttgttgttgttgcaaaaaaaaagcaaagttcaaggaccctagtgggtgaaaggaaaaaaactgtttttcctaaaaagaaggcaaaaaggtttcca

SEQ ID NO: 6184 - DNA, 551 bp, Zea mays
  Clone ID: LIB3061-063-Q1-N6-G12
ggtggggttttttcatttcaattgttcattcaggtcattgctcacactgacactgccacccatggtgatgcgtgacacattattactcaatcatcgccgctaaatgactcaactagctagctagccagcggctatactacagcacatagttggtggagggggggacaccgccggcagcagcgtaggggcatggagtcggctgctgcaggccgcacatcgccgtcagttgctgcgctatctgcgccgccaacagccccgcgacctggccgctttgcggctgctgctgcaggatggactggaggaccaagccgaagatcgcctggtaccggtgctgcggctccacctgcctgagctgctggcaacactgctgccgcaacgactggcactgaggcgagcagtagggcgtcgccgtcgggctgcactgatgcctcagaaactcgacgcactggcccaggatcggggtgctgccaacgccgcaggttccctgcagctggcacgggcttggatgcggctgttggcacgggcatgggtgtggctggggatgaggctga

SEQ ID NO: 6185 - DNA, 366 bp, Zea mays
  Clone ID: LIB3061-063-Q1-N6-G2
gatcaacagaaattatttttattcttgcaaatcacaacagtaccacaccgccaagagtttacttttctggtcctcaagcacgagcaatacaggcacaatctaagagttcaaaagcccaggcatattaagttcttacaaactagccattgcagtcacactgcggatccatacaagcttatgaagactgtcgaagctctggacgcacgaaatcagcatcagcggtcactgagatgtcaacagtgggcctcagctgagcgcagacttcgatggcaccgtggacagggtcagacatgaagttgctgatgaggtcttggttgatcggtgctttcttgtcaacagtcacaaacgcctgttgggtcaagatgt

SEQ ID NO: 6186 - DNA, 458 bp, Zea mays
  Clone ID: LIB3061-063-Q1-N6-G3
cacattaaaatctggaaaagtaacttcttatttctggttggccacatacatcatccaaaaactttattattgaattacaactaataagcaatctaaaaggggcaccaccaatgatgtgttgttggtaggaggccgctcggtctgtcaaagcaagttggacaaagggcaacaattgttgtagttgtaagagggttgcggggttagccgcaaactgctggtagaaaggcagcaactgttgctgtgtcaagaaggaagcacggtttgctgcagctagctggctaaatggtagtagtatttgctgctgcaaataagcagcggggttcagtgcggccaattggttaaatggaagaagttgttgttgctgaaagtaggcagtagctagctggctgaatggtaatagttgttgctgcaaataagcagcagggttcagtgtaaacagttggttgaatggaagaaat

SEQ ID NO: 6187 - DNA, 538 bp, Zea mays
  Clone ID: LIB3061-063-Q1-N6-G4
cacctagtaacttggtaccttaacggccgcccttttttttttttttttttttttttttttttttttttttttttcaccaaaaactttattattgattacactaataacatctaaaaagggccccaccaagatggttgttggtaggaggctgctgggtttgcaaacagttggcaagggcaacaatgttgattgaagagggttgcggggttagcccaaactgtgtaaaaaggcacactgttgctgtgtcaaaaggaacacggtttgctgcactgctggctaaaggtagaatatttgctgctgcaaataacacgggttcagtgcggccaattggttaaaggaaaaattgttgttgtgaaagtaggcatacctagctggctgaatggaatagttgttgctgcaaataacagcagggttcagtgtaaaagttggttgaatggaaaaaatgttgttgctgatagtagggaaaaaggtttgccaaagctacttggttgatcacaggtagcacaagttgctgcagctgctgtgccttgatggtttg

SEQ ID NO: 6188 - DNA, 523 bp, Zea mays
  Clone ID: LIB3061-063-Q1-N6-G7
atcgaggaaaatctcaatcaatatattgattatttctaggaaacacacgtcggtatgagggcaccattatcgagtacatctcatatgtaatctaaaaaaggcacctccaacgatgggttgctgcctcgacaagacaggattcatcaaagagaactggttgtatggcagcaattgttgctgctgtaggaaggcggcgaccaatgggttagccactaccaatggattaagtaactgttgtcgctgttgtaggtacgcagcagagttcgacagagtcagttggttgaatggaagcagctgttgcaagtaggcaacagggtttgccacagctagttgagtcagagctggtacaatctgttgcaacaattgttgttgcaggtatgtaggtgcattgcccacagcgagcgggctagatgaaagcagttgttgttgttgtacgtaggcggcagggttcaccatggctagttgactgagcgttggcagaaactgttgtagctgttgttgttgctggtttgcaactacgttt

SEQ ID NO: 6189 - DNA, 513 bp, Zea mays
  Clone ID: LIB3061-063-Q1-N6-G8
gcagcaccaaggaacaccatttttttccttaggatttaacttagaataaagcctgacgggggtaacagcacccatcgatccgcagtccatgctggttgatgcatgggtctgctggagccgaggatgaacacgaggctaacaactgacacagagcgaccttcaatcaaaaacacagatgggcaacaacaaacacgagacgaacgaagataaacactctggactagggtaaacaacacggtagcgaacaggataacttggccgcgcgggccccaccgctcagttcctccagttcccgtcggagttgccgtagccgccgccacggttgccaccgccgtagccgccgccaccaccaccgtagccgccgccgccaccaccgtagccgccgccaccgccgtagccgccgccgccatcacggggcccgccaccggcgtagccgccgccttcacgaggcaccaccgtacccggcggcggcggcggctacacgggcgccgggggaactgggcctcgttgacg

SEQ ID NO: 6190 - DNA, 558 bp, Zea mays
  Clone ID: LIB3061-063-Q1-N6-G9
ggggggttttttttttttttttttttttttttttttttttttttttttttttttttttttttttttttttttttttttttaaaaaactaaaaagggcctttcttatttcgggggccccccaaacctcatccaaaaaacttcatttttgaaccatagcccataagccatctaaaagggggccccccccaggggggggtggggggaaaaccccggggggtttgccaaaacaaggggggtgaagggcaccaattggtgcagttgtaaaagggggcccgcgttaggcatagcgggccgggaaaacggcaacaactgttgttgggtcaaaaaggcagcagggcccacatcaactagctggctgaatgggaaaagttgttgctgctgtaaaaaaaccccaaagttcaatgctgctagttgggtgaaaggaaaaaaatgctggggggaggcaacaactaactggctgaaagggaaatggtggtgcaaaaaacccgcaaagttcaatgccccccgttggttgaatggaaaaaaccgatgttgctgaaagaatccaccaagggttgc

SEQ ID NO: 6191 - DNA, 537 bp, Zea mays
  Clone ID: LIB3061-063-Q1-N6-H10
gtggtgtgggggtttttttttttttttttttttttttttttttttttttttttttttttttttttttttttttttttttttttaagaatctaaaaagggcctttcttatttcgggggccccccaaacatcatccaaaaaacctcattatggggggggggggggggagccatctaaaagggggccccccccatggggggggggggggaaaacaccgggggggttgtcaaaacaaggggggtgaatggcaacaattgttgcagttgaaaaagggggcccccgttaggcataacgggcagggaaaaccgcaacaactggtggtgggtcaaaaaggcagcagggctcacatcaactaactggctgaatgggaaaagttgttgctgctgaaaaaaaacagcaaagttcaatgctgctagttgggtgaaaggaaaaaattgctgggggggggcagcaactagctggctgaaggggaattggtgttgcaaaaaaaccgcaaagttcaatgcccccagttggttgaatggaaaaaactgatgttg

SEQ ID NO: 6192 - DNA, 516 bp, Zea mays
  Clone ID: LIB3061-063-Q1-N6-H11
aacttataataaagcctgacgggggtaacagcacccatcgatccgcagtccatgctggttgatgcatgggtctgctgcgagccgtggatgaacacagcactaacaactgacacaaagcgaccttcagtggggggcacagatgggcaacatcaaacacgagacgaacgaagataaacactctggactagggtaaacaacacggcccgcgaacaggataacttggccgcgcgggccccaccgttcagttcctccagttcccgtcggagttgccgtaaccttcgccacggttgccaccgccgtagccgccgccaccagcaccgtagccgccgccgccaccaccgtagccgggggcaccgccgtagccgccgccgccatgacggttctccgtcacagacgtagccgccggctccacgggcaccaccgtacccgccgtcgacgccggctccacgggcgccgcgggactgggcctcgttgacagtgatgttgcggccgtccagttccttgccgttcatgccc

SEQ ID NO: 6193 - DNA, 450 bp, Zea mays
  unsure (1)..(450): unsure at all n locations; Clone ID: LIB3061-063-Q1-N6-H12
gggttggtgggggttttaaaaatagatctctaatactttattactgaggggtcgcacatatcagcatgagaactttattattacagntgataaatcataaaaaatctagaagatggcaccaccaatggtgggcggttgcaataaggtggtagggtggggggggggcatgttggctaaatggtagcaattgttgttgttgtaagaaggcaacaatgtttgccacattctgtgggtagaatggtagcaattgttgctgttgcaagaaggcattaatgtttcccacaacttgtgggtaaaatggcaacaaatgttgttgtctcaagaaagcaacaatgtttgccacagcttgcagatggaatggcagaagctgttgttgcagtaagaaggcataagggctcccgacaagttggttaaatggtagtagctgttgtgcctgcaagtagatagcag

SEQ ID NO: 6194 - DNA, 524 bp, Zea mays
  Clone ID: LIB3061-063-Q1-N6-H2
agaatctgggaaagtaacttcttatttctggttggccacatacatcatccaaaaactttattattgaattacaactaataatcaatctaaaagaggcaccaccaatgatgtgttgttggtaggaggctgctgggtttgtcaaagcaagttggacaaagggcaacaattgttgtagttgtaagagggttgcggggttagccgcaaactgcttgtagaaaggcagcaactgttgctgtgtcaagaaggaagcacgacttgctgcagctagctcgctaaatggcagtagtatttgctgctgcaaataagcagcggggttcagtgcggccaattggttaaatggaagaagttgttgttgctgagagtaggcagtagctagctggctaaatggtaatagttgttgctgcaaataagcagcagggttcagtgtagacagttggttgaatggaagaaattgttgttgctgagagtagggagaaaggtttgccagagctacttggttgatcacaggtagcacgagttgctgc

SEQ ID NO: 6195 - DNA, 480 bp, Zea mays
  Clone ID: LIB3061-063-Q1-N6-H3
ccggttggccacatacaaaaaccaaaaactttattattgatttacaaaaaaaaataaaacgggacaccggcaccagcgggggtgggttaaaacacggggggtggtggaaacaggcaaaggaaggtggacaaaaggcagcaattggtgaaagggggagagggttggggggatagccccaaactaacgggaaaaaggcaggaactgttgctaaggcaagaaggaagccccacttgctgcagctagctcgctaaatggcaggcggatttgctgaagcaaaaaagccccggggttcactgcgggcaattgggtaaaaagaagaagggggggcagctgagagtaggcgggaactagctggctgtgtgggcatagaagatgctgcaaataaacaacacggttcagtgtaaacagaaaaatgaatggaagaaaaagaagctgctgagagtgcggagaaaggtttgccagagctacttgcccgatcac

SEQ ID NO: 6196 - DNA, 517 bp, Zea mays
  Clone ID: LIB3061-063-Q1-N6-H4
attattgaactataactcataagaaactaaaagaggcaccaccaatgatgggttgttggtagaacactgctgggtttgtcaaagcaagttggttgaatggcagcaattgttgcagttgtaagagggtgccagcgttaggcgcaacgtgctggtagaacggcaacaactgtggttgtgtcaagaaggtagcagggctcacaccagctagctggctgaatggtagtagttgttgctgctgtaaataagcaggagagttcaatgctgctagttggttgaatggaagaaattgctgggggtaggcagcaggtagctggctgaatggtagttgttgttgttgcaaataagaagcagagttcaatgaacctagttggttgaatggaagaaactgctgttgctgagagtaggcagcaaggtttgctagcacaagttgttgtagttgttgtgccctgatgttttgtgccaataaatgcaccaaaggtaactgttgtaatagggctgatgattgttggaggaacaa

SEQ ID NO: 6197 - DNA, 532 bp, Zea mays
  Clone ID: LIB3061-063-Q1-N6-H5
agaatctagaaagtactttcttatttctgggaagccacaaacatcatccaaaaacttcattattgaagtataactcataagcaatctaaaagagggcaccaccaatgatgggttgttggtagaacgctgttgggtttgtcaaagcaagttggttgaatggcagcaattgttgcagttgtaagagggtgccagcgttaggcgcagcgtgcaggtagaacggcaacaactgttgttgtgtcaagaaggcaacagggctcacatcagctagctggctgaatggtggtagctgttgctgttgtaaataagcagcagagttcaatgctgccagttggttgaatggaagaaattgctgggggtaggcagcagctagctgactgaatggtagttgttgttgcaaataagcagcagagttcaatgcagccagttggttgaatggaagaaactgctgttgctgagagtaggcagcaaggtttcctagcacaagttgttgtagttgttgtgccttgatgttttgtgccaacaaatgcaccaa

SEQ ID NO: 6198 - DNA, 498 bp, Zea mays
  Clone ID: LIB3061-063-Q1-N6-H6
agagggaaaacccgctccatgctttccctgatctctacacatactagcagtatgcatacatgccatgagggatctaggggcagtttctaagggtaaacaaccatccctagcatacaagctactacagatgtttaatcctacacaacgactaatacttccatattccaagagacattacacgcagaagacgatggccaaaccaccgggctcaaaaagggtgaactctccagccagccttcgaagcttcttcttatttggggctgattgacgtctttttttgtaccggggggcactgatcgatgggcgacccaggtgacttcactgatcgatcagcgacgtaggggactccactggtagctgctccgatacctttgcgagagaattgagggtgcacttgatcacggcctccacaaagtagcatgtctcgtccttcgggttgccatcaggcacattgaccacgaacgacttgatcaccagggggcccggcctcccgtaaat

SEQ ID NO: 6199 - DNA, 544 bp, Zea mays
  Clone ID: LIB3061-063-Q1-N6-H7
gtggggtgtttttttttttttttttttttttttttttttttttttttttttttttttttcttttttttttttttttttttttttttttttttttttttttttttttttttttttttttttttttttttttttttttttttttaaaaaaaaaggggggaaaaaaaaaaaaccccccaaaaaaaaacccggggggttttttaaaaaaaaaaaaaaaaaaataaaaacccccccaagggaaaaaaaaaaaaaaaaaaaaaaggtaaaaaaacccaccccggggggaaaaaaacaaaaggcccccaaaaaaaaaaaacaaaaaaaaaaactttggcaagggggccccaaaaagggcccccaaaaaatttgaaaaaaccccccgggggaagggcccaaaatccggggggggaaggcttaaaaaaaggggtaaacccaaaagggcccaaaaaaaaaaaaaaaccttttttgggggggggaaaaaaaaaaaaagggggggtttttaaaaggggtccaaaaaattttacctggaaaaaaagggggggccccc

SEQ ID NO: 6200 - DNA, 611 bp, Zea mays
  unsure (1)..(611): unsure at all n locations; Clone ID: LIB3061-064-Q1-K6-A1
gtggnaatccagtagcaacaacagnagcaacaatggcgaccaagnaattttccctccttatgctccttgctctttctgcatgtgttgctaacgcgacaattttccctcaatgctcacaagctcctatagcttcccttcttcccccataccttccatcaatgatagcttcagtatgtgaaaacccagctcttcagccctataggctccaacaagcaatcgcagcaagcaacatacctttatcacccttgttgtttcaacaatcgccagccctatctttggtgcagtcattggtacaaaccatcagggcacagcagctgcagcaactcgtgctacctgtgatcaaccaagtagctctggcaaacctttctccctactctcagcaacaacaatttcttccattcaaccaactgtctacactgaaccctgctgcttatttgcagcaacaactattaccattcagccagctagctactgcctactctcagcaacaacaattgttgccctttgtccaacttgctttgacagaccgagcggcctactaccaacaacacatcattggaggtgccctcttttaggatgcttattagctggcattcaataataaagatttt

SEQ ID NO: 6201 - DNA, 474 bp, Zea mays
  Clone ID: LIB3061-064-Q1-K6-A10
gcgtttttagtttatgccagtgctcagtcaactaggcgtgggtgaaccctgccgtctacctacaactactttcatctagcccgctcgcggtgggcaatgcacctacgtacctacaacaacagttgctgcaacaaattgtaccagctctgactcagctagctgtggcaaaccctgctgcctactggggggggggcttccattcaaccaactggctgtgtcaaactctgctgcgtacctacaacagcgacaacagttacttaatccattggcagtggctaacccattggtcgctaccttcctgcagcagcaacaacaattgctgccatacaaccagttctctttgatgaaccctgccttgcagcaacccatcgttggaggtgccatcttttagattacatatgagatgtactcgacaatggtgccctcataccgacatgtgtttcctagaaataatcaatatattgattgagattt

SEQ ID NO: 6202 - DNA, 620 bp, Zea mays
  unsure (1)..(620): unsure at all n locations; Clone ID: LIB3061-064-Q1-K6-A11
gcgttcttttgctggnacagttatatgaaggggggtgtgtgggtgtagtgattttgagggtatagtacaggtttgggatgttactaggagtcaagtttttgttgggatgagggagcatgagcgacgcgtgtggtcggtggacttctcaattgtggacccaacaaaattggtcagtgggagtgatgaggggggggtgaaactgtgggatatgaatcaggctgggagtattggcactattagaacaagagcaaatgtgtgttctgtacaatttcaacctgatactgctcgctccattgccatcggctctgcagaccacaaaatttactgctatgatctacgtaacatacgagctccttattgtacactagttggccacacaaagactgtaagctatgttaagtatctggatgcatcaacaatactatccgcatctactgacaactcattgaagctttgggacttatcgatgaatccaggaaggataattgacagtccagttcaaacatttacagggcatacaaatacaaagaacttcgttggtctttccatatctgatggttacattgctactggctctgaaacaaatgaagtttttgtctaccacaaagaatttcccatgc

SEQ ID NO: 6203 - DNA, 510 bp, Zea mays
  Clone ID: LIB3061-064-Q1-K6-A3
gcgttcgtgcgtcggcagcgtcggcagcccgttcctgggccagtgcgtcgagttcctgaggcaccagtgcagcccggcggcgacgccctacggctcgccacagtgccaggcgctgcagcagcagtgctgccaccagatcaggcaggtggagccgctgcaccggtaccaggcgacatacggtgtggtcctgcagtccttcctgcagcagcagccgcagggcgagctcgcggcgctgatggcggcccaggtagcgcagcagctgacggcgatgtgcggcctgcagctgcagcagccaggtccctgcccttgcaacgcagctgccggcggtgtctactactgaggaaactatgtactgtagtaataatgtaatggagccgctgactagctacctagctcgctagtttactcatttagcggcgatgagtaacgtagtgtcacccatcaccatgggtggcagtgtgagcaatgacctgaatgaaccattgaaatggaaaggaataatatataagg

SEQ ID NO: 6204 - DNA, 608 bp, Zea mays
  Clone ID: LIB3061-064-Q1-K6-A4
caaaaacacaccaagcgaacgcactagcaacgacctaacaccaatggctaccaagaattagccctccttgcgcttcttgcccttttagtgagcgcaacaaatgcgttcattattccacagtgctcacttgctcctagtgccattattccacagttcctcccaccagttacttcaatgggcttcgaacatccagccgtgcaagcctacaggctacaactagcgcttgcggcgagcgccttacaacaaccaattgcccaattgcaacaacaatccttggcacatctaaccctacaaaccattgcaacgcaacaacaacaacaacaacagtttctgccatcactgagccacctagccgtggtgaaccctgtcacctacttgcaacagcagctgcttgcatccaacccacttgctctggcgaacgtagctgcataccagcaacaacaacagctgcaacagtttatgccagtgctcagtcaactagccatggtgaaccctgccgtctacctacaactactttcatctagcccgctcgcggtgggcaatgcacctacgtacctacaacaacagttgctgcaacaaattgtaccagctctgactcagctagctgt

SEQ ID NO: 6205 - DNA, 603 bp, Zea mays
  unsure (1)..(603): unsure at all n locations; Clone ID: LIB3061-064-Q1-K6-A5
gcaacatanaagtagaatccattagcaacaatagagcaacaatggcgaccaagatattttccctccttatgctccttgctctttctacatgtgttgctaacgcgacaattttccctcaatgctcacaagctcctatagcttcccttcttcccccataccttccatcaattatagcttcagtatgtgaaaacccagctcttcaaccatataggcttcaacaagcaatcgcagcaagcaacatacctttatcgcccttgttgtttcaacaatcaccagccctatctttggtgcagtcattggtacaaaccatcagggcacaacagctgcagcaactcgtgctacctgtgatcaaccaagtagctctggcaaacctttctccctactctcagcaacaacaatttcttccattcaaccaactgtctacactgaaccctgctgcttatttgcagcaacaactattaccatttagccagctagctactgcctactctcagcaacaacaacttcttccatttaaccaattggccgcactgaaccccgctgcttatttgcagcagcaaatactactgccatttagcgagctagctgcagcaagtcgtgctt

SEQ ID NO: 6206 - DNA, 213 bp, Zea mays
  Clone ID: LIB3061-064-Q1-K6-A8
gcgttcgggcaacatttacagccatacgtgctggcccttattgacggcgatttgtgaactagtagtatgtttgtttctatccgagccggaggcgatacttaaccatggatacttgttgtgagttcgtttctgttcgcgtgtgactcttgaattgaatcaaccagctcaccactgcaccaggcgcggggggagtggtgacagtgatttcctgtt

SEQ ID NO: 6207 - DNA, 188 bp, Zea mays
  Clone ID: LIB3061-064-Q1-K6-B1
ccccgcgtccgcttacaactacaacaattgttgccctttgtccaacttgctttgacagacccagcggcctcctaccaacaacacatcattggtggtgccctcttttagattgcttattagttgtaattcaataataaagttttttggatgatgtatgtggccaaccagaaataagaagttacatttcc

SEQ ID NO: 6208 - DNA, 616 bp, Zea mays
  Clone ID: LIB3061-064-Q1-K6-B10
tctctagcaattagctcatcgactccaggaggggggaactgcgacaccatgaaggtgctgatcgttgcccttgctctcctggcgctcgctgcgagcgccgcctccagtacaagcggcggctgtggctgccagacaccaccgtttcatctaccgcctccgttctatatgccgcctccgttctatcggggggcgcagcagcagccgcagccatggcaataccccactcaaccaccgcagctaagcccgtgccagcagttcggatcctgcggcgtcggcagcgtcggcagcccgttcctgggccagtgcgtcgagttcctgaggcaccagtgcagcccggcggcgacgccctacggctcgccacagtgccaggcgctgcagcagcagtgctgccaccagatcaggcaggtggagccgctgcaccggtaccaggcgacatacggtgtggtcctgcagtccttcctgcagcagcagccgcagggcgagctcgcggcgctgatggcggcccatgtagcgcagcagctgacggcgatgtgcggtctgcagctgcagcagccaggtccctgcccttgcaacgcagctgccggcggggtctactactgaggaaactatgtactga

SEQ ID NO: 6209 - DNA, 593 bp, Zea mays
  Clone ID: LIB3061-064-Q1-K6-B11
attttgagcattcagaaacacacctagcgaacgcactagcaacgacctaacaacaatggctaccaagatattatccctctttgcgcttcttgccctttttgtgagcgcaacaaatgcgttcattattccacaatgctcacttgctcctagtgccattattccacagttcctccctccagttacttcaatgggcttcgaacacccagctgtgcaagcctacaggctacaacaagcgcttgcggcgagcgtcttacaacaaccaattgcccaattacaacaacaatccttggcacatctaaccatacaaaccatcgcaacgcaacagcaacaacaatttctaccagcactgagccaactagctgtggtgaaccctgtcgcctacttgcaacagcagttgcttgcatccaacccacttgctctggcaaacatagttgcataccaacaacaacaacaattgcaacagtttctaccagcgctcagtcaactagccatggtgaaccctgccgcctacctacaacagcaacaactgatttcatctagccctctcgctgtggttaatgcacctacatacctgcaacaacagttgctgcaac

SEQ ID NO: 6210 - DNA, 637 bp, Zea mays
  unsure (1)..(637): unsure at all n locations; Clone ID: LIB3061-064-Q1-K6-B12
gcgttcttttaaaaaataaagcanaagcaaaaaggagctgagaggattgaataaggcagggaaaaaacatgtcgttgttgaaggggagcttactaaggaggccatcatggaattggcacgngaatgaacagttaaaggagcgccnacgaaatgggagaaaaaactgcagaagtttgcaaaaacaatggattgtggggggagggcaaaaaggcaggaagaggcaccactgattgagcaagcttttcaaaaacgtcttgaggaagagaagatccttcacgagcaagagcagcttcgggagattgaactcagcaagcaacaccatgccagcgacttgcaagagaaaaatagactttcacggatgttggagcacaagaatgctttacaggagagaatcatccaagaacgtgcagctgagtttggccgtctgaagaaagagagagatgaacggatgaatcggttgatatcttcaagaaagcatgaaagggagacagtaaggaagttgatgttttatctgaacctggaggaacagcggattgaaatgcttcgtgaggaagaggaagctagaaaacgtgaagcggaagagaggaggaagagagaggaggctgaaaggaaagctaaacttgatgccatcgctgaa

SEQ ID NO: 6211 - DNA, 452 bp, Zea mays
  unsure (1)..(452): unsure at all n locations; Clone ID: LIB3061-064-Q1-K6-B3
gcagcaacaactactaccattcagccagctagctggtgtgagccctgctaccttcttgacacaaccacaattgttgccgttctaccagcacgctgcgcctaacgctggcaccctcttacaactgcaacaattgctgccattcaaccaacttgctttgacaaacccaacagcattctaccaacaacccatcattggtggtgcgcctnttttagatttattattggactgtaactnataagaaattaaaaagggcgcnanngaggatgggtgggtgggggactgcgggtgggttggtcggagcaagttggttgagtggcagcagtgggtggagttgtaagagggtgccagcgttaggcgcagcgggctggtngaacggcagcatttgtggttgtgtcaagaagggggcagggctcacacgagctagctggctgaatggtagtagttgttgctgc

SEQ ID NO: 6212 - DNA, 606 bp, Zea mays
  unsure (1)..(606): unsure at all n locations; Clone ID: LIB3061-064-Q1-K6-B4
tcgcgcaattgcaccaanaatccatcgggggccgtcgacaggggaattaatggcgtcgtcgtctagcagcagccaccgccgcctcatcctcgcagccgccgtcctgctctccgtgctcgcggctgccagcgccagcgccgggacctcctgcgtgccggggtgggccatcccgcacaacccgctcccgagctgccgctggtacgtgaccagccggacctgcggcatcgggccgcgcctcccgtggccggagctgaagaggagatgctgccgggagctggcggacatcccggcgtactgccggtgcacggcgctgagtatcctcatggacggcgcgatcccgccgggcccggacgcgcagctggagggccgcctagaggacctgccgggctgcccgcgggaggtgcagaggggattcgccgccaccctcgtcacggaggccgagtgcaacctggccaccatcagcggcgtcgccgaatgcccctggattctcggcggcggaacgatgccctccaagtaactgcgaagagcatagtgcatgaggaatgagcttgtagctagctcatatgtctgaataataagcacagccaggaagatgaatgcatttct

SEQ ID NO: 6213 - DNA, 605 bp, Zea mays
  unsure (1)..(605): unsure at all n locations; Clone ID: LIB3061-064-Q1-K6-B7
cagcacatanaaagtggatacagtagcaacaatagagcaacaatggcggccaagatattttccatccttatgctccttgctctttctgcatgtgttgctaacgcgaccatttttcctcaatactcacaagctcctatagctgcccttcttcccccataccttccatcaatgaccgcttcagtttgtgaaaacccagcccttcaaccctacaggctccaacaagcaatcgcaacaagcaacttacctttatcacccctgttctttcaacaatcgccagccctatctttggtgcagtcattggtacaaaccatcagggcacaacagctgcaacaactcgtgctaccagtgatcagccaagtagctctggcaaacctttctccctactctcagcaacaacaatttcttccattcaaccaactgtctacactgaaccctgctgcttatttacaacaacaacaactactaccattcagccagctagctactgcctactctcagcagcaacaatttcttccatttaaccaattggccgcactgaacccctctgcttatttccagcagcaaatactactaccatttggccagctagctacaacaagccccac

SEQ ID NO: 6214 - DNA, 621 bp, Zea mays
  unsure (1)..(621): unsure at all n locations; Clone ID: LIB3061-064-Q1-K6-B9
agnacaactagcaacatagnaaagcacaatagtgtaccaacaatggcagccaaaatattttgcttccttatgctccttggtctttctgcaagtgttgctaccgcaaccattttcccacaatgctcacaagctcctatagcttcccttcttcccccatacctctcaccagcggtgtcttcaatgtgtgaaaccccaattgttcaaccctacaggatccaacaggcaatcgcaacaggcatcttaccattatcacccttgttcctccaacaaccgtcagccctattacagcagttacctttggtccatttggtggcacaaaacatcagggcacaacaactacaacaacttgtgctagcaaaccttgctgcatactctcagcaacatcagtttcttccattcaaccaactggctgcattgaactctgctgcttatttgcaacaacaattaccattcagccagctagttgctgcctacccccagcaatttcttccattcaaccaactagcagcattgaactctgctgcttatttacagcagcaacaactactaccattcagccagctagctgatgtgagccctgctgccttcttgacacaacaacagttgttgccgttctacctg

SEQ ID NO: 6215 - DNA, 594 bp, Zea mays
  Clone ID: LIB3061-064-Q1-K6-C1
gcgacggccgcgtggcggcgttcacgccgtcgggcccctccacaggttgccgaccgccttctaccagcgatccatcaaggaacaaccatattacatcgccgtcctgcaggtgagggacctgatctggtctccggcgccggcggacggggtgcaggctccaccgcccgcgccgcagcccgacgcggcgccggggttgacggatctgctgtccaagaacggctgcgggggcttcgccagcctcctcgccgcgacggccgacgcagtcaccaagtacgacagcagcgccgccgggctcaccgtcttctgcccggccgacgaggcggtggaggccttcaactccaccttcaagaacctcaccgccgacgcccagctcgcgctcctgctgtaccacggcgtggcggaacactactccgcgcagtctctcaaggcgatcaatggggacgtaagcacgcttgcctccgacggatccaagaacaacaacgggtacaacctaacgatacgtgccgacggggacacagtgaaaatctcgtccgcatctgccagcgccgccacggtgaccaagacgctgctcgacaaggcgccgctcgccgtcta

SEQ ID NO: 6216 - DNA, 627 bp, Zea mays
  unsure (1)..(627): unsure at all n locations; Clone ID: LIB3061-064-Q1-K6-C12
gcgtttgttttngagcttcagnaacacaccaagcgaagctgcctgagcacgacttaacaacaatggctaccaagatattagccctccttgcgcttcttgccctttttgtgagcgcaacaaatgcgttcattattccacaatgctcacttgctcctagtgccattataccacagttcctccgaccagttggggggatgggcttcgaacacctagctgtgcaagcctacaggctacaacaagcgcttgcggcgagcgtcttacaacaaccaattaaccaattgcaacaacaatccttggcacatctaaccatacaaaccatcgcaacacaacagcaacaacagttcctaccagcactgagccaactagatgtggtgaaccctgtcgcctacttgcaacagcaggtgcttgcatccaacccacttgctctggcaaacgtagctgcataccaacaacaacaacaattgcaacagtttctgccagcgctcagtcaactagccatggtgaaccctgccgcctacctacaacagcaacaactgctttcatctagccctctcgttgtgggtaatgcacctacatacctgcaacaacaattgctgcaacagattgtaccagctctgactcagctag

SEQ ID NO: 6217 - DNA, 508 bp, Zea mays
  Clone ID: LIB3061-064-Q1-K6-C2
gcttgtcgggcctgaagtgaagagcacgagtttgatgctccagacgacgcctacatccttgacgcagccgagactgccggtgtggagttgccatactcgtgccgtgctggggcttgctccacctgtgccggcaaaatcgagtctggttcggttgaccagtcggatgggtccttccttgatgacgggcagcaggaggaaggttatgtgctgacatgcgtctcctacccaaagtccgactgcgtcatccacacccacaaggaaggcgacctgtactagggctagggattttcaatttggcgagggaccaaaaatgctctcgagtggtgctttgtcaagcaaagctccatctgcgcgccctaccccgttgtgcgaactgtttggcatcaaacttgtgtggttgctgtcttctatgttctgctagtttatgttcggagtccgtgggaatatactagctgattaataaaaagaaaaaactgatgtgatgccataatagtataatttcatggct

SEQ ID NO: 6218 - DNA, 636 bp, Zea mays
  unsure (1)..(636): unsure at all n locations; Clone ID: LIB3061-064-Q1-K6-C6
nttttgagcattcataaacacacctagcgaacgcactagcaacgacctaacaacaatggcttccaagacattatccctccttgcgcttcttgccctttttgtgagtgcaacaaatgcgttcattattccacaatgctcacttgctccgagtgccattattccacagttcctccctccagttacttcaatgggcttcgaacacccagctgtgcaagcctataggctacaacaagcgcttgcggcgagcgtcttagaacaaccaattgcccaattacaacaacaatccttggcacatctaaccatacaaaccatcgcaacgcagcagcaacaagcactgagccacctagccgtggtgaaccctatcgcctacttgcaacaacagctgcttgcatccaacccacttgctttggcaaacgtagctgcataccaacaacaacaacagttgcaacagtttctaccagcgctcagtcaactagccatggtgaaccctatcgcctacctacaacagcaacaacttctttcatctagcccgctcgctatgggcaatgcacctacatacctgcaacaacagttgttgcaacaacagttgctgcaacaaattgtaccagctcttactcagctagctgtggcaaaccc

SEQ ID NO: 6219 - DNA, 491 bp, Zea mays
  Clone ID: LIB3061-064-Q1-K6-C7
gttctagatcgcgagcggcccccttttttttttttttttttttttttttttatattttttttttttttttttttttttttttttttttttttttttttttaaatttttaaattttttttttttttttttttttttttttttttttttttttttttttttttttttttttttttttttagggggggggggggtttttttttttttttttttaattttatttttgtgtgaaaaaaaaaaaatttcttttgggggggggcaacaaaaaaaaaaaaaaaaaatttttttgtaacaaaatccccaaaaaaaaaaaaaaaaaaggggggggggtttaaagggaaaaaaaaaatccggccggggggggggggagaaatttttaagaggggggccccaaaaaaaaaaaaaaaggggggggttttaaaaaaggggggggggaaaaaacccggggcgcccaaaaaaaaaggcggggggggacgattccctttaggcggggg

SEQ ID NO: 6220 - DNA, 506 bp, Zea mays
  Clone ID: LIB3061-064-Q1-K6-C8
gcgttcgcccttactgcgcgctcctccggccgctggcgctgcgcctgaggacccccagcgctacagcctccggagccgcgggctgtgcctggtgccggtggacctgacgctgcagctgacccagagcaacggggccgacctgtgggcgccggcgcacacggccaggcgaaggtgaggactgaggagacgcccctgtcgacctctcgccaggaggagccggcctgtctgtccggagggaaccgcgcaagtgctgccgcgtctgcgtgcgcgccgtggagtagagtttccaggcccctgactgacccgattcgacctcctagcaagcaagcgtgcgtgtccgtatcagccgccttgtattatactcctagtagtagtactctagtgacctgcctggtggtctggtctctccttgttgtccgccgtatatgtgttgagcggcatgtggattagaagcctgtgtggctggctgtcagcaagcagagcggcagtttgatgcctgttccttg

SEQ ID NO: 6221 - DNA, 599 bp, Zea mays
  unsure (1)..(599): unsure at all n locations; Clone ID: LIB3061-064-Q1-K6-D1
tcgttggcgctacgcgtagncagnactccagggaaggatgtgcgatctgtctgcttctccatcatccgtcgttatcatgccagcctgctggnagatgccacagcgggacagggagcatgtgggatgatgcaggcgcaanatgacnntgcaagtggcgccggnatccctgacgttcggcgactgggaacctgcggngacgacatggcccgtcacccaatacttgcaagcagggacttcttcatcgttgtgccgccggcagagaaggacgacgacgaggatctgttcaaggtgccccagtgttcctgccaagccctacaactacaagaaggctatataaattcaagtaggaatgcaggatggggtgcattcaactcatgcaggtggcaggttaatggaagtggccaattctgtggcgtggctgagatgattggacctgtcgatctcgacagaagtgttgattactggcagcaggataagttggagtggccagttccctgtgaagtggcgcatatttaaggatgaacctgaacaatcttgtgcggcgcatgcttgttgggaacaatggcaatgatcctgggcgcgagtagggtgggactcac

SEQ ID NO: 6222 - DNA, 603 bp, Zea mays
  Clone ID: LIB3061-064-Q1-K6-D10
tggtaaacacaccaagcgaacgcactagcggacggcctagcaacaatggctaccaagatattagccctccttgcgcttcttgccctttttgtgagcgcaacaaatgcgttcattattccacaatgctcacttgctcctagtgccattattccacagttcctcccaccagttacttcaatgggggggcggacacctatctgtgcaagccaacatgcaacaacaagcgcttgcggcgagcgtcttacaacaaccaattgcccaattgcaacaacaatccttgccacatctaacaatacaagccatcacaacgcaacagcaacaacagttcctaccagcactgagccacctagccatggtgaaccctgccgcctacttgcaagagcagctgcttgcatccaacccacttgctctggcgaacgtagttgcaaaccagcaacaacaacagctacaacagtttctgccaacgctcagtcaactagccatggtgaaccctgccgcctacgtacaacaacaacaactgctttcatctagcccgctcgctgtgggcaatgcacctacatacctgcaacaacaattgttgcaacagattgtaccagctctgac

SEQ ID NO: 6223 - DNA, 607 bp, Zea mays
  Clone ID: LIB3061-064-Q1-K6-D11
gcgttttcattgttcaacctacagatccaacggggatcgcagcaggcatcttaccattatcacccttgttcctccaacaaccgtcagccctattacagcagttacctttggtccatttggtggcacaaaacatcagggcacaacaactacaacaacttgtgctagcaaaccttgctgcatactctgagcaacatcagtttcttccattcaaccaactggctgcattgaactctgctgcttatttgcaacaacaattaccattcagccagctagttgctgcctacccccagcaatttcttccattcaaccaactagcagcattgaactctgctgcttatttacagcagcaacaactactaccattcagccagctagctgatgtgagccctgctgccttcttgacacaacaacagttgttgccgttctacctgcacgctatgcctaacgctggcaccctcttacaactgcaacaattgctgccattcaaccaacttgctttgacaaacccaacagtgttctaccaacaacccatcattggtggtgccctcttttagattgcttatgagttatagttcaataatgaagttttttggatgatgtttgtgga

SEQ ID NO: 6224 - DNA, 603 bp, Zea mays
  Clone ID: LIB3061-064-Q1-K6-D2
cagcctagcaattagctcatcgactccagatggagaactcgacaccatgaaggtgctgatcgttgcccttgctctcctggcgctcgctgcgagcgccgcctccagtacaagcggcggctgtggctgccagacaccaccgtttcatctaccgcctccgttctatatgccgcctccgttctatctgccgccgcagcagcagccgcagccatggcaataccccactcaaccaccgcagctaagcccgtgccagcagttcggatcctgcggcgtcggcagcgtcggcagcccgttcctgggccagtgcgtcgagttcctgaggcaccagtgcagcccggcggcgacgccctacggctcgccacagtgccaggcgctgcagcagcagtgctgccaccagatcaggcaggtggagccgctgcaccggtaccaggcgacatacggtgtggtcctgcagtccttcctgcagcagcagccgcagggcgagctcgcggcgctgatggcggcccaggtagcgcagcagctgacggcgatgtgcggcctgcagctgcagcagccaggtccctgcccttgcaacgcagctgccggcggtgtctactactgaggaaa

SEQ ID NO: 6225 - DNA, 608 bp, Zea mays
  unsure (1)..(608): unsure at all n locations; Clone ID: LIB3061-064-Q1-K6-D3
naccaactagcaacatagnaaagcacaatagtgtaccaacaatggcagccaaaatattttgcctccttatgctccttggtctttctgcaagtgctgctacggcgaccattttcccgcaatgctcgcaagctcctatagcttcccttcttcccccgtacctctcaccagcggtgtcttcggtatgtgaaaacccaattcttcaaccctacaggatccaacaggcaatcacagctggcatcttacctttatcacccttgttcctccaacaatcatcagccctattacatcagttacctttggtgcatttattggcacaaaacatcagggcacaacaactacaacaacttgtgctagcaaaccttgctgcctactctcagcaacagcagtttcttccattcaaccaactagctgcattgaactctgcttcttatttgcaacaacaacaactaccattcagccagctacctgctgcctacccccagcaatttcttccattcaaccaactggcagcattgaactctcctgcttatttacagcagcaacaactactaccattcagccagctagctggtgtgagccctgctaccttcttgatacaaccacagttg

SEQ ID NO: 6226 - DNA, 597 bp, Zea mays
  Clone ID: LIB3061-064-Q1-K6-D4
ccacaaccccccgccggcgcggctcccggtgtcccttccactctccaccctctccttcccttcggcgccaagtccatccgcccctccgaatctccgattgccgccgtccagttttggcaggtgccggccgacagttgagaatgggactgaggcgcctgatgagatgctgctgctgcattgcaaagcacgcggacgacggcgacaagatcgatttcggaggtggcaatgttcatgttgtcacaagcaaagaggactgggaccaaagaattgccgaggcaaacaaggatgggaaaaccgtggttgcaaacttcagcgcttcctggtgtgggccgtgccgtgtcatcgcacctgtctacgccgaaatgtcgcagacgtaccctcagctcatgttcctgacgatcgatgttgatgacttgatggagttcagctcgtcgtgggacatccgcgcgaccccgaccttcttcttcctcaagaacgagcagcaggtggacaagctggtcggcgccaacaagcctgagctggagaagaaagtggccgccgtcgccgacgcggccggcagcaagacagtgtagtgtaggcaaagacccgcctagcttg

SEQ ID NO: 6227 - DNA, 601 bp, Zea mays
  unsure (1)..(601): unsure at all n locations; Clone ID: LIB3061-064-Q1-K6-D8
ctagcaacatagnaaagcacaatagtgtaccaacaatggcagccaaaatattttgcctccttatgctccttggtctttctgcaagtgctgctacggcgaccattttcccgcaatgctcgcaagctcctatagcttcccttcttcccccgtacctctcaccagcggtgtcttcggtatgtgaaaacccaattcttcaaccctacaggatccaacaggcaatcgcagctggcatcttacctttatcacccttgttcctccaacaatcatcagccctattacaacagttacctttggtgcatttattggcacaaaacatcagggcacaacaactacaacaacttgtgctagcaaaccttgctgcctactctcagcaacagcagtttcttccattcaaccaactaggttcattgaactctgcttcttatttgcaacaacaacaactaccattcagccagctacctgctgcctacccccagcaatttcttccattcaaccaactagcagcattgaactctcctgcttatttacagcagcaacaactactaccattcagccagctagctggtgtgagccctgctaccttcttgacacaaccacagtt

SEQ ID NO: 6228 - DNA, 600 bp, Zea mays
  Clone ID: LIB3061-064-Q1-K6-D9
ttcagaaaacacaccaagcgaacgcactagcaacaacctaacaacaatggctaccaagatattatccctccttgcgcttcttgcgctttttgcgagcgcaacaaatgcgtccattattccacaatgctcacttgctcctagttccattattccacagttcctcccaccagttacttcaatggccttcgaacacccagctgtgcaagcctataggctacaacaagcgattgcggcgagcgtcttacaacaaccaattgcccaattgcaacaacaatccttggcacatctaacaatacaaaccatcgcaacgcaacagcaacaacagttcctaccagcactgagccacctagccatggtgaaccctgtcgcctacttgcaacagcagctgcttgcatccaacccacttgctctagcaaacgtagttgcaaaccagcaacaacaacaactgcaacagtttctgccagcgcttagtcaactagccatggtgaaccctgccgcctacctacaacagcaacaactgctttcatctagcccgctcgctgtggccaatgcacctacatacctgcaacaagaattgttgcaacagattgtaccagctct

SEQ ID NO: 6229 - DNA, 581 bp, Zea mays
  unsure (1)..(581): unsure at all n locations; Clone ID: LIB3061-064-Q1-K6-E1
gttctagnacgcgncggccgcccttttttttttttttttttttttttttttttttttttttttttttagaaagtactttcttatttctgggaagccacaaacatcagacaaaaactttattattgaactataactcataaaaaatctaaaaggggcaccaccaatgatgggttgttggtagaatgctgctgggtttgtcaaagcaagttggttgaatggcagcaattgttgcagttgtaagagggtgccagcgttaggcgcagcgtgctggtagaacggcaacaactggggttgtgtcaagaagggagcagggctcacaccagctagctggctgaatggtagtagttgttgctgctgtaaataagcaggagagttcaatgctgtcagttggttgaatggaaaaaattgctgggggtaggcagcaaatagctggctgaatggtagttgttgttgttgcaaataagaagcagagttcaatgcagctagttggttgaatggaaaaaactgctgttgctgagagtaggcagcaaggtttgctagcacaagttgttgtagttgttgtgccctgatgttttgtgcca

SEQ ID NO: 6230 - DNA, 580 bp, Zea mays
  Clone ID: LIB3061-064-Q1-K6-E10
gcacaatagtgtaccaacaatggcagccaaaaattttgcctccttatgctccttggtctttctgcaagtgctgctacggcgaccattttcccgcaatgctcgcaagctcctatagcttcccttcttcccccgtacctctcaccagcggtgtcttcggtatgtgaaaacccaattcttcaaccctacaggatccaacaggcaatcacagctggcatcttacctttatcacccttgttcctccaacaatcatcagccctattacatcagttacctttggtgcatttattggcacaaaacatcagggcacaacaactacaacaacttgtgctagcaaaccttgctgcctactctcagcaacagcagtttcttccattcaaccaactagctgcattgaactctgcttcttatttgcaacaacaacaactaccattcagccagctacctgctgcctacccccagcaatttcttccattcaaccaactggcagcattgaactctcctgcttatttacagcagcaacaactactaccattcagccagctagctggtgtgagccctgctaccttcttgatacaaccac

SEQ ID NO: 6231 - DNA, 598 bp, Zea mays
  Clone ID: LIB3061-064-Q1-K6-E11
gcgttctgctcttcaaccatatagcttcaacagagcagatgggagcaagcaacatacctttatcgcccttgttgtttcaacaatcgccagccctatctttggtgcagtcattggtacaaaccatcagggcacaacagctgcagcaactcgtgctacctctgatcaaccaagtagctctggcaaacctgggtggctactctcagcaacaacaatttcttccattcaaccaactgtctacactgaaccctgctgcttatttgcagcaacaactattaccatttagccagctagctactgcctactctcagcaacaacaacttcttccatttaaccaattggccgcactgaaccccgctgcttatttgcagcagcaaatactactaccatttagccagctagctgcagcaaaccgtgcttccttcttgacacagcaacagttgctgcctttctaccagcagtttgcggctaaccccgcaaccctcttacaactacaacaattgttgccctttgtccaacttgctttgacagacccagcggcctcctaccaacaacacatcattggtggtgccctcttttagattgcttattagttgtaatt

SEQ ID NO: 6232 - DNA, 606 bp, Zea mays
  unsure (1)..(606): unsure at all n locations; Clone ID: LIB3061-064-Q1-K6-E12
gcgttcgcagcacatanaagtagaatccattagcagcaatagagcaacaatggcgaccaagaattttccctccttatgctccttgctctttctacatgtgttgctaacgcgacaattttccctcaatgctcacaagctcctatagcttcccttcttcccccataccttccatcaattatagcggggggggtgtgaaaacccagctcttcaaccatataggcttcaacaagcaatcgcagcaagcaacatacctttatcgcccttgttgtttcaacaatcaccagccctatctttggtgcagtcattggtacaaaccatcagggcacaacagctgcagcaactcgtgctacctgtgatcaaccaagtagctctggcaaacctttctccctactctcagcaacaacaatttcttccattcaaccaactgtctacactgaaccctgctgcttatttgcagcaacaactattaccatttagccagctagctactgcctactctcagcaacaacaacttcttccatttaaccaattggccgcactgaaccccgctgcttatttgcagcagcaaatactactgccatttancgagctagctgcagcaagtca

SEQ ID NO: 6233 - DNA, 590 bp, Zea mays
  Clone ID: LIB3061-064-Q1-K6-E3
ataagacacatagtgtaccaacaatggcagccaaaaattttgcctccttatgctccttggtctttctgcaagtgctgctacggcgaccattttcccgcaatgctcgcaagctcctatagcttcccttcttcccccgtacctctcaccagcggtgtcttcggtatgtgaaaacccaattcttcaaccctacaggatccaacaggcaatcacagctggcatcttacctttatcacccttgttcctccaacaatcatcagccctattacatcagttacctttggtgcatttattggcacaaaacatcagggcacaacaactacaacaacttgtgctagcaaaccttgctgcctactctcagcaacagcagtttcttccattcaaccaactagctgcattgaactctgcttcttatttgcaacaacaacaactaccattcagccagctacctgctgcctacccccagcaatttcttccattcaaccaactggcagcattgaactctcctgcttatttacagcagcaacaactactaccattcagccagctagctggtgtgagccctgctaccttcttgatacaaccacagttgt

SEQ ID NO: 6234 - DNA, 590 bp, Zea mays
  unsure (1)..(590): unsure at all n locations; Clone ID: LIB3061-064-Q1-K6-E5
gnccggtccaagctgctgttcgacatcgtgtgcacgctcacggacatggagtacgtcgtgttccatgccgccgtgtcgtccgaagccaactacggcatccaggagctgtacatccgccgcaggacggcaaaacgcttctgaaagacgaagcagagaaggtgatcaggtgcctggaagcagccatctccagaagagtatccgagggattcacgctggaggtgtgcggccgggaccgggtgggcttgctgtcggacgtgacgagggtgctccgggagcacgggctcacggtgagccgcgccgacgtgacgacggcgggcgggcaggccacaaacgtcttctacgtccggaacccctcgggccagccagtggacatgaagaccgtcgaggggctcaggggccagtttggccagaccgccatgctcaacgtcaagagcgtgggcgtgcctgctgcggtggccaaagcggcggagccaagctccggcagcatggtcaggagcagcttcttctccttcggcagcctcttcgcgaagctccgggcctgacaactggtcaggcgattcgaactccagctgtgtgtagaagaaatgaac

SEQ ID NO: 6235 - DNA, 599 bp, Zea mays
  unsure (1)..(599): unsure at all n locations; Clone ID: LIB3061-064-Q1-K6-E6
ggcccagcagcacatanaagtagaatccattagcaacaatagagcaacaatggcgaccaagatattttccctccttatgctccttgctctttctacatgtgttgctaacgcgacaattttccctcaatgctcacaagctcctatagcttcccttcttcccccataccttccatcaattatagcttcagtatgtgaaaacccagctcttcaaccatataggcttcaacaagcaatcgcagcaagcaacatacctttatcgcccttgttgtttcaacaatcaccagccctatctttggtgcagtcattggtacaaaccatcagggcacaacagctgcagcaactcgtgctacctgtgatcaaccaagtagctctggcaaacctttctccctactctcagcaacaacaatttcttccattcaaccaactgtctacactgaaccctgctgcttatttgcagcaacaactattaccatttagccagctagctactgcctactctcagcaacaacaacttcttccatttaaccaattggccgcactgaaccccgctgcttatttgcagcagcaaatactactgccatttagcgagctagctgcaa

SEQ ID NO: 6236 - DNA, 588 bp, Zea mays
  unsure (1)..(588): unsure at all n locations; Clone ID: LIB3061-064-Q1-K6-E9
gnaattacananacgggggcatcaaatgcctattattacacctgcttacccttgcatgaattccagctacaatgtatctgttagtactagatatgtgatgatccaagaattcacgcgagcgtttgagatttgtcaggccatagatgaaggaaaagcagattgggacgcattgtttgagccatatccattttttgaatcatataaaaattatctagaagttaatatcacagcgagaaatgaagatgatctcaggaattggaaaggctgggtggagtctcgccttcgcactcttgtattaaagattgagcgttattcacacgagatgatccttgcacacccatatcccaaagatttctcagacaaatccaggcccttacattgcttttacttcatgggtctttggagaaaacaaaccacccaagctcaagaagctgagcaatttgatatcaggggaattgtaaatgagtttaggaatactatttgtgcatatcaacattggaaagaaggaatggacattgaagtgtcccatgtaaaaagaaaagaaatcctttgtttgtttttcctggtggagtgcgtacttctcgttct

SEQ ID NO: 6237 - DNA, 602 bp, Zea mays
  unsure (1)..(602): unsure at all n locations; Clone ID: LIB3061-064-Q1-K6-F1
tatanatatacgagctccacgcctccacgctgccactacaccagccaggcagcagcccccacgactggctcgccgctcgcgagaacccgagtctatttctgcacgcgcttccaggttttagctgcagcggcatcagggcagggagagagcgatagttctgttctactgcaggaagagcagggagcaagatggggtccggatctttcctcaaggtgctggccaataacttcgatgtccttgccgggccactcatatcacttgcttatcctctatatgcttctgttagagctatagagacaaaaaatcctgtagatgatcagcagtggctcacttactgggtgttgtactcatttatcactttgtttgagctaacttttgctccaattatcgagtggcttccattttggtcgtatgcaaagctgttctttaactgctggttggtcttgccttggttcaatggtgctgcctatgtttacgaccattttgtgcggccaatgtttgtgaaccgccaaatagtgaacatatggtatattccaagaaatgagaagctaggtaaatctgatgatgttctgtcagctgcagagagatatattgaacaaaac

SEQ ID NO: 6238 - DNA, 602 bp, Zea mays
  Clone ID: LIB3061-064-Q1-K6-F10
caaacggcagtgcgtagaaaaggacgtcgaacagaacagcatgaagatggtcatcgttctcgtcgtgtgcctggctctgtcagctgccagcgcctctgcaatgcagatgccctgcccctgcgcggggctgcagggcttgtacggcgctggcgccggcctgacgacgatgatgggcgccggcgggctgtacccctacgcggagtacctgaggcagccgcagtgcagcccgctggcggcggcgccctactacgccgggtgtgggcagccgagcgccatgttccagccgctccggcaacagtgctgccagcagcagatgaggatgatggacgtgcagtccgtcgcgcagcagctgcagatgatgatgcagcttgagcgtgccgctgccgccagcagcagcctgtacgagccagctctgatgcagcagcagcagcagctgctggcagcccagggtctcaaccccatggccatgatgatggcgcagaacatgccggccatgggtggactctaccagtaccagctgcccagctaccgcaccaacccctgtggcgtctccgctgccattccgccctactactgattcatgatatttgggaaatctcctc

SEQ ID NO: 6239 - DNA, 606 bp, Zea mays
  Clone ID: LIB3061-064-Q1-K6-F11
ttctgccgccgccctctatgccctaccctactcaaccgccccgggctgaggctgatccccagccacacccatgcccgtgccaacagccgcatccaagcccgtgccagctgcagggaacctgcggcgttggcagcaccccgatcctgggccagtgcgtcgagttcctgaggcatcagtgcagcccgacggcgacgccctactgctcgcctcagtgccagtcgttgcggcagcagtgttgccagcagctcaggcaggtggagccgcagcaccggtaccaggcgatcttcggcttggtcctccagtccatcctgcagcagcagccgcaaagcggccaggtcgcggggctgttggcggcgcagatagcgcagcaactgacggcgatgtgcggcctgcagcagccgactccatgcccctacgctgctgccggcggtgtcccccactgaagaaactatgtgctgtagtatagccgctggctagctagctagttgagtcatttagcggcgatgattgagtaataatgtgtcacgcatcaccatgggtggcagtgtcagtgtgagcaatgacctgaatgaacaattgaaatgaaaagaaaaaaagtactccatc

SEQ ID NO: 6240 - DNA, 614 bp, Zea mays
  unsure (1)..(614): unsure at all n locations; Clone ID: LIB3061-064-Q1-K6-F12
ttttggcacnaaccagcagccagccgcggggggaggaaccctagcggaacaggtgacggcggcgcgctaccggtgacgggggatacggcggcatcgtcccctcctccatccccggcgcggcggcgccagcagccggcctgcaggctgtttgaagagctcgccatttaatctcaatggaagccaaggttttccgtttcctgaagctcgttggggtcggcttcaaagcgaggtcagagagccaaggccgtgagttgttccttaaactgggcttcagccatgaggtgcagttcaccgctcctccagctgtccgtgtcttctgcttcaaacccaacataatctgctgcaccggcatcgataaggacagggtgcaccagttcgccggcgccatccggagctccaaggctccagaggtgtacaaggggaaggggatcctgtacattgacgaggttatcaagctgaagcccggaaagaagcgaaaaaataagtgacgattcgaaggcgttacaactttgtctctgtcttttaaccccatgcttcgcatttgtagtgatctggatctggggtctgctgtgttgtgttgtgtacttgcgttgtgctacacagatcaccattat

SEQ ID NO: 6241 - DNA, 611 bp, Zea mays
  unsure (1)..(611): unsure at all n locations; Clone ID: LIB3061-064-Q1-K6-F3
gcaacatagnaagcacaatagtgtaccaacaatggcagctaaaatattttgcctccttatgctccttggtctttctgcaagtgctgctacggcgaccattttcccacaatgctcacaagctcctatagcttcccttcttcccccgtacctctcaccaacggtgtcttcggtatgtgaaaacccaattcttcaaccctacaggatccaacaggcaatcgcagctggcatcttacctttatcacccttgttcctccaacaatcatcagccctattacagcagttacctttggtgcatttattggcacaaaacatcagggcacaacaactacaacaacttgtgctagcaaaccttgctgcctactctcagcaacagcagtttcttccattcaaccaactagctgcattgaactctgcttcttatttgcaacaacaacaactaccattcagccagctatctgctgcctacccccagcaatttcttccattcaaccaactgacagcattgaactctcctgcttatttacagcagcaacaactactaccattcagccagctagctggtgtgagccctgctaccttcttgacacaaccacagttgttgccgttctacc

SEQ ID NO: 6242 - DNA, 606 bp, Zea mays
  unsure (1)..(606): unsure at all n locations; Clone ID: LIB3061-064-Q1-K6-F4
attgagaccaactagcaacatagnaaagcacaatagtgtaccaacaatggcagccaaaaattttgcctccttatgctccttggtctttctgcaagtgctgctacggcgaccattttcccgcaatgctcgcaagctcctatagcttcccttcttcccccgtacctctcaccagcggtgtcttcggtatgtgaaaacccaattcttcaaccctacaggatccaacaggcaatcgcagctggcatcttacctttatcacccttgttcctccaacaatcatcagccctattacaacagttacctttggtgcatttattggcacaaaacatcagggcacaacaactacaacaacttgtgctagcaaaccttgctgcctactctcagcaacagcagtttcttccattcaaccaactaggttcattgaactctgcttcttatttgcaacaacaacaactaccattcagccagctacctgctgcctacccccagcaatttcttccattcaaccaactagcagcattgaactctcctgcttatttacagcagcaacaactactaccattcagccagctagctggtgtgagccctgctaccttcttgacacaacca

SEQ ID NO: 6243 - DNA, 606 bp, Zea mays
  unsure (1)..(606): unsure at all n locations; Clone ID: LIB3061-064-Q1-K6-F6
caacagcacatanaagtggaatccagtagcaacaacagnagcaacaatggcgaccaagatattttccctccttatgctccttgctctttctgcatgtgttgctaacgcgacaattttccctcaatgctcacaagctcctatagcttcccttcttcccccataccttccatcaatgatagcttcagtatgtgaaaacccagctcttcagccctataggctccaacaagcaatcgcagcaagcaacatacctttatcacccttgttgtttcaacaatcgccagccctatctttggtgcagtcattggtacaaaccatcagggcacagcagctgcagcaactcgtgctacctgtgatcaaccaagtagctctggcaaacctttctccctactctcagcaacaacaatttcttccattcaaccaactgtctacactgaaccctgctgcttatttgcagcaacaactattaccattcagccagctagctactgcctactctcagcaacaacaacttcttccatttaaccaattggccgcactgaaccccgctgcttatttgcagcagcaaatactactaccatttagccagctagctgcagcaaaccgtgc

SEQ ID NO: 6244 - DNA, 607 bp, Zea mays
  unsure (1)..(607): unsure at all n locations; Clone ID: LIB3061-064-Q1-K6-F7
gtttatgagttcttctcaaggctggggaggttcgtgatgttcgtctttcatggaccgaaactcaagacgttctaaaggagttgggattacacacntgaaattttatagtttgctctacatgctgggattatcggcaatttacaagtaagatggaatattagatcattctgatgtcagtcagcagttgaggacagtttgattccagtgtatttgacaaacacttggtgcaggttctaggcaataaagggggcacccaagaaccaagttcgaaacctctacaatttttgatcaaaatgcctgaagttttctgtgaaaaattgaaatgtcttaacatatgatgccccacttattgttcttcttttcttttttacaggaagacatcttttcttggacgcttcgatgtttgtactaaacatatatctaaatttgcaggtacattgagttttacgatgttatgtctgttccaatggcaattgctttgtctggtcaaccgctgcttggacaagcagtgatggttaagccatctgaggctgaaaagacttagttcagtcaaatgcgacatcaggtggtgcggcttcaggtggagcaagaaagttgtatgttggca

SEQ ID NO: 6245 - DNA, 590 bp, Zea mays
  unsure (1)..(590): unsure at all n locations; Clone ID: LIB3061-064-Q1-K6-F8
attttgagcattcanaacacaccaagcgaagcgcactagcaacaacctaacaacaatggctaccaagatattatccctccttgcgcttcttgcgctttttgcgagcgcaacaaatgcgtccattattccacaatgctcacttgctcctagttccattattccacagttcctcccaccagttacttcaatggccttcgaacacccagctgtgcaagcctataggctacaacaagcgattgcggcgagcgtcttacaacaaccaattgcccaattgcaacaacaatccttggcacatctaacaatacaaaccatcgcaacgcaacagcaacaacagttcctaccagcactgagccacctagccatggtgaaccctgtcgcctacttgcaacagcagctgcttgcatccaacccacttgctctagcaaacgtagttgcaaaccagcaacaacaacaactgcaacagtttctgccagcgcttagtcaactagccatggtgaaccctgccgcctacctacaacagcaacaactgctttcatctagcccgctcgctgtggccaatgcacctacatacctgcaacaagaattgttgc

SEQ ID NO: 6246 - DNA, 610 bp, Zea mays
  unsure (1)..(610): unsure at all n locations; Clone ID: LIB3061-064-Q1-K6-F9
gngaccagcaagcaacatagnaagtagaatccattagcaacaatagagcaacaatggcgaccaagatattttccctccttatgctccttgctctttctacatgtgttgctaacgcgacaattttccctcaatgctcacaagctcctatagcttcccttcttcccccataccttccatcaattatagcttcagtatgtgaaaacccagctcttcaaccatataggcttcaacaagcaatcgcagcaagcaacatacctttatcgcccttgttgtttcaacaatcaccagccctatctttggtgcagtcattggtacaaaccatcagggcacaacagctgcagcaactcgtgctacctgtgatcaaccaagtagctctggcaaacctttctccctactctcagcaacaacaatttcttccattcaaccaactgtctacactgaaccctgctgcttatttgcagcaacaactattaccatttagccagctagctactgcctactctcagcaacaacaacttcttccatttaaccaattggccgcactgaaccccgctgcttatttgcagcagcaaatactactgccatttagcgagctagctgcagcaagtcg

SEQ ID NO: 6247 - DNA, 587 bp, Zea mays
  unsure (1)..(587): unsure at all n locations; Clone ID: LIB3061-064-Q1-K6-G1
tccanacagcaaacggcagtgcgtagagagatcgtcgacagaacagcatgaagaggtcatcgttctcgtcgtgtgcctggctctgtcagctgccagcgcctctgcaatgcagatgccctgcccctgcgcggggctgcagggcttgtacggcgctggcgccggcctgacgacgatgatgggcgccggcgggctgtacccctacgcggagtacctgaggcagccgcagtgcagcccgctggcggcggcgccctactacgccgggtgtgggcagccgagcgccatgttccagccgctccggcaacagtgctgccagcagcagatgaggatgatggacgtgcagtccgtcgcgcagcagctgcagatgatgatgcagcttgagcgtgccgctgccgccagcagcagcctgtacgagccagctctgatgcagcagcagcagcagctgctggcagcccagggtctcaaccccatggccatgatgatggcgcagaacatgccggccatgggtggactctaccagtaccagctgcccagctaccgcaccaacccctgtggcgtctccgctgccattccgccctactactgattca

SEQ ID NO: 6248 - DNA, 597 bp, Zea mays
  Clone ID: LIB3061-064-Q1-K6-G4
gtttctgtctgctaccagcaccatcctagcaccccaccgcgtctagggtttcctgctccaatggccgccgcgggggcagacggggagcgcaggatcggggtggccatcgactactcggagagcgccaagaagcgctggactgggccatcgacaacctgctccaccacggggacaccctcgtcgtcgtccacgtcctgcaccacggcgcggaggagaccaagcacacgctctgggccaagtccggatccccgctgatcccactctccgagttccgggagcccgaggtgatgcagggctacggcgtgcgccccgacgccgaggtgctcgacgcgatcgacacggcagcgcgccagaagcagctgaaggtggtggcgaagctgtactggggcgacgccagggagaagctctgcgacgccgtcgaggatctcaagatcgattccctcgtcatgggtagtcggggcctcggcccgatccagaggattctcctgggaagcgtgacaaactacgtgctgtcaaacgcatcgtgcccggtgacagtcgtcaaggggaagtagcggcctggacagcgtgccagtgatatgaatgaagatgctagcg

SEQ ID NO: 6249 - DNA, 621 bp, Zea mays
  unsure (1)..(621): unsure at all n locations; Clone ID: LIB3061-064-Q1-K6-G5
cttcatgtgtgaaacccaatngaanaaccgctgggtatccaacaggcaatcgcaacaggcatcttaccattatcacccttgttcctccaacaaccgtcagccctattacagcagttacctttggtccatttggtggcacaaaacatcagggcacaacaactacaacaacttgtgctagcaaaccttgctgcatactctcagcaacatcagtttcttccattcaaccaactggctgcattgaactctgctgcttatttgcaacaacaattaccattcagccagctagttgctgcctacccccagcaatttcttccattcaaccaactagcagcattgaactctgctgcttatttacagcagcaacaactactaccattcagccagctagctgatgtgagccctgctgccttcttgacacaacaacagttgttgccgttctacctgcacgctatgcctaacgctggcaccctcttacaactgcaacaattgctgccattcaaccaacttgctttgacaaactcaacagtgttctaccaacaacccatcattggtggtgccctcttttagattgcttatgagttatagttcaataatgaagttttttggatgatgtttgtggcg

SEQ ID NO: 6250 - DNA, 583 bp, Zea mays
  unsure (1)..(583): unsure at all n locations; Clone ID: LIB3061-064-Q1-K6-G7
gcgagcgcgtctgccgccaccgcttccgttgcttagctctgttctcccgccaanaaggcgaaggggagacggttggttgagttgagttgagccagccagccagccagtggcggggcgtctgctctcggttgctttgctatggggatctgcgcgtcgtccaagcgcgtggagcaggaggaggacgagaacgtggtgtacgtggtggtggacgggcagggcggcggctgtggagggggatggggaggggacggccgtggcgcggcgtgggagcggacggtggccgcctccctcttctcgcagaagggcaagaaggggcccaaccaggacgccgtcatcctctgccagggattcggcatggaggacggtgtgttctgcggcgtgttcgacgggcacggccgctgcgggcagctggtcagcaagctggcgagggaccacctccccttcatgatcctgagccagcggaacgcgctgctcctgggctccgacgacgacggcgacggcccggccttcagcgacgcatcgcccgcggcgtcgtcgtccacggacggcagccgcagcgagcggtcgtcgccggcgccggcgc

SEQ ID NO: 6251 - DNA, 612 bp, Zea mays
  Clone ID: LIB3061-064-Q1-K6-H1
ctacgcgaccatttttcctcaatactcacaagctcctatagctgcccttcttcccccataccttccatcaatgaccgcttcagtttgtgaaaacccagcccttcaaccctacaggctccaacaagcaatcgcaacaagcaacttacctttatcacccctgttctttcaacaatcgccagccctatctttggtgcagtcattggtacaaaccatcagggcacaacagctgcaacaactcgtgctaccagtgatcagccaagtagctctggcaaacctttctccctactctcagcaacaacaatttcttccattcaaccaactgtctacactgaaccctgctgcttatttacaacaacaacaactactaccattcagccagctagctactgcctactctcagcagcaacaatttcttccatttaaccaattggccgcactgaacccctctgcttatttccagcagcaaatactactaccatttggccagctagctacaacaagccccacttcctttttgaaacaacaacaattgcttccgttctaccagcagtttgtggctaaccccgcaaccctcttacaactgcaacagttgctgccctttgtccaacttgc

SEQ ID NO: 6252 - DNA, 608 bp, Zea mays
  unsure (1)..(608): unsure at all n locations; Clone ID: LIB3061-064-Q1-K6-H10
tcttaactagncaacatagnaaagcacaatagtgtaccaacaatggcagccaaaaattttgcttccttatgctccttggtctttctgcaagtgctgctaccgcaaccattttcccacaatgctcacaagctcctatagcttcctttcttcccccatacctctcaccagcggtgtcttcagtatgtgaaaacccaattcttcaaccctacaggatccaacaggcaatcgcagcaggcatcttacctttatcacccttgttcctccaacaaccgtcagccctattacagcagttacctttggtgcatttgttggcacaaaacatcaaggcacaacaactacaacaacttgtgctaggaaaccttgctgcctactctcagcaacagcagtttcttccattcaaccaactggctgcattgaactctgctgcttatttgcaacaacaactaccattcagtcagctagctgctgcctacccccagcaatttcttccattcaaccaactggcagcattgaactctgctgcttatttacaacagcaacagctaccaccattcagccagctagctgatgtgagccctgttgccttcttgacacaacaacagttgttg

SEQ ID NO: 6253 - DNA, 588 bp, Zea mays
  Clone ID: LIB3061-064-Q1-K6-H2
cttcttttcaagcaaaggtttggaagatggtcagagaatcctgagtccttccaccatgagcagaatttggttcagtggaccgagaaaaaacggccatgtgctgaagccctcttcattgttatcttcgagaagtaccgagaggtgtgaacatttaagttttcattgtggctgtgagtatattcaatgctctaatgctcacatgatcacgtgtcgcttcagcttctagctccagttgttgtttctgttcttcgtgaagctatggctatttctccaccacaagaaacagaggttactgcaggaatgcttttaaaggatgcttcctatacagctgccgggcatgtttattatgaactttcgaactatctcagttttaatgaatggttccatggatctctatctattgaaatttcaaatcatcaccccaatatgcgtatcattcgtagaaaaatcgcattgctacttgggcattggatttctgagatcaagggcgacactcggaaattggtataccgcgctttggttgggttgctgcaggataatgatatagctgttaggctagcagcatgctcttctctctgttatcttttc

SEQ ID NO: 6254 - DNA, 147 bp, Zea mays
  unsure (1)..(147): unsure at all n locations; Clone ID: LIB3061-064-Q1-K6-H3
gcgttcgcagctcaaaaccaaaatgacttgtcgaccgtccgactaggcacccgccgacacccgcctccttgccggntnnccaaacnccgggggggggnnnnnaaccccccttttagcatcgccgggcggcggcggggggagggaagg

SEQ ID NO: 6255 - DNA, 600 bp, Zea mays
  Clone ID: LIB3061-064-Q1-K6-H5
catcaatcatcattcatcttagtagtataggcaccaaatcaaatctgcaacatcaattatctaactccaaaaaccatgaagctggtgcttgtggttcttgctttcattgctttagtatcaagtgtttcttgtacacagacaggcggctgcagctgtggtcaacaacaaagccatgagcagcaacatcatccacaacaacatcatccacaaaaacaacaacatcaaccaccaccacaacatcaccagcagcagcaacaccaacaacaacaagttcacatgcaaccacaaaaacatcagcaacaacaagaagttcatgttcaacaacaacaacaacaaccgcagcaccaacaacaacaacaacaacaacagcaccaacaacaacatcaatgtgaaggccaacaacaacatcaccaacaatcacaaggccatgtgcaacaacacgaacagagccatgagcaacaccaaggacagagccatgagcaacaacatcaacaacaattccagggtcatgacaagcagcaacaaccacaacagcctcagcaatatcagcagggccaggaaaaatcacaacagcaacaatgtcattgccaggagcagcaa

SEQ ID NO: 6256 - DNA, 619 bp, Zea mays
  unsure (1)..(619): unsure at all n locations; Clone ID: LIB3061-064-Q1-K6-H7
gcgttctttgnangacatctggncgattgtgttctccatctcatatgtccttgctgtacgctgtgccaggaggctagaactttggagatgaataatgtccagtgtggtgtctggcatggccgaggtgataccatttgtttagggagcaacggtgcaggaaacaaggctttcgctgccctgaacaaggcctctctcgtgcctgtaaagtccccggggctgtgtggcatggatagatcgtcaagcgcagctgacgagcagcagccgcttgtcccaccggaccaactggagcaggtttaggtattctctgtcgccacgacctctgcactttcctagaagggcttggacagcgccgacggaaaaaaaaaatcgtcctctgccggattattaggcgcctgcatctgcatccattggtcccgagaactggactttgcagctaccgtacatgggtgatgggcgcagtcgacctgctgctggctgctgctgttgtaaaattcagtgatagattttctcttgcagtcgaattgtttaggtcgaagactgtatcttcataatgtcacgacacgtgctcaggccttttgcctgaatccaactgtaaatttcagatccaatctagcagttc

SEQ ID NO: 6257 - DNA, 602 bp, Zea mays
  unsure (1)..(602): unsure at all n locations; Clone ID: LIB3061-064-Q1-K6-H8
gcgttctgcacatanaagcacatagtgtgccacgtgggagccaaaaattttgcctccttatgctccttggtctttctgcaagtgctgctacggcgaccattttcccgcaatgctcgcaagctcctatagcttcctttcttcccccgtacctctcaccagcggtgtcttcggtatgtgaaaacgcaattcttcaaccctacaggatccaacaggcaatcgcagctggcatcttacctttatcacccttgttcctccaacaatcatcagccctattacaacagttacctttggtgcatttattggcacaaaacatcagggcacaacaactacaacaacttgtgctagcaaaccttgctgcctactctcagcaacagcagtttcttccattcaaccaactaggttcattgaactctgcttcttatttgcaacaacaacaactaccattcagccagctacctgctgcctacccccagcaatttcttccattcaaccaactagcagcattgaactctcctgcttatttacagcagcaacaactactaccattcagccagctagctggtgtgagccctgctaccttcttgacacaaccacagttgttg

SEQ ID NO: 6258 - DNA, 533 bp, Zea mays
  Clone ID: LIB3061-064-Q1-N6-A1
ctggttggccacatacatcatccaaaaaatttattattgaattacaactaataagcaatctaaaagagggcaccaccaatgatgtgttgttggtaggaggccgctcggtctgtcaaagcaagttggacaaagggcaacaattgttgttgctgagagtaggcagtagctagctggctgaatggtaatagttgttgctgcaaataagcagcagggttcaatgtagcacagttggttgaatggaagaaatgttgttgctgagagtagggagaaaggtttgccagagctacttggttgatcacaggtagcacgagttgctgcagctgctgtgccctgatggtttgtaccaatgactgcaccaaagatagggctggcgattgttgaaacaacaagggtgataaaggtatgttgcttgctgcgattgcttgttggagcctataaggctgaagagctgggttttcacatactgcaagctatcattagatggaaggtatgggggcaagaagggaagctatactgagcttgtggagcattga

SEQ ID NO: 6259 - DNA, 538 bp, Zea mays
  Clone ID: LIB3061-064-Q1-N6-A10
gttgttggggtttttttttttttttttttttttttttttttttttttttttttttttttttttttttttttttttttttttttttttttttttttttttttttttttttttttttttttttttttttttttttttttttaaaaaaaaaaaggggggggggggggttttaaaaaaaaaaaatttgggggggggggcccctttggggggaacatttaaatgggaaaaaaaaaggggggcccccaaaagggggggggttgaagggggggttaaaaaaaaaaaaacggggttttgggaaaaaaatttttttttttttaaaaaaagggaaaaccaaagggggaaaccccccccaaaggaaaaaaaaaaggggggggtttttggggggccccaaaaaagtttaaaaaacccgggggggaaaaggaaaaaaaattttaaaaaagagaaaaaggttttaccaaaatttgtggaaaaaagaggggaaaaatttgggcaaaaaattgttgttgaagaacccaaggggatttgccacccggggggggct

SEQ ID NO: 6260 - DNA, 545 bp, Zea mays
  unsure (1)..(545): unsure at all n locations; Clone ID: LIB3061-064-Q1-N6-A11
ggtttgtttggggtttttttgattcaacagnagtacagcgatttatacctttcacctttcaagtaacactatgacaagagcaagtctgatgctggtactggtaggtgagaaactggattgattgcctgtacaagtatacctcaaaccaatgaggggcagaagggttccccttggtactatcccacgccccaattctgtttcctatttatgctacttttgctaccacgctaatctgtaatcctataaaaccacgctaaatctgctacagctactacctttcccaactctgcaactcggattaagctgcaccgttggcaactctggatttaatcgccacaaattttgaagccacgcacgcgcacaacttggtaagctatctctagcagcattactcatccaatctctcattttaaactcaactccctagacagtgacatctaccacggctatatgcatgatttgttgagcacggcctaagaagtcggtctatttatagctgagactcaaacagatgcaaactcctcagtccatttctaagatcttac

SEQ ID NO: 6261 - DNA, 516 bp, Zea mays
  Clone ID: LIB3061-064-Q1-N6-A3
gggtgttttttttccttatatattattcctttccatttcaatggttcattcaggtcattgctcacactgccacccatggtgatgggtgacactacgttactcatcgccgctaaatgagtaaactagcgagctaggtagctagtcagcggctccattacattattactacagtacatagtttcctcagtagtagacaccgccggcagctgcgttgcaagggcagggacctggctgctgcagctgcaggccgcacatcgccgtcagctgctgcgctacctgggccgccatcagcgccgcgagctcgccctgcggctgctgctgcaggaaggactgcaggaccacaccgtatgtcgcctggtaccggtgcagcggctccacctgcctgatctggtggcagcactgctgctgcagcgcctggcactgtggcgagccgtagggcgtcgccgccgggctgcactggtgcctcaggaactcgacgcactggcccaggaacgggctgccgacgctgccgacgcc

SEQ ID NO: 6262 - DNA, 547 bp, Zea mays
  Clone ID: LIB3061-064-Q1-N6-A4
ggggggtgttttttttatcgagaaaaatctcaatcaatatattgattatttctaggaaaccatgtcggtatgagggcaccattgtcgagtacatctcatatgtaatctaaaagaggcacctccaacgatgggttgctgcaaggcagggttcatcaaagagaactggttgtatggcagcaattgttgttgctgctgcaggaaggtagcgaccaatgggttagccactgccaatggattaagtaactgttgtcgctgttgtaggtacgcagcagagtttgacacagccagttggttgaatggaagcaactgttgtaagtaggcagcagggtttgccacagctagctgagtcagagctggtacaatttgttgcagcaactgttgttgtaggtacgtaggtgcattgcccaccgcgagcgggctagatgaaagtagttgtaggtagacggcagggttcaccatggctagttgactgagcactggcataaactgttgcagctgttgttgttgctggtatgcagctacgttcgccagagcaagtgggttggat

SEQ ID NO: 6263 - DNA, 400 bp, Zea mays
  Clone ID: LIB3061-064-Q1-N6-A5
gggaaaaggaaggggtttttttgggggggccccaaaccaaacccaaaaaattttttttggggttcccccaaaaaaaaaattaaaagaggaggggcccccccaagggggggtggggggggggggggggggggttttaaaaaaaaggggggaaaagggggaaaaattgggggtttttaaaagggggggggggggtaccccaaaaccgttttaaaaaaggggaaaatttggggtgggaaaaaaaagaaaaaaaatttgggggaaaaagcccccaaaaggggggaaatttttgggggggaaaaaaaaaagggggggtaaaggggcccaattggtaaaaaggaaaaaatttttttttttaaaagggccaaaccccccggggaaaagggaaaaaagggggccccaa

SEQ ID NO: 6264 - DNA, 525 bp, Zea mays
  Clone ID: LIB3061-064-Q1-N6-A6
agaaagtactttcttatttctgggacgccacaaacatcatccaaaaacttcattattgaactataactcataagcaatctaaaagagggcaccaccaatgatgggttgttggtagaacactgttgggtttgtcaaagcaagttggttgaatggcagcaattgttgcagttgtaagagggtgccagcgttaggcatagcgtgcaggtagaacggcaacaactgttgttgtgtcaagaaggcagcagggctcacatcagctagctggctgaatggtagtagttgttgctgctgtaaataagcagcagagttcaatgctgctagttggttgaatggaagaaattgctgggggtaggcagcaactagctggctgaatggtaattgttgttgcaaataagcagcagagttcaatgcagccagttggttgaatggaagaaactgatgttgctgagagtatgcagcaaggtttgctagcacaagttgttgtagttgttgtgccctgatgttttgtgccaccaaatggaccaa

SEQ ID NO: 6265 - DNA, 221 bp, Zea mays
  Clone ID: LIB3061-064-Q1-N6-A8
gggggtggttttttttaacagggaaacactgtcaccactcaccacggcctggtgcagtggtgagctggttgattcaattcaagagtcacacgcgaacagaaacgaactcacaacaagtatccatggttaagtatcgcctccggctcggatagaaacaaacatactactagttcacaaatcgccgtcaataagggccagcacgtatggctgtaaatgttggc

SEQ ID NO: 6266 - DNA, 188 bp, Zea mays
  Clone ID: LIB3061-064-Q1-N6-B1
gggaaaggaacttcttatttttggggggccacatacatcatccaaaaaatttattattgaattacaactaataagcaatctaaaagagggcccccccaatgatgtgttgttgggaggaggcccctgggtctgtcaaagcaaggtggacaaagggcaacaattgttgtagttgtaagcggacccctggg

SEQ ID NO: 6267 - DNA, 532 bp, Zea mays
  Clone ID: LIB3061-064-Q1-N6-B10
gggggggggttttttttttttttttttttttttttttttttttttttttttttttttttttttttttttttttttttttttttttttttttaaaaaataaaaaaaaaaaaaaaaaaaaaaaacaaaaaaaaaaaaaaaaaaaaaaaaaggggggggggggggggaaaaaaaaaaaaaacaacaaagaaaaaggaaaaaaaaaaaaaaaaaaagggaaaaaaaaaaaaaaaaaaaaaaaaacaaaaaaaaaaaaaaaaaaagggggaaaaaaaaaaaaaaaaaaaaaaaaaagttaaaaaaaaaaaaaaaaaagggggagggggagaacaaaggacagaaaaataattagtgaaaaaagggaaagaaaaaagggggaaaaggggaaaaaaaaagaggaaaaaaaaaaggggggaagggaaaattaggaaaaagagaaaaaaaaaaaagaaagagaaaaaattaaaggaaggggggaaaaggaaagggggaaaaaaaggagaaaaggggaaaaaaaaatgggaaagaaggtaag

SEQ ID NO: 6268 - DNA, 520 bp, Zea mays
  Clone ID: LIB3061-064-Q1-N6-B11
gagaaaaatctcaatcaatatattgattatttctagggaacacatgccgctatgagggcaccattatcgagtacatctcatatgtaatctaaaagaggcacctccaacgatgggttgctgccacaacgggggggggggcatcaaagagaactggttgtatggcagcaattgttgctgctgtaggaaggcagcgaccaatgggttagccaccgctagtggattaagtaactgttgtcgctgttgtaggtacgcagcagagttcgacacagtcagttggttgaatggaagcagctgttgcaagtaggcagcagggtttgccacagctagctgagtcagagctggtacaatctgttgcagcaactgttgttgcaggtatgtaggtgcattaaccacagcgagagggctagatgaaatcagttgttgctgttgtaggtaggcggcagggttcaccatggctagttgactgagcgctggtagaaactgttgcaattgttgttgttgttggtatgcaactatgttt

SEQ ID NO: 6269 - DNA, 583 bp, Zea mays
  unsure (1)..(583): unsure at all n locations; Clone ID: LIB3061-064-Q1-N6-B12
acgcgtgcgtatacttggntacctctaaacgaccggggggttgttggggggggtttttttttaataattttatagctcataaaaatgataatcttgcaagttttacatgcatacatagtcctgcaattcttggctatatgtaggtatagagtgtttcatgctctgataaaacagcattactaacaaacaggggggggggggggggattgtanagtattactacaaaagtacaaaacagggacaatatgcatggagtgcagtgcctggaaaggtacgattagacattgtgcacgggggtcgacacatgggctatgaaaaaagtcctgcagcataggatcagttccgtgaacggctccaggttgatgaagaggacgttgagttagagggaaatcttgatccacgccagcgatcagtatcttgccgtgatgagggtgcatccagtcgtgcaggaggaccatcttgcctgagcggaccacgtgaaccccagcgatcttcatcgcggctgccaaaaggatgctgctgctatcaccaccgcgtttaaacttgggaatatatttactaggagcaggagcaggagcagcca

SEQ ID NO: 6270 - DNA, 245 bp, Zea mays
  Clone ID: LIB3061-064-Q1-N6-B3
aagaatctagaatgtactttcttatttctgggaagccacaaacatcagacaaaaactttattattgaactataacccatcattggtggggccctcttttagatttcttatgagttatagttaaataataaagtgaggggggggcgccgccaatgatggggcatggttcactgctgatgtcagggggcggaagtgtgaggcgccccgggcgtgagaagcacattcctggatgcttggagcaacagg

SEQ ID NO: 6271 - DNA, 525 bp, Zea mays
  Clone ID: LIB3061-064-Q1-N6-B4
atcacaagaacaaatccggatcccctttaattattgttccggatgaacgatccgagaaaagcattcatcttcttgctgggcttattattcagacatatgagctagctacaagctcattcctcatgcactatgctcttcgcagttacttggagggcatcgttccgccgccgagaatccaggggcattcggcgacgccgctgatggtggccaggttgcactcggcctccgtgacgagggtggcggcgaatcccctttgcacctcccgcgggcagcccggcaggtcctttaggcggccctccagctgcgcgtccgggcccggcgggatcgcgccgtccatgaggatactcagcgccgtgcaccggcagtacgccgggatgtccgccagctcccggcagcatctcctcttcagctccggccacgggaggcgcggcccgatgccgcaggtccggctggtcacgtaccagcggcagctcgggagcgggttgtgcgggatggcccaccccggcacgcaggaggtcccggcgc

SEQ ID NO: 6272 - DNA, 518 bp, Zea mays
  Clone ID: LIB3061-064-Q1-N6-B5
ctagaaagtactttcttatttctgggaagccacaaacatcagacaaaaaactttattattgaactataactcataagaaatctaaaagagggcaccaccaatgatgggttgttggtagaacactgctaggtttgtcaaagcaagttggttgaatggcagcaattgttgcagttgtaagagggtgccagcgttaggcgcagcgtgctggtagaacggcaacaactgtggttgtgtcaagaaggtagcagggctcacaccagctagctggctgaatggtagtagttgttgctgctgtaaataagcaggagagttcaatgctgccagttggttgaatggaagaaattgttgggggtaggcaacaggtagctggctgaatggtagttgttgttgttgcaaataagaagcagagttcaatgcagctagttggttgaatggaagaaactgctgttgctgagagtaggcagcaaggtttgctagcacaagttgttgtagttgttgtgccctgatgttttgtgcca

SEQ ID NO: 6273 - DNA, 529 bp, Zea mays
  Clone ID: LIB3061-064-Q1-N6-B7
ggaaatgtaacttcttatttctaggaggccacatacatcagccaaaaaattcattattgaattacaactaataagcaatctaaaaaaggcaccgccaatgatgtgttgttggtagaaggctgctgggtttgtcaaagcaagttggacaaagggcagcaactgttgcagttgtaagagggttgcggggttagccacaaactgctggtagaacggaagcaattgttgttgtttcaaaaaggaagtggggcttgttgtagctagctggccaaatggtagtagtatttgctgctggaaataagcagaggggttcagtgcggccaattggttaaatggaagaaattgttgctgctgagagtaggcagtagctagctggctgaatggtagtagttgttgttgttgtaaataagcagcagggttcagtgtaaacagttggttgaatggaagaaattttgttgctgagatagggagaaagtttgccaaaatacttggctgatcactggtagcaccagttgttgcagctgttgtgccc

SEQ ID NO: 6274 - DNA, 510 bp, Zea mays
  Clone ID: LIB3061-064-Q1-N6-B9
ctaaaaatgtactttcttatttctgggacgccacaaacatcatccaaaaacttcattattgaactataactcataagcaatctaaagggggcaccaccaatgatgggttgttggtagaacactgttgggtttgtcaaagcaagttggttgaatggcagcaattgttgcagttgtaagagggtgccagcgttaggcatagcgtgcaggtagaacggcaacaactgttgttgtgtcaagaaggcagcagggctcacatcagctagctggctgaatggtagtagttgttgctgctgtaaataagcagcagagttcaatgctgctagttggttgaatggaaaaaattgctgggggtaggcagcaactagctggctgaatggtaattgttgttgcaaataagcagcagagttcaatgcagccagttggttgaatggaaaaaactgatgttgctgagagtatgcagcaaggtttgctagcacaagttgttgtagttgttgtgccctgatgttttgg

SEQ ID NO: 6275 - DNA, 522 bp, Zea mays
  Clone ID: LIB3061-064-Q1-N6-C1
aggcggaagcagaatatattattttggccaatgcatgcccataaacattgtcttcagtgtacactggtattggcggcgagatgacggatcccaatcggcgtcaatctatctaagcttaaacccttcacgacaagaggcacacgatcgccagcaccgcgccgatagtccaagatgcagtgtcccttgctgcgttgttcttctgatctgcaggcggttggccgtccgcgtccggcgaaggagctggggtagtgtgctctggcgatggcgctgggcgactcctgggcgcaggtgcagtcaccggagcaggggcaagtgggggtgtgggtgcatgtgcaggcgacggcgacggcgagaccggtacaggggcaggcgacggcgagaccggcgcaagggcaggtgtaggtgcatgtgcaggcgaggaggccggcgcaggggcgggcgcagtgtgtccctggtcgtcgttagactgctgccttggcaggagcaccgcgtcgatgaggtagacggcgagcggcgccttgt

SEQ ID NO: 6276 - DNA, 540 bp, Zea mays
  Clone ID: LIB3061-064-Q1-N6-C12
cgagaaaaatgtcaatcaatatattgattatttctaggaaacacatgccggtatgagggcaccattatcgattacatctcatatgtaatctaaaaaaggcacctccaacgatgggttgctgccacgacaaggcagggttcatcaaagagactggctgtatggtagcaattgttgctgctgtaggaaggcagtgaccaatgggttaggcactgctagtggattaagtaactgttgtcgctgttgtaggtacgcagcagagttcgacacagtcagttggttgaatggaagcagctgttgcaagtaggcagcagggtttgccacagctagctgagtcagagctggtacaatctgttgcagcaattgttgttgcaggtatgtaggtgcattacccacaacgagagggctagatgaaagcagttgttgctgttgtaggtaggcggcagggttcaccatggctagttgactgagcgctggcagaaactgttgcaattgttgttgttgttggtatgcagctacgtttgccagagcaagtgggttggc

SEQ ID NO: 6277 - DNA, 525 bp, Zea mays
  unsure (1)..(525): unsure at all n locations; Clone ID: LIB3061-064-Q1-N6-C2
agccatgnaaattatactattatggcatcacatcagttttttctttttattaatcagctagtatattcccacggactccgaacataaactagcagtaacaatagaatacagcaaccacacaagtttgatgccaaacagttcgcacaacggggtagggcgcgcagatggagctttgcttgacaaagcaccactcgagagcatttttggtccctcgccaaattgaaaatccctagccctagtacaggtcgccttccttgtgggtgtggatgacgcagtcggactttgggtaggagacgcatgtcagcacataaccttcctcctgctgcccgtcatcaaggaaggacccatccgactggtcaaccgaaccagactcgattttgccggcacaggtggagcaagccccagcacgggacgagtatggcaacttcacaccggcagtctcggctgcgtcaaggatgtaggcgtcgtctggagcatcaaactcgggctcttcaccttcaggcccgacaagccggacgcgtgggc

SEQ ID NO: 6278 - DNA, 400 bp, Zea mays
  Clone ID: LIB3061-064-Q1-N6-C3
ggggggggggaaaaaaaaaaaaaccccgcccccccttaattttggggggggggggaagcccccgaaaaggcccttttttttgggggggggtttttttaaaaaaaaaagggggctcccaaagcccttcccccaggcccctttttttttggggatgcggggggggggtttccccccccccaaaaaaacggggggctttggggccccccgggggggggggcggggggccccccccccccggggggggggggggggaaaaaccccttttacccccccgggggggacccgggggggcctttgggggggcccccaattggggccccgggcccggggggaaccccccccccaaggggggccccaaccccccccccccggggacccccgggggttccccccccccccc

SEQ ID NO: 6279 - DNA, 369 bp, Zea mays
  Clone ID: LIB3061-064-Q1-N6-C4
aggttcttacacaaggtctcaaactcgcaataacatgtgcacttgtcaaatagacacgtctcaacttttctctacaaggagtcaaaaagaaaaacgattggaaatgaggcacaaaataaaaaagtccaccgtgctggacgatgctagaaaaagtctgtcctaacaattactttattattggtaccggatccaacctctgtctcaatccatttatgcaagggatggtgatttctagttcccaggtatcattatccttcgatgctgaggggttggagacttggaggacatacatcatcaagccttgtttacttgtcagacgccttggcgcctatcggatatcttgtggagatggagtttaacagatataat

SEQ ID NO: 6280 - DNA, 316 bp, Zea mays
  Clone ID: LIB3061-064-Q1-N6-C6
cgagaaaaatctcaatcaatatattgattatttttaggaaacacatgccgctatgagggcaccattatcgagtacatctcatatgtaatctaaaagaggcaccaccaacgatgggttgctgccacgacaaggcagggttcatcaaagagaactggttgtatggcagcaattgttgctgctgtaggaaggcagcgaccaatgggttagccaccgctagtggattaagtaactgttgtcgctgttgtaggtacgcagcagagttcgacacagtcagttgggttgaatggaagtagttgttgcaagtaggcagcagggt

SEQ ID NO: 6281 - DNA, 353 bp, Zea mays
  Clone ID: LIB3061-064-Q1-N6-C7
ttagatttcttatgagttatagttcaataataaagttttttgtctgatgtttgtggcttcccagaataagaaagtacatttctaaaaaaaaaaaaaaaaaaaaaaaaaaaaaaaaaaaaaaaaaaaaaaaaaaaaaaaaaaaaaaaaaaaaaaaaaaaaaaaaaaaaaaaaaaaaaaaaaaaaaaaaaaaaaaaaaaaaaaaccaaaaaaaaaaaaaaaaaaaaaaaaaaaaaaaaaaaaaaaaaaaaaaaaaaaaaaaaaaaaaaaaaaaaaaaaaaaaaaaaggggggggccgctctctttaaaaaaaacaccccccggggggttccccccgaaaaaaccgcgaccccacc

SEQ ID NO: 6282 - DNA, 499 bp, Zea mays
  Clone ID: LIB3061-064-Q1-N6-C8
gaagggaacaggaaagaaacgggcggcaggctggcggccagccagccagacgggcaacaaacaggcaggccaccaaaaagacagccggcagaaaacagggggagaccaggcaaccaggccggccacgagcgaccaacgggggggaaaaaaaaagaggggggaggaaacgggcacgcccgctggcccgccgggggggcgaaggggggcaggggggggccaggaaaactcacggggacggcgcgcacacggacccggccccaccggggcggctccccccggacagccaggccccccccgcccggcgagaggccgacaggggccccaccgcagcccccaccttcgcccgaccgcgcccgcccccccccacaggccccccccgtggcggcgggccagctgcagggcaaggcccaccgcaaccaaacccaccccggggcacgggaggaggcacgggggggggaacccaggggcaccccaagcgcaggggacaaccccccaagga

SEQ ID NO: 6283 - DNA, 177 bp, Zea mays
  Clone ID: LIB3061-064-Q1-N6-C9
gccacacaatatgtgctcatgctaagctgaaaccaaaatcataaagctatgttttgttacatgcttaactatggacacacctaattttgcgctttagccacattcttcgaacattgtggttcattgttgacatgaaagcctctctattaatctaggacttaaagacctccacagcat

SEQ ID NO: 6284 - DNA, 497 bp, Zea mays
  Clone ID: LIB3061-064-Q1-N6-D1
gtgactacttacaaatttttaataaaacgcgagggcccaacaattacattgaaaacaaacagtatatcgtcaatcgtacactaatctattctttcaaagagaaaaagacaatcgaacaccaaggaaccccagatttcacaaagagagagaagttcctaagcacaactatggaaggggcttgaagggggcgccgccgatagaaggggaccgccgaccccggaaagggacaaaaaggggggaagggccccagggcaactttggagccggataggaggggcccggcttttgagcgaggagtcgccccaacacggaagggccttacttgaagcacgagggggggcgctgagatggaagggcaaggagggcccggcaaacatggaccggggatggggtccaaaacaaaggggaaggcgggaacagcctcataggggccacaaaaacaaaaggggccccatgccccaacccaactttgaatctgaagggaccattaacgccac

SEQ ID NO: 6285 - DNA, 522 bp, Zea mays
  Clone ID: LIB3061-064-Q1-N6-D10
gaggaaaatctcaatcaatatattgattatttctaggaaacacacgtcggtatgagggcaccattatcgagtacatctcatatgtaatctaaaaaaggcacctccaacgatgggttgctgcctcggcagggcaggattcatcaaagagaactggttgtatggcagcaattgttgctgctgtaggaaggcggcgaccaatgggttagccactaccaatggattaagtaactgttgtcgctgttgtaggtacccagcagagttcgacagagtcagttggttgaatggaagcagctgttgcaagtaggcaacagggtttgccacagctagttgagtcagagctggtacaatctgttgcaacaattgttgttgcaggtatgtaggtgcattgcccacagcgagcgggctaaatgaaagcagttgttgttgttgtacgtaggcggcagggttcaccatggctagttgactgagcgttggcagaaactgttgtagctgttgttgttgctggtttgcaactacgttcgc

SEQ ID NO: 6286 - DNA, 542 bp, Zea mays
  Clone ID: LIB3061-064-Q1-N6-D11
gggggtgggtttttaagaactaaaaagtactttcttatttctgggacgccacaaacatcatccaaaaaattcattattgaactataactcataagcaatctaaaagaggcaccaccaatgatgggttgttggtagaacactgttgggttggggagaagcaagttggttgaatggcagcaattgttgcagttgtaagagggtgccagcgttaggcatagcgtgcaggtagaacggcaacaactgttgttgtgtcaagaaggcagcagggctcacatcagctagctggctgaatggtagtagttgttgctgctgtaaataagcagcagagttcaatgctgctagttggttgaatggaagaaattgctgggggtaggcagcaactagctggctgaatggtaattgttgttgcaaataagcagcagagttcaatgcagccagttggttgaatggaagaaactgatgttgctgagagtatgcagcaaggtttgctagcacaagttgttgtagttgttgtgccctgatgttttgtgccaccaaatgga

SEQ ID NO: 6287 - DNA, 534 bp, Zea mays
  Clone ID: LIB3061-064-Q1-N6-D12
gactcagaaatagttataaatatctgacgtaaaaaacatttcacgtctaacaggacatccaaatgtacagctacatcaaaaaacaagtttagaagccattacaaaagcgtacataacgctaaactagcaagaaagatggttcttggcgcatgtaaatcgttgtggcgttacatctcagtacgagaccaagcctttgtttccatcagcatcagggctgctggacctcgagctgctgctgcgcctgcggttgtatctcgagctctccctcttggctggggcagcatcaggagacctggatctcaagggatccaggctcttcgacctggacctgttgttggcaggggggctgtggccacggtggtcaggaccgcctccaccgtgacctgatcgaggcctatcgttcgcatcgcgtctcgggtctgcagggctgcggctgcgccttgggctggggcggcgataccctccacggtcatgacgcgtcgccgggctgcgtgacctgctccggcctcttctttggtacctggatgggctatt

SEQ ID NO: 6288 - DNA, 507 bp, Zea mays
  Clone ID: LIB3061-064-Q1-N6-D2
ccaatcatcttttttccttatatattattcctttccatttcaatggttcattcaggtcattgctcacactgccacccatggtgatgggtgacactacgttactcatcgccgctaaatgagtaaactagcgagctaggtagctagtcagcggctccattacattattactacagtacatagtttcctcagtagtagacaccgccggcagctgcgttgcaagggcagggacctggctgctgcagctgcaggccgcacatcgccgtcagctgctgcgctacctgggccgccatcagcgccgcgagctcgccctgcggctgctgctgcaggaaggactgcaggaccacaccgtatgtcgcctggtaccggtgcagcggctccacctgcctgatctggtggcagcactgctgctgcagcgcctggcactgtggcgagccgtagggcgtcgccgccgggctgcactggtgcctcaggaactcgacgcactggcccaggaacgggctgccgacg

SEQ ID NO: 6289 - DNA, 535 bp, Zea mays
  Clone ID: LIB3061-064-Q1-N6-D3
agaatctagaaagtactttcttatttctgggaagccacaaacatcagacaaaaactttattattgaactataactcataagaaatctaaaagagggcaccaccaatgatgggttgttggtagaacgctgctgggtttgtcaaagcaagttggttgaatggcagcaattgttgcagttgtaagagggtgccagcgttaggcgcagcgtgctggtagaacggcaacaactgtggttgtatcaagaaggtagcagggctcacaccagctagctggctgaatggtagtagttgttgctgctgtaaataagcaggagagttcaatgctgccagttggttgaatggaagaaattgctgggggtaggcagcaggtagctggctgaatggtagttgttgttgttgcaaataagaagcagagttcaatgcagctagttggttgaatggaagaaactgctgttgctgagagtaggcagcaaggtttgctagcacaagttgttgtagttgttgtgccctgatgttttgtgccaataaatgcaccaa

SEQ ID NO: 6290 - DNA, 516 bp, Zea mays
  Clone ID: LIB3061-064-Q1-N6-D4
aaccgtaagacaccattaccattaccattaccattaccgggcaactcttacaatcagcacatggcggaagaaattaccgccgacagatcgacgcatgcgcacggggccaagaaagaaacacacagcaacaataggatataacgatgtacagggccaggtcaacaagctaggcgggtctttgcctacactacactgtcttgctgccggccgcgtcggcgacggcggccacttttttttccagctcaggcttgttggcgccgaccagcttgtccacctgctgctcgttcttgaggaaaaaaaagtcggggtcgcgcggatgtcccacgacgagctgaactccatcaagtcatcaacatcgatcgtcaggaacatgagctgagggtacgtctgcgacatttcggcgtaaacaggtgcgatgacacggcacggcccacaccaggaagcgctgaagtttgcaaccacggttttcccatccttgtttgcctcggcaattctttggtcccagtcctctttgct

SEQ ID NO: 6291 - DNA, 523 bp, Zea mays
  Clone ID: LIB3061-064-Q1-N6-D5
aatagctaattcgcttatatgtctcaatgacccgaaggctgttacacctgaccgaaagagcactctaaagctttgacaacactcctatgtcaaaaccctcaccatccaagcactgaatcggtgtgcatgtggcagggaaaaaccatatgtaaacctcatacaaggatcgactaatcttcttttttgctgtctgaatcttcaagagcttgcagcctctcgacgagtggtgggtgggagtagtgatatgccgaataccaaggatcggtgttcatcgcagacaagttctcctcctgtagtttaacaagggctgctcggagctgaggggcatatccaaggttcttggcaaaggcatcagcctgaaattcaaatgctctgctgacaaggttcaggcaaaagctcagaaggtgttggatgggtattatggtgtgctggaaaatgatcaatccaattattactggctggtccttgaagccaaaacttccaaatagatctttggagctccttactagagtatatcctccaa

SEQ ID NO: 6292 - DNA, 535 bp, Zea mays
  Clone ID: LIB3061-064-Q1-N6-D6
agaaagtactttcttatttctgggaagccacaaacatcagacaaaaactttattattgaactataactcataagaaatctaaaagagggcaccaccaatgatgggttgttggtagaatgctgctgggtttgtcaaagcaagttggttgaatggcagcaattgttgcagttgtaagagggtgccagcgttaggcgcagcgtgctggtagaacggcaacaactgtggttgtgtcaagaaggtagcagggctcacaccagctagctggctgaatggtagtagttgttgctgctgtaaataagcaggagagttcaatgctgtcagttggttgaatggaagaaattgctgggggtaggcagcagatagctggctgaatggtagttgttgttgttgcaaataagaagcagagttcaatgcagctagttggttgaatggaagaaactgctgttgctgagagtaggcagcaaggtttgctagcacaagttgttgtagttgttgtgccctgatgttttgtgccaataaatgcaccaaaggtaac

SEQ ID NO: 6293 - DNA, 522 bp, Zea mays
  Clone ID: LIB3061-064-Q1-N6-D7
cacccaaaaaattcattattgaactataactcataagcaatctaaaagagggcaccaccaatgatgggttgttggtagaacactgttgggtttgtcaaagcaagttggttgaatggcagcaattgttgcagttgtaagagggtgccagcgttaggcatagcgtgcaggtagaacggcaacaactgttgttgtgtcaagaaggcagcagggctcacatcagctagctggctgaatggtagtagttgttgctgctgtaaataagcagcaaagttcaatgctgctagttggttgaatggaaaaaattgctgggggtaggcagcaactagctggctgaatggtaattgttgttgcaaataagcagcagagttcaatgcacccagttggttgaatggaaaaaactgatgttgctgaaagtatgcagcaaggtttgctagcacaagttgttgtagttgttgtgccctgatgttttgtgccaccaaatggaccaaaggtaactgctgtaatagggctgacggttgttgg

SEQ ID NO: 6294 - DNA, 542 bp, Zea mays
  unsure (1)..(542): unsure at all n locations; Clone ID: LIB3061-064-Q1-N6-D8
tggntcctctaaacaacccccctttgtttgggggtttttttttttttttttttttttttttttttttttctttttttttttttttttttttttttattttttttttttattttttttttttttttttttttttttttttttttttttttttttnnnttttttttttttttttttggggggggggttttttccaaaattttttttttttttttgggggggggggaaaccccccttaaaaactttttttttttcccttttcccttaaaaaaatttaaaaggggcccccccccatttggggtttttgggaaaccccccttgtttttttaaaaacctttttttttttggggccatttttttttttttttaaagggggccccccttttgcccccccctccttttaaaaccccccccccttttttttttttaaaaagggtggcggtttcccccccccttctccttttatggggtttttttttttttttttaaaaaaacccgggaaattcaatctcccctttttgttcgaaaaaaaaaaaatttttggg

SEQ ID NO: 6295 - DNA, 533 bp, Zea mays
  Clone ID: LIB3061-064-Q1-N6-D9
aaatctcaaccaatatattgattatttctaggaaacaatgccggtatgagggcaccattatcgagtacatctcatatgtaatctaaaagaggcacctccaacgatgggttgctgcctcgacaagacaggattcatcaaagagaaccggttgtatggcagcaattgttgctgctgtaggaaggcagcgaccaatgggttagccactgccaatggattaagtaactgttgtcgctgttgtaggtacgcaacagagttcgacatagttagttggttgaatggaagcagctgttgcaagtaggcaacagggtttgccacagctagctgagttagagctggtacaatctgttgcaacaattcttgttgcaggtatgtaggtgcattggccacagcgagcgggctagatgaaagcagttgttgctgttgtaggtaggcggcagggttcaccatggctagttgactaagcgctggcagaaactgttgcagttgttgttgttgctggtttgcaactacgtttgctagagcaagtgggttgg

SEQ ID NO: 6296 - DNA, 552 bp, Zea mays
  unsure (1)..(552): unsure at all n locations; Clone ID: LIB3061-064-Q1-N6-E1
tcgcgnatagcaacatagnaaagcacaatagtgtaccaacaatggcagctaaaaattttgcctccttatgctccttggtctttctgcaagtgctgctacggcgaccattttcccacaatgctcacaagctcctatagcttcccttcttcccccgtacctctcaccaacggtgtcttcggtatgtgaaaacccaattcttcaaccctacaggatccaacaggcaatcgcagctggcatcttacctttatcacccttgttcctccaacaatcatcagccctattacagcagttacctttggtgcatttattggcacaaaacatcagggcacaacaactacaacaacttgtgctagcaaaccttgctgcctactctcagcaacagcagtttcttccattcaaccaactagctgcattgaactctgcttcttatttgcaacaacaacaactaccattcagccagctatctgctgcctacccccagcaatttcttccattcaaccaactgacagcattgaactctcctgcttatttacagcagcaacaactactacc

SEQ ID NO: 6297 - DNA, 541 bp, Zea mays
  Clone ID: LIB3061-064-Q1-N6-E10
aaaaagtactttcttatttctgggaagccacaaacatcagacaaaaaatttattattgaactataactcataagaaatctaaaagagggcaccaccaatgatgggttgttggtagaacgctgctgggtttgtcaaagcaagttggttgaatggcagcaattgttgcagttgtaagagggtgccagcgttaggcgcagcgtgctggtagaacggcaacaactgtggttgtatcaagaaggtagcagggctcacaccagctagctggctgaatggtagtagttgttgctgctgtaaataagcaggagagttcaatgctgccagttggttgaatggaagaaattgctgggggtaggcagcaggtagctggctgaatggtagttgttgttgttgcaaataagaagcagagttcaatgcagctagttggttgaatggaagaaactgctgttgctgagagtaggcagcaaggtttgctagcacaagttgttgtagttgttgtgccctgatgttttgtgccaataaatgcaccaaaggtaactgatgt

SEQ ID NO: 6298 - DNA, 549 bp, Zea mays
  Clone ID: LIB3061-064-Q1-N6-E11
ggttttgttttggttttcacattaaaaatctggaaaagtaacttcttatttctggttggccacatacatcatccaaaaaatttattattgaattacaactaataagcaatctaaaaggggcaccaccaatgatgtgttgttggtaggaggccgggtggtggggcaaagcaagttggacaaagggcaacaattgttgtagttgtaagagggttgcggggttagccgcaaactgctggtagaaaggcagcaactgttgctgtgtcaagaaggaagcacggtttgctgcagctagctggctaaatggtagtagtatttgctgctgcaaataagcagcggggttcagtgcggccaattggttaaatggaagaagttgttgttgctgagagtaggcagtagctagctggctaaatggtaatagttgttgctgcaaataagcagcagggttcagtgtagacagttggttgaatggaagaaattgttgttgctgagagtagggagaaaggtttgccagagctacttggttgatcagaggtagcacgagttgctgca

SEQ ID NO: 6299 - DNA, 516 bp, Zea mays
  Clone ID: LIB3061-064-Q1-N6-E12
gtttggttttttttttttttttttttttttttttttttttttttttttttttttttttttttttttttttttttttttttttttttttttttttttttttttttttttttttttttttttttttttttttttttctttaaattttggggtttgttgggggtattaataatattaaaaaaatggacaaccaaaaaaaaattttttaataggggggggggggcccctctcaaaacacaaaaaaaaaaagggaaaaaaaaaaaaaaaaaaaaaaaaaaaaaaggggcccccccaaacttttttaataaaagaaaaattttttttttttaaaaaaaaaaaaacaaaaacccacacaattttttaaaaaaaaaaaatttttttttttcccaaaaaaaacatctaaaaaaaaaaaattcaatttttttataaaaaaaaaaaacatttttttttcaattcccctaatatatacatcgaaaaaaatatattttataaaaaaaaaaaagaaaaattttccccctc

SEQ ID NO: 6300 - DNA, 492 bp, Zea mays
  Clone ID: LIB3061-064-Q1-N6-E2
aagaacgaacattgcgcatatataaacacatgacatgtaaacaaccaattcgcccccgggacactatattgaactagtcgacaaaactggggcaaaacaagtcgacagacaggcagacagctaaccacacatagaaatcactcaatttccgccatctttcgcccatcagtgctctgtaccgggctcccctttggcgccaggggaatcatcggccggcttcttgtacttgtaccagctggcgatgacgaggtaggcaaggaagttgaggaggctgagcactgcgagcagccagaaaaagtagtcgagggggccgcggttgaggttctccgggatccacccgatgcggccgtgcctgggggtgatgtgggtgaccatggtcaccaggaccgtgctgaggtagttgccgagcgcgacggtggtgagcgacagcgccgagcacatgctcctcatggggtcgggcgcctggtcgtaaaaaaactccagctgccccac

SEQ ID NO: 6301 - DNA, 486 bp, Zea mays
  Clone ID: LIB3061-064-Q1-N6-E3
aaaaaaggctttcttatttctgggaagccacaaacatcagacaaaaaatttattattgaactataacccataaaaaatctaaaagggggcccccccaatgatggggtggtgggaaaaccctgctgggtttgtcaaaacaaggtggttgaatggcaacaattgttgcagttgtaaaagggggccagcgttaggcccaacgtgctggtaaaacggcaacaactggggttgtatcaaaaagggagcagggctcacaccaactagctggctgaatgggaatagttgttgctgctgtaaaaaaacaggaaagttcaatgctgccagttggttgaaaggaaaaaaatgctgggggtaggcaacaagtaactggctgaaagggaattgttgttgttgcaaataaaaaacaaagttcaatgcacctagttggttgaaaggaaaaaactgctgttgcttgaaagaaggcaacaaggtttgctaacacaaattgtt

SEQ ID NO: 6302 - DNA, 476 bp, Zea mays
  Clone ID: LIB3061-064-Q1-N6-E4
aaaaaaaggcaaagagctttatttgacaaccatgtttgtacatacagacaccacgacgatcgaacatataaaaccatgatggggcatatgacatatataaaacctttatttagcatatttggagtacccggcctggtggtgaaaccaaactaaagttggggcagggagacaccgatcgcagggacgagcctgggcgtcgcgcgtccataaaaacccacaatgctgctgccgatgggcgcggggatgcaaaaacgggggccgctttcgatgccccatggcccccaagctttgggggggctggggacaatcctgaacgagggaaggggagtcccacctttaaatgcgccggacgttccaaaaacttccttgacgtattcaggggcgccaaaaacgagcttccgggacgttgccgccaagtccaccccattgcccaagggggcgcgtttgaccacctgtgtcggtactggaggggaacc

SEQ ID NO: 6303 - DNA, 507 bp, Zea mays
  Clone ID: LIB3061-064-Q1-N6-E5
cgacagatgacaggatcgatgtttttttttaaattctgcgcagatgggataaacccttaccttaacaagcagtccgcagcctgcattccacagaactaccattcttctggtagaggctccttatgaactgtacaacaaccacagctgccacatagagatacagttgctccctgtttttttcccccgcccacccccgttagtccactaccctagttctgagttcatttcttctacacacagctggagttcgaatcgcctgaccagttgtcaggcccggagcttcgcgaagaggctgccgaaggaaaaaaagctgctcctgaccatgctgccggagcttggctccgccgctttggccaccgcagcaggcacgcccacgctcttgacgttgagcatggcggtctggccaaactggcccctgagcccctcgacggtcttcatgtccactggctggcccgaggggttccggacgtaaaaaacgtttgtggcctgcccgcccgccgtcgtcac

SEQ ID NO: 6304 - DNA, 539 bp, Zea mays
  unsure (1)..(539): unsure at all n locations; Clone ID: LIB3061-064-Q1-N6-E6
agaatctgngaaagtaacttcttatttctggttggccacatacatcatccaaaaactttattattgaattacaactaataatcaatctaaaagaggcaccaccaatgatgtgttgttggtaggaggctgctgggtttgtcaaagcaagttggacaaagggcaacaattgttgtagttgtaagagggttgcggggttagccgcaaactgcttgtagaaaggcagcaactgttgctgtgtcaagaaggaagcacgacttgctgcagctagctcgctaaatggcagtagtatttgctgctgcaaataagcagcggggttcagtgcggccaattggttaaatggaagaagttgttgttgctgagagtaggcagtagctagctggctaaatggtaatagttgttgctgcaaataagcagcagggttcagtgtagacagttggttgaatggaagaaattgttgttgctgagagtagggagaaaggtttgccagagctacttggttgatcacaggtagcacgagttgctgcagctgttgtgccctg

SEQ ID NO: 6305 - DNA, 540 bp, Zea mays
  Clone ID: LIB3061-064-Q1-N6-E9
gcttcgaagagatatccattcccgtttaacaagcgtagctaagtcgtcaagaaacgtaccacagcgtacatttatgccaactcagctatgtactacacacaatttattacaattgcactcatttacgtcaggtggtctccgtttttttttcattttccctttcatttgaactcgcggtgccaaagcgcttccacagatccttgactcaatacaaggaaaagcgaactctaggtaattttggctcctgggcaattcgattcaggtagttccttcagctggcttcggtttccccaaagtcgtcaacctcaatctgagtggttttcttggggcagttcctgtcgattgtgccgcagcaacagtggatggggcggcaagctcaagtggctcgagctcttgattcgctttgcgcttcagattatcattagaatcttggggcctcagactgcatatttgttccaaattattttcagaaccgatctccaaagatggtctccgttcagcatttacatcttcctggttagctttaatttgattagagga

SEQ ID NO: 6306 - DNA, 506 bp, Zea mays
  Clone ID: LIB3061-064-Q1-N6-F1
agaagctcgaactccctcatatttcagttatctaaaagtagcattcaattacaaaaatacgaaagccaaactgaaaacaagggtcgctccttgctaaagagtagtaaaacggggggtaagggcaccatccaaaaagcacataaacgattaacgctggcatctacctccatttacacaggccacaattgctctagaactcatcattatgtagtagcagggggtgtaacaagggacaatattcagaggcagaaatatgggaatggcgtcttcgggccgacgcaactaaagcttgcatgaggctcgggagcaagggcatcttcaaactggtgaggggattttgaactggtttagtatctggagtttttggcgtagaagggattttcgccccacgattctctctcgggtttagctcgattttcagcctctccatcctccaagttcaaccgctttgggttccttgacttcgaagacttcgtagacttgctgatgagcttctcaaatgcttc

SEQ ID NO: 6307 - DNA, 532 bp, Zea mays
  Clone ID: LIB3061-064-Q1-N6-F10
cattaaaccaaactttattatgaccatgcatatattattggtcataccacacatgataatgtgtgtcgtcttactgcattattacatatatagatagagagagatggatagaggagatttcccaaatatcatgaatcagtagtagggcggaatggcagcggagacgccacaggggttggtgcggtagctgggcagctggtactggtagagtccacccatggccggcatgttctgcgccatcatcatggccatggggttgagaccctgggctgccagcagctgctgctgctgctgcatcagagctggctcgtacaggctgctgctggcggcagcggcacgctcaagctgcatcatcatctgcagctgctgcgcgacggactgcacgtccatcatcctcatctgctgctggcagcactgttgccggagcggctggaacatggcgctcggctgcccacacccggcgtagtagggcgccgccgccagcgggctgcactgcggctgcctcaggtactccgcgtaggggtacagcccg

SEQ ID NO: 6308 - DNA, 560 bp, Zea mays
  unsure (1)..(560): unsure at all n locations; Clone ID: LIB3061-064-Q1-N6-F11
ttggtcctctanaggccgccctgggggggggtttttaatttggaacagaggagtactttttttcttttcatttcaattgttcattcaggtcattgctcacactgacactgccacccatggggatgcgtgacacattattactcaatcatcgccgctaaatgactcaactagctaggtggccggcggctatactacagcacatagtttcttcagtgggggacaccgccggcagcagcgtaggggcatggagtcggctgctgcaggccgcacatcgccgtcagttgctgcgctatctgcgccgccaacagccccgcgacctggccgctttgcggctgctgctgcaggatggactggaggaccaagccgaagatcgcctggtaccggtgctgcggctccacctgcctgagctgctggcaacactgctgccgcaacgactggcactgaggcgagcagtagggcgtcgccgtcgggctgcactgatgcctcaggaactcgacgcactggcccaggatcggggtgctgccaacgccgcaggttccctgcagctggcacgggcttgg

SEQ ID NO: 6309 - DNA, 423 bp, Zea mays
  Clone ID: LIB3061-064-Q1-N6-F12
tgtttgtttttttttttttttttttttttttttttttttttttttttttttttttttttttttttttttttttttttttttttttttttttttttttttttttttttttttttttttttttttccaaaaaaaactttccccttaaatggagggggggggaaattaatccccacaaatggccccccacccccctagggaaaaggaaaaaaaaggggaaccttgttaaaaaaaccaaggtccccaaaaaaacaaaacaacccccaaacccaaacactccaaaatccaaaccatggggtaaaaaaaaaaaaacaaatttgaaaccctttaaaacccacactttttttttcaattttttccgggcttaactttaaaaaccaccaaaaagtaaaaaacccctttcccctttaacacctttgagacctt

SEQ ID NO: 6310 - DNA, 533 bp, Zea mays
  Clone ID: LIB3061-064-Q1-N6-F3
agaatctagaaagtactttcttatttctgggaagccacaaacatcagacaaaaactttattattgaactataactcataagaaatctaaaagagggcaccaccaatgatgggttgttggtagaatgctgctgggtttgtcaaagcaagttggttgaatggcagcaattgttgcagttgtaagagggtgccagcgttaggcgcagcgtgctggtagaacggcaacaactgtggttgtgtcaagaaggtagcagggctcacaccagctagctggctgaatggtagtagttgttgctgctgtaaataagcaggagagttcaatgctgtcagttggttgaatggaagaaattgctgggggtaggcagcagatagctggctgaatggtagttgttgttgttgcaaataagaagcagagttcaatgcagctagttggttgaatggaagaaactgctgttgctgagagtaggcagcaaggtttgctagcacaagttgttgtagttgttgtgccctgatgttttgtgccaataaatgcacc

SEQ ID NO: 6311 - DNA, 529 bp, Zea mays
  Clone ID: LIB3061-064-Q1-N6-F4
ctaaaaagtactttcttatttctgggaagccacaaacatcagataaaaactttattattgaactataactcataagaaatctaaaagagggcaccaccaatgatgggttgttggtagaacactgctgggtttgtcaaagcaagttggttgaatggcagcaattgttgcagttgtaagagggtgccagcgttaggcgcaacgtgctggtagaacggcaacaactgtggttgtgtcaagaaggtagcagggctcacaccagctagctggctgaatggtagtagttgttgctgctgtaaataagcaggagagttcaatgctgctagttggttgaatggaagaaattgctgggggtaggcagcaggtagctggctgaatggtagttgttgttgttgcaaataagaagcagagttcaatgaacctagttggttgaatggaagaaactgctgttgctgagagtaggcagcaaggtttgctagcacaagttgttgtagttgttgtgccctgatgttttgtgccaataaatgcacca

SEQ ID NO: 6312 - DNA, 534 bp, Zea mays
  unsure (1)..(534): unsure at all n locations; Clone ID: LIB3061-064-Q1-N6-F6
atcacattaaaatctgngaaatgtaacttcttatttctggttggccacatacatcatccaaaaactttattattgaattacaactaataagcaatctaaaagaggcaccaccaatgatgtgttgttggtaggaggccgctcggtctgtcaaagcaagttggacaaagggcaacaattgttgtagttgtaagagggttgcggggttagccgcaaactgctggtagaaaggcagcaactgttgctgtgtcaagaaggaagcacggtttgctgcagctagctggctaaatggtagtagtatttgctgctgcaaataagcagcggggttcagtgcggccaattggttaaatggaagaagttgttgttgctgagagtaggcagtagctagctggctgaatggtaatagttgttgctgcaaataagcagcagggttcagtgtagacagttggttgaatggaagaaattgttgttgctgagagtagggagaaaggtttgccagagctacttggttgatcacaggtagcacgagttgctgca

SEQ ID NO: 6313 - DNA, 550 bp, Zea mays
  Clone ID: LIB3061-064-Q1-N6-F7
atatcccacgacaggggactaataaaggtaccattgtgattatgtaacgcttttgcttagtatacaaatacgtaccagtgccaacagatcgtacataaataaaccatatgccaacgtgcctggagatcatagggcatttcattcggtggacaaaataagggatggtcactgtgtgtgatgccgtaaataaagtacatcaaacattgtacgcacgaccagcgctgcaactgaaactatcctgtcatacaatcaataaggtgttcgtctagtctaccatccaacgatacagcactagcaaactctccgaacgaactatgcgggtctgaccaactcttccccgcatatgctcacaagtttgggaacttagtactgtattcctgatcggacataaatgtcgctgtaatcatctttccggcgaaccatcttccatgaagtgcttgttgggccttccctgctgcagttacactatcgaactgcagatacacgaagcctgcagtatttttgtcaacaaaaatatgcttcactgcaccaaacttggaacattcatctt

SEQ ID NO: 6314 - DNA, 326 bp, Zea mays
  Clone ID: LIB3061-064-Q1-N6-F8
ggggggggaaaaaccccccccaaattgggggttttttgggggaaccccccccggggggggggcccccctttggggccccccccaaaggggaaaaaaaaagggggccccccccccggggggggggcccccccccaaggggggtttcaaaaaaaaaccccggggggggggaaaaaattgggcgggggggggggggggcccccccaggggggcccccccccccaggggaaaaaaaaccgggggccccgggggggggccccccaaaaagtccccaaaattggggggggaaagggaaaaccctttttaaaagggaaaaaagggggtccccc

SEQ ID NO: 6315 - DNA, 512 bp, Zea mays
  Clone ID: LIB3061-064-Q1-N6-F9
agaatctgggaaagtaacttcttatttctggttggccacatacatcatccaaaaaatttattattgaattacaactaataatcaatctaaaagagggcaccaccaatgatgtgttgttggtaggaggctgctgggtttgtcaaagcaagttggacaaagggcaacaattgttgtagttgtaagagggttgcggggttagccgcaaactgcttgtaaaaaggcagcaactgttgctgtgtcaagaaggaagcacgacttgctgcagctagctcgctaaatggcagtagtatttgctgctgcaaataagcagcggggttcagtgcggccaattggttaaatggaaaaagttgttgttgctgagagtaggcagtagctagctggctaaatggtaatagttgttgctgcaaataagcagcagggttcagtgtaaacagttggttgaatggaaaaaatgttgttgctgaaatagggagaaagtttgccaaaatacttggttgatcacaggtagcacg

SEQ ID NO: 6316 - DNA, 378 bp, Zea mays
  unsure (1)..(378): unsure at all n locations; Clone ID: LIB3061-064-Q1-N6-G1
aggggggggggggggggggggggggggggggggtggggggggtgggggggggggggggggggggggggggggggggggggggggggggggggggggggggggggggggggggggggggggggggggggggggggggggggggggggggcacccgaagggggggggggggggggcgggcccgggggtgggggtgaggggggggggggggggggggggggggggggccgggggggggggggggggggggggggggggggggggggggggggccccgggggggggggggggggggggnaaaattttttgggggggggaaccctcttgccggggtggtggggaaaaggaaaaaaggagggggggaagaagaaaagggggggg

SEQ ID NO: 6317 - DNA, 551 bp, Zea mays
  unsure (1)..(551): unsure at all n locations; Clone ID: LIB3061-064-Q1-N6-G10
ctctanacggccgggttttgttttggttttaatttgngaacagaggagtactttttttcttttcatttcaattgttcattcaggtcattgctcacactgacactgccacccatggggatgcgtgacacattattactcaatcatcgccgctaaatgactcaactaggtgggggggcagcggctatactacagcacatagtttcttcagtgggggacaccgccggcagcagcgtaggggcatggagtcggctgctgcaggccgcacatcgccgtcagttgctgcgctatctgcgccgccaacagccccgcgacctggccgctttgcggctgctgctgcaggatggactggaggaccaagccgaagatcgcctggtaccggtgctgcggctccacctgcctgagctgctggcaacactgctgccgcaacgactggcactgaggcgagcagtagggcgtcgccgtcgggctgcactgatgcctcaggaactcgacgcactggcccaggatcggggtgctgccaacgccgcaggttccctgcagctggcacgggc

SEQ ID NO: 6318 - DNA, 545 bp, Zea mays
  unsure (1)..(545): unsure at all n locations; Clone ID: LIB3061-064-Q1-N6-G11
ctctaaacaccggggggggggggggggttttttttatttttttttggtggggggatgcatgcattgcagttcggggaaaaatatacacagattaattattacagacctgattccgtaagttaatgaaagccctaatgaacaagcaaagaaacntacaaaaactgtggggggggggggggggcaaatgaatgaatcanacagacagacaatcaaagacacacgcgcagtacagtactctgcaacgacgactaaccggttggctagtatttagtgctggaagtccttggtggggggcgtgggctggtacccgacgccgtgccggttgttggggaacaccatgaagacgtagcccgcgacggggccgacgacgggcgggagcacggccattatggggggcttggggagctccagcgccgggtagaggcaggcgacggtgtcggtgttaaggagcgcgagggtggggaagacgagcagtaagagcgcggtgtgcgcaaagtcgtcggcgcggaagcggtactccgtcaggtcccgggcgggggcatccc

SEQ ID NO: 6319 - DNA, 529 bp, Zea mays
  Clone ID: LIB3061-064-Q1-N6-G2
gtgtgggggttttttatttttttattttttttttttttttttttttttttttttttggttttttttttttttttttttttttttttttttttttttttttttttttttttttttttttttttttttttttttttttttttttggaaatttggggggggttttttgggggggcccctttcttcccccaaaaacctttttttggggttcccccttaaaagccctttaaaaggggggcccccccatgggggttttgggggggaggggggggggggttttaaaaaaggggggggaaaggggggcccccttggggggttttaaagggggggggggggttcccccaaaccggggggaaaaagggaacccttttttttttttaaaaaagggaagggggttttttttactttgggggcccaagggggggagtttttggggggggaaaaaaaaaaggggggttaaggggcccccttggtttatagggaaaaattttttttttttaagagagggaaaaatttccggggggaaggggaac

SEQ ID NO: 6320 - DNA, 555 bp, Zea mays
  Clone ID: LIB3061-064-Q1-N6-G3
cttggtcctctttacggccgccctttttttttttttttttttttttttccattaaaactggaaagtacttcttattctggttggccacatacatcatccaaaaactttattattgaattacaactaataagcaatctaaaaggggcaccaccaatgatgtgttgttggtaggaggccgctcggtctgtcaaagcaagttggacaaagggcaacaattgttgtagttgtaagagggttgcggggttagccgcaaactgctggtagaaaggcagcaactgttgctgtgtcaagaaggaagcacggtttgctgcagctagctggctaaatggtagtagtatttgctgctgcaaataagcagcggggttcagtgcggccaattggttaaatggaagaagttgttgttgctgagagtaggcagtagctagctggctgaatggtaatagttgttgctgcaaataagcagcagggttcagtgtaaacagttggttgaatggaagaaattgttgttgctgagagtagggagaaaggtttgccagagctacttggttgatcaca

SEQ ID NO: 6321 - DNA, 485 bp, Zea mays
  Clone ID: LIB3061-064-Q1-N6-G4
agaaagaacatgctttattgaaatgcagcaacaagacggaacatagggtttagctataacccacacaaactggacgctagcatcttcattcatatcactggcacgctggccaggccgctacttccccttgacgactggcaccgggcacgatgcgtttgacagcacgtagtttgtcacgcttcccaggagaatcctttggatcgggccgaggccccgactacccatgacgagggaatcgatcttgagatcctcgacggggtcgcaaagcttttccctggggtcgccccagtacagcttcgccaccaccttcagctgcttttggcgcgctgccgtgtcgatcgcgtcgagcacctcggcgtcggggcgcacgccgtagccctgcatcacctcgggctcccggaactcggagagggggatcagcggggatccggacttggcccaaagcgtgggcttggtctcctccgcgccgtggtgcaggacgtgga

SEQ ID NO: 6322 - DNA, 516 bp, Zea mays
  Clone ID: LIB3061-064-Q1-N6-G5
aaaaagtactttcttatttctgggacgccacaaactcatccaaaaacttcattattgaactataactcataagcaatctaaaagaggcaccaccaatgatgggttgttggtagaacactgttgagtttgtcaaagcaagttggttgaatggcagcaattgttgcagttgtaagagggtgccagcgttaggcatagcgtgcaggtagaacggcaacaactgttgttgtgtcaagaaggcagcagggctcacatcagctagctggctgaatggtagtagttgttgctgctgtaaataagcagcagagttcaatgctgctagttggttgaatggaagaaattgctgggggtaggcagcaactagctggctgaatggtaattgttgttgcaaataagcagcagagttcaatgcagccagttggttgaatggaagaaactgatgttgctgagagtatgcagcaaggtttgctagcacaagttgttgtagttgttgtgccctgatgttttgtgccaccaaat

SEQ ID NO: 6323 - DNA, 538 bp, Zea mays
  Clone ID: LIB3061-064-Q1-N6-G7
ttcgccttgggcgcggcggcgacgctggtggcccagtcctggtcccgtaggaagaggcaggcggcggagcagtcgtcgacgcgggacgccgggtacctggtccgccagcgctgcgccgcggcctgggcgacggccttggaggcgtgctgcttccttggcgtggcgcagacgatggacaccacctcctcattgctgagcacgtcccacaccccgtccgtggccaggacgaggaacaggtcccccggcgcgacgcggcggtgcgccacctccggctccgacaccacgccgtgccgcttgaggcggtggtcgcccagcgaccgcgccatggccaggcccgggcagtcctcgtcgggcagccacacgcgaggcaccgacgcctcgtccttgagcgcgaacacgcgcccgttgcagcgcttgatgcgctcagcctcctgaggcacgctgggcttctggtcggtggtgagctgcacggccttcaggtagcccgtctccgacacggtcgccagcacggccctggagtcgccgaggttggcgacga

SEQ ID NO: 6324 - DNA, 359 bp, Zea mays
  Clone ID: LIB3061-064-Q1-N6-G9
gtgtgtttttttttttttttttttttttttttttttttttttttttttttttttttttttttttttttttttttttttttttttttttttttttttttttttttttttttttttttttttttttttttttttttttttttaaaaaggggggggggggggaaaaaaaaaaaaaaaaaaaaaaaaaaagcggaaaagggggaaaaaaaaaaaaaaaaattaaaaaaaaaaaaaaaaaaagggaataaaaaaagggggggggggtaaaaaaaaggggggggttaaaaaaaaaaaggggtggggggggaaaaaaagggggagggggaaaaagggggagaaaaagggggaaaaaaagaaggagg

SEQ ID NO: 6325 - DNA, 537 bp, Zea mays
  unsure (1)..(537): unsure at all n locations; Clone ID: LIB3061-064-Q1-N6-H1
gngaaatgtaacttcttatttctaggaggccacatacatcagccaaaaacttcattattgaattacaactaataagcaatctaaaagatggcaccgccaatgatgtgttgttggtagaaggctgctgggtttgtcaaagcaagttggacaaagggcagcaactgttgcagttgtaagagggttgcggggttagccacaaactgctggtagaacggaagcaattgttgttgtttcaaaaaggaagtggggcttgttgtagctagctggccaaatggtagtagtatttgctgctggaaataagcagaggggttcagtgcggccaattggttaaatggaagaaattgttgctgctgagagtaggcagtagctagctggctgaatggtagtagttgttgttgttgtaaataagcagcagggttcagtgtagacagttggttgaatggaagaaattgttgttgctgagagtagggagaaaggtttgccagagctacttggctgatcactggtagcacgagttgttgcagctgttgtgccctg

SEQ ID NO: 6326 - DNA, 556 bp, Zea mays
  Clone ID: LIB3061-064-Q1-N6-H10
gggggggtgtttttttttttttttttttttttcagccaaaaacttcattattgaactataactcataagcaatctaaaagagggcaccgccaatgatgggttgttggtaaaacgttgttgggtttgtcaaagcaagttggttgaatggggggagggggggcagttgtaagagggtgccagcgttaggcgcagcgtgcaggtaaaacggcaacaactgttgttgtgtcaagaaggcaacagggctcacatcagctagctggctgaatgggggtagctgttgctgttgtaaataagcagcaaagttcaatgctgccagttggttgaatggaaaaaattgctgggggtaggcagcagctagctgactgaatggtagttgttgttgcaaataagcagcagagttcaatgcagccagttggttgaatggaaaaaactgctgttgctgaaagtaggcagcaaggtttcctagcacaagttgttgtagttgttgtgccttgatgttttgtgccaacaaatgcaccaaaggtaactgctgtaatagggctgacggttgttggag

SEQ ID NO: 6327 - DNA, 553 bp, Zea mays
  Clone ID: LIB3061-064-Q1-N6-H11
gttgtttggttttttagtaaaaaaaacgggggtattttattttagaggtaattataaaggcgactacatctatatatataaatactcctgacatgtacttattctaggtctttttgatcaacctttacatatttgacacatacagaacgaaggggggagatatacacatatgcatacaagagcttctttattatttgacacacgatagactgtgacgaggaactaattaatatatctatttgaaatcaagcatcatgctgttgaaatcaaagttgacgcaggtagacaccgatagcgtcgacgagcctggttcccgcgcgtccgtagaatcccacgacgctgctgccgatgggcgcggtgatgcaaaagcgtgtcccgttctcggtgccccatgggccccaggctctggtgctggtgatgaacctgagcgaggttagggtagtagcaccttcaaatgtgccgtacgttcctgacacctccctgatgtgttcgttgtcgccaagatcgatcgttcgaacattgccgccaagtccaccccatcgcccagctgtgc

SEQ ID NO: 6328 - DNA, 541 bp, Zea mays
  unsure (1)..(541): unsure at all n locations; Clone ID: LIB3061-064-Q1-N6-H2
aggggtgtaagttctaacctccagnaggtcaaagcttctattcatgatgcccacaaggtaagggaataaatccagaagttgaggtacaatggaaggggcatttgaaagggttgcttcccacaacaaaacactgtcctcaagaagattaagagcatcagggctgtcaatattgataccactttgcagtataggaataagcatgtggtaagaaagaggtgactggaatccaagcgaagaaacaaaagttctaagtgctgttagtaattgtatctgtagcaagctttcacccgcagattcattccatatcatctgaaaaaattgtgatagctgacatgcaaatggaataaccttgtcccccgcatgttcaagaagaactgaaatgaagttcaacacttgcacctacaaagaaataggtaaagccgagttggttaggtggtctgagtagcactcctcaggtcctaggttcgactttccgtgggagcgaatttcagctgtggttaaaaaatcccctcgtctgtccaacgacaaagcacaggtctac

SEQ ID NO: 6329 - DNA, 530 bp, Zea mays
  Clone ID: LIB3061-064-Q1-N6-H3
agatgagccacaaactctatttcacacagtcattctaaagcaaaaatcggtttccagagaaccatttctcacgcgacaaggcaaaacctccctgaaacctaaacaccggataagtattcggtgcaccgcggcaccgagcaggtttacttccgcgacatgctgccgagcaggtttacttccgcgacatgcagattacagcgacatcgtgaaatcatcttaagagctgtccatcaggttctccattgaagttgggtttaccctgccatcactattgttatctcgagggttagcttctgctttcctctcaactccaaaagtgaaattggcggggcgatcatttgggttgaatcgctcgaatatggatggcatggtcgtttggttgaacacaggcgtttgcatgtcacctgctggttttgtataaccaaatccaagagaagcaaatgattcagtgggaaccaaggtttgagtactgggtccgaaaagcttcaactcatactccaaaagctccttctgagaagcatctgtcagtt

SEQ ID NO: 6330 - DNA, 537 bp, Zea mays
  Clone ID: LIB3061-064-Q1-N6-H4
ctagaaagtactttcttatttctgggaagccacaaacatcagacaaaaactttattattgaactataactcataagaaatctaaaagagggcaccaccaatgatgggttgttggtagaacactgctaggtttgtcaaagcaagttggttgaatggcagcaattgttgcagttgtaagagggtgccagcgttaggcgcagcgtgctggtagaacggcaacaactgtggttgtgtcaagaaggtagcagggctcacaccagctagctggctgaatggtagtagttgttgctgctgtaaataagcaggagagttcaatgctgccagttggttgaatggaagaaattgttgggggtaggcaacaggtagctggctgaatggtagttgttgttgttgcaaataagaagcagagttcaatgcagctagttggttgaatggaagaaactgctgttgctgagagtaggcagcaaggtttgctagcacaagttgttgtagttgttgtgccctgatgttttgtgccaataaatgcaccaaaggtaac

SEQ ID NO: 6331 - DNA, 554 bp, Zea mays
  Clone ID: LIB3061-064-Q1-N6-H5
ggggggggttttttttttttttttttttttttttttttttttttttttttttttttttttttcttttttttttttttttttttttttttttttttttttttttttttttttttttttttttttttttttttttttttttttttttttttttggggggggggttttttaaaaaagggggggggtttttggggaaaaaccccggggggggggaaaagggggggggggaaaaaatttttaaaagggaaaacccccaaatgggttgggggggggggggaaattttggggggggggggggggccccccccccaaagggggggggggggggggggggggaaaaaaaccccccccccctttggggggggggggggaacccaaaaaaacccagggggggggggggggcccccccccgggaaaagggggaaaccccggggaaaaatggggggggaaaagtggggggccaaaaccccaaaaaaaaaaaaaaaaatggggggggaaaaaacgggggaaatttgggggggtaaaaaacggggggggagaaaaaggcccccccgggg

SEQ ID NO: 6332 - DNA, 545 bp, Zea mays
  unsure (1)..(545): unsure at all n locations; Clone ID: LIB3061-064-Q1-N6-H7
taactcgaactgctagnattgggatcttgaaatttacagttggattcaggcaaaagcctgagcacgtgtcgtgacattatgaagatacagtcttcgacctaaacaattcgactgcagagagaaaatctatcactgaattttacaacagcagcagccagcagcaggtcgactgcgcccatcacccatgtacggtagctgcaaagtccagttctcgggaccaatggatgcagatgcaggcgcctaataatccggcagaggacgattttttttttccgtcggcgctgtccaagcccttctaggaaagtgcagaggtcgtggcgacagagaatacctaaacctgctccagttggtccggtgggacaagcggctgctgctcgtcagctgcgcttgacgatctatccatgccacacagccccggggactttacaggcacgagagaggccttgttcagggcagcgaaagccttgtttcctgcaccgttgctccctaaacaaatggtatcacctcggccatgccagacaccacactggacattattcatctct

SEQ ID NO: 6333 - DNA, 517 bp, Zea mays
  Clone ID: LIB3061-064-Q1-N6-H8
agataaaaaatttattattgaactataactcataagaaatctaaaagagggcaccaccaatgatgggttgttggtagaacactgctgggtttgtcaaagcaagttggttgaatggcagcaattgttgcagttgtaagagggtgccagcgttaggcgcaacgtgctggtagaacggcaacaactgtggttgtgtcaagaaggtagcagggctcacaccagctagctggctgaatggtagtagttgttgctgctgtaaataagcaggagagttcaatgctgctagttggttgaatggaaaaaattgctgggggtaggcagcaggtagctggctgaatggtagttgttgttgttgcaaataagaagcagagttcaatgaacctagttggttgaatggaaaaaactgctgttgctgagagtaggcagcaaggtttgctagcacaagttgttgtagttgttgtgccctgatgttttgtgccaataaatgcaccaaaggtaactgttgtaatagggctgatga

SEQ ID NO: 6334 - DNA, 597 bp, Zea mays
  unsure (1)..(597): unsure at all n locations; Clone ID: LIB3061-065-Q1-K6-A1
gtggnaatccagtagcaacaacagnagcaacaatggcgaccaagatttttccctccttatgctccttgctctttctgcatgtgttgctaacgcgacaattttccctcaatgctcacaagctcctatagcttcccttcttcccccataccttccatcaatgatagcttcagtatgtgaaaacccagctcttcagccctataggctccaacaagcaatcgcagcaagcaacatacctttatcacccttgttgtttcaacaatcgccagccctatctttggtgcagtcattggtacaaaccatcagggcacagcagctgcagcaactcgtgctacctgtgatcaaccaagtagctctggcaaacctttctccctactctcagcaacaacaatttcttccattcaaccaactgtctacactgaaccctgctgcttatttgcagcaacaactattaccattcagccagctagctactgcctactctcagcaacaacaacttcttccatttaaccaattggccgcactgaaccccgctgcttatttgcagcagcaaatactactaccatttagccagctagctgcagcaaaccgtgcttcctt

SEQ ID NO: 6335 - DNA, 597 bp, Zea mays
  unsure (1)..(597): unsure at all n locations; Clone ID: LIB3061-065-Q1-K6-A10
gcgttctgcgacgtcgncaggcacaacgtctgcgccatggagtgaggcacagcgtcgaacggctggaccaggccgacgtctacagccctggggctgggaggatcacacgcctcaccagccacaagttccccgtcctcaacctcgtacagatgagcgcggtgcgggtagacctgtaccaggacgccatcatgtcgccgttctggaacttcaacgcccacagcgccatgtacggcatcaggggcagtgcaagggtccaggtcgccagcgacaacgggaccacggtgttcgacgacgtgctccgtgcggggcagctgctcatcgtaccccagggctacctcgtcgccaccaaggcgcagggagaaggcttccagtacatcgccttcgagacgaaccctgacaccatggtcagccacgtcgccgggaagaactccgtcctgagcgacttgccggccgccgtcatcgccagctcgtatgccatctccatggaggaagctgcagagctcaagaacggtaggaagcatgagctggctgtgcttactcctgctggcagtggcagctaccaacaaggtcaagctggcagcgcccaacagtaggcac

SEQ ID NO: 6336 - DNA, 607 bp, Zea mays
  unsure (1)..(607): unsure at all n locations; Clone ID: LIB3061-065-Q1-K6-A11
tcttgcaacatagnaaagcacaatagtgtaccaacagtgggagccaaaaattttgcttccttatgctccttggtctttctgcaagtgttgctaccganaccattttcccacaatgctcacaagctcctatagcttcccttcttcccccatacctctcaccagcggtgtcttcaatgtgtgaagaccggggggttcattcctacaggatccaacaggcaatcgcaacaggcatcttaccattatcacccttgttcctccaacaaccgtcagccctattacagcagttacctttggtccatttggtggcacaaaacatcagggcacaacaactacaacaacttgtgctagcaaaccttgctgcatactctcagcaacatcagtttcttccattcaaccaactggctgcattgaactctgctgcttatttgcaacaacaattaccattcagccagctagttgctgcctacccccagcaatttcttccattcaaccaactagcagcattgaactctgctgcttatttacagcagcaacaactactaccattcagccagctagctgatgtgagccctgctgccttcttgacacaacaacagttgttgccgtt

SEQ ID NO: 6337 - DNA, 596 bp, Zea mays
  unsure (1)..(596): unsure at all n locations; Clone ID: LIB3061-065-Q1-K6-A2
atattgagacacagcacatataagtgngatacagtagcaacaatagagcaacaatggcggccaagatattttccatccttatgctccttgctctttctgcatgtgttgctaacgcgaccatttttcctcaatactcacaagctcctatagctgcccttcttcccccataccttccatcaatgaccgcttcagtttgtgaaaacccagcccttcaaccctacaggctccaacaagcaatcgcaacaagcaacttacctttatcacccctgttctttcaacaatcgccagccctatctttggtgcagtcattggtacaaaccatcagggcacaacagctgcaacaactcgtgctaccagtgatcagccaagtagctctggcaaacctttctccctactctcagcaacaacaatttcttccattcaaccaactgtctacactgaaccctgctgcttatttacaacaacaacaactactaccattcagccagctagctactgcctactctcagcagcaacaatttcttccatttaaccaattggccgcactgaacccctctgcttatttccagcagcaaatactactaccatttggccag

SEQ ID NO: 6338 - DNA, 593 bp, Zea mays
  unsure (1)..(593): unsure at all n locations; Clone ID: LIB3061-065-Q1-K6-A4
tagcaattagctcatcgactccanattggagaactcgacaccatgaaggtgctgatcgttgcccttgctctcctggcgctcgctgcgagcgccgcctccagtacaagcggcggctgtggctgccagacaccaccgtttcatctaccgcctccgttctatatgccgcctccgttctatctgccgccgcagcagcagccgcagccatggcaataccccactcaaccaccgcagctaagcccgtgccagcagttcggatcctgcggcgtcggcagcgtcggcagcccgttcctgggccagtgcgtcgagttcctgaggcaccagtgcagcccggcggcgacgccctacggctcgccacagtgccaggcgctgcagcagcagtgctgccaccagatcaggcaggtggagccgctgcaccggtaccaggcgacatacggtgtggtcctgcagtccttcctgcagcagcagccgcagggcgagctcgcggcgctgatggcggcccaggtagcgcagcagctgacggcgatgtgcggcctgcagctgcagcagccaggtccctgcccttgcaacgcagctgccggcggtgtctactactg

SEQ ID NO: 6339 - DNA, 610 bp, Zea mays
  Clone ID: LIB3061-065-Q1-K6-A5
tgcctaagccagcagcttcagttcccttcaatttcttggatggcatttcaatatcttccgagcaacattatgggggttcaaatatatcattgggaagtatggaaagtgctgttgagagaaataaaagaagccagttgcatgatttgctggcagaagaagttctggcgaggtcaagcattgcagataatgagaataatgccaatgatgcatttttctctcctctgtcgcctgctgctgttcaggctgatgctcctgcccttgatgataatgacttcattgaggccaaggacaaaaagaacaaaaagaggtcagcaaaaacaaaagcttctactgtgaaggctccatcacctgttgtttcctttgatccaccagctatttcgatgccttctgaaaagggaaagtctgccaagcaagcacaacaggagttagaaatattgccagctccaccaagtggtccatcgtttggagattttgttctttggaagggtgatcagactagctctgtgcctgctccagcatggtctaatgactcagcaaaggtgcagaaacctttgtctttgagagatattcagagagaacaagaaagggagaaccgtatctatccagcaac

SEQ ID NO: 6340 - DNA, 598 bp, Zea mays
  unsure (1)..(598): unsure at all n locations; Clone ID: LIB3061-065-Q1-K6-A7
gttgaaattactgaaaagcaaaaccatattggacagacaaanaaactcttcacttgcttgaggctgtcttgcattatggggaagactggaaaaggtgtctgaacatgttagtagtcggtcagaaaaagatgtattgcaagatttataaggctaccttttggagaacagttcatgggacacaaggaggatagaatgaggtttgagaatactgatgacaatactgatgagcctggagcaaatgtctcaaaacgactacgtctcactccactagcagatgcaagcaatccgattatggctcaggttgcatttttatcagccattgtgggttccgatgttgcctcagctgcagcgcaagcagctatttctgcccaatcccgtgttgaccttaatgacggcgagattgaaacttcaataaatagcattaagcaagaagaatcatctcacacaaatgggctctcagccaacgtgttactgaaagaggcagctgctaatgcacgggcacaactcgagaaggaaaggaacagcatagagcaatctttatcaaacatagtagacgtccagatgaaggaaatccaagataaaatatgccggtttgagc

SEQ ID NO: 6341 - DNA, 583 bp, Zea mays
  Clone ID: LIB3061-065-Q1-K6-B1
cgtcagcctagcaattagctcatcgactccagatggagaactcgacaccatgaaggtgctgatcgttgcccttgctctcctggcgctcgctgcgagcgccgcctccagtacaagcggcggctgtggctgccagacaccaccgtttcatctaccgcctccgttctatatgccgcctccgttctatctgccgccgcagcagcagccgcagccatggcaataccccactcaaccaccgcagctaagcccgtgccagcagttcggatcctgcggcgtcggcagcgtcggcagcccgttcctgggccagtgcgtcgagttcctgaggcaccagtgcagcccggcggcgacgccctacggctcgccacagtgccaggcgctgcagcagcagtgctgccaccagatcaggcaggtggagccgctgcaccggtaccaggcgacatacggtgtggtcctgcagtccttcctgcagcagcagccgcagggcgagctcgcggcgctgatggcggcccaggtagcgcagcagctgacggcgatgtgcggtctgcagctgcagcagccaggtccctgcccttgcaacgcagctgcc

SEQ ID NO: 6342 - DNA, 592 bp, Zea mays
  unsure (1)..(592): unsure at all n locations; Clone ID: LIB3061-065-Q1-K6-B10
tccggcagnaccccagcanaagaagcgaatcgtcgccgcgagcagaggaagagcgagcagcaagatgtcgtggcaggcgtacgtcgatgaccacctgctgtgcgacatcgaaggccagcacctcagcgccgccgccatcgtcggccacgacggcagcgtctgggcacagtccgagaacttccccgagttaaagcctgaggaggttgctgggatgataaaggactttgatgaacctggaactcttgcaccaactggtctttttgttggaggtacgaagtacatggtgatccaaggtgaacctggagttgtcatccgaggaaagaagggcactggaggcattactatcaagaaaactggcatgtccttgattatcggtatctatgatgagccaatgactccagggcaatgcaatatggtggtggagaggctcggcgattacctgatcgaacagggcttctaagtttgtcataatgctattttggtcattgggcacttaagtttgcacctcatttggttctgtaatatgtgggcttgtgcatgtgcttggcgtattgcatgcagtgaataatttatcttcgcgttgggttggtga

SEQ ID NO: 6343 - DNA, 608 bp, Zea mays
  unsure (1)..(608): unsure at all n locations; Clone ID: LIB3061-065-Q1-K6-B11
gcgttctacagcacatanaagtagaatccatgagcagacagtagagcaacaatggcgaccaagatattttccctccttatgctccttgctctttctacatgtgttgctaacgcgacaattttccctcaatgctcacaagctcctatagcttcccttcttcccccataccttccatcaattatgggggggggatgtgaaaacccagctcttcaaccatataggcttcaacaagcaatcgcagcaagcaacatacctttatcgcccttgttgtttcaacaatcaccagccctatctttggtgcagtcattggtacaaaccatcagggcacaacagctgcagcaactcgtgctacctgtgatcaaccaagtagctctggcaaacctttctccctactctcagcaacaacaatttcttccattcaaccaactgtctacactgaaccctgctgcttatttgcagcaacaactattaccatttagccagctagctactgcctactctcagcaacaacaacttcttccatttaaccaattggccgcactgaaccccgctgcttatttgcagcagcaaatactactgccatttagcgagctagctgcagcaagtcg

SEQ ID NO: 6344 - DNA, 115 bp, Zea mays
  Clone ID: LIB3061-065-Q1-K6-B12
ctctcgttacaggacctagctgcacacctactggagggcgggggctgggagaccctattaccgaacacccaacctcgtcctcctacggttcgtgcgccacttcccggccatggtc

SEQ ID NO: 6345 - DNA, 604 bp, Zea mays
  unsure (1)..(604): unsure at all n locations; Clone ID: LIB3061-065-Q1-K6-B2
anaagaaacctggcgatgatacatatgcacctggtcctgatgacactgtgtatcgctacctctgtgcctctagaaaaattgggagtatcattggcaggggtggagaaattgcaaagcagttgaggactgagacccaagctaagatcaggattggcgagagtgtccctggatgtgatgagcgagttgttaccatatttagcacaagcaggaaaactaataccatcgatggtgctgaagatgaggtttgccctgctcaggatgccctctttagagttcatgagaggcttgccagtgatgagggtcttgggaacgaagacagcgaagaaatttcacctcaagttactgttcgcttgcttgtgccatcagaccagattggatgcattattggaaaaggtgggcagatcatccaaggaatccgcagtgagactggtgcacaaatacgtgtccttagtaatgatcatatccccgcatgtgccattagtggagacgaacttctccagatatctggggacacggtagttgtcagaaaggctcttcatcaagtgtcatctcgcctccataacaacccatccaagtcacagcatcttcttgcatccagcttgac

SEQ ID NO: 6346 - DNA, 301 bp, Zea mays
  unsure (1)..(301): unsure at all n locations; Clone ID: LIB3061-065-Q1-K6-B4
gcggcgagcgtcttagnaacaaccaattgcccaattacaacaacaatccttggcacatctaaccatacaaaccatcgcaacgcagcagcaacaagcactgagccacctagccgtggtgaaccctatcgcctacttgcaacaacagctgcttgcatccaacccacttgctttggcaaacgtagctgcataccaacaacaacaacagttgcaacagtttctaccagcgctcagtcaactagccatggtgaaccctatcgnctacctacaacagcaaacaacttctttcatctagcccgctcgc

SEQ ID NO: 6347 - DNA, 603 bp, Zea mays
  unsure (1)..(603): unsure at all n locations; Clone ID: LIB3061-065-Q1-K6-B5
cagcaagcaacatagnaagtagaatccattagcaacaatagagcaacaatggcgaccaagatattttccctccttatgctccttgctctttctacatgtgttgctaacgcgacaattttccctcaatgctcacaagctcctatagcttcccttcttcccccataccttccatcaattatagcttcagtatgtgaaaacccagctcttcaaccatataggcttcaacaagcaatcgcagcaagcaacatacctttatcgcccttgttgtttcaacaatcaccagccctatctttggtgcagtcattggtacaaaccatcagggcacaacagctgcagcaactcgtgctacctgtgatcaaccaagtagctctggcaaacctttctccctactctcagcaacaacaatttcttccattcaaccaactgtctacactgaaccctgctgcttatttgcagcaacaactattaccatttagccagctagctactgcctactctcagcaacaacaacttcttccatttaaccaattggccgcactgaaccccgctgcttatttgcagcagcaaatactactgccatttagcgagctagctgcagcaagt

SEQ ID NO: 6348 - DNA, 587 bp, Zea mays
  Clone ID: LIB3061-065-Q1-K6-B7
ttttcagcattcaaaaacacaccaagcgaacgcactagcaacgacctaacaccaatggctaccaagatattagccctccttgcgcttcttgcccttttagtgagcgcaacaaatgcgttcattattccacagtgctcacttgctcctagtgccattattccacagttcctcccaccagttacttcaatgggcttcgaacatccagccgtgcaagcctacaggctacaactagcgcttgcggcgagcgccttacaacaaccaattgcccaattgcaacaacaatccttggcacatctaaccctacaaaccattgcaacgcaacaacaacaacaacaacagtttctgccatcactgagccacctagccgtggtgaaccctgtcacctacttgcaacagcagctgcttgcatccaacccacttgctctggcgaacgtagctgcataccagcaacaacaacagctgcaacagtttatgccagtgctcagtcaactagccatggtgaaccctgccgtctacctacaactactttcatctagcccgctcgcggtgggcaatgcacctacgtacctacaacaacagttgctgca

SEQ ID NO: 6349 - DNA, 604 bp, Zea mays
  unsure (1)..(604): unsure at all n locations; Clone ID: LIB3061-065-Q1-K6-B8
gcaacatagnaaagcacaatagtgtaccaacaatggcagccaaaaattttgcctccttatgctccttggtctttctgcaagtgctgctacggcgaccattttcccgcaatgctcgcaagctcctatagcttcccttcttcccccgtacctctcaccagcggtgtcttcggtatgtgaaaacccaattcttcaaccctacaggatccaacaggcaatcacagctggcatcttacctttatcacccttgttcctccaacaatcatcagccctattacatcagttacctttggtgcatttattggcacaaaacatcagggcacaacaactacaacaacttgtgctagcaaaccttgctgcctactctcagcaacagcagtttcttccattcaaccaactagctgcattgaactctgcttcttatttgcaacaacaacaactaccattcagccagctacctgctgcctacccccagcaatttcttccattcaaccaactggcagcattgaactctcctgcttatttacagcagcaacaactactaccattcagccagctagctggtgtgagccctgctaccttcttgatacaaccacagttgttgccg

SEQ ID NO: 6350 - DNA, 603 bp, Zea mays
  unsure (1)..(603): unsure at all n locations; Clone ID: LIB3061-065-Q1-K6-C1
ngacaagcaacatagnaaagtggnaatccagtagcaacaacagagcaacaatggcgaccaagatattttccctccttatgctccttgctctttctgcatgtgttgctaacgcgacaattttccctcaatgctcacaagctcctatagcttcccttcttcccccataccttccatcaatgatagcttcagtatgtgaaaacccagctcttcagccctataggctccaacaagcaatcgcagcaagcaacatacctttatcacccttgttgtttcaacaatcgccagccctatctttggtgcagtcattggtacaaaccatcagggcacagcagctgcagcaactcgtgctacctgtgatcaaccaagtagctctggcaaacctttctccctactctcagcaacaacaatttcttccattcaaccaactgtctacactgaaccctgctgcttatttgcagcaacaactattaccattcagccagctagctactgcctactctcagcaacaacaacttcttccatttaaccaattggccgcactgaaccccgctgcttatttgcagcagcaaatactactaccatttagccagctagctgcagcaa

SEQ ID NO: 6351 - DNA, 430 bp, Zea mays
  Clone ID: LIB3061-065-Q1-K6-C11
gcaacaactgctttcatctagcccgctcgctgtggccaatgcacctacatacctgcaacaacaattgttgcaacagattgtaccagctctgactcagctagttgtggcaaaccctgctgcctacttgcaacagctgcttccattcaaccaactgactatgtcgaactctgctgcgtacctacaacagcgacaacagttacttaatccactagcagtggctaacccattggtcgctgccttcctacagcagcaacaattgctgccatacaaccagttctctttgataaaccctgtcttgtcgaggcagcaacccatcggtggaggtgccatcttttagattacatatgagatgtactcgataatggtgccctcattccggcatgtgtttcctagaaataatcaatatattgattgagatttatctcaatat

SEQ ID NO: 6352 - DNA, 604 bp, Zea mays
  unsure (1)..(604): unsure at all n locations; Clone ID: LIB3061-065-Q1-K6-C3
cagnccattagctttatctactccanacgcanaagaacccgatcgacaccatgagggtgttgctcgttgccctcgctctcctggctctcgctgcgagcgccacctccacgcatacaagcggcggctgcggctgccagccaccgccgccggttcatctaccgccgccggtgcatctgccacctccggttcacctgccacctccggtgcatctcccaccgccggtccacctgccgccgccggtccacctgccaccgccggtccatgtgccgccgccggttcatctgccgccgccaccatgccactaccctactcaaccgccccggcctcagcctcatccccagccacacccatgcccgtgccaacagccgcatccaagcccgtgccagctgcagggaacctgcggcgttggcagcaccccgatcctgggccagtgcgtcgagtttctgaggcatcagtgcagcccgacggcgacgccctactgctcgcctcagtgccagtcgttgcggcagcagtgttgccagcagctcaagcaggtggagccgcagcaccggtaccaggcgatcttcggcttggtcctccagtccatcctgcagcagcagccgca

SEQ ID NO: 6353 - DNA, 610 bp, Zea mays
  unsure (1)..(610): unsure at all n locations; Clone ID: LIB3061-065-Q1-K6-C4
caactagcaacatagnaaagcacaatagtgtaccaacaatggcagccaaaatttttgcctccttatgctccttggtctttctgcaagtgctgctacggcgaccattttcccgcaatgctcgcaagctcctatagcttcccttcttcccccgtacctctcaccagcggtgtcttcggtatgtgaaaacccaattcttcaaccctacaggatccaacaggcaatcacagctggcatcttacctttatcacccttgttcctccaacaatcatcagccctattacatcagttacctttggtgcatttattggcacaaaacatcagggcacaacaactacaacaacttgtgctagcaaaccttgctgcctactctcagcaacagcagtttcttccattcaaccaactagctgcattgaactctgcttcttatttgcaacaacaacaactaccattcagccagctacctgctgcctacccccagcaatttcttccattcaaccaactggcagcattgaactctcctgcttatttacagcagcaacaactactaccattcagccagctagctggtgtgagccctgctaccttcttgatacaaccacagttgttgccg

SEQ ID NO: 6354 - DNA, 609 bp, Zea mays
  unsure (1)..(609): unsure at all n locations; Clone ID: LIB3061-065-Q1-K6-C5
ttttgagcttcanaacacacctagcgaagcgcactagcaacgacctaacaacaatggcttccaagacattatccctccttgcgcttcttgccctttttgtgagtgcaacaaatgcgttcattattccacaatgctcacttgctccgagtgccattattccacagttcctccctccagttacttcaatgggcttcgaacacccagctgtgcaagcctataggctacaacaagcgcttgcggcgagcgtcttagaacaaccaattgcccaattacaacaacaatccttagcacatctaaccatacaaaccatcgcaacgcagcagcaacaagcactgagccacctagccgtggtgaaccctatcgcctacttgcaacaacagctgcttgcatccaacccacttgctttggcaaacgtagctgcataccaacaacaacaacagttgcaacagtttctgccagcgctcagtcaactagccatggtgaaccctatcgcctacctacaacagcaacaacttctttcatctagcccgctcgctatgggcaatgcacctacatacctgcaacaacagttgttgcaacaacagttgctgcaacaaattgtaccagctc

SEQ ID NO: 6355 - DNA, 609 bp, Zea mays
  unsure (1)..(609): unsure at all n locations; Clone ID: LIB3061-065-Q1-K6-C6
tttgganaaccaactagcaacatagnaaagcacaatagtgtaccaacaatggcagccaaaatttttgcctccttatgctccttggtctttctgcaagtgctgctacggcgaccattttcccgcaatgctcgcaagctcctatagcttcccttcttcccccgtacctctcaccagcggtgtcttcggtatgtgaaaacccaattcttcaaccctacaggatccaacaggcaatcgcagctggcatcttacctttatcacccttgttcctccaacaatcatcagccctattacaacagttacctttggtgcatttattggcacaaaacatcagggcacaacaactacaacaacttgtgctagcaaaccttgctgcctactctcagcaacagcagtttcttccattcaaccaactaggttcattgaactctgcttcttatttgcaacaacaacaactaccattcagccagctacctgctgcctacccccagcaatttcttccattcaaccaactagcagcattgaactctcctgcttatttacagcagcaacaactactaccattcagccagctagctggtgtgagccctgctaccttcttgacacaaccac

SEQ ID NO: 6356 - DNA, 618 bp, Zea mays
  Clone ID: LIB3061-065-Q1-K6-C9
tcgggccgtcagcctagcaattagctcatcgactccagatggagaactcgacaccatgaaggtgctgatcgttgcccttgctctcctggcgctcgctgcgagcgccgcctccagtacaagcggcggctgtggctgccagacaccaccgtttcatctaccgcctccgttctatatgccgcctccgttctatctgccgccgcagcagcagccgcagccatggcaataccccactcaaccaccgcagctaagcccgtgccagcagttcggatcctgcggcgtcggcagcgtcggcagcccgttcctgggccagtgcgtcgagttcctgaggcaccagtgcagcccggcggcgacgccctacggctcgccacagtgccaggcgctgcagcagcagtgctgccaccagatcaggcaggtggagccgctgcaccggtaccaggcgacatacggtgtggtcctgcagtccttcctgcagcagcagccgcagggcgagctcgcggcgctgatggcggcccaggtagcgcagcagctgacggcgatgtgcggtctgcagctgcagcagccaggtccctgcccttgcaacgcagctgccggcggtgtctactactgaggaaactatgt

SEQ ID NO: 6357 - DNA, 331 bp, Zea mays
  Clone ID: LIB3061-065-Q1-K6-D1
attggccgcactgaacctcgctgcttatttgcagcagcaaatattactaccatttagccagctagctgcagcaagccgtgcttccttcttgacacagcaacagttgctgcctttctaccagcagtttgcggctaaccccgcaaccctcttacaactacaacaattgttgccctttgtccaacttgctttgacaaacccagcagcctcctaccaacaacacatcattggtggtgccctcttttagattgcttattagttgtaattcaataataaagttttttggatgatgtatgtggccaaccagaaataagaagttacatttccagattct

SEQ ID NO: 6358 - DNA, 612 bp, Zea mays
  Clone ID: LIB3061-065-Q1-K6-D10
tgtacatagtgaatacactagcaacatcttaagcaccaatgggagccaagattttttccctccttgccctccttgctctttcagcaagcgctgctacctctactattattccacaatgctcacaacaatacctctctccggtgacagccgcgggatttcaacacccaactatacaatcctacatgctacatgaggccatcgtagcaagcatcttacggtcattagcattaaccctccaacagccatatgccctattgcaacaaccatccttagtgcatctgtatctccaaagaatcgcgacacaacaactacaacaacagttgctaccaacaatcaatcaagtagttgcagcgaaccttgctgcttatctccagcaacaacaatttcttccattcaatcaactagctggggtgaaccctgctgtctacttgcaggcacaacaactactaccatttaaccaacttgtcgggagccctgatgccttcttactgcaacaacagcttctgccattccatctgcaagctgtggaaaacattgcttctttcttgcgacaacaacaattgttgccattttacccacaggttgtgggaaacattaatgccttcttgcaac

SEQ ID NO: 6359 - DNA, 175 bp, Zea mays
  unsure (1)..(175): unsure at all n locations; Clone ID: LIB3061-065-Q1-K6-D12
ctaanatttcggggcaatatgtaatggctatgagccggtaccatcctctggtaaaacaagccactcttcctttcgccaaggaaaaaaggcggctcgctgggctagacttcgtgcagctgtggcagcctcagacatctttactctcccttatgagctatctggctattgtagcttt

SEQ ID NO: 6360 - DNA, 565 bp, Zea mays
  Clone ID: LIB3061-065-Q1-K6-D4
cacagcttgtgctagcaaacttgctgcctcatgtcagcaacagcagttgcttccattgaaccaactagcatgcatctgagacctctgccttcttattcgataccaactacgcaacatagaagcacagtactgttccaacaatgggagataacatgtttggcctccttatgctccttggtatttcagcaagtgctgataccgcgaccattttcccacaatgctcacaagctcctatagcttcccttcttcccccgttcctctcaccaacggcggcttccgtatggtgaaaacccaattcgtcaaccctacaggatccaacaggcaatcgcaacaagcaacttacctttatcacacctgttctttgaacaagcgacagccctatctctggcgcattcattggttcaaaccatcagggcagaacagtaacagcaactcctgctaccagtgatcagccaagtagctctggcaatactttccccctactatcagaaacatcaatttcttccattcaaccaactgtctatactgaaacctgctgcttatttgcaaggacaacaagtgctac

SEQ ID NO: 6361 - DNA, 621 bp, Zea mays
  unsure (1)..(621): unsure at all n locations; Clone ID: LIB3061-065-Q1-K6-D5
ntagnaagaccaatagtgtaccaacaatggcagctaaaatttttgcctccttatgctccttggtctttctgcaagtgctgctacggcgaccattttcccacaatgctcacaagctcctatagcttcccttcttcccccgtacctctcaccaacggtgtcttcggtatgtgaaaacccaattcttcaaccctacaggatccaacaggcaatcgcagctggcatcttacctttatcacccttgttcctccaacaatcatcagccctattacagcagttacctttggtgcatttattggcacaaaacatcagggcacaacaactacaacaacttgtgctagcaaaccttgctgcctactctcagcaacagcagtttcttccattcaaccaactagctgcattgaactctgcttcttatttgcaacaacaacaactaccattcagccagctatctgctgcctacccccagcaatttcttccattcaaccaactgacagcattgaactctcctgcttatttacagcagcaacaactactaccattcagccagctagctggtgtgagccctgctaccttcttgacacaaccacagttgttgccgttctaccagcacgctgcgcctaa

SEQ ID NO: 6362 - DNA, 500 bp, Zea mays
  Clone ID: LIB3061-065-Q1-K6-D8
tgagcacaacaactacaacaacttgtgctaggaaaccttgctgcctactctcagcaacagcagtttcttccattcaaccaactggctgcattgaactctgctgcttatttgcaacaacaactaccattcagtcagctagctgctgcctacccccagcaatttcttccattcaaccaactggcagcattgaactctgctgcttatttacaacagcaacagctaccaccattcagccagctagctgatgtgagccctgttgccttcttgacacaacaacagttgttgccgttctacctgcacgctgcgcctaacgctggcaccctcttacaactgcaacaattgctgccattcaaccaacttgctttgacaaacccaacaacgttctaccaacaacccatcattggcggtgccctcttttagattgcttatgagttatagttcaataatgaagttttttggatgatgtttgtggcttcccagaaataagaaagtacatttct

SEQ ID NO: 6363 - DNA, 505 bp, Zea mays
  unsure (1)..(505): unsure at all n locations; Clone ID: LIB3061-065-Q1-K6-D9
ttcgggcagccaagcacaagccgccgaggccgggcagtacgccaagnacaccgccgtctccggcaaggacaagtccagcggcgtcatccagcaggccactgagcaggtgaagagcgcggcggcgggcgccaagggacgcggtgatgagcacgctggggatgggcggggacgacaagcagggggacgccaacaccaacaccaacaaggactcctctaccatcaccagggatcactagacgcgtgtatgcacacgcacttggtccgatcctgtcgtccgtgaccctgtttgcttgttcgcgagtccagtatgggtttgtgcatgttttcagtgtcatggtttccttttctacgaatttggcgttgtaagttcgattcgcaggtacgttgctgtgttttttttctgcgccatcaggtgtctgtaaacgagtcgggcgggtttgagtgtcctttgttgtgataataaagttggtaaatcgtgattaatatatagcatgcgactgtcttg

SEQ ID NO: 6364 - DNA, 609 bp, Zea mays
  Clone ID: LIB3061-065-Q1-K6-E1
gcggtgtcttcggtatggtgaaaacccaattcttcaaccctacaggatccaacaggcaatcgcagctggcatcttacctttatcacccttgttcctccaacaatcatcagccctattacagcagttacctttggtgcatttattggcacaaaacatcagggcacaacaactacaacaacttgtgctagcaaaccttgctgcctactctcagcaacagcagtttcttccattcaaccaactagctgcattgaactctgcttcttatttgcaacaacaacaactaccattcagccagctacctgttgcctacccccaacaatttcttccattcaaccaactggcagcattgaactctcctgcttatttacagcagcaacaactactaccattcagccagctagctggtgtgagccctgctaccttcttgacacaaccacagttgtggccgttctaccagcacgctgcgcctaacgctggcaccctcttacaactgcaacaattgctgccattcaaccaacttgctttgacaaacctagcagtgttctaccaacaacccatcattggtggtgccctcttttagatttcttatgagttatagttcaataataa

SEQ ID NO: 6365 - DNA, 614 bp, Zea mays
  unsure (1)..(614): unsure at all n locations; Clone ID: LIB3061-065-Q1-K6-E10
tcttttggtttgtgctttctttctggcaaaattttaacttgtacccctngatttgttgattacagtactaactagtcagaagattaatgatgcgagctcctcttgcaggttgaggttgtaattagcttgctgcctgctagttttcatgctgccattgcaggagtatgcatagagttgaagaagcacatggtaacggcaagctatgttgatgaatccatgtcaaacttgagccaagctgccaaagatgcaggtgtaactatactttgtgaaatgggcctagatcctggcatagatcacttgatgtcaatgaagatgattgatgaagctcatgcacgaaagggaaaaataaaggcatttacatcttactgtggtggattgccatctccagctgcagcaaacaatccgcttgcctataaattcagttggaacccagctggtgcactccggtcagggaaaaatcctgcagtctacaaatttcttggtgagacgatccatgtagatggtcataacttgtatgaatcagcaaagaggctcagactacgagagcttccagcttttgctctggaacacttgccaaatcggaattccttgatatatggtgacctttatggtat

SEQ ID NO: 6366 - DNA, 595 bp, Zea mays
  unsure (1)..(595): unsure at all n locations; Clone ID: LIB3061-065-Q1-K6-E11
caactagcaacatagnaaagcacaatagtgtaccaacaatggcagccaaaaattttgcctccttatgctccttggtctttctgcaagtgctgctacggcgaccattttcccgcaatgctcgcaagctcctatagcttcccttcttcccccgtacctctcaccagcggtgtcttcggtatgtggaaaacccaattcttcaaccctacaggatccaacaggcaatcacagctggcatcttacctttatcacccttgttcctccaacaatcatcagccctattacatcagttacctttggtgcatttattggcacaaaacatcagggcacaacaactacaacaacttgtgctagcaaaccttgctgcctactctcagcaacagcagtttcttccattcaaccaactagctgcattgaactctgcttcttatttgcaacaacaacaactaccattcagccagctacctgctgcctacccccagcaatttcttccattcaaccaactggcagcattgaactctcctgcttatttacagcagcaacaactactaccattcagccagctagctggtgtgagccctgctaccttcttgataca

SEQ ID NO: 6367 - DNA, 571 bp, Zea mays
  unsure (1)..(571): unsure at all n locations; Clone ID: LIB3061-065-Q1-K6-E2
gctggtcagcaactacagtaggtccctgcttcatgaggcggagtggccagggatggccgacaagnaaactgagcattcgaagacaccgttcatcgcgagagttttcatgagcatttcaggttcctcacagaacacgttccctgacatcgatttcaccgaagaaggaacttctgcagctggaccaagcagtcctaagtcgctccgatgtctggcagagccaagagtggtcaggaggattagggttgtcgccgagaagactccgatccagcacgtccttcagcccccgacgatcgcctctttgcttgccattaccatcggcatggttcctgtcctgaaagattttgttttcggggctgatgcgccgctctcgttcttcaccgacagtttggagatcctagccgctgctgtggttccgtcggtgatgttgattctcggaggcatgctcgcggaaggcccaaaagacaacgccttgggcatgaggactatcatcggtatcattgtggccaggctcttggttctcccatgcattggcatcggtgttgtgaccctggcagacaggttgcatctgctc

SEQ ID NO: 6368 - DNA, 622 bp, Zea mays
  unsure (1)..(622): unsure at all n locations; Clone ID: LIB3061-065-Q1-K6-E3
caactagcaacatagnaagcacaatagtgtaccaacaatggcagccaaaatattttgcctccttatgctccttggtctttctgcaagtgctgctacggcgaccattttcccacaatgctcacaagctcctatagcttcccttcttcccccgtacctctcaccagcggtgtcttcggtatgtgaaaacccaattcttcaaccctataggatccaacaggcaatcgcagctggcatcttacctttatcacccttgttcctccaacaatcatcagccctattacagcagttacctttggtgcatttattggcacaaaacatcagggcacaacaactacaacaacttgtgctagcaaaccttgctgcctactctcagcaacaacagtttcttccattcaaccaactagctgcattgaactctgcttcttatttgcaacaacaacaactaccattcagccagctatctgctgcctacccccagcaatttcttccattcaaccaactgacagctttgaactctcctgcttatttacagcagcaacaactactaccattcagccagctagctggtgtgagccctgctaccttcttgacacaaccacaattgttgccgttctaccagcac

SEQ ID NO: 6369 - DNA, 606 bp, Zea mays
  Clone ID: LIB3061-065-Q1-K6-E4
caacacttgtgctagcaaaccttgctgcctactctcagcaacagcagtttcttccattcaaccaactagctgcattgaactctgcttcttattgagaccaactagcaacatagaaagcacaatagtgtaccaacaatggcagctaaaatattttgcctccttatgctccttggtctttctgcaagtgctgctacggcgaccattttcccacaatgctcacaagctcctatagcttcccttcttcccccgtacctctcaccaacggtgtcttcggtatgtgaaaacccaattcttcaaccctacaggatccaacaggcaatcgcaacaagcaacttacctttatcacacctgttctttcaacaatcgccagccctatctttggtgcagtcattggtacaaaccatcagggcagaacagttgcagcaactcgtgctaccagtgatcagccaagtagctctggcaaacctttccccctactctcagcaacaacaatttcttccattcaaccaactgtctatactgaaccctgctgcttatttgcagcaacaacaactactaccattcagccagctagctactgcctactctcagcagcaaacatttctt

SEQ ID NO: 6370 - DNA, 603 bp, Zea mays
  Clone ID: LIB3061-065-Q1-K6-E5
gcgttctgcttgtctcacacggggtctgctgcgtctggtggtggtgaaggggagaaattcgtgagatctgttccggatcaggcgtgcgagctcgggaatcaggggtttcacacatagcttcgtcgatttgaatttgatgtactaatggagtctaagggtggcaaaaagtctagcagtagtcgttccatgatgtatgaagctccccttggctacagcattgaggacgttcgacctgccggaggcgtgaagaagttccagtctgctgcttactccaactgcgcgaagaagccatcctgatatcccttttggcttcctcattctagtagtttaggatttcttttctgacactttgattctgaccaatctctctggcctgctgcttcctgataatcgaccagttccccagtcttgctccttgcactcctccctcctccatctccagcattgtgttctgattcacctgctccaatggctgttctttctgctgctgatgcttccccggtctcagctatcgggtttgagggctatgagaagcgccttgagatcacattctctgaggcacctgtctttgtggaccctcatgggcgtgttttgcgtgccctc

SEQ ID NO: 6371 - DNA, 603 bp, Zea mays
  unsure (1)..(603): unsure at all n locations; Clone ID: LIB3061-065-Q1-K6-E7
ggnacctcctcatccatgtgcacaggctgggcagcagataccgcagactgctaatgaatgttaaacaaataagcaccattccagccaaatggtgatggaacccagaggttagcacattgctttgcagatggtcttgaggctcgattggcaggcacagggagtcagctttaccgcaagcttatagcaaaacgtacaactgcctcagacatgcttaaagcttaccacctttaccttgcggcatgcccatttaagaggctttcacattttctttccaatcaaacaatcttgagtatgactaaacatgcatcaaaggtgcatatcattgacttcggcatttatttcggcttccaatggccatgcctaatcaggcgtctctccaagagggaaggtggtccacctgttctgcgcattactggaattgatgtacctcagccaggtttccgacctactgagagaattgaagagactggacaaaggcttgcagaatatgctgagaagttgaaggtgccttttgagtatcagggaatagcatctaagtgggaaaccatccgagttgaggatctcaaagttggcaaggacgaagttgtgattgttaattgccta

SEQ ID NO: 6372 - DNA, 608 bp, Zea mays
  Clone ID: LIB3061-065-Q1-K6-E8
agacgcagcacatagaagtagaatccattagcaacaatagagcaacaatggcgaccaagatattttccctccttatgctccttgctctttctacatgtgttgctaacgcgacaattttccctcaatgctcacaagctcctatagcttcccttcttcccccataccttccatcaattatagcttcagtatgtgaaaacccagctcttcaaccatataggcttcaacaagcaatcgcagcaagcaacatacctttatcgcccttgttgtttcaacaatcaccagccctatctttggtgcagtcattggtacaaaccatcagggcacaacagctgcagcaactcgtgctacctgtgatcaaccaagtagctctggcaaacctttctccctactctcagcaacaacaatttcttccattcaaccaactgtctacactgaaccctgctgcttatttgcagcaacaactattaccatttagccagctagctactgcctactctcagcaacaacaacttcttccatttaaccaattggccgcactgaaccccgctgcttatttgcagcagcaaatactactgccatttagcgagctagctgcagcaagtcgtgct

SEQ ID NO: 6373 - DNA, 589 bp, Zea mays
  unsure (1)..(589): unsure at all n locations; Clone ID: LIB3061-065-Q1-K6-F1
taaagnataatatcttgatgtcctcgcagtttgtccaatagatctcctcgccgcctcacccgtctcctcctccgcagcttccccgcgatcccgaccatggagggcgacggtaccaaccttgatgcggcgatagagtcgctcctgaatgtcgagaagcagatgaggctggccggagatgtcgccggcactcggaaggccgtcatcgacatcgtcgagctctgctacaaggccggcgcgtggaagacgctaaacgaccagatcgttctcctatctaagaggagaggccagcttaagcaggctattactgctatggttcagaaagcaatggagtacattgatttgacaccaggcattgacacaagcatcgagctaataaaaacactgagcagtgtctctgctggcaaaatctatgttgagatagagagagcaagattgatcaaaaggcttgcaaaaattaaagaggagcagggacaaatttacgaggctgctgatttgatgcaagaagttgctgttgaaacatttggctctatggcaaagacggagaaaattgctttcattcttgagcaggtccggctatgcctggatcggc

SEQ ID NO: 6374 - DNA, 598 bp, Zea mays
  unsure (1)..(598): unsure at all n locations; Clone ID: LIB3061-065-Q1-K6-F10
gcgtttctttttgnagcattcagnaacacacctagcgagacgcactagcaacgacctaacaacaatggcttccaagacttatccctccttgcgcttcttgccctttttgtgagtgcaacaaatgcgttcattattccacaatgctcacttgctccgagtgccattattccacagttcctccctccaggtacttcaatgggcttcgaacacccagctgtgcaagcctataggctacaacaagcgcttgcggcgagcgtcttagaacaaccaattgcccaattacaacaacaatccttggcacatctaaccatacaaaccatcgcaacgcagcagcaacaagcactgagccacctagccgtggtgaaccctatcgcctacttgcaacaacagctgcttgcatccaacccacttgctttggcaaacgtagctgcataccaacaacaacaacagttgcaacagtttctaccagcgctcagtcaactagccatggtgaaccctatcgcctacctacaacagcaacaacttctttcatctagcccgctcgctatgggcaatgcacctacatacctgcaacaacagttgttgcaacaacagttgc

SEQ ID NO: 6375 - DNA, 615 bp, Zea mays
  unsure (1)..(615): unsure at all n locations; Clone ID: LIB3061-065-Q1-K6-F11
gtccaactagcaacatagnaaagcacaatagtgtaccaacaatggcagccaaaaattttgcctccttatgctccttggtctttctgcaagtgctgctacggcgaccattttcccgcaatgctcgcaagctcctatagcttcccttcttcccccgtacctctcaccagcggtgtcttcggtatgtgaaaacccaattcttcaaccctacaggatccaacaggcaatcgcagctggcatcttacctttatcacccttgttcctccaacaatcatcagccctattacaacagttacctttggtgcatttattggcacaaaacatcagggcacaacaactacaacaacttgtgctagcaaaccttgctgcctactctcagcaacagcagtttcttccattcaaccaactaggttcattgaactctgcttcttatttgcaacaacaacaactaccattcagccagctacctgctgcctacccccagcaatttcttccattcaaccaactagcagcattgaactctcctgcttatttacagcagcaacaactactaccattcagccagctagctggtgtgagccctgctaccttcttgacacaaccacagttgttgccgtt

SEQ ID NO: 6376 - DNA, 581 bp, Zea mays
  Clone ID: LIB3061-065-Q1-K6-F4
cgttgccctcgctctcctggctctcgctgcgagcgccacctccacgcatacaagcggcggctgcggctgccagccaccgccgccggttcatctaccgccgccggtgcatctgccacctccggttcacctgccacctccggtgcatctcccaccgccggtccacctgccgccgccggtccacctgccaccgccggtccatgtgccgccgccggttcatctgccgccgccaccatgccactaccctactcaaccgccccggcctcagcctcatccccagccacacccatgcccgtgccaacagccgcatccaagcccgtgccagctgcagggaacctgcggcgttggcagcaccccgatcctgggccagtgcgtcgagttcctgaggcatcagtgcagcccgacggcgacgccctactgctcgcctcagtgccagtcgttgcggcagcagtgttgccagcagctcaggcaggtggagccgcagcaccggtaccaggcgatcttcggcttggtcctccagtccatcctgcagcagcagccgcaaagcgggcaggtcgcggggctgttggcggcgcagatagcgc

SEQ ID NO: 6377 - DNA, 170 bp, Zea mays
  Clone ID: LIB3061-065-Q1-K6-F5
tctagtccacatagatgcacctggtgtgaagcgagctcaagaatacattcggcgacctgtagcggcagacactttcgggctgtgctgttacggcgaccatgcatacgccatgttcgttggatctgagaccttcggtgcttctaccacaggccataccactggtgtcttcg

SEQ ID NO: 6378 - DNA, 605 bp, Zea mays
  unsure (1)..(605): unsure at all n locations; Clone ID: LIB3061-065-Q1-K6-F6
tagcaacatagnaaagcacaatagtgtaccaacaatggcagccaaaatattttgcctccttatgctccttggtctttctgcaagtgctgctacggcgaccattttcccgcaatgctcgcaagctcctatagcttcccttcttcccccgtacctctcaccagcggtgtcttcggtatgtgaaaacccaattcttcaaccctacaggatccaacaggcaatcacagctggcatcttacctttatcacccttgttcctccaacaatcatcagccctattacatcagttacctttggtgcatttattggcacaaaacatcagggcacaacaactacaacaacttgtgctagcaaaccttgctgcctactctcagcaacagcagtttcttccattcaaccaactagctgcattgaactctgcttcttatttgcaacaacaacaactaccattcagccagctacctgctgcctacccccagcaatttcttccattcaaccaactggcagcattgaactctcctgcttatttacagcagcaacaactactaccattcagccagctagctggtgtgagccctgctaccttcttgatacaaccacagttgttgc

SEQ ID NO: 6379 - DNA, 525 bp, Zea mays
  Clone ID: LIB3061-065-Q1-K6-F7
tacagctgcagcaactcgtgctacctgtgatcaaccaagtagctctggcaaacctttctccctactctcagcaacaacaatttcttccattcaaccaactgtctacactgaaccctgctgcttatttgcagcaacaactattaccatttagccagctagctactgcctactctcagcaacaacaacttcttccatttaaccaattggccgcactgaaccccgctgcttatttgcagcagcaaatactactgccatttagcgagctagctgcagcaagtcgtgcttccttcttgacacagcaacagttgctgcctttctacaagcagtttgcggctaaccccgcaaccctcttacaactacaacaattgttgccctttgtccaacttgctttgacaaacccagcagcctcctaccaacaacacatcattggtggtgccctcttttagattgattattagttgtaattcaataataaagttttttggatgatgtatgtggccaaccagaaataagaagttacatttt

SEQ ID NO: 6380 - DNA, 151 bp, Zea mays
  Clone ID: LIB3061-065-Q1-K6-F8
gcgttcgctttgccaaacccacagtgttctaccaacaacccatcattggtggtgccctcttttagatttcttatgagttatagttcaataataaagttttttatctgatgtttgtggcttcccagaataagaaagtcatttctagattctt

SEQ ID NO: 6381 - DNA, 480 bp, Zea mays
  unsure (1)..(480): unsure at all n locations; Clone ID: LIB3061-065-Q1-K6-F9
naccaaaaccactgnaagcgacagnaaaataagtcggtaggtcatgaaggaagatgttggggaagaagatccacccagagcagctcaatgggcgtagcaatgcagagggcccccttactgcatgatgtttattcttgccgacaaatttgcttctctatttggttacattggatccctatggctcagattccttgccagagagaagcgtccatggacagtcgtcgacgatgtggaagttccgttttttgttgatgtgttttgtcgccagtgaagcgtgcatgaataccaaccattctgctttcccatgttctcttgcttatttgcatgtataaatcaactgttggggtgtgtgtctgtgatcttgtaagctgtcatcatctggcaccacggcctgcgctgcgctgcactgcactgccttgtcgtcgcggcatgccaaatatatatattctttattaataaaatatctgcttttacgtttgc

SEQ ID NO: 6382 - DNA, 605 bp, Zea mays
  Clone ID: LIB3061-065-Q1-K6-G11
aaagcacatagtgtaccaacaatggcggggaaaaattttgcctccttatgctccttggtctttctgcaagtgctgctacggcgaccattttcccgcaatgctcgcaagctcctatagcttcccttcttcccccgtacctctcaccagcggtgtcttcggtatgtgaaaacccattggggagccctacaggatccaacaggcaatcacagctggcatcttacctttatcacccttgttcctccaacaatcatcagccctattacatcagttacctttggtgcatttattggcacaaaacatcagggcacaacaactacaacaacttgtgctagcaaaccttgctgcctactctcagcaacagcagtttcttccattcaaccaactagctgcattgaactctgcttcttatttgcaacaacaacaactaccattcagccagctacctgctgcctacccccagcaatttcttccattcaaccaactggcagcattgaactctcctgcttatttacagcagcaacaactactaccattcagccagctagctggtgtgagccctgctaccttcttgatacaaccacagttgttgccgttctaccagcacg

SEQ ID NO: 6383 - DNA, 618 bp, Zea mays
  unsure (1)..(618): unsure at all n locations; Clone ID: LIB3061-065-Q1-K6-G12
tcttaacaagcaacatagnaagtggnaatccagtagcaacaatagagcaacaatggcgaccaagatactttccctccttatgctccttgctctttctgcatgtgttgctaacgcgacaattttccctcaatgctcacaagctcctatagcttcccttcttcccccataccttccatcaatgataggtgcagtatgtgaaaacccagctcttcaaccctataggctccaacaagcaatcgcagcaagcaacatacctttatcacccttgtttcaacaatcgccagccctatctttggtgcagtcattggtacaaaccatcaaggcacagcagctgcagcaactcgtgctacctgtgatcaaccaagtagctctggcaaacctttctccctactatcagcaacaacaatttcttccattcaaccaactatctacactgaaccctgctgcttatttgcagcaacaactattaccattcagccagctagctactgcctactctcatcaacaacaacttcttccatttaaccaattggccgcactgaacctcgctgcttatttgcagcagcaaatattactaccatttagccagctagctgcagcaagccgtgcttccttctt

SEQ ID NO: 6384 - DNA, 609 bp, Zea mays
  unsure (1)..(609): unsure at all n locations; Clone ID: LIB3061-065-Q1-K6-G4
cactgtttgacgagnatgattatattttagaaggaaaaaagctgaaggtttgctactctttattcacatggttcaagtggggtcaattctgaagctagtacaagtatcaaggtcccaaagtttactggaactatacatgtaaaaccatattgacactggaatggattgatggaattaagctaactgatgctgagcgcatcagcaaagccaatttgaacaggaaaagaatgatagatgagggtctctattgctcattgcgacaactgcttgaagaagggtttttccatgcagacccccaccctggtaatctagttgcaactgaaggtggatctctagcatattttgactttggtatgatgggagatattccgaggcactatcgtgtggggcttatacaaatgcttgtacattatgttaatcgggactccttaggcttggcgaatgacttccattcactaggatttgttcctgagggaacagatttacttgcagttgcagatgcgttgcggttttcctttggtgatgtcaggaggcaatcaaatgatttccagggcgtaatgaaccatttgtatgatgtgatgtatgaatttagtttctcccttccccctg

SEQ ID NO: 6385 - DNA, 494 bp, Zea mays
  Clone ID: LIB3061-065-Q1-K6-G5
cattgcaacatttctaccagcgctcagtcaactagccatggtgaaccctgccgcctacctacaacagcaacaactgatttcatctagccctctcgctgtggttaatgcacctacatacctgcaacaacagttgctgcaacagattgtaccagctctgactcagctagctgtggcaaaccctgctgcctacttgcaacagctgcttccattcaaccaactgactgtgtcgaactctgctgcgtacctacaacagcgacaacagttacttaatccactagcggtggctaacccattggtcgctgccttcctacagcagcaacaattgctgccatacaaccagttctctttgatgaaccctgccttgttgtggcagcaacccatcgttggaggtgccatcttttagattacatatgagatgtactcgataatggtgccctcatagcggcatgtgtttcctagaaataatcaatatattgattgagatttatctcgaa

SEQ ID NO: 6386 - DNA, 611 bp, Zea mays
  unsure (1)..(611): unsure at all n locations; Clone ID: LIB3061-065-Q1-K6-G7
taaggatatgctgaaaanaacagaacaatgatttgtccagaagtgataatggcaaggaagatgttaccgtgcatccaaaaacaatggaagtttctggtaaagatgcttacgtagtgaagacatctgatccaccagttcaaccccatgtgccaaaaaggatagaccaaatgatgttgaggatgacgatttactcatttcagtgaataatgttaacatagcgccaaatgagcatgccgaggtggttcccacaacatttgctgccatgacttatgaatcagatttgcaagatgttccaagagaaagcacctctgatgattcagctccaaaagtggtatgttgccaacaaaagcttttggaaaacacaggagatgattctggtaaaatcgtagaggtggttcaagattcaggagatatattgtctgtgactccacatggtcttcagatggcacacaatctatacccccctgacaataaattgcataaaccagatttgaagaaggaagcttttgctgatcaatcttccgctcttgggaattgtttaaaagattttgttattccagagcagtcttacatctggcagggtgggtttgaggtttcaggacatggaaact

SEQ ID NO: 6387 - DNA, 610 bp, Zea mays
  Clone ID: LIB3061-065-Q1-K6-G8
tcgcaagcgaacacattagcaacaacctaacaacaatggctaccaagatttatccctccttgcgcttcttgcgctttttgcgagcgcaacaaatgcgttcattattccacaatgctcacttgctccaagttccattattacacagttcctcccaccagttacttcaatgggcttcgaacacccagctgtgcaagcctataggctacaacaagcaattgcggcgagcgtcttacaacaaccaatttcccagttgcaacaacaatccttggcacatctaacaatacaaaccatcgcaacgcaacagcaacaacaattcctaccagcactgagccacctagccatggtgaaccctgccgcctacttgcaacagcagttgcttgcatcaaacccacttgctctggcaaacgtagttgcaaaccagccacaacaacagctgcaacagtttctgccagcgctcagtcaactagccatggtgaaccctgccgcctacctacaacagcaacaactgctttcatctagcccgctcgctgtggccaatgcacctacatacctgcaacaacaattgttgcaacagattgtaccagctctgactcagctagttgtggcaaac

SEQ ID NO: 6388 - DNA, 603 bp, Zea mays
  Clone ID: LIB3061-065-Q1-K6-H1
ggcaatcgcagcaggcatcttacctttatcacccttgttcctccaacaaccgtcagccctattacagcagttacctttggtgcatttgttggcacaaaacatcaaggcacaacaactacaacaacttgtgctaggaaaccttgctgcctactctcagcaacagcagtttcttccattcaaccaactggctgcattgaactctgctgcttatttgcaacaacaactaccattcagtcagctagctgctgcctacccccagcaatttcttccattcaaccaactggcagcattgaactctgctgcttatttacaacagcaacagctaccaccattcagccagctagctgatgtgagccctgttgccttcttgacacaacaacagttgttgccgttctacctgcacgctgcgcctaacgctggcaccctcttacaactgcaacaattgctgccattcaaccaacttgctttgacaaacccaacagcgttctaccaacaacccatcattggtggtgccctcttttagattgcttatgagttatacttcaataatgaagttttttggatgatgtttgtggcttcccagaaataagaaggtacatttct

SEQ ID NO: 6389 - DNA, 627 bp, Zea mays
  Clone ID: LIB3061-065-Q1-K6-H10
gcgttctctccgatcgccctccgctcgctccaccggggggggggggcgctcatctccccctaacctcccccgctcgcgattcccgaggcgaggtgccacccaccgcagatttcttccgacggacggttggctcgctcaccccctacttcgctgatcggatcgcgtgctgcccgaggtagaggtgaggaggaggcatagttgtttgacttagcctgccttagctatttcttgaagctaagggaaataataattggtgttatggcatttagaaatatggtttgcactccccaagtcattaatcttacatcagactcagagagagggcaagctcaaggaggcaatggtagtgagatatctgagcaaggtgcacaacatgctgtcagagttgtaggaaatgcaatgaacattggtctctctggtgtgcgaagttactatgatatgagcataaatcatcaccatcagtctgttcataacccacccccgaatttaggtgttgattctggttttgtcttcgcatcaaatatgtacaatccctgcatgtcatcaacatcaatgaacagacatgtttctcatgctcagagctttggatcagggaatcaagtgttggcctcaaaaccaagtcccagg

SEQ ID NO: 6390 - DNA, 605 bp, Zea mays
  Clone ID: LIB3061-065-Q1-K6-H11
cgttctatgaccaatatgtaccaacaatggcagggagagggtgtgggcctccttatgctccttggtatttctgcaagtgctgctacggcgaccattttcccgcaatgctcacaagctcctatagcttcccttcttcccccgtacctctcaccagcggtgtcttcggtatgtggaaaacccaatggggggggcgtgacagatccaacaggcaatcgcagctggcatcttacctttatcacccttgttcctccaacaatcatcagccctattacagcagttacctttggtgcatttattggcacaaaacatcagggcacaacaactacaacaacttgtgctagcaaaccttgctgcctactctcagcaacagcagtttcttccattcaaccaactagctgcattgaactctgcttcttatttgcaacaacaacaactaccattcagccagctacctgttgcctacccccaacaatttcttccattcaaccaactggcagcattgaactctcctgcttatttacagcagcaacaactactaccattcagccagctagctggtgtgagccctgctaccttcttgacacaaccacagttgttgccgttct

SEQ ID NO: 6391 - DNA, 600 bp, Zea mays
  unsure (1)..(600): unsure at all n locations; Clone ID: LIB3061-065-Q1-K6-H12
ttttcctttctcctcacgcctacaacgtgtggcatgccatgccgttccgtcctcccccattccctcgtagtaccaccgccggtcgtcactcgtcacccatctcaagcctcgtctcatgtcatgcaacgcagcgtgcggcggcgccacacacaatcacagccccggccggtcggctcgcgctacagcgatgtatcgtcctcattctcattcccctgaccactgaccacctctctccccggccggccgtctctcccgagctaaactgtggcaggcagctagctgttacgagctagctccgcgcgcgctaggcggcgtcacgtacgtgctgtgatcaactgtctagttctctactcgacgcggacaccctgacccgcgcgcgcgccgtggccatggtcgccgccgccgccgccatccttctggtcctgcccgtcgtcgccgtcctcgcgtcgtcgtccgcggcggcggacgggtcgttcataacgtgggacgacctcagcaccccgtccgccgccgncgtgcatggcggcgtgaaagcggccagcgggggaggcgcccgcgagctggacacgatcgtggtgggcgcagacgggacggggcact

SEQ ID NO: 6392 - DNA, 602 bp, Zea mays
  unsure (1)..(602): unsure at all n locations; Clone ID: LIB3061-065-Q1-K6-H2
gtccaactagcaacatagnaaagcacaatagtgtaccaacaatggcagccaaaatttttgcctccttatgctccttggtctttctgcaagtgctgctacggcgaccattttcccgcaatgctcgcaagctcctatagcttcccttcttcccccgtacctctcaccagcggtgtcttcggtatgtgaaaacccaattcttcaaccctacaggatccaacaggcaatcgcagctggcatcttacctttatcacccttgttcctccaacaatcatcagccctattacaacagttacctttggtgcatttattggcacaaaacatcagggcacaacaactacaacaacttgtgctagcaaaccttgctgcctactctcagcaacagcagtttcttccattcaaccaactaggttcattgaactctgcttcttatttgcaacaacaacaactaccattcagccagctacctgctgcctacccccagcaatttcttccattcaaccaactagcagcattgaactctcctgcttatttacagcagcaacaactactaccattcagccagctagctggtgtgagccctgctaccttcttgacacaaccac

SEQ ID NO: 6393 - DNA, 602 bp, Zea mays
  Clone ID: LIB3061-065-Q1-K6-H3
gccactcgcaacataccaagcacactagtgtaccaacaatggcagccaaaatattttgcctccttatgctccttggtctttctgcaagtgctgctacggcaaccatttccccgccatagctcgcaagctcctatagcttgccttcttcccccgtacctctcaccagcggcgtcttcggtctggtgaaaacccaattcttcaaccctacaggatccaacaggcaatcggagctggcatcttacctttatcacccttgctcctccaacaatcatcaggcctattacaacagctacctttggtgcatttattggcacaaaacatcatggcacaacaactacaacaacttgtgctagcataccttgctgcctactctcagcaacagcagtttcttccattcaaccaactaggttcattgaactctgcttcttatttgcaacaacaacaactaccattcagccagctacctgctgcctacccccagcaatttcttccattcaaccaactagcagcattgaactctcctgcttatttacagcagcaacaactactaccattcagccagctagctggtgtgagccctgctaccttcttgacacaaccac

SEQ ID NO: 6394 - DNA, 518 bp, Zea mays
  unsure (1)..(518): unsure at all n locations; Clone ID: LIB3061-065-Q1-K6-H4
tgcaacaacaacaactaccattcagccaggtgcctgctgcctacccccagcaatttcttccattcaaccaactggcagcattgaactctcctgcttatttacagcagcaacaactactaccattcagccagctagctggtgtgagccctgctaccttcttgatacaaccacagttgttgccgttctaccagcacgctgcgcctaacgctggcaccctcttacaactgcaacaattgctgccattcaaccaacttgctttgacaaacccagcagcgttctaccaacaacccatcattggtggtgccctcttttagatttcttatgagttatagttcaataataaagttttttgtctgaaaaaaaaaaaaaaaaaaaaaaaaaaaaaaaaaaaaaaaaaaaaaaaatttaaanaaaaaaaaaaaaaaaaaaaaaaaattttattttanaaccanaaaaaaaaaaaaaaaaaaaaaaaaaaatttttnaaaaaaaaaaaaaaaaaagggggggccggttta

SEQ ID NO: 6395 - DNA, 597 bp, Zea mays
  Clone ID: LIB3061-065-Q1-K6-H5
caaaaccacaccaagcgaacgcactagcaacgacctaacaccaatggctaccaagatattagccctccttgcgcttcttgcccttttagtgagcgcaacaaatgcgttcattattccacagtgctcacttgctcctagtgccattattccacagttcctcccaccagttacttcaatgggcttcgaacatccagccgtgcaagcctacaggctacaactagcgcttgcggcgagcgccttacaacaaccaattgcccaattgcaacaacaatccttggcacatctaaccctacaaaccattgcaacgcaacaacaacaacaacaacagtttctgccatcactgagccacctagccgtggtgaaccctgtcacctacttgcaacagcagctgcttgcatccaacccacttgctctggcgaacgtagctgcataccagcaacaacaacagctgcaacagtttatgccagtgctcagtcaactagccatggtgaaccctgccgtctacctacaactactttcatctagcccgctcgcggtgggcaatgcacctacgtacctacaacaacagttgctgcaacaaattgtaccagctctgac

SEQ ID NO: 6396 - DNA, 601 bp, Zea mays
  unsure (1)..(601): unsure at all n locations; Clone ID: LIB3061-065-Q1-K6-H8
gcgttcggcagcacatanaagtagaaccatagcaacaatagagcaacaatggcgaccaagatattttccctccttatgctccttgctctttctacatgtgttgctaacgcgacaattttccctcaatgctcacaagctcctatagcttcccttcttcccccataccttccatcaattatagcttcaggatgtgaaaacccagctcttcaaccatataggcttcaacaagcaatcgcagcaagcaacatacctttatcgcccttgttgtttcaacaatcaccagccctatctttggtgcagtcattggtacaaaccatcagggcacaacagctgcagcaactcgtgctacctgtgatcaaccaagtagctctggcaaacctttctccctactctcagcaacaacaatttcttccattcaaccaactgtctacactgaaccctgctgcttatttgcagcaacaactattaccatttagccagctagctactgcctactctcagcaacaacaacttcttccatttaaccaattggccgcactgaaccccgctgcttatttgcagcagcaaatactactgccatttagcgagctagctgcagcaa

SEQ ID NO: 6397 - DNA, 299 bp, Zea mays
  Clone ID: LIB3061-065-Q1-K6-H9
ctggtaacgaaatcctcagattagcgacgggagcaattcctggtacacgtgactatgataaacagcagtgcatggatctgaacctgctgcctcctcaagttcaacaccctgtatatggctggtgatcaaaccagttcacattgaactatgtatagtcgtaggatgtacatattaagtgatccagttcctgtgtactgtcaggagcatgaacttttgtagagtcttggtaattcctagggtccatggggaacctgccttgttgcactctttgattgtaattatattccttttcactatcc

SEQ ID NO: 6398 - DNA, 497 bp, Zea mays
  Clone ID: LIB3061-065-Q1-N6-A1
ctggaaaatgtaacttcttatttctggttggccacatacatcatccaaaaaatttattattgaattacaactaataagcaatctaaaagagggccccaccaatgatgtgttgttggtaggaggccgctcggtctgtcaaagcaagttggacaaagggcaacaattgttgtagttgtaagagggttgcggggttagccgcaaactgctggtaaaaaggcagcaactgttgctgtgtcaaaaaggaagcacggtttgctgcagctagctggctaaatggtagtagtatttgctgctgcaaataagcagcggggttcagtgcggccaattggttaaatggaaaaagttgttgttgttgaaagtaggcagtaactagctggctgaatggtaatagttgttgctgcaaataagcagcagggttcagtgtaaacagttggttgaatggaaaaaatgttgttgcttgaaatagggagaaagtttgccaaagctacttggttgat

SEQ ID NO: 6399 - DNA, 546 bp, Zea mays
  Clone ID: LIB3061-065-Q1-N6-A10
ggggttgtttttttttttttttttttttttttttttttttttttagacatgcagtttagccataacaaacatgttttggttacaacaatctggtcatttttttcctggcgaaatcactcgggggatcaaaaactttaaagctatgtagttgaagagggtgaatcaacacccagtttaaccatgagcaagctttgtttaattattacaggctacgagtacttattcaggcggatcactctgggggtgggcctactggtgggggctgccagcttgaccttgttgggagctgccactgccagcaggagtaagcacagccagcttatgcttcctaccggtcttgagctttggaggttcctccatggggatgggataccagctggggatgacgggggccggcaagtcgctcaagacggggttttttccggggacgtggctgaccatggggtcagggtttgttttaaaggggatgtactggaagccttcttcctgggccttgggggcgacgaggtagccctggggtaccatgagcagctgccccccacgggg

SEQ ID NO: 6400 - DNA, 550 bp, Zea mays
  Clone ID: LIB3061-065-Q1-N6-A11
gcgggtgttgggggttttagaaatgtactttcttatttctgggacgccacaaactcatccaaaaacttcattattgaactataactcataagcaatctaaaagaggcaccaccaatgatgggttgttggtagaacactgttgagtttgtcaagaggggggggggtgaatggcagcaattgttgcagttgtaagagggtgccagcgttaggcatagcgtgcaggtagaacggcaacaactgttgttgtgtcaagaaggcagcagggctcacatcagctagctggctgaatggtagtagttgttgctgctgtaaataagcagcagagttcaatgctgctagttggttgaatggaagaaattgctgggggtaggcagcaactagctggctgaatggtaattgttgttgcaaataagcagcagagttcaatgcagccagttggttgaatggaagaaactgatgttgctgagagtatgcagcaaggtttgctagcacaagttgttgtagttgttgtgccctgatgttttgtgccaccaaatggaccaaaggtaac

SEQ ID NO: 6401 - DNA, 558 bp, Zea mays
  Clone ID: LIB3061-065-Q1-N6-A12
ggggggggggttttttttttttttttttagaatctgggaaagtaacttcttatttctgggtggccacatacatcatccaaaaactttattattgaattacaactaataatcaatctaaaagagggcaccaccaatgatgtgttgttgggggggggggggggggtttgtcaaagcaagttggacaaagggcaacaattgttgtagttgtaagagggttgcggggttagccgcaaactgcttgtagaaaggcagcaactgttgctgtgtcaagaaggaagcacgacttgctgcagctagctcgctaaatggcagtagtatttgctgctgcaaataagcagcggggttcagtgcggccaattggttaaatggaagaagttgttgttgctgagagtaggcagtagctagctggctaaatggtaatagttgttgctgcaaataagcagcagggttcaatgtaaacagttggttgaatggaagaaattgttgttgctgaaagtagggagaaaggtttgccaaagctacttggttgatcacaggtagcacgagttgctgcagctg

SEQ ID NO: 6402 - DNA, 429 bp, Zea mays
  Clone ID: LIB3061-065-Q1-N6-A2
ggggaaagggaaccttttattttggggggggccaaaacaaaagccaaaaaatttattttgggaaaacaacaaaaaagcaaacaaaaaaaggggccccccaaaggggggggggggggaaaagggggggggggttgaaaaaaaaagggggaaaaaggggaaaaacgggggcagtggaaaaaggggggggggggaaaccaaaaacgggggggaaaaaggaaacaattgggggtgttaaaaaaaggaagggggggttggtggaactagggggccaaaggggggaaaaatttggggggggaaaaaaaaaaggggggtaaggggggccaatggggaaaaaggaaaaaaatttgctgttgaaaggaggcaaaacctacctggctaaaagggaaaaattggggggggtgaaaaaaaaaagcgggggtcaagggaaac

SEQ ID NO: 6403 - DNA, 490 bp, Zea mays
  Clone ID: LIB3061-065-Q1-N6-A3
gcgcaagcgccgcgtggtcacgcgctttcgcacacggtcgggctggccggccggatgtcggtgcggctgcagccgaaccatccgaccgatgacgtgaagggcatcgccgcatcgatgctcgacgggctgatgtacggctgcggcgacgcgatgatcggcatcaacccggcgaccgacagcctggctgcgatcgtgaagctgctcgcgatgatcgacggcttccgcgagcgctacggcgtgccgacgcagtcgtgtgtgctcacgcacgtgaccaacacgatcgcggcggtcgagaagggcgcgccggtcgatctggtgttccagtcgatcgcgggcaccgagaaggcgaacgcgagcttgcatctcgctcgcgctgctcggcgaggcgcgcgaggccgcgttgtcgctgaagcgcggcaccgtcggcaacaacctgatgtacttcgagacgggccagggcagcgcgctttccgcgaacgcgcatcacggc

SEQ ID NO: 6404 - DNA, 521 bp, Zea mays
  Clone ID: LIB3061-065-Q1-N6-A4
caatggttcattcaggtcattgctcacactgccacccatggtgatgggtgacactacgttactcatcgccgctaaatgagtaaactagcgagctaggtagctagtcagcggctccattacattattactacagtacatagtttcctcagtagtagacaccgccggcagctgcgttgcaagggcagggacctggctgctgcagctgcaggccgcacatcgccgtcagctgctgcgctacctgggccgccatcagcgccgcgagctcgccctgcggctgctgctgcaggaaggactgcaggaccacaccgtatgtcgcctggtaccggtgcagcggctccacctgcctgatctggtggcagcactgctgctgcagcgcctggcactgtggcgagccgtagggcgtcgccgccgggctgcactggtgcctcaggaactcgacgcactggcccaggaacgggctgccgacgctgccgacgccgcaggatccgaactgctggcacgggcttagctgcggtggttgc

SEQ ID NO: 6405 - DNA, 514 bp, Zea mays
  Clone ID: LIB3061-065-Q1-N6-A5
gaactgaatccatctggtgagtttctattggaaaaaaaaattttctgtccgttacaggatcctaaccaattgttacaggaacccaaaatcaccagcacaagaccctgcatctaagctcagtttcccaccctcggcaaaacaggtagaccagaccgccattccgagcacccccagcttccctcgagccctgagacttcggtggcatgtaaccaaaggccaaactatgttatatacacggtggtgtgccgccatcctcctaatccacgttctggatctcgcccatcattatacggttgctggccacgttgaaccccaacactgcggcactcaccttcttccccttcttcccctttttcttcccgccgccatccagatccgcgtctatgaccgtgcctcctctagctgcagcagcagggtttgcccgccctgcaccgtcaccacggctgctgggagcttggaaggccatgtggatcacatctgctgacaggaaggccttgtagttgaggaacttgtc

SEQ ID NO: 6406 - DNA, 448 bp, Zea mays
  Clone ID: LIB3061-065-Q1-N6-A7
aagttaaggggttttttggggggggggttttatttttttattatataattgggggggaaaggggggaaaaaaaaaaaaatccccttggacccaaggcaaatggggggaaaaaggggaagggggccccccaataaaaaaaaaaaccccccccaaaaaaaaccgcgggcccaaaaggaaaaaaaaaaaaaaggtaaaaacccccaaaacccaaaggcgggaaaaacccggcccaaatcccaaattgaaggaaaaacaccccccccgggggggtcccccgtaaaaaattaaggaaaaccggggggtggggttttaaaaaccccagcaccttggggggaaaaaagggcccccttttaaaaggggaaaaaaccaaaaaggggccgaaaaaagaaaacccccaaaaaaaagggggggggggccccttttttaaaaaaaaacctcctttaggaaa

SEQ ID NO: 6407 - DNA, 72 bp, Zea mays
  Clone ID: LIB3061-065-Q1-N6-A9
ggggggggggttttttttttttttttttttttttttttttttttttttttttttttttttttttttttcggc

SEQ ID NO: 6408 - DNA, 543 bp, Zea mays
  unsure (1)..(543): unsure at all n locations; Clone ID: LIB3061-065-Q1-N6-B1
ggtttgtttggggtttttttttttttttttttttttttttttttttttttttttttttttttttttttttttttttttttttttttttccaaaaaaccttttccccaaaaaaaaatcccttcccattaaagggggtaaaaaagggaatgggggggggggggccccgggggggggggggaccccccggtacccaaggccggaaaaggggggaacaaggtaaggccctagggggggggggggggggggcccattacaatataacaacgggaaaagggttcccaagggggaaaccccgcgggggggggggtgggggggggggggaccggggggggggagggggaaaccgaaaaaggccgggggggggggggcaacggggggcggaaaaagggccgggggggccccctgggggggggggggngggaggggcgggaggacccccccggaggggggcggggcccgggggggggggtcccccggccggaccgggggggagaaaggggggggaagggccgggcccgggggggggccccggggccccccccc

SEQ ID NO: 6409 - DNA, 526 bp, Zea mays
  Clone ID: LIB3061-065-Q1-N6-B10
cagtaaaatgcactcttttccataaagcagcagagtgcacaagtaccattaccaggggaaatgtacattactcagtgaaacagcagctgagttcgagatatgaggagatggcaagcataaaccccaattcaaatccgttcccaacattgtcaccaacccaacgcgaagataaattattcactgcatgcaatacgccaagcacatgcacaagcccacatattacagaaccaaatgaggggcaaacttaagtgcccaatgaccaaaatagcattatgacaaacttagaagccctgttcgatcaggtaatcgccgagcctctccaccaccatattgcattgccctggagtcattggctcatcatagataccgataatcaaggacatgccagttttcttgatagtaatgcctccagtgcccttctttcctcggatgacaactccaggttcaccttggatcaccatgtacttcgtacctccaacaaaaagaccagttggtgcaagagttccaggttcatcaaagtccttta

SEQ ID NO: 6410 - DNA, 541 bp, Zea mays
  unsure (1)..(541): unsure at all n locations; Clone ID: LIB3061-065-Q1-N6-B11
tttanaaaaataattatcnaacacccttggggaccaatatcacattagaatctggaaatgtaacttcttatttctggttggccacatacatcatccaaaaactttattattgaattacaactaataatcaatctaaggggggggagggggagatgatgtgttgttggtaggaggctgctgggtttgtcaaagcaagttggacaaagggcaacaattgttgtagttgtaagagggttgcggggttagccgcaaactgcttgtagaaaggcagcaactgttgctgtgtcaagaaggaagcacgacttgctgcagctagctcgctaaatggcagtagtatttgctgctgcaaataagcagcggggttcagtgcggccaattggttaaatggaagaagttgttgttgctgagagtaggcagtagctagctggctaaatggtaatagttgttgctgcaaataagcagcagggttcagtgtagacagttggttgaatggaagaaattgttgttgctgagagtagggagaaaggtttgccagagctac

SEQ ID NO: 6411 - DNA, 553 bp, Zea mays
  unsure (1)..(553): unsure at all n locations; Clone ID: LIB3061-065-Q1-N6-B12
ggggggggttttattcatgaagaccacatttattgtttctgtgggcatcgcatttctgttttgtatacattattattgcagcacaaataagaaaatgagtgtggcaggccatatttcacacactcaactcancctcngcccctagggggtcggggaactgattccacctcggccatgtttacttcttccagagtgggtggattccacttcggattctgggccttgtcaactaaaacagcacgcacaccttcaacaaaatcgtttctaatcgacgacctcaaggcaatgcgatattccaatttcataacaccagccagcttagataaatagtgttcactagtcccatatgctgatgcaacttgagagaaatgcttctgtgttaaacaaagagaaaatggagcgcctttctcaattcctgctaaagcttcaatggcccattctgccactgcagcatcaccacttcggctacatttctttagctcttccacagattcagccactgatttatcaggactgaaagaagaaatgatatatggcaaaagcttttttagtt

SEQ ID NO: 6412 - DNA, 533 bp, Zea mays
  Clone ID: LIB3061-065-Q1-N6-B2
caacaaaatcactaaactgaatcaggtttcaaacaagcaaatacatgcagtctcaaatgcgacctttcaatacataggttcagaacatttgcggcagggctaaaaacataggcccacaggaagacaaagtaatgtagtgaggaatataaggtggtctatggcatccacacgggtcctcttaagcaaagcttccaggttgggctctcttggtcatctggtttgggaagggactccaataagcaggctccaaacttcaatgtcttggctgctttatcaagcaatctaaatcctaataaccatgacgctttccatagtgaagagaactatgaccagataacccactattagaggagcgagcactgtacccgctgtaagccccatatcctcttccaggtgcctgggagccgccataacttgcatagctgtcagaaggaatcgtgtcatccgatgtacgaaaaccacttgaatatagatagtgcccaacaggcttggtgtctctgcctagatattttggttcatccgaaacaccagca

SEQ ID NO: 6413 - DNA, 487 bp, Zea mays
  Clone ID: LIB3061-065-Q1-N6-B4
cgagaaaaatctcaatcaatatattgattatttttaggaaacacatgccgctatgagggccccattatcgagtccatctcatatgtaatctaaaagatggcccccccaacgatgggttgctgctgtaggaaggcagcgaccaatgggttacccaccgctaggggattaagtaactgttgccgctgttgtaggtccccagcaaagttcgacacagccagttggttgaatggaagtagttgttgcaagtaggcagcagggtttgccacagctagctgagtaaaagctggtacaatttgttgcagcaactgttgttgcaacaactgttgttgcaggtatgtaggtgcattgcccatagcgagcgggctaaataaaaaaagttgttgctgttgtaggtaggcaatagggttcaccatggctagttgactgacccctggtaaaaactgttgcaactgttgttgttgttggaatgcagctacgtttgccaaac

SEQ ID NO: 6414 - DNA, 507 bp, Zea mays
  Clone ID: LIB3061-065-Q1-N6-B5
ggccacatacatcatccaaaaaatttattattgaattacaactaataatcaatctaaaagaggcaccaccaatgatgtgttgttggtaggaggctgctgggtttgtcaaagcaagttggacaaagggcaacaattgttgtagttgtaagagggttgcggggttagccgcaaactgcttgtaaaaaggcagcaactgttgctgtgtcaagaaggaagcacgacttgctgcagctagctcgctaaatggcagtagtatttgctgctgcaaataagcagcggggttcagtgcggccaattggttaaatggaaaaagttgttgttgctgaaagtaggcagtagctagctggctaaatggtaatagttgttgctgcaaataaacagcagggttcaatgtaaacagttggttgaatggaaaaaattgttgttgctgaaagtagggaaaaaggtttgccaaaactacttggttgatcacaggtagcacgagttgctgcaactgttgtgccctgc

SEQ ID NO: 6415 - DNA, 537 bp, Zea mays
  Clone ID: LIB3061-065-Q1-N6-B6
cagcaaaaaaaatttattattgaactataactcataagcaatctaaaagaggcaccaccaatgatgggttgttggtagaacactgctgggtttgtcaaagcaagttggtcgaatggcagcaattgttgcagttgtaagagggtgccaacgttaggcgcagtgtgcaggtagaacggcaacaaatgttgctgtgtcaagaaggcagcagggctcacagcagctagctggctgaatggtagtagttgttgttgttgtacataagcatgagagttcaatgctgccagttggttgaatggaagaaattgccgggggtaggcagcagctagctggctgaatggtagtagttgttgttgctgcaaataagcagcagagttcaatgcagctagttggttgaatggcagaaactgttgttgctgagagtaggcagcaaggtttgctagcacgagttgttgtagttgttgtgccctgatgttttgtgccaacaaatgcaccaaaggtaactgctgttgctgagagtaggcagcaaggtttgctagc

SEQ ID NO: 6416 - DNA, 293 bp, Zea mays
  Clone ID: LIB3061-065-Q1-N6-B7
caatcaatatattgattatttctaggaaacacatgtcggtatgagggcaccattgtcgagtacatctcatatgtaatctaaaagatggcacctccaacgatgggttgctgcaaggcagggttcatcaaagagaactggttgtatggcagcaattgttgttgctgctgcaggaaggtagcgaccaatgggttagccactgccaatggattaagtaactgttgtcgctgttgtaggtacgcagcagagtttgacacagccagttggttgaatggaagcaactgttgtaagtaggc

SEQ ID NO: 6417 - DNA, 538 bp, Zea mays
  Clone ID: LIB3061-065-Q1-N6-B8
agaaatgtactttcttatttctgggaagccacaaacatcagacaaaaactttattattgaactataactcataagaaatctaaaagagggcaccaccaatgatgggttgttggtagaacgctgctgggtttgtcaaagcaagttggttgaatggcagcaattgttgcagttgtaagagggtgccagcgttaggcgcagcgtgctggtagaacggcaacaactgtggttgtatcaagaaggtagcagggctcacaccagctagctggctgaatggtagtagttgttgctgctgtaaataagcaggagagttcaatgctgccagttggttgaatggaagaaattgctgggggtaggcagcaggtagctggctgaatggtagttgttgttgttgcaaataagaagcagagttcaatgcagctagttggttgaatggaagaaactgctgttgctgagagtaggcagcaaggtttgctagcacaagttgttgtagttgttgtgccctgatgttttgtgccaataaatgcaccaaaggtaactg

SEQ ID NO: 6418 - DNA, 503 bp, Zea mays
  Clone ID: LIB3061-065-Q1-N6-B9
gggtggtgttttttcaaaaatatatcgagaaaatctcaatcaatatattggattattttctaggaaaacacacgtcggtatgagggcaccattatcgagtacatctcatatgtaatctaaaaaaggcacctccaacgatgggttgctgcctggacaggacaggattcatcaaagagaactggttgtatggcagcaattgttgctgctgtaggaaggcggcgaccaatgggttagccactaccaatggattaagtaactgttgtcgctgttgtaggtacgcagcagagttcgacagagtcagttggttgaatggaagcagctgttgcaagtaggcaacagggtttgccacagctagttgagtcagagctggtacaatctgttgcaacaattgttgttgcaggtatgtaggtgcattgcccacagggagcgggctagatgaaagcagtggttgctggtggacgtaggcggcagggtccaccatgggtaggtgactgagcgtgggc

SEQ ID NO: 6419 - DNA, 452 bp, Zea mays
  Clone ID: LIB3061-065-Q1-N6-C1
aaggaacacccttggggaaccaatatcacattaaaatcgggaaagggaactttttattttggggggggcacaaacatcatccaaaaaatttattatggaattacaactaaaaagcaatctaaaagaagggcccccccaaggaggggttggggggagggggccgctcggtctgtcaaagcaagggggacaaagggcaacaattggtggagttgaaaaaggggtgggggggtagcccaaaactggtgggaaaaagggagaaactggtgctgggtaaaaaaggaagcacgggttggtggaactagctgggtaaaggggagaagtatttggtggtgaaaaaaagcaggggggttaaggggggccaattggttaaaaggaaaaagttgttgttggtgaaagtagggaaaaactagctgggtgaaggggaaaaggtggtggtgaaaaaaaacaggagg

SEQ ID NO: 6420 - DNA, 448 bp, Zea mays
  unsure (1)..(448): unsure at all n locations; Clone ID: LIB3061-065-Q1-N6-C11
gccggggggggtttttttatattgagataaatctcaatcaatatattgattatttctaggaaacacatgccggaatgagggcaccattatcgagtacatctcatatgtaatctaaaagaggcacctccaacgatgggttgctgcctcnacaagacgaggggggatcaaagagaactggttgtatggcagcaattgttgctgctgtaggaaggcagcgaccaatgggttagccactgctagtggattaagtaactgttgtcgctgttgtaggtacgcagcagagttcgacatagtcagttggttgaatggaagcagctgttgcaagtaggcagcagggtttgccacaactagctgagtcagagctggtacaatctgttgcaacaattgttgttgcaggtatgtaggtgcattggccacagcgagcgggctagatgaaagcagttgttgc

SEQ ID NO: 6421 - DNA, 547 bp, Zea mays
  Clone ID: LIB3061-065-Q1-N6-C12
ggggggggggggttttttaggaaaataattatcgaacacccttggggaccaatatcacattagaatctggaaatgtaacttcttatttctggttggccacatacatcatccaaaaactttattattgaattacaactaataatcaatctaaaggggggggccaccaatgatgtgttgttggtaggaggctgctgggtttgtcaaagcaagttggacaaagggcaacaattgttgtagttgtaagagggttgcggggttagccgcaaactgcttgtagaaaggcagcaactgttgctgtgtcaagaaggaagcacgacttgctgcagctagctcgctaaatggcagtagtatttgctgctgcaaataagcagcggggttcagtgcggccaattggttaaatggaagaagttgttgttgctgagagtaggcagtagctagctggctaaatggtaatagttgttgctgcaaataagcagcagggttcagtgtagacagttggttgaatggaagaaattgttgttgctgagagtagggagaaaggtttgcc

SEQ ID NO: 6422 - DNA, 515 bp, Zea mays
  Clone ID: LIB3061-065-Q1-N6-C2
aactaaaaagtctttcttatttgggagcccaaactcagacaaaaactttattattgaactataactcataagaaatctaaaagagggcaccaccaatgatgggttgttggtagaacgctgctgggtttgtcaaagcaagttggttgaatggcagcaattgttgcagttgtaagagggtgccagcgttaggcgcagcgtgctggtagaacggcaacaactgtggttgtatcaagaaggtagcagggctcacaccagctagctggctgaatggtagtagttgttgctgctgtaaataagcaggagagttcaatgctgccagttggttgaatggaagaaattgctgggggtaggcagcaggtagctggctgaatggtagttgttgttgttgcaaataagaagcagagttcaatgcagctagttggttgaatggaagaaactgctgttgctgagagtaggcagcaaggtttgctagcacaagttgttgtagttgttgtgccctgatgttttgtgccaat

SEQ ID NO: 6423 - DNA, 525 bp, Zea mays
  Clone ID: LIB3061-065-Q1-N6-C3
caattgttcattcaggtcattgctcacactgacactgccacccatggtgatgcgtgacacattattactcaatcatcgccgctaaatgactcaactagctagctagccagcggctatactacagcacatagtttcttcagtgggggacaccgccggcagcagcgtaggggcatggagtcggctgctgcaggccgcacatcgccgtcagttgctgcgctatctgcgccgccaacagccccgcgacctggccgctttgcggctgctgctgcaggatggactggaggaccaagccgaagatcgcctggtaccggtgctgcggctccacctgcctgagctgctggcaacactgctgccgcaacgactggcactgaggcgagcagtagggcgtcgccgtcgggctgcactgatgcctcagaaactcgacgcactggcccaggatcggggtgctgccaacgccgcaggttccctgcagctggcacgggcttggatgcggctgttggcacgggcatgggtgtggctggggat

SEQ ID NO: 6424 - DNA, 523 bp, Zea mays
  Clone ID: LIB3061-065-Q1-N6-C4
aagaactagaaagtactttcttatttctgggaagccacaaactcagacaaaaactttattattgaactataactcataagaaactaaaagaggcaccaccaatgatgggttgttggtagaacgctgctgggtttgtcaaagcaagttggttgaatggcagcaattgttgcagttgtaagagggtgccagcgttaggcgcagcgtgctggtagaacggcaacaactgtggttgtatcaagaaggtagcagggctcacaccagctagctggctgaatggtagtagttgttgctgctgtaaataagcaggagagttcaatgctgccagttggttgaatggaagaaattgctgggggtaggcagcaggtagctggctgaatggtagttgttgttgttgcaaataagaagcagagttcaatgcagctagttggttgaatggaagaaactgctgttgctgagagtaggcagcaaggtttgctagcacaagttgttgtagttgttgtgccctgatgttttgtgccaataa

SEQ ID NO: 6425 - DNA, 541 bp, Zea mays
  unsure (1)..(541): unsure at all n locations; Clone ID: LIB3061-065-Q1-N6-C5
gtggtttttttttttatcgagaaaaatctcaatcaatatattgattatttttaggaaacacatgccgctatgagggcaccattatcgagtacatctcatatgtaatctaaaagaggcaccaccaacgatgggttgctgccacgacaaggcaggggtcatcaaagagaactggttgtatggcagcaattgttgctgctgtaggaaggcagcgaccaatgggttagccaccgctagtggattaagtaactgttgtcgctgttgtaggtacgcagcagagttcgacacagtcagttggttgaatggaagtagttgttgcaagtaggcagcagggtttgccacagctagctgagtaagagctggtacaatttgttgcagcaactggngttgcaacaactgttgttgcaggtatgtaggtgcattgcccatagcgagcgggctagatgaaagaagttgttgctgttgtaggtaggcgatagggttcaccatggctagttgactgagcgctggcagaaactgttgcaactgttgttgttgttggtat

SEQ ID NO: 6426 - DNA, 522 bp, Zea mays
  Clone ID: LIB3061-065-Q1-N6-C6
aaaaagtcctttttttatttttgggaaagccacaacttcaaataaaaactttttttttgacctttacctcataaaaaatttaaaaaagggccccaccaatgatgggttgtgggtaaaccactgttgggtttgtaaaaccaggttggttgaatggcaccaatggttgcagttgtaaaagggggccagcgttaggcccaccgtgctggtaaaacggcaccaactgtggttgtgtaaaaaaggtaccagggttaacaccacttacctggttgaatggtagtagttgttgttgttgtaaataaccaggaaagttcaatgctgttagttggttaaatggaaaaaattgttgggggtaggcaccaggtacctggctaaatggtagttgttgttgttgcaaataaaaaccaaagttcaatgaacctatttggttaaatggaaaaaactgttgttgttgaaaagtaggcaccagggtttgttaccccaagttgttgtaattgttgggccctgatgttttgggccaataaa

SEQ ID NO: 6427 - DNA, 514 bp, Zea mays
  Clone ID: LIB3061-065-Q1-N6-C8
agaaagtactttcttatttctgggaagccacaaacatcagacaaaaactttattattgaactataactcataagaaatctaaaagagggcaccaccaatgatgggttgttggtagaatgctgttgggtttgtcaaagcaagttggttgaatggcagcaattgttgcagttgtaagagggtgccagcgttaggcgcagcgtgctggtagaacggcaacaattgtggttgtgtcaagaaggtagcagggctcacaccagctagctggctgaatggtagtagttgttgctgctgtaaataagcaggagagttcaaagctgtcagttggttgaatggaaaaaattgctgggggtaggcagcaaatagctggctgaatggtagttgttgttgttgcaaataagaagcagagttcaatgcagctagttggttgaatggaagaaactgttgttgctgagagtaggcagcaaggtttgctagcacaagttgttgtagttgttgtgccctgatgttttgtgcc

SEQ ID NO: 6428 - DNA, 442 bp, Zea mays
  Clone ID: LIB3061-065-Q1-N6-C9
cccaaacacccttttccccaaaaaaaaatcccttcccattaaaaggggggatccggggcatggcccaccccgccccccaggggggggggggaccccccggtccccaccgccggtaaacgggggaaccagctttgcccctaagggggggtgggcagggggcccattccattattccccccggccaaagttccccaaaaagaaaacccccccgggagttgggttgaagggggggggacccggttggtgaaattgaaaaccccaaaaccccgcaaggggggggcctcccggggcccccaaaagcccccggggccccccccgggggtgttgctgcaggaaggaccgcaggccccccccctttggccccgggacccggggcagggggcccccccgcctgaacggggggaaaaactggtgctgaaacccctggcactgggggaagccc

SEQ ID NO: 6429 - DNA, 363 bp, Zea mays
  Clone ID: LIB3061-065-Q1-N6-D1
gtttgttttttttttttttttttttttttttttagaaactgggaaagtaacttcttatttctgggtggccacatacatcatccaaaaactttattattgaattacaactaataagcaatctaaaagagggcaccaccaatgatgtgttggtgggaggaggctgctgggtttgtcaaagcaagttggacaaagggcaacaattgttgtagttgtaaaagggttgcggggttagccgcaaactgctggtaaaaaggcagcaactgttgctgtgtcaaaaaggaagcacgggttgctgcagctagctggctaaatgggagtaatatttggtggtgcaaataagcagggagggttagtgggggcaat

SEQ ID NO: 6430 - DNA, 542 bp, Zea mays
  Clone ID: LIB3061-065-Q1-N6-D10
agatctataatacttagttactgaggggtcgcacatatcagcatgagaactttattattacagtataaatcataaaaaatctagaagatggcaccaccaatggtgggcgattgcaataaggtggtaggattcgtcaaagcatgttggctaaatggcagcaattgttgttgttgtaagaaggcaacaatgtttgccacattatgtgggtagaatggcagcaattgttgctgttgcaagaaggcattaatgtttcccacaacctgtgggtaaaatggcaacaattgttgttgtcgcaagaaagaagcaatgttttccacagcttgcagatggaatggcagaagctgttgttgcagtaagaaggcatcagggctcccgacaagttggttaaatggtagtagttgttgtgcctgcaagtagacagcagggttcaccccagctagttgattgaatggaagaaattgttgttgctggagataagcagcaaggttcgctgcaactacttgattgattgttggtagcaactgttgttgtagttgttgtgt

SEQ ID NO: 6431 - DNA, 554 bp, Zea mays
  Clone ID: LIB3061-065-Q1-N6-D11
aaaaagtactttcttatttctgggaagccacaaacatcagacaaaaaatttattattgaactataactcataagaaatctaaaagagggcaccaccaatgatgggttgttggtagaacactgctaggtttgtcaaagcaagttggttgaatggcagcaattgttgcagttgtaagagggtgccagcgttaggcgcagcgtgctggtagaacggcaacaactgtggttgtgtcaagaaggtagcagggctcacaccagctagctggctgaatggtagtagttgttgctgctgtaaataagcaggagagttcaatgctgccagttggttgaatggaagaaattgttgggggtaggcaacaggtagctggctgaatggtagttgttgttgttgcaaataagaagcagagttcaatgcagctagttggttgaatggaagaaactgctgttgctgagagtaggcagcaaggtttgctagcacaagttgttgtagttgttgtgccctgatgttttgtgccaataaatgcaccaaaggtaactgctgtaatagggctgatg

SEQ ID NO: 6432 - DNA, 447 bp, Zea mays
  Clone ID: LIB3061-065-Q1-N6-D12
ggggcgggggggggcatccaaataaaatgggccctgctgaaaacagggggggccacaacatcgattaagcatagggttggacattgggttttacaaaaaaaacccgaaaacacacgggatttttcaacaacaaaaaacatttttaagctttccaaagcattgatgggtccattaaaaacgggggcatccttggaggacccaaaaagggctttataaattggcacggaaatttcactttattggggccaaaccattgaaaaaaacattgaagggtggggctggggaaaccaaactaactttgacagcccttggatccactcaaaaccttgggccacccggagggaaaaattttttttcgaggaggaagggccccaaaacttaaaaaaaacccttgggggagcgaacccctccaaaggggggatggggggggacagtctcattggaaaa

SEQ ID NO: 6433 - DNA, 538 bp, Zea mays
  Clone ID: LIB3061-065-Q1-N6-D2
gagaaaaatctcaatcaatatattgattatttttaggaaacacatgccgctatgagggcaccattatcgagtacatctcatatgtaatctaaaagaggcaccaccaacgatgggttgctgccacgacaaggcagggttcatcaaagagaactggttgtatggcagcaattgttgctgctgtaggaaggcagcgaccaatgggttagccaccgctagtggattaagtaactgttgtcgctgttgtaggtacgcagcagagttcgacacagtcagttggttgaatggaagtagttgttgcaagtaggcagcagggtttgccacagctagctgagtaagagctggtacaatttgttgcagcaactgttgttgcaacaactgttgttgcaggtatgtaggtgcattgcccatagcgagcgggctagatgaaagaagttgttgctgttgtaggtaggcgatagggttcaccatggctagttgactgagcgctggcagaaactgttgcaactgttgttgttgttggtatgcagctacgtttgcc

SEQ ID NO: 6434 - DNA, 395 bp, Zea mays
  Clone ID: LIB3061-065-Q1-N6-D3
aaaaaaaaagggggggggggttttttggggaaacccccgttttgggggtaaggggggggggggaccccattttttaagggggaacccccccttggggtgggggggggggggggttttttggggggggggggggggcccccgccccccttgggggggggggtgggggggggggaaaaaaggccccccccttttgggggggggggggggaccccaaaaacccaaggggggggggggggggccccccccgggtttgggggggacccccggggtaaaatggggggggaaagttttgggggcaaaatcggcaaaaaaaaaaaaaccattggggggggaaaaccgggggggttttgggggggttaaaaccggggggggaaaaaggttttcccagggggggg

SEQ ID NO: 6435 - DNA, 549 bp, Zea mays
  Clone ID: LIB3061-065-Q1-N6-D5
gaactaaaaagtactttcttatttctgggaagccacaaactcagacaaaaactttattattgaactataactcataagaaatctaaaagagggcaccaccaatgatgggttgttggtagaatgctgctgggtttgtcaaagcaagttggttgaatggcagcaattgttgcagttgtaagagggtgccagcgttaggcgcagcgtgctggtagaacggcaacaactgtggttgtgtcaagaaggtagcagggctcacaccagctagctggctgaatggtagtagttgttgctgctgtaaataagcaggagagttcaatgctgtcagttggttgaatggaagaaattgctgggggtaggcagcagatagctggctgaatggtagttgttgttgttgcaaataagaagcagagttcaatgcagctagttggttgaatggaagaaactgctgttgctgagagtaggcagcaaggtttgctagcacaagttgttgtagttgttgtgccctgatgttttgtgccaataaatgcaccaaaggtaactgctgtaata

SEQ ID NO: 6436 - DNA, 498 bp, Zea mays
  Clone ID: LIB3061-065-Q1-N6-D8
agaaatgtactttcttatttctgggaagccacaaacatcatccaaaaaattcattattgaactataactcataagcaatctaaaagagggcaccgccaatgatgggttgttggtagaacgttgttgggtttgtcaaagcaagttggttgaatggcagcaattgttgcagttgtaagagggtgccagcgttaggcgcagcgtgcaggtagaacggcaacaactgttgttgtgtcaagaaggcaacagggctcacatcagctagctggctgaatggtggtagctgttgctgttgtaaataagcagcagagttcaatgctgccagttggttgaatggaagaaattgctgggggtaggcagcagctagctgactgaatggtagttgttgttgcaaataagcagcagagttcaatgcagccagttggttgaatggaagaaactgctgttgctgagagtaggcagcaaggtttcctagcacaagttgttgtagttgttgtgcct

SEQ ID NO: 6437 - DNA, 502 bp, Zea mays
  Clone ID: LIB3061-065-Q1-N6-D9
agcaagacagtcgcatgctatatattaattacgatttaccaactttattatcacaacaaaggacactcaaacccgcccgactcgtttacagacacctgatggcgcagaaaaaaaaacagcaacgtacctgcgaatcgaacttacaacgccaaattcgtagaaaaggaaaccatgacactgaaaacatgcacaaacccatactggactcgcgaacaagcaaacagggtcacggacgacaggatcggaccaagtgcgtgtgcatacacgcgtctagtgatccctggtgatggtagaggagtccttgttggtgttggtgttggcgtcgccctgcttgtcgtccccgcccatccccagcgtgctcatcaccgcgtccttggcgcccgccgccgcgctcttcacctgctcagtggcctgctggatgacgccgctggacttgtccttgccggagacggcggtgtccttggcgtactgcccggcctcggcggccttctgcttggctgcc

SEQ ID NO: 6438 - DNA, 546 bp, Zea mays
  Clone ID: LIB3061-065-Q1-N6-E1
gtttgggtttttttttttttttttttttttttttttttttttttttttttttttttttttttttttttttttttttttttttttttagaaaaagggggttttttaatttggggggggcaaaaaaaaaaaaaaaaaaaattatttggggggggggggggaaaaaaaaaaaaaaaggggggccccccaaagggggggggggggggaaaaaacgggggggggggaaaaaaaaggggggggaaggggaaaaaaggggggggggggaaaaggggggcagggggagggggaagggggggggaaaaagggaaaaaagggggggggggaaaaaaggggggaggggtaaaaaaaaaaaaatgggggaaggggaaaagggggggggggggtaaaaaaaggggggggaaaaaaggggggagggggggaaaaggaaaaaaaaggggggggggggaaaaaggggagggggggaaggggggggggggggggggggaaaaaaaaggagaatcaagggagataagggggggaggggaaaaaaaaggtggtcccccccacccc

SEQ ID NO: 6439 - DNA, 479 bp, Zea mays
  Clone ID: LIB3061-065-Q1-N6-E10
aaactgagcggcattatttgatatcgacagggcatatatacaggagggttctttgccggcttttacaaaaaaccccacccgttctttttatttggcacattttagttcacaaaaatatattccaaaacggggttaaaacaaaaaaacatgggccccgctataaaaaactatctttatctggggatcagggaactttcaaggctccactttttaaaccagcttgatgcccgacgactccaaaaactccaatgctggaacgtaaatttccgggtgcaaaggcctgaacactcctttcgtctggaccttattttttaacaaaaacagggcccctattgctgctggaatgcccacggtcaaccccatggcagggggggacctgccattttaaaccttcccaaactccaaaagcgtcgcttggggcttttcggcgggttgcccctccgggtattccacctcaacttcgggggggagcaaaacca

SEQ ID NO: 6440 - DNA, 542 bp, Zea mays
  Clone ID: LIB3061-065-Q1-N6-E11
aaaaatgtactttcttatttctgggaagccacaaacatcagacaaaaactttattattgaactataactcataagaaatctaaaagagggcaccaccaatgatgggttgttggtagaacgctgctgggtttgtcaaagcaagttggttgaatggcagcaattgttgcagttgtaagagggtgccagcgttaggcgcagcgtgctggtagaacggcaacaactgtggttgtatcaagaaggtagcagggctcacaccagctagctggctgaatggtagtagttgttgctgctgtaaataagcaggagagttcaatgctgccagttggttgaatggaagaaattgctgggggtaggcagcaggtagctggctgaatggtagttgttgttgttgcaaataagaagcagagttcaatgcagctagttggttgaatggaagaaactgctgttgctgagagtaggcagcaaggtttgctagcacaagttgttgtagttgttgtgccctgatgttttgtgccaataaatgcaccaaaggtaactgatgt

SEQ ID NO: 6441 - DNA, 541 bp, Zea mays
  Clone ID: LIB3061-065-Q1-N6-E12
gtgggggggggtttttcaacaaaactcgcatttcatttgcaaaagaaaatgtaaaagaaagctgacaagtatcctaaattatgctgacaagtatgctggatccatcaggtcatcaaatcagtcagcgatctggcagctgatggccatcgtctacaagggtgctaggcagctcttcggggccaaccaagcgactgttgcccaccgccggctcaccgtcactctcctccacgctatcgtgccggacagggcggagcagcagcccttgcaaccgcaccaaatagctttgacctgccggctgcgacctcacgtatctcgtcgctgcagttgccgttgttacattgctggcgctggcggacggatggtccggctcgctggtcgaccgaagattgttcaacgcactcaggtccaggttggggaagacggagcaccggcaccgtgggcacttgacattcagccgaagccactggtcgatgcactccacatgaaaattgtgcgcgcatgggagcccacggacctcattgccaacatgaaattcttcaag

SEQ ID NO: 6442 - DNA, 477 bp, Zea mays
  Clone ID: LIB3061-065-Q1-N6-E2
aaacagaacaccgatcatcttcatatattgaccaacaggcaaccatggtattcactactatcaggctatcccgggctactaaatttatccagggaaggatttgcatacaacaatagcctcatgaaaatacccatcaatatatcgccccgaaagaacagacaaaaaccggctggatctcctggtcacaaacaacacacacaactgaaacttaaataacccccgaattataaacacttctgactgataggagcccatgcccaaaacccattcttttagcatcccacttgaaagccacctatatatgccaaaaccggatggatggatggatggatggccattggcttcatatgaaaaaaaacaacctgaagtatacaacccggtagagggaaaaaaaaaaccccccacaaatatgctgccaaaacaaaaggggggatgcttccttgaccccaaaacctctgaaactggggaacgctccaa

SEQ ID NO: 6443 - DNA, 520 bp, Zea mays
  unsure (1)..(520): unsure at all n locations; Clone ID: LIB3061-065-Q1-N6-E3
aagaactanaaagtactttcttatttctgggaagccacaaactcagacaaaaactttattattgaactataactcataagaaactaaaagaggcaccaccaatgatgggttgttggtagaatgctgttgggtttgtcaaagcaagttggttgaatggcagcaattgttgcagttgtaagagggtgccagcgttaggcgcagcgtgctggtagaacggcaacaattgtggttgtgtcaagaaggtagcagggctcacaccagctagctggctgaatggtagtagttgttgctgctgtaaataagcaggagagttcaaagctgtcagttggttgaatggaagaaattgctgggggtaggcagcagatagctggctgaatggtagttgttgttgttgcaaataagaagcagagttcaatgcagctagttggttgaatggaagaaactgttgttgctgagagtaggcagcaaggtttgctagcacaagttgttgtagttgttgtgccctgatgttttgtgccaa

SEQ ID NO: 6444 - DNA, 535 bp, Zea mays
  unsure (1)..(535): unsure at all n locations; Clone ID: LIB3061-065-Q1-N6-E4
gngaaaataacttcttatttctaggaggccacatacatcagccaaaaaattcattattgaattacaactaataagcaatctaaaagaggcaccgccaatgatgtgttgttggtagaaggctgctgggtttgtcaaagcaagttggacaaagggcagcaactgttgcagttgtaagagggttgcggggttagccacaaactgctggtagaacggaagcacttgttgttgtgtcaagaaggaagcggggcttgttgtagctagctggccaaatggtagtagtatttgctgctggaaataagcagaggggttcagtgcggccaattggttaaatggaagaaattgttgctgctgagagtaggcagtagctagctggctgaatggtagtagttgttgttgctgcaaataagcagcagggttcagtatagacagttggttgaatggaagaaattgttgttgctgagagtagggggaaaggtttgccagagctacttggctgatcactggtagcacgagttgctgcaactgttctgccctg

SEQ ID NO: 6445 - DNA, 534 bp, Zea mays
  Clone ID: LIB3061-065-Q1-N6-E5
aacctcgaaaaaacaaacttattcataaacaaaatgggttcacagatatttctccatacgtacatgctcattgtggtagacgcagctgaccacctagagctgcatacttacttattcagactgatccagcatgtggcaacgtcggaagttcacatgcttacagacgacaaattttcataacaatagcttggcttggctgcttcacagaataaccaaacgacaaccacgaaattgcgacgatataaaataaacaactcagaagcaaatcgaccccagaagcccgtcttactcatcaagcactcccgccttctcctccatggcatccgcttcctcctcccagcatagaagattagccagtttgtagtccttcttcataggaggaggagcactctccacgttctcgccgtcaaagcagtggaaaacagatttgggcgaggtagcaacagcgtcttcagcagcacagaagctctggtacacgaggagcccgcctccaggcagctcctgctccaccatgttgttgcagtcatagacctc

SEQ ID NO: 6446 - DNA, 513 bp, Zea mays
  Clone ID: LIB3061-065-Q1-N6-E6
agaaagtactttcttatttctgggaagccacaaacatcagacaaaaactttattattgaactataactcataagaaatctaaaagagggcaccaccaatgatgggttgttggtagaacgctgctgggtttgtcaaagcaagttggttgaatggcagcaattgttgcagttgtaagagggtgccagcgttaggcgcagcgtgctggtagaacggcaacaactggggttgtatcaagaaggtagcagggctcacaccagctagctggctgaatggtagtagttgttgctgctgtaaataagcaggagagttcaatgctgccagttggttgaatggaagaaattgctgggggtaggcagcaggtagctggctgaatggtagttgttgttgttgcaaataagaagcagagttcaatgcagctagttggttgaatggaagaaactgctgttgctgagagtaggcagcaaggtttgctagcacaagttgttgtagttgttgtgccctgatgttttgtgc

SEQ ID NO: 6447 - DNA, 529 bp, Zea mays
  unsure (1)..(529): unsure at all n locations; Clone ID: LIB3061-065-Q1-N6-E7
atctgctggtgctngaaaaccaataatgttcaacatggatggatacaagtcaaaaatactaagctcaagatagtaggtagtttggctaaccaattaactagaagcagtgatctggttattgctaataggacgccaggccgatcatagaagtaaatggaaagaagaaaactacgaaatttaatagaagtaatggtaccaacaccaaggtagagaggtctacacccagtctatcagagtactggctggacagatgtgaagctagcaaagctccatgttgatcattatccgtcttcaagccatttccttgatcagacaggttcacaggtcaaggtccacatgctataacatagcaggactggttaattagctgctaccatcaatggaataggaaacgtaacatgtgagaccaagaacctagttattcttaggcttccaggtagatattgcatagattatccttcctttccagccttgcaggagccatccgctgtcttcatctatgacaaagtccttgtgataaatgtctttt

SEQ ID NO: 6448 - DNA, 533 bp, Zea mays
  Clone ID: LIB3061-065-Q1-N6-E8
acattagaatctgggaatgtaacttcttatttctggttggccacatacatcatccaaaaactttattattgaattacaactaataatcaatctaaaagaggcaccaccaatgatgtgttgttggtaggaggctgctgggtttgtcaaagcaagttggacaaagggcaacaattgttgtagttgtaagagggttgcggggttagccgcaaactgcttgtagaaaggcagcaactgttgctgtgtcaagaaggaagcacgacttgctgcagctagctcgctaaatggcagtagtatttgctgctgcaaataagcagcggggttcagtgcggccaattggttaaatggaagaagttgttgttgctgagagtaggcagtagctagctggctaaatggtaatagttgttgctgcaaataagcagcagggttcagtgtagacagttggttgaatggaagaaattgttgttgctgagagtagggagaaaggtttgccagagctacttggttgatcacaggtagcacgagttgctgcagct

SEQ ID NO: 6449 - DNA, 523 bp, Zea mays
  Clone ID: LIB3061-065-Q1-N6-E9
agatctataatacttagttactgaggggtcgcacatatcagcatgagaactttattattacagtataaatcataaaaaatctagaagatggcaccaccaatggtgggcgattgcaataaggtggtaggattcgtcaaagcatgttggctaaatggcagcaattgttgttgttgtaagaaggcaacaatgtttgccacattatgtgggtagaatggcagcaattgttgctgttgcaagaaggcattaatgtttcccacaacctgtgggtaaaatggcaacaattgttgttgtcgcaagaaagaagcaatgttttccacagcttgcagatggaatggcagaagctgttgttgcagtaagaaggcatcagggctcccgacaagttggttaaatggtagtagttgttgtgcctgcaagtagacagcagggttcaccccagctagttgattgaatggaagaaattgttgttgctggagataagcagcaaggttcgctgcaactacttgattgattgttggtagcaact

SEQ ID NO: 6450 - DNA, 535 bp, Zea mays
  Clone ID: LIB3061-065-Q1-N6-F1
aataaaaaaaaggtgcatctacttttttttttcaggactaggtatctgattgcagatctaggaatccgaaaaaattcagcgagtcaaagcaaatttgcggggacactggccgtgcccaacaacaacaaaaaaccccccctcctgttacggtaactcatgaacagcacgggtttcaaaacctaaaccaaaagagttaaacttttaacgccgtcttgtggatcatggtctctttatgtatctcggggcagctcttctcaacgaggtccagaagcttctcaaggctcgtggcccatgagttcagtgtgccattgctgtcttgggtcgtccggaagctgacaactcccatcggcctgtcgatctttgccactagagatttcgagttaaccatgtctgagagatgcttctctgcctcctgcaaagtcaggcaaagaagatcagcaagcctctcgagggtaacccttgcatagtacttggatacaaccaagatattatgttcgataatcctcagcctcaaatcttctgaagctttggcacc

SEQ ID NO: 6451 - DNA, 535 bp, Zea mays
  Clone ID: LIB3061-065-Q1-N6-F10
aaatctcaatcaatatattgattatttttaggaaacacatgccgctatgagggcaccattatcgagtacatctcatatgtaatctaaaagaggcaccaccaacgatgggttgctgccacgacaaggcagggttcatcaaagagaactggttgtatggcagcaattgttgctgctgtaggaaggcagcgaccaatgggttagccaccgctagtggattaagtaactgttgtcgctgttgtaggtacgcagcagagttcgacacagtcagttggttgaatggaagtagttgttgcaagtaggcagcagggtttgccacagctagctgagtaagagctggtacaatttgttgcagcaactgttgttgcaacaactgttgttgcaggtatgtaggtgcattgcccatagcgagcgggctagatgaaagaagttgttgctgttgtaggtaggcgatagggttcaccatggctagttgactgagcgctggtagaaactgttgcaactgttgttgttgttggtatgcagctacgtttgccaa

SEQ ID NO: 6452 - DNA, 541 bp, Zea mays
  unsure (1)..(541): unsure at all n locations; Clone ID: LIB3061-065-Q1-N6-F11
aaaaactanaatgtactttcttatttctgggaagccacaaactcagataaaaactttattattgaactataactcataagaaactaaaaggggcaccaccaatgatgggttgttggtagaacactgctgggtttggcaaagcaagttggttgaatggcagcaattgttgcagttgtaagagggtgccagcgttaggcgcaacgtgctggtagaacggcaacaactgtggttgtgtcaagaaggtagcagggctcacaccagctagctggctgaatggtagtagttgttgctgctgtaaataagcaggagagttcaatgctgctagttggttgaatggaagaaattgctgggggtaggcagcaggtagctggctgaatggtagttgttgttgttgcaaataagaagcagagttcaatgaacctagttggttgaatggaagaaactgctgttgctgagagtaggcagcaaggtttgctagcacaagttgttgtagttgttgtgccctgatgttttgtgccaataaatgcaccaaaggtaactg

SEQ ID NO: 6453 - DNA, 562 bp, Zea mays
  unsure (1)..(562): unsure at all n locations; Clone ID: LIB3061-065-Q1-N6-F12
gggtttgttggggggtttataattctatcataatcactcagctccttgtatctctccttgaaactttagcatagcgttgaacttcctcttctgtcttaccctccatttcagaggatatacttttaatatcattgcgaccatatttctcacatggggcagangggggggttngaagtctctccttgtccatgatgcaaaaccctcttctaataactgctccttctcttcctgctcctctgctgggaaaggctccaattgatcttcgtcttcaccatcaatgggatctttcttctgggttgcttgcatgagggaccgcacttccttttcgtacaattcatttagcctttgggtattgaaaaactggaaatcatgcaagtgcgggattcttggaatccttggctccctaggcttcgttggtgcaccttggcgaagcgcttgcttaaagtaatcagactcagagtagtttctcttcctttctcttctaggtggctcgatccagttatcactaacgagtttcttgaaatcaaccttgttttcatccttctcatcatcaaaatcatac

SEQ ID NO: 6454 - DNA, 425 bp, Zea mays
  Clone ID: LIB3061-065-Q1-N6-F2
gggagggggaaatatttatgaagggatgttggttgaaaactgttgggtatgggaaagtaagagggggggatggcagaagtggggggggggggaaaaggggggaagggaggggaatagaggggggggggaagggaaaaaactgttggaaaaagtaaaaggggggcagggataagaaaaaggagaaggaaaaaggggaccaactgttggggggggaaaaaaaaaaaaggggcaaagctacaaaaagggtggaagggaaaaaaatgtgggggtagaaaaaaaaaagggggcccaaaggggaataagggggggcaaaaaaaaaaaaaaaggggggggggccaaaaaaaggagagggaaaaaaaaaagttgttgaaaaaaagcaaaaaagtttaggggcccaagttagaaaaaaagggaagaaacctggg

SEQ ID NO: 6455 - DNA, 543 bp, Zea mays
  Clone ID: LIB3061-065-Q1-N6-F3
aatctcaatcaatatattgattatttctaggaaacacatgtcggtatgagggcaccattgtcgagtacatctcatatgtaatctaaaagatggcacctccaacgatgggttgctgcaaggcagggttcatcaaagagaactggttgtatggcagcaattgttgttgctgctgcaggaaggtagcgaccaatgggttagccactgccaatggattaagtaactgttgtcgctgttgtaggtacgcagcagagtttgacacagccagttggttgaatggaagcaactgttgtaagtaggcagcagggtttgccacagctagctgagtcagagctggtacaatttgttgcagcaactgttgttgtaggtacgtaggtgcattgcccaccgcgagcgggctagatgaaagtagttgtaggtagacggcagggttcaccatggctagttgactgagcactggcataaactgttgcagctgttgttgttgctggtatgcagctacgttcgccagagcaagtgggttggatgcaagcagctgctgttgca

SEQ ID NO: 6456 - DNA, 535 bp, Zea mays
  Clone ID: LIB3061-065-Q1-N6-F4
ggaacagatggatactttttttcttttcatttcaattgttcattcaggtcattgctcacactgacactgccacccatggtgatgcgtgacacattattactcaatcatcgccgctaaatgactcaactagctagctagccagcggctatactacagcacatagtttcttcagtgggggacaccgccggcagcagcgtaggggcatggagtcggctgctgcaggccgcacatcgccgtcagttgctgcgctatctgcgccgccaacagccccgcgacctggccgctttgcggctgctgctgcaggatggactggaggaccaagccgaagatcgcctggtaccggtgctgcggctccacctgcctgagctgctggcaacactgctgccgcaacgactggcactgaggcgagcagtagggcgtcgccgtcgggctgcactgatgcctcaggaactcgacgcactggcccaggatcggggtgctgccaacgccgcaggttccctgcagctggcacgggcttggatgcggctgttggcac

SEQ ID NO: 6457 - DNA, 505 bp, Zea mays
  Clone ID: LIB3061-065-Q1-N6-F6
caaacaaaaactttattattgaactataactcataaaaaatctaaaagagggccccaccaatgatgggttgttggtaaaaccctgctgggtttgtcaaagcaagttggttgaatggcagcaattgttgcagttgtaaaagggggccagcgttaggcccagcgtgctggtaaaacggcaacaactggggttgtatcaaaaaggtagcagggctcacaccagctagctggctgaatggtagtagttgttgctgctgtaaataagcaggaaagttcaatgctgccagttggttgaatggaaaaaattgctgggggtaggcaacaggtacctggctgaatggtagttgttgttgttgcaaataaaaagcaaagttcaatgcacctagttggttgaatggaaaaaactgctgttgctgaaagtaggcaacaaggtttgctagcacaagttgttgaagttgttgggccctgatgttttgggccaataaatgcaccaaaggtaactgatgta

SEQ ID NO: 6458 - DNA, 471 bp, Zea mays
  Clone ID: LIB3061-065-Q1-N6-F7
ggggaaaggaactttttattttgggggggccccctccctcacccaaaaacttttttattggattcccaccaaaaatcaatctaaaagggggccccccccaagatgggttgttgggagggggccgctgggtttgtcaaaacaagggggccaaagggccacaattggtgtagttgtaaaaggggggggggggtagccccaaaccgcttgtaaaaagggagcaactgttgctgggtcaaaaaggaagccccacttggtgcaactagccccctaaaaggcagaagtatttgctggtgcaaaaaaacagcgggggtcaaggcggcccattggttaaaaggaaaaaatttttttttcttaaaataggccaaaactacccggctaaaagggaaaaggtggtggtgcaaaaaaacagcaggggtcaatgtaaacagttggttaaaaggaaaaaaatttttttcttaaaatagggaaaac

SEQ ID NO: 6459 - DNA, 145 bp, Zea mays
  Clone ID: LIB3061-065-Q1-N6-F8
aagaatctagaaagtactttcttatttctgggaagccacaaacatcagataaaaactttattattgaactataactcataagaaatctaaaagagggcaccaccaatgatgggttgttggtagaacactgctgggtttgtcaaag

SEQ ID NO: 6460 - DNA, 479 bp, Zea mays
  unsure (1)..(479): unsure at all n locations; Clone ID: LIB3061-065-Q1-N6-F9
gcaaacgtaaaagcagatattttnattaataaagaaatatatatttggcatgccgcgacgacaaggcagtgcagtgcagcgcagcgcaggccgtggtgccagatgatgacagcttacaagatcacagacacacaccccaacagttgatttatacatgcaaataagcaagagaacatgggaaagcagaatggttggtattcatgcacgcttcactggcgacaaaacacatcaacaaaaaacggaacttccacatcgtcgacgactgtccatggacgcttctctctggcaaggaatctgagccatagggatccaatgtaaccaaatagagaagcaaatttgtcggcaagaataaacatcatgcagtaagggggccctctgcattgctacgcccattgagctgctctgggtggatcttcttccccaacatcttcctcatgacctaccgacttaattttcttgtcgctttcagtggttttggt

SEQ ID NO: 6461 - DNA, 594 bp, Zea mays
  unsure (1)..(594): unsure at all n locations; Clone ID: LIB3061-065-Q1-N6-G11
cgtcgcatgcacgcgtccgttatatcttggntacctcttanacggccggcggggggggggggttttctaaaaagtactttcttatttctgggaagccacaaactcagacaaaaactttattattgaactataactcataagaaactaaagggggcaccaccaatgatgggttgttggtagaacgctgctgggtttggcagagagggggggggttgaatggcagcaattgttgcagttgtaagagggggccagcgttaggcgcagcgtgctggtagaacggcaacaactgtggttgtatcaagaaggtagcagggctcacaccagctagctggctgaatggtagtagttgttgctgctgtaaataagcaggagagttcaatgctgccagttggttgaatggaagaaattgctgggggtaggcagcaggtagctggctgaatggtagttgttgttgttgcaaataagaagcagagttcaatgcagctagttggttgaatggaagaaactgctgttgctgagagtaggcagcaaggtttgctagcacaagttgttgtagttgttgtgccctgatgttttgtgccaataaatgcacca

SEQ ID NO: 6462 - DNA, 549 bp, Zea mays
  Clone ID: LIB3061-065-Q1-N6-G12
ggggggggggttttttttgaatctggaaagtaacttcttatttctggttggccacatacatcatccaaaaactttattattgaattacaactaataagcaatctaaaagaggcaccaccaatgatgtgttgttggtaggaggctgctgggggggggaaagcaagttggacaaagggcaacaattgttgtagttgtaagagggttgcggggttagccgcaaactgctggtagaaaggcagcaactgttgctgtgtcaagaaggaagcacggcttgctgcagctagctggctaaatggtagtaatatttgctgctgcaaataagcagcgaggttcagtgcggccaattggttaaatggaagaagttgttgttgatgagagtaggcagtagctagctggctgaatggtaatagttgttgctgcaaataagcagcagggttcagtgtagatagttggttgaatggaagaaattgttgttgctgatagtagggagaaaggtttgccagagctacttggttgatcacaggtagcacgagttgctgcagctgctgt

SEQ ID NO: 6463 - DNA, 492 bp, Zea mays
  Clone ID: LIB3061-065-Q1-N6-G2
ggagaaaatctcaatcaatatattgattatttctaggaaacacatgccggaatgagggccccattatcgagtacatctcatatgtaatctaaaaaaggcacctccaacgatgggttgctgcctcgacaagacagggtttatcaaaaagaaactggttgtatggcagcaattgttgctgctgtaggaaggcagcgaccaatgggttagccactgctaggggattaagtaactgttgtcgctgttgtaggtacccagcaaagttcgacataatcagttggttgaatggaagcagctgttgcaagtaggcagcagggtttgccacaactagctgagtcaaagctggtacaatctgttgcaacaattgttgttgcaggtatgtaggtgcattggccacagcgagcgggctaaatgaaagcagttgttgctgttgtaggtaggcggcagggttcaccatggctagttgactgagcgctggcaaaaactgttgcagct

SEQ ID NO: 6464 - DNA, 540 bp, Zea mays
  unsure (1)..(540): unsure at all n locations; Clone ID: LIB3061-065-Q1-N6-G4
ggtttgttttggtttttaaaaaaaanaggaattgatatattaaccgttcctaaagttatcttgtttgtccaagtaatttagaaacttgacataaatgccagatgtttctggaatcttgtaactggaatggttagccagggccaaaaaacatggggaacaaatttttgtgattcaggtttcaacaaagtgcggattagcatggcgctccaagcatctggagccaaattgatagcttggcggaacgattgcacagtattcaccagcctcctgatcatcttacttctctctggatttaggtcccctatctttcccactttcgcatatacatatgggaatgtcgcttcttgaaggaacacgtctgaagcattaacgatgtcctggacaaggaaaacccgaacccgccatcctttcctcgataaaatgaaatcaaataggtcttctgtagctgcaatcacagaatgcatatcaaatgatctccactcaggacttccattggcgttctcactggagtcagctcctgatgcgcttgaagattctgat

SEQ ID NO: 6465 - DNA, 498 bp, Zea mays
  Clone ID: LIB3061-065-Q1-N6-G5
cgagaaaaatctcaatcaatatattgattatttctaggaaacacatgccgttatgagggcaccattatcgagtacatctcatatgtaatctaaaaaaggcacctccaacgatgggttgctgccacaacaaggcagggttcatcaaaaagaactggttgtatggcagcaattgttgctgctgtaggaaggcagcgaccaatgggttagccaccgctaggggattaagtaactgttgtcgctgttgtaggtacccagcaaagttcgacacagtcagttggttgaatggaagcagctgttgcaagtaggcagcagggtttgccacagctagctgagtcaaagctggtacaatctgttgcagcaactgttgttgcaggtatgtaggtgcattaaccacagcgagagggctagatgaaatcagttgttgctgttgtaggtaggcggcagggttcaccatggctagttgactgagcgctggtaaaaactgttgcaattgtcgga

SEQ ID NO: 6466 - DNA, 511 bp, Zea mays
  Clone ID: LIB3061-065-Q1-N6-G7
gacaaaatgaattcacaaacattcacattttgatctatccttttatgtcatacccataatatctcaagaaactaacaccatatatctcatagatatggcagatagtaacatcatcacaccattatcactaacaacggcagcagatgcatataacagtgagagagaaaaaaagaaaaatttcataatttaacagctataccatacttctaccctgtctaaactccatacagctgcacaaaactgtacactcgcaaatctaaaggggcattaagtgtttatgcctggcttctccggcaggaattgcttcatctcctgatctgctctcccaccgacaacactagggagcccaagagagagagacagtggttcatcatctacaatatctgaaccagaaagattacgcttcgttgccaccatggatagggaaagtgagcataaaatggaggagccctcatctgccttcgatgatgccttatttaagctagtactaggttctggggaatcttcgtcg

SEQ ID NO: 6467 - DNA, 533 bp, Zea mays
  Clone ID: LIB3061-065-Q1-N6-G8
atattgagaaaaatctcaatcaatatattgattatttttaggaaacacatgccggaatgagggcaccattatcgagtacatctaatatgtaatctaaaaaaggcacctccaacgatgggttgctgcctcgacaagaacagggtttatcaaagagaactggttgtatggcagcaattgttgctgctgtaggaaggcagcgaccaatgggttagccactgctagtggattaagtaactgttgtcgctgttgtaggtacccagcaaagttcgacatagtcagttggttgaatggaagcagctgttgcaagtaggcagcagggtttgccacaactagctgagtcagagctggtacaatctgttgcaacaattgttgttgcaggtatgtaggtgcattggccacagcgagcgggctaaatgaaagcagttgttgctgttgtaggtaggcggcagggttcaccatggctagttgactgagcgctggcaaaaactgttgcagctgttgttgtggctggtttgcaactacgtttgccaaac

SEQ ID NO: 6468 - DNA, 425 bp, Zea mays
  Clone ID: LIB3061-065-Q1-N6-G9
aaaatattgtataaataattttgggggtttgttaggggggatcaatctttataaggaggccccccgaagaaggggggggggggaaaagggggggggggggggggggggggggggggggggggggggggggggggcagggggggggggggggcgggggaggagggggggggacacaagaaaggccacaaaagggggggggggggggaggggggggggaaacaagagagggagaggtaaaagggtggatgtatggaaaaaataaaaaagggaagggaggaaatagggggcaaaatggtagggggggaaaatgctagggggaggcaaagaaaaaaggaggtaaatggttgggaggggggggggaaaaaaccgggggaattaaggccggaacttggggggaaaccacatttgcttaaaaccaggaaaaa

SEQ ID NO: 6469 - DNA, 509 bp, Zea mays
  Clone ID: LIB3061-065-Q1-N6-H1
agaaagtactttcttatttctgggaagccacaaacatcatccaaaaaattcattattgaagtataactcataagcaatctaaaagaggcaccaccaatgatgggttgttggtagaacgctgttgggtttgtcaaagcaagttggttgaatggcagcaattgttgcagttgtaagagggtgccagcgttaggcgcagcgtgcaggtagaacggcaacaactgttgttgtgtcaagaaggcaacagggctcacatcagctagctggctgaatggtggtagctgttgctgttgtaaataagcagcagagttcaatgctgccagttggttgaatggaagaaattgctgggggtaggcagcagctagctgactgaatggtagttgttgttgcaaataagcagcagagttcaatgcagccagttggttgaatggaagaaactgctgttgctgagagtaggcagcaaggtttcctagcacaagttgttgtagttgttgtgccttgatgttttgcgc

SEQ ID NO: 6470 - DNA, 537 bp, Zea mays
  Clone ID: LIB3061-065-Q1-N6-H10
gaagaaaaataaaaagttatggctgtacagtttcaggaagctgagtactcccagtcacaacaaagtgaacaacaaatacaggtagcgccattgtctaccacttctttatatacaaaattgagctgaacgtttgtcaaagcaaataaccaacaggcttctccattcccgctcactgtccttgtcttctgttggcagacaatgctgtcgtcttgcagatggggcacaagttcttcaccatcagccactgcttcacgcactccgcgtggtacctgtgaccgcagtcaagggtgccaacgcagtctctagcctggtactcctcctggcatattatgcaagcatcattctctagagaagatttagatggctgatcagacatgctcgatattcctggaacatataggctagtcctcaatttatctacaatgtgactttttgtcagaccagtattgacatctccaatctgctcttctaatgctaaaagctcctcatacgtcatgctgtctatatctagacgcatatctctatgctcatctacag

SEQ ID NO: 6471 - DNA, 594 bp, Zea mays
  Clone ID: LIB3061-065-Q1-N6-H11
cgcatgcacgcgtacgttttcttggttccttttttacggccgccggtttggtttggttttttttaatctaaaaagtactttcttatttctgggaagccacaaacatcagacaaaaactttattattgaactataactcataagaaactaaagggggcaccaccaatgatgggttgttggtagaacactgctagggggggggggcaagttggttgaatggcagcaattgttgcagttgtaagagggtgccagcgttaggcgcagcgtgctggtagaacggcaacaactgtggttgtgtcaagaaggtagcagggctcacaccagctagctggctgaatggtagtagttgttgctgctgtaaataagcaggagagttcaatgctgccagttggttgaatggaagaaattgttgggggtaggcaacaggtagctggctgaatggtagttgttgttgttgcaaataagaagcagagttcaatgcagctagttggttgaatggaagaaactgctgttgctgagagtaggcagcaaggtttgctagcacaagttgttgtagttgttgtgccctgatgttttgtgccaataaatgcaccaa

SEQ ID NO: 6472 - DNA, 544 bp, Zea mays
  Clone ID: LIB3061-065-Q1-N6-H12
tgggggtggggtatgagcgacacgacggcttcgtgatcggcaccgtcaccttctccctgtacacgccgggcctgacgaggatcttgacgcggcggctgtttccggcgggcaccatgtcgactgcgccctgcacggtgcgcgagtgccccgtcccgtgcctgcgccaccacgatcgtgtccagctcgcgggcgcctcccccgctggccgccttcacgccgccctgcacggcggcggcggacggggtgctgaggtcgtcccacgttatgaacgacccgtccgccgccgcggacgacgacgcgaggacggcgacgacgggcaggaccaggaggatggcggcggcggcggcgaccatggccacggcgcgcgcgcgggtcagggtgtccgcgtcgagtagagaactagacagttgatcacagcacgtacgtgacgccgcctagcgcgcgcggagctagctcgtaacagctagctgcctgccacagtttagctcgggagagacggccggccggggagagaggtggtcagtggtcaggggaatgagaatga

SEQ ID NO: 6473 - DNA, 531 bp, Zea mays
  Clone ID: LIB3061-065-Q1-N6-H2
agaaatgtctttcttattctgggagcccaaactcagataaaaactttattattgaactataactcataagaaactaaagggggcaccaccaatgatgggttgttggtagaacactgctgggtttgtcaaagcaagttggttgaatggcagcaattgttgcagttgtaagagggtgccagcgttaggcgcaacgtgctggtagaacggcaacaactgtggttgtgtcaagaaggtagcagggctcacaccagctagctggctgaatggtagtagttgttgctgctgtaaataagcaggagagttcaatgctgctagttggttgaatggaagaaattgctgggggtaggcagcaggtagctggctgaatggtagttgttgttgttgcaaataagaagcagagttcaatgaacctagttggttgaatggaagaaactgctgttgctgagagtaggcagcaaggtttgctagcacaagttgttgtagttgttgtgccctgatgttttgtgccaataaatgcaccaaaggtaactg

SEQ ID NO: 6474 - DNA, 539 bp, Zea mays
  Clone ID: LIB3061-065-Q1-N6-H4
tttgtttgggtttttttttattttttttttttttttttttttttttttttttgttttttattttatttttttttttttttttttttttttttttatttttttttttttttttttttttttttttttttttttttttttttttttcagggcgaggggtggtttttggacctttacccaataaaaaacttaaaggggggcccccccccagtggggttgggggaaaacccccccggggtttccaaaacccggggggttaaagggccaaaattgttcccgtttaaaagggggcccccctttgggcccccggtcctttaaaaacccaacccccttggggttttaaaaaaagggggcggggttcccccccccttcttgggtaaaggggaaaatgttttgtttgtgaaaaaacccggggaaattaaatccccccccatggttaaaagaaaaaaatttttgggggtggccccaagtgccctgcctaaaggggaattttttttgtagacccccccctggggtcccccccgaatttccggcccggtccc

SEQ ID NO: 6475 - DNA, 543 bp, Zea mays
  Clone ID: LIB3061-065-Q1-N6-H5
ggggggggttttttattttttttttttttttttatttttttttttttttttttttttttttttttttttttttttttttttttttttttttttttttttttttttttttcaaaaatttttggggaaaatcccaaccaaatttttggtttttgggggggaaacaattgggggttgggggcccccttgggggggccccttcatttggaatcaaaaagagggggccccccaaccagggggtggtgcagggggggggttaaaaaaaaaaaccgggtttttgggaaaaattggtgttttttttgccggaaggggccccccaagggggtaccccccgccaaggggttaaaaaactgggggcccttttggggggcccccccaaaatttgccccacccccttggtttaagggaaaaaacttttttaaagaggcaaaagggttttccccaatttggtgggtaaaaggggggccaatttggggcaaaaaccgttgttggagggccctaggggcattgcccccccggggggggtttaaaaaaaatattttttgg

SEQ ID NO: 6476 - DNA, 528 bp, Zea mays
  Clone ID: LIB3061-065-Q1-N6-H6
agaaatgtactttcttatttctgggaagccacaaacatcagataaaaactttattattgaactataactcataagaaatctaaaagagggcaccaccaatgatgggttgttggtagaacactgctgggtttgtcaaagcaagttggttgaatggcagcaattgttgcagttgtaagagggtgccagcgttaggcgcaacgtgctggtagaacggcaacaactgtggttgtgtcaagaaggtagcagggctcacaccagctagctggctgaatggtagtagttgttgctgctgtaaataagcaggagagttcaatgctgctagttggttgaatggaagaaattgctgggggtaggcagcaggtagctggctgaatggtagttgttgttgttgcaaataagaagcagagttcaatgaacctagttggttgaatggaagaaactgctgttgctgagagtaggcagcaaggtttgctagcacaagttgttgtagttgttgtgccctgatgttttgtgccaataaatgcacca

SEQ ID NO: 6477 - DNA, 500 bp, Zea mays
  Clone ID: LIB3061-065-Q1-N6-H7
actattaataagtattagtatttgtataaaatatagtattataaaaatacataaaatatcgatagggtcacgaaacgtatgtgtcacatgttttgatcggcatgcctaacaggggcacattctgtatggctataggggccaacctaacaaagtaccctttttggagactataccatcctcatcatgaatcgggtatcacactggaagggtgatttaaagcttgttactcccaatcttaggaaaagtaattatcgaacacccttggagaccaatatcacattagaatctggaaatgtaacttcttatttctgggtggccacatacatcatccaaaaaactttattattgaattacaactaataatcaatctaaaagagggccccaccaatgatgtgttgttggtaggaggctgctgggtttgtcaaagcaagttggacaaagggcaacaattgttgtagttgtaaaagggttgcggggttagccccaaactgcttgtaaaa

SEQ ID NO: 6478 - DNA, 275 bp, Zea mays
  Clone ID: LIB3061-065-Q1-N6-H9
ggatagtgaaaaggatataattacaatcaaagagtgcaacaaggcaggttccccatggaccctaggaattaccaagactctacaaaagttcatgctcctgacagtacacaggaactggatcacttaatatgtacatcctacgactatacatagttcaatgtgaactggtttgatcaccagccatatacagggtgttgaacttgaggaggcagcaggttcagatccatgcactgctgtttatcatagtcacgtgtaccaggaattgctcccgtcgc

SEQ ID NO: 6479 - DNA, 516 bp, Zea mays
  unsure (1)..(516): unsure at all n locations; Clone ID: LIB3061-066-Q1-K6-A1
caacaacttgtgctagcaaaccttgctgcctactctcagcaacaacagtttcttccattcaaccaactagctgcattgaactctgcttcttatttgcaacaacaactactaccattcagccagctagctggtgtgagccctgctaccttcttgatacaaccacagttgttgccgttctaccagcacgctgcgcctaacgctggcaccctcttacaactgcaacaattgctgccattcaaccaacttgctttgacaaacccagcagcgttctaccaacaacccatcattggtggtgccctcttttagatttcttatgagttatagttcaataataaagttttttgtctgatgtttgtggcttcccagaaataagaaagtacatttctagattctaaaaaaaaaaaaaaaaaaaaaaaaaaaaaaaaaaaaaaaaaaaaaaaaaaaaaaaaaaaaaaaaaaaaaaaaaaaaaaaaaaaaaaaaaaaaaaaaaaaaaaaaaaaaaanaaaanaaccccc

SEQ ID NO: 6480 - DNA, 693 bp, Zea mays
  unsure (1)..(693): unsure at all n locations; Clone ID: LIB3061-066-Q1-K6-A10
accgaaacctaaaccatagtcgnnctgatccccgccgcagcaaccgtgttnnncgatcccttnnnctccctcgnacctctgggnacnnccctttgaggggctnntccccttcggnnctccggcaaccagcatgcagtncnttcttccccctcgnnttcccgcggnaccagcgtggggaggaccgcnnggccttcgctttggcgccgcggnatnncgactggnaagggagnnactccagnagnngcgcacgntnngttcaaggcnnncgacgtannccggggnnctgaagaaaaggaggnannggtcaagnngtggaggggtcgaggggacggnncaacgtnnccttcagaaatcaagcggcgaagcgccaacaaggnnagcaggnnnaggagaagaaacggacnatcctggcnnaccgcgtggnnagcggnnnagcagcgggaaggggttccnttgcgcagnngttccgacctgggcccgagnaaccgccaagnaacggnagcagnatnncacggccccgccatggnagaaaacggcgnnntgcttaccagnntcactgntnngccgaagggagggggacgccaagnaagnncctgaagtgnannagtccattcagaatnnctccggctagaacnnctcggtnnctgcgggtcgtcgtacctttgcgtggtttggagggaacggggcagttcg

SEQ ID NO: 6481 - DNA, 599 bp, Zea mays
  Clone ID: LIB3061-066-Q1-K6-A11
attgaacgaactagcaacatacatagggaggtacactagcaacatcttagcaccaatggcagccaagatttttgccatccttgccctccttgctctttcagcaagcgttgctaccgcgactattattccacaatgctcacaacaatacctctctccggtgacagccgcgagatttgaatacccaactatacaatcctacaggctacaagaggccatcgcagcaagcatcttacggtcgttagcattgaccgtccaacaaccatatgccctattgcaacaaccatccttaatgaatctatatctccaaagaatcgcagcacaacaactacaacaacagttgcttccaacaatcaatcaagtagttgcagcgaaccttgctgcttacctccagcaacaacaatttcttccattcaatcaactagctggggtgaaccctgctgcttacttgcaggcacaacagctactaccattcaaccaacttgtcaggagccctgctgccttcttactgcagcaacagttgcttccattccatctacaagttgtggcaaacattgctgctttcttgcaacaacaacaacaattgctgccattttacccac

SEQ ID NO: 6482 - DNA, 625 bp, Zea mays
  Clone ID: LIB3061-066-Q1-K6-A12
cagccttccagtttgatttttatggggggaggggcacctttcttcactgcaccccgatgcttgcctccgacgcaattggacaagtgcaagatgaaagatgcatttatctcagatggttgcttactgagagaatgcaacatcgagcattctgtgattggagtctgctcacgtgtcagctgtgggggggaactcaaggactccgtgatgatgggagcggacacctatgaaactgaagaagaagcttcaaagctactgttagctgggaaggtcccagttggaataggaaggaacacaaagataaggaactgtatcattgacatgaatgctaggattgggaagaacgtggtgatcacaaacagtaagggcatccaagaggctgatcacccggaagaagggtactacataaggtctggaatcgtggtgatcttgaagaatgcaaccatcaacgatgggtctgtcatatagatcggctgcgtttgcgtctacaaaacaagaacctacaatggtattgcatcgatggatcgtgtaaccttggtatggtaagagccgcttgacaggaagtcgagcgttcgggcgcaagatgcgttgtctggcatgctgttccttgaccatttgtgctgctagt

SEQ ID NO: 6483 - DNA, 410 bp, Zea mays
  unsure (1)..(410): unsure at all n locations; Clone ID: LIB3061-066-Q1-K6-A2
ttgaaagagcttagtaacacaaacttgggaggctttcagctacagcaaacccttacttttattgtttgacaacaaccaattgttcctattacatcaactttcacttactcatcttactcttcaaaccattttcatcgcatccactcatctatttctacctgcactgattcctaatatctttggtgaggcctgtccccttctttcaacatcaatttcttgcatccttcccactttctctttcaaacatattttcttaccaacaacaacctctcttacaacaccttctacctnctctcattcatacaatccttatcaaccctatctcctaccttcatctcatcaacttatttcatctatccctctcnctttttttaattcacctacatacctccaacatcattttcttcaac

SEQ ID NO: 6484 - DNA, 624 bp, Zea mays
  unsure (1)..(624): unsure at all n locations; Clone ID: LIB3061-066-Q1-K6-A3
agcttcanaaacacaccaagcgaacacattagcaacaacctaacaacaatggctaccaagatattatccctccttgcgcttcttgcgctttttgcgagcgcaacaaatgcgttcattattccacaatgctcacttgctccaagttccattattacacagttcctcccaccagttacttcaatgggcttcgaacacccagctgtgcaagcctataggctacaacaagcaattgcggcgagcgtcttacaacaaccaatttcccagttgcaacaacaatccttggcacatctaacaatacaaaccatcgcaacgcaacagcaacaacaattcctaccagcactgagccacctagccatggtgaaccctgccgcctacttgcaacagcagttgcttgcatcaaacccacttgctctggcaaacgtagttgcaaaccagccacaacaacagctgcaacagtttctgccagcgctcagtcaactagccatggtgaaccctgccgcctacctacaacagcaacaactgctttcatctagcccgctcgctgtggccaatgcacctacatacctgcaacaacaattgttgcaacagattgtaccagctctgactcagctagttgtggcaaac

SEQ ID NO: 6485 - DNA, 601 bp, Zea mays
  unsure (1)..(601): unsure at all n locations; Clone ID: LIB3061-066-Q1-K6-A5
ttcaagttttggnagttttccgcttaataggtcaagtgatcgcaaaatcctgcaagatggcagacttttagatttgcctttatcaacagcgttttataagcttatacttggacaggaacttgatttgtttgacatagtgtcatttgattctgagtttgggaagacattgcaagaactgcaagttcttgttgaacgaaagcagttccttgaatccacttctggcaagaaccagctacaagttgcagatttgtgtttccatggcgcttctattgaagatttgtgtttagattttactcttccaggttatcctgattatgtgcttaaagagggtgaaggaggcacaattgttaatatttataatttagaagagtatattactttggtggtggatgctacagttaagtcagggataaagcgacaggttgaggcatttagatcagggtttaatcaggtgtttgacatgtcatccctccacatattttcacctcaagaacttgactatctaatatgtggtcgacaagaaatttgggagtcggaatccctggtggataacataaaatttgatcatggatatactgctaaaagtcctgcgatcgtgaat

SEQ ID NO: 6486 - DNA, 605 bp, Zea mays
  Clone ID: LIB3061-066-Q1-K6-A6
ccgggtcgaacccacgccgtctcgtctaaatcgcgaacggcccccctgggggggggggggtttttttttttttttttttttttttttttttttttttttttttttttttttaccgatcgggacttaactacacacccaagcaattagttcatgcccttattaaggtgggccactggccaccactacactacattacactaggacagggggggagctacacatacttggccatatcacataaaccaaacagcatatataaaaagatgtcccaacatttttgcaccacccccaaaaacaggggccctgcaagccaaacttttaaaggcgcggccaccttctccttggggagcggggcaatctcctcgccttcaacccctggctcgcccccggggaccccgagggtgaacaacacgttctcccaatttttggcaaggcccttccaagaaaaaacctggataatgcaattcctcaccatttcctcgtaccccggggtgccgaccaccttgatggcgccctgcaatgggggggccacctttttgacgtccgccggctccacaacgttacaatcaaccctgaggcggcccatgtggaacccggtcttgcct

SEQ ID NO: 6487 - DNA, 589 bp, Zea mays
  Clone ID: LIB3061-066-Q1-K6-B1
ggccgtcgaggacgtgcactaccaaggttcctgattcccaaaggtggaaggtgatgcccctgttcagtaacctgcactacagcccggactacttcgaggacccacacaagttcgacccttcccgattcaaggtggcgccgcggcccggcacgttcctgccgttcgggagcggcgtgcacgcgtgccccggcaacgacctggccaagctcgagatgctcgtcctcatccaccgcctcgtcaccacctacaggtgggaggtggtggggtcgagcgacgacgtgacctacagcccgttcccggtgccgaaacgcggcctcctggcgaggctcagcagggccaccaccggcagcgcggtcgtcggccgtgcgccgccgctggacattggaggacctgcaggcgctagctatagctagctcctcggaccaaaaggcaatgcatgcacccaagcacccaggagatagataggcccggcaggcggcaggggacgacgacacacacatccagacatcgtccagtcacgtggcagtagcaagctagtactactactactgtgtgtgctgccattctgcatgcatgcgtttcctctcat

SEQ ID NO: 6488 - DNA, 526 bp, Zea mays
  unsure (1)..(526): unsure at all n locations; Clone ID: LIB3061-066-Q1-K6-B11
tgcacatagnaagtagaatccatgggcaagatggggcgagcaataacaaacaaaatattttccctccttatgctccttgctctttctacatgtgttgctaacgcgacaattttccctcaatgctcacaagctcctatagcttcccttcttcccccataccttccatcaattatagcttgggtgggggggagacccanctcttcaaccatataggcttcaacaagcaatcgcagcaagcaacatacctttatcgcccttgttgtttcaacaatcaccagccctatctttggtgcagtcattggtacaaaccatcagggcacaacagctgcagcaactcgtgctacctgtgatcaaccaagtagctctggcaaacctttctccctactctcagcaacaacaatttcttccattcaaccaactgtctacactgaaccctgctgcttatttgcagcaacaactattaccatttagccagctagctcctgcctactctcagcaccaacaacttcttccatttaaccaattg

SEQ ID NO: 6489 - DNA, 562 bp, Zea mays
  Clone ID: LIB3061-066-Q1-K6-B12
gaccaaaataataaccctccttgccctccttgctctttcagcaagcgctgctacctcgacttttattccacaatgctcacaacaatacctctctccggtgacagccgtttgttttcaatacccaactatacaatcctggggggggggggaggccctccaagcaagcatcttacggtcattagcattaaccctccaacaaccctatgctctattgcaacagccatccttagtgcatctgtatctccaaagaatcgcggcacaacaactacaacaacagttgctaccaacaatcaatcaagtagttgcagcgaaccttgctgcttacctccagcaacaacagtttcttccattcaatcaactagctggggtgaaccctgctatctacttgcaggcacaacagctactaccatttaaccaacttgtcgggagcccttatgccttcttactgcaacaacagcttctgccattccatctgcaagctgtggcaaacattgttgctttcttgagacaacaacatttgttgccattttacccacaagttgtgggaaacattaatgccttc

SEQ ID NO: 6490 - DNA, 550 bp, Zea mays
  Clone ID: LIB3061-066-Q1-K6-B2
cggcgaagcgccttaaacaaccaattgcccaattgcaacaacaatccttggcacatctaaccctacaaaccattgcaacgcaacaacaacaacaacaacagtttctgccatcactgagccacctagccgtggtgaaccctgtcacctacttgcaacagcagctgcttgcatccaacccacttgctctggcgaacgtagctgcataccagcaacaacaacagctgcaacagtttatgccagtgctcagtcaactagccatggtgaaccctgccgtctacctacaactactttcatctagcccgctcgcggtgggcaatgcacctacgtacctacaacaacagttgctgcaacaaattgtaccagctctgactcagctagctgtggcaaaccctgctgcctacttacaacagttgcttccattcaaccaactgggctgtgtcaaactctgctgcgtacctacaacagcgacaacagttacttaatccattggcagtggctaacccaatggtcgctacctttctgcagcagcaacaacaattgctgccataca

SEQ ID NO: 6491 - DNA, 602 bp, Zea mays
  unsure (1)..(602): unsure at all n locations; Clone ID: LIB3061-066-Q1-K6-B3
tgnaaaacccagctcttcagccctataggctccaacaagcaatcgcagcaagcaacatacctttatcacccttgttgtttcaacaatcgccagccctatctttggtgcagtcattggtacaaaccatcagggcacagcagctgcagcaactcgtgctacctgtgatcaaccaagtagctctggcaaacctttctccctactctcagcaacaacaatttcttccattcaaccaactgtctacactgaaccctgctgcttatttgcagcaacaactattaccattcagccagctagctactggctactctcagcaacaacaacttcttccatttaaccaattggccgcactgaaccccgctgcttatttgcagcagcaaatactactaccatttagccagctagctgcagcaaaccgtgcttccttcttgacacagcaacagttgctgcctttctaccagcagtttgcggctaaccccgcaaccctcttacaactacaacaattgttgccctttgtccaacttgctttgacagaccgagcggcctcctaccaacaacacatcattgggtggtgccctcttttagattgcttattagttgtaatt

SEQ ID NO: 6492 - DNA, 598 bp, Zea mays
  Clone ID: LIB3061-066-Q1-K6-B4
gtaagcagcagcaggaaaccctagcaccgccgcatccgcagccatgggtatcgacctcgttgccggtgggaggaacaagaagaccaagcgcacagcgccgaagtccgacgatgtttatctcaagctccttgtcaagctctaccgtttcttggtcaggaggaccaagagcaacttcaatgctgtcattctcaagaggctcttcatgagcaaaaccaatcgcccaccaatctccatgcgccgccttgtcaagttcatggaaggaaaggagaagaacattgctgtgattgttggcacagtcacagatgacaagaggatccaagaggttccagcaatgaaggttactgccctgaggttcaccgagacggcaagggccaggattgtcaatgctggtggggagtgcctcacatttgaccagcttgctctccgtgctccacttggcgagaacacagtcctcttgaggggccccaagaatgcccgtgaggcggtgaggcacttcggcaaggctcctggagtgccgcacagccacaccaagccatatgtgcgcctccaagggaaggaagttcgagaaggctcgtggcaggaggaacagccgtgggtt

SEQ ID NO: 6493 - DNA, 599 bp, Zea mays
  unsure (1)..(599): unsure at all n locations; Clone ID: LIB3061-066-Q1-K6-B6
caactagcaacatagnaaagcacaatagtgtaccaacaatggcagccaaaatttttgcctccttatgctccttggtctttctgcaagtgctgctacggcgaccattttcccgcaatgctcgcaagctcctatagcttcccttcttcccccgtacctctcaccagcggtgtcttcggtatgtgaaaacccaattcttcaaccctacaggatccaacaggcaatcgcagctggcatcttacctttatcacccttggtcctccaacaatcatcagccctattacaacagttacctttggtgcatttattggcacaaaacatcagggcacaacaactacaacaacttgtgctagcaaaccttgctgcctactctcagcaacagcagtttcttccattcaaccaactaggttcattgaactctgcttcttatttgcaacaacaacaactaccattcagccagctacctgctgcctacccccagcaatttcttccattcaaccaactagcagcattgaactctcctgcttatttacagcagcaacaactactaccattcagccagctagctggtgtgagccctgctaccttcttgacacaaccac

SEQ ID NO: 6494 - DNA, 593 bp, Zea mays
  unsure (1)..(593): unsure at all n locations; Clone ID: LIB3061-066-Q1-K6-B7
ccgnaaaacccgttggtgagaagtacggggggaataagggaagctataggagcttgtgagcattgtggngaaaacccaattcttcaaccctacaggatccaacaggcaatcgcagctggcatcttacctttatcacccttgttcctccaacaatcatcagccctattacagcagttacctttggtgcatttattggcacaaaacatcagggcacaacaactacaacaacttgtgctagcaaaccttgctgcctactctcagcaacagcagtttcttccattcaaccaactagctgcattgaactctgcttcttatttgcaacaacaacaactaccattcagccagctatctgctgcctacccccagcaatttcttccattcaaccaactgacagcattgaactctcctgcttatttacagcagcaacaactactaccattcagccagctagctggtgtgagccctgctaccttcttgacacaaccacagttgttgccgttctaccagcacgctgcgcctaacgctggcaccctcttacaactgcaacaattgctgccattcaaccaacttgctttgacaaacccagcagcatt

SEQ ID NO: 6495 - DNA, 609 bp, Zea mays
  Clone ID: LIB3061-066-Q1-K6-B9
ggctcacgctcacccgtgggaaaaaggtgacatctggaatgagtccagcttttcaatcttttatgggtgtgcccttggattggtgccttgcaggagtgggaaaccaccagtttatgataactctcatgggataaaattggttactgccaccacacgtcgaaattctccaaatagtatagattccaagatacatgacaacaatcttatcaacaatattttggcaaagatagaagggaatcttgcccaggctgaggatgccattatgctagataagggtgggtttgtatcagaaacaaacgcaacaaatatttttatggtcaaaaagggaattgtattgacacctcatgctgactattgccttccaggcattacgcgagcaactgtcatggatcttgtggtgaaagaaaactttgtgttacatgaacgacgcattattctgtcagaattccatgctgcagatgaggtatggacaaccggaacaatgggtgaaattacaccggttgtaatgattgatggacgtgaaatcggcgacgggaaaattggtccagtcactagacaaatccagaaagcatacaagatcctgacagcagggcaagggagtaccgatac

SEQ ID NO: 6496 - DNA, 615 bp, Zea mays
  unsure (1)..(615): unsure at all n locations; Clone ID: LIB3061-066-Q1-K6-C10
ctgctattgcgttccatatggtaatgcgtgggtgttgtgctccccactagctgaagcaaagaagaatgggacagatttggtggaaacatttgctagttacgtngaaagattattacanttggaaaatttggggcgtcagtagcatcatatgatcagcaatatttgaagaacacaactcctgctgaatcctcatatagactatggtggtaccaagtttgcagtgaggttgcatatttccaggtggcaccaaaaaacgatagtgttcgttccccaaagatcgacacgaggtaccatttggacttgtgcagaaatgttttcggcgaaggagtctaccctgatgtctttatgacaaacttatactatggaggcacaggaattgcaggttctaaaattgtttttgcaaatggatctcaagacccatggcgccacgcttctaagcagaaatcatcagacgaattgccatcatacttaattgagtgcaagaactgcggacactgcagtgatctctctggatgccctcaagctccttcaaacattgaaggtgattcatccaagtgctcacctcccgaagctctgaacaaagtaaggaaagagattgtcgatcacatttgacct

SEQ ID NO: 6497 - DNA, 547 bp, Zea mays
  unsure (1)..(547): unsure at all n locations; Clone ID: LIB3061-066-Q1-K6-C11
gcgagaacaacaagagcaacgcctgctncgacncagggcaacagcagaggccgtgcgcggcggggcagaagtactacgggcgcggcccgctgcagatctcgtggaactacaactacgggcccgccgggagggacatcggcttcaacgggctcgccgaccccaacagggtggcgcaggacgcggggatcgcgttcaagacggcgctctggttctggatgaacaacgtgcaccgcctgatgccgcagggcttcggcgccaccatcagggccatcaacggcgccctcgagtgcaacgggaacaaccccgcccagatgaacgcgcgcgtcggctactacaagcagtactgccagcagctccgcgtcgacccagggcccaacctcacttgctaggccagcagctcctgctagctcgtccacaataaatgctcggcgtcgcaccctcgcgaaaccaagagtttactactgactagtacgagctagctagcatgcagtaataataatcatcgtaataataataataaaacgacggggctgagccactttgttcg

SEQ ID NO: 6498 - DNA, 648 bp, Zea mays
  unsure (1)..(648): unsure at all n locations; Clone ID: LIB3061-066-Q1-K6-C12
cccggtcgacccagcgtccgcggnanaacgagcacanncggagcggannncgtcccgggatcccggccacacaccggcgcaaggcgaggaatctgcctccccctcctcgtggcctccccgaaagctccagagtttcacaccagggctgtggtcacaatacaaagcttatgaggatgcagttgtggagaacattaaaggagagggggggggatgctctggttcttgtgagagagcatcaggcggaggcaattggatgtgccactgttgcaggattcattctgttcagaggccctcgaagatttttataccgcaatacctttggccgtttaaagactgagaaggatttactgaatgatgccgagcaaagtatgatggagtaccaaacatctattcagaacttgaagaaagaatcaaaatacactcttgacaaagtagctatcggtgaaagcgatgtgcagcgtgggcgaactgatctgagatctactgggaagcagatacaatctcttataggttccatttacaaagcanaatctacagctgcaggtctgatggatagactaagaaccattccaaccaggcaatctctcgagctgcgagcagaggtggcttccatggcctccgatttgaagaaccagaggtgtgccttgc

SEQ ID NO: 6499 - DNA, 520 bp, Zea mays
  Clone ID: LIB3061-066-Q1-K6-C3
gtagttgcaaaccagcaacaacaacagctacaacagtttctgccaacgctcagtcaactagccatggtgaaccctgccgcctacgtacaacaacaacaactgctttcatctagcccgctcgctgtgggcaatgcacctacatacctgcaacaacaattgttgcaacagattgtaccagctctgactcaactagctgtggcaaaccctgttgcctacttgcaacagctgcttccattcaaccaactgactctgtcgaactctgctgcgtacctacaacagcgacaacagttacttaatccattggtagtggctaacccattggtcgccgccttcctacagcagcaacaattgctgccatacaaccagttctctttgatgaatcctgtcttgtcgaggcagcaacccatcgttggaggtgccatcttttagattacatatgagatgtactcgataatggtgccctcataccgacgtgtgtttcctagaaataatcaatatattgattgagatttatctcgat

SEQ ID NO: 6500 - DNA, 606 bp, Zea mays
  Clone ID: LIB3061-066-Q1-K6-C5
caactagcaacatacactagtgaatacactagcaacatcttagcaccaatgggagccaagatttttgccctccttgccctccttgctctttcagcaagcgctgctacctcgacttttattccacaatgctcacaacaatacctctctccggtgacagccgcgggatttcaatacccaactatacaatcctacatggtacaagaggccatccaagcaagcatcttacggtcattagcattaaccctccaacaaccatatgctctattgcaacagccatccttagtgcatctgtatctccaaagaatcgcggcacaacaactacaacaacagttgctaccaacaatcaatcaagtagttgcagcgaaccttgctgcttacctccagcaacaacagtttcttccattcaatcaactagctggggtgaaccctgctatctacttgcaggcacaacagctactaccatttaaccaacttgtcgggagcccttatgccttcttactgcaacaacagcttctgccattccatctgcaagctgtggcaaacattgttgctttcttgagacaacaacatttgttgccattttacccacaagttgtgggaaacatt

SEQ ID NO: 6501 - DNA, 102 bp, Zea mays
  unsure (1)..(102): unsure at all n locations; Clone ID: LIB3061-066-Q1-K6-C7
aagcacacaaccccaaccacccacnccccaacccccacaagggggggaacagcgaaaacccaccccaaccaccagccccaacaacaaccccaccgcaacaac

SEQ ID NO: 6502 - DNA, 446 bp, Zea mays
  unsure (1)..(446): unsure at all n locations; Clone ID: LIB3061-066-Q1-K6-C8
gcctccctttttttttttttttagaaaagtagctttcgttatggggtgggaaaccaaaaacatcaaacaaaaaactttattattgaactataactcataacaaactaaaaaaagcaccacccttattgcctcttgatacaaccaccattacttcccttttctaccaacactcatccncctaaattctggggatgttggggggaaacaactaccctactctnccctctcctccactaatcaattctctttatcaccactttctcccaccaccctactttacccttaaaaccaacattcctttttacacatatcccttcacaccatttcattctcacaccaccaccaattcttaccacttctacaccctttctttccttntcaacccctcctcctttttccattaccccctcctttcttccaaccctttctctcttattaacctcttc

SEQ ID NO: 6503 - DNA, 625 bp, Zea mays
  unsure (1)..(625): unsure at all n locations; Clone ID: LIB3061-066-Q1-K6-C9
tnanaaagcacaatagtgtaccaacggtgggaggcggggtttttgcttccttatgctccttggtctttctgcaagtgctgctaccgcaaccattttcccacaatgctcacaagctcctatagcttcctttcttcccccatacctctcaccagcggtgtcttcagtatgtgaaaacccaatggtggaaccctacaggatccaacaggcaatcgcagcaggcatcttacctttatcacccttgttcctccaacaaccgtcagccctattacagcagttacctttggtgcatttgttggcacaaaacatcaaggcacaacaactacaacaacttgtgctaggaaaccttgctgcctactctcagcaacagcagtttcttccattcaaccaactggctgcattgaactctgctgcttatttgcaacaacaactaccattcagtcagctagctgctgcctacccccagcaatttcttccattcaaccaactggcagcattgaactctgctgcttatttacaacagcaacagctaccaccattcagccagctagctgatgtgagccctgttgccttcttgacacacaacagttgttgccgttctacctgcacgctgcgcctaacgctggca

SEQ ID NO: 6504 - DNA, 593 bp, Zea mays
  unsure (1)..(593): unsure at all n locations; Clone ID: LIB3061-066-Q1-K6-D10
cttcgnctagnanacctccccaacaacaacgcaaatagaaacaattgctggtttacaaatgccattaaaccctggttagagaagtgcaaatataattctaatgcagtcttagacatacttcacgcgagtgtgaaatgtaacgttatatacttgtatactgaccttgttacttaatcattgtgatgttttataatttttttgttatgatttcatgtttaatagctctgtacagcatgtgtgatgataacattgttacttcctgtgatgttatatcctctctatgtgagtggtgatggcctcatggtaagtctacttctagttctatgtgtttacattattttaattttggcaatcttcacaatctaaaagtctgtcagaacaggtcatggaagtccctgaaatatctcctatgtcagaatacttgtccactcatgatgttattctttctgtggatggtctgaaaataaccagaactgatgattggatcaagattctgaaccaaggtactacagcgaaatctagggatcctgaattccttgaaggctctcatagatatgttgccactagttctaccaagggttattgcgtgcccg

SEQ ID NO: 6505 - DNA, 608 bp, Zea mays
  unsure (1)..(608): unsure at all n locations; Clone ID: LIB3061-066-Q1-K6-D11
gtgngaatccatacacaacagggacgggggcgaccaagatattttccctccttatgctccttgctctttctgcatgtgttgctaacgcgacaattttccctcaatgctcacaagctcctatagcttcccttcttcccccataccttccatcaatgatagcttcagtatgtgaaaacccaggtcttcagccctataggctccaacaagcaatcgcagcaagcaacatacctttatcacccttgttgtttcaacaatcgccagccctatctttggtgcagtcattggtacaaaccatcagggcacagcagctgcagcaactcgtgctacctgtgatcaaccaagtagctctggcaaacctttctccctactctcagcaacaacaatttcttccattcaaccaactgtctacactgaaccctgctgcttatttgcagcaacaactattaccattcagccagctagctactgcctactctcagcaacaacaacttcttccatttaaccaattggccgcactgaaccccgctgcttatttgcagcagcaaatactactaccatttagccagctagctgcagcaaaccgtgcttccttcttgacacagcaacag

SEQ ID NO: 6506 - DNA, 344 bp, Zea mays
  unsure (1)..(344): unsure at all n locations; Clone ID: LIB3061-066-Q1-K6-D12
tactcaaggtggcaagagcaaatttggagcggactccaaaaccctccttagggtcctgtgtcacagaaatgattcagaggcatcacattacgtgaagaagcaattcaagatacccagctcagctccnagcgcgggggggggggcgaacaaaaaacagatatcgaacaggacagtgcagccttgctcgtaacccaagaaacggtgctccaccgcccattttcatgtttgtgtaacagttattattcatcggtaacactaggactttgggtggacgcggcagtaagcatgtatttacacaaatactaacacactggtcctgtattgattggtactagttttggacc

SEQ ID NO: 6507 - DNA, 613 bp, Zea mays
  unsure (1)..(613): unsure at all n locations; Clone ID: LIB3061-066-Q1-K6-D2
gcaacatacctttatcgcccttgttgtttcaacaatcaccagccctatctttggtgcagtcattggtacaaaccatcagggcacaacagctgcagcaactcgtgctacctgtgatcaaccaagtagctctggcaaacctttctccctactctcagcaacaacaatttcttccattcaaccaactgtctacactgaaccctgctgcttatttgcagcaacaactattaccatttagccagctagctactgcctactctcagcaacaacaacttcttccatttaaccaattggccgcactgaaccccgctgcttatttgcagcagcaaatactactgccatttagcgagctagctgcagcaagtcgtgcttccttcttgacacagcaacagttgctgcctttctacaagcagtttgcggctaaccccgcaaccctcttacaactacaacaattgttgccctttgtccaacttgctttgacaaacccagcagcctcctaccaacaacacatcanttggtggtgccctcttttagattgattattagttgtaattcaataataaagttttttggatgatgtatgtggccaaccagaaataagaagttacatttccag

SEQ ID NO: 6508 - DNA, 621 bp, Zea mays
  Clone ID: LIB3061-066-Q1-K6-D3
cttcgccgtgccgcacctgcgaggagaggagacttcgccgcgaagctcaccatgatctcgccggagaggagctcgtcacagagccagcggtcggcggcggcgggggcgccgttcctgtcgatctccgtcacggatcccgtaaagatgggtaccggcgtgcagtcctacatctcctaccgcgtcatcaccaagaccaacctccctgaatttgagggaccagagaaaattgttattcggcgctatagtgattttgaatggttgcatgatcggcttgctgagaggtacaaaggcatttttataccccctcttccggagaagaatgctgttgagaaattccggtttagcaaggagttcattgaattgcggcgtcaagctctggatttattcgttaacaggatagcttcacaccctgaactcaagcaaagtgatgtcttgaggacatttttgcaagcagatgaagagataatggatagggcaagatcttatgagactggtatttttaagaaaccggcagatttcatacagatgtttaaggatgtgcagtcaaaagtcagtgatgttgttctgggaaaagaaaagcctgtggaggaatctactcctgaatatgagaagcttaaaaat

SEQ ID NO: 6509 - DNA, 608 bp, Zea mays
  Clone ID: LIB3061-066-Q1-K6-D5
caaaaaaaaaaaaagtactctatataatatctatacgaggagcgataagaacaccgaacagcagggattatttactccaccactacaggtccatttatttactcgcaatataaaattaccgatcggtacttaactacacacgcaagcaattagttcatgcgcttattaggttgtgccactggccaccactacactacattacactagcacaagcaagcagctacacatacttgtccatatcacataaacgaaacagcatatataagaagatgtcccaacatctttgcaccacgcgcgagatcaggggccctgcaggccgaactcttcagggcgcggccacgttctccttggcgagcggcgcgatctcctcgccttcgacccctggctcgccgccggcgaccccgaggctgagcagcacgttctcccagttcttggcagggcccttccaggagagatcctggatcatgcagttcctcaccatctcctcgtacgccggcgtgccgaccaccttgatggcgcgctgcaatgtggtggccaccttcttgacgtccgccggctccacgacgttacagtcgacgctgaggcggcccatgtggaacccggtcttg

SEQ ID NO: 6510 - DNA, 616 bp, Zea mays
  Clone ID: LIB3061-066-Q1-K6-D6
ggtctttctgcagtgctgctacggcgaccattttcccgcaatgctcgcaagctcctatagcttcccttcttcccccgtacctctcaccagcggtgtcttcggtatgtgaaaacccaattcttcaaccctacaggatccaacaggcaatcgcagctggcatcttacctttatcacccttggtcctccaacaatcatcagccctattacaacagttacctttggtgcatttattggcacaaaacatcagggcacaacaactacaacaacttgtgctagcaaaccttgctgcctactctcagcaacagcagtttcttccattcaaccaactaggttcattgaactctgcttcttatttgcaacaacaacaactaccattcagccagctacctgctgcctacccccagcaatttcttccattcaaccaactagcagcattgaactctcctgcttatttacagcagcaacaactactaccattcagccagctagctggtgtgagccctgctaccttcttgacacaaccacagttgttgccgttctaccagcacgttgcgcctaacgctggcaccctcttacaactgcaacaattgctgccattcaaccaacttgctttgac

SEQ ID NO: 6511 - DNA, 588 bp, Zea mays
  unsure (1)..(588): unsure at all n locations; Clone ID: LIB3061-066-Q1-K6-D7
anacacagcacatanaagtggaatccagtagcaacaatagagcaacaatggcgaccaagatattttccctccttatgctccttgctctttctacatgtgttgctaacgcgacaattttccctcaatgctcacaagctcctatagcttcccttcttcccccataccttccatcaattatagcttcaatatgtgaaaacccagctcttcaaccatataggcttcaacaagcaatcgcagcaagcaacatacctttatcgcccttgttgtttcaacaatcgccagccctatctttggtgcagtcattggtacaaaccatcagggcacaacagctgcagcaactcgtgctacctctgatcaaccaagtagctctggcaaacctttctccctactctcagcaacaacaatttcttccattcaaccaactgtctacactgaaccctgctgcttatttgcagcaacaactattaccatttagccagctagctactgcctactctcagcaacaacaacttcttccatttaaccaattggccgcactgaaccccgctgcttatttgcagcagcaaatactactaccatttagccagc

SEQ ID NO: 6512 - DNA, 616 bp, Zea mays
  unsure (1)..(616): unsure at all n locations; Clone ID: LIB3061-066-Q1-K6-D8
gcccaactagcaacatannaaagcacagtgggggaccaacaatggcagccaaaatattttgcctccttatgctccttggtctttctgcaagtgctgctacggcgaccattttcccgcaatgctcgcaagctcctatagcttcccttcttcccccgtacctctcaccagcggtgtcttcggggtgggaaaacccaattcttcaaccctacaggatccaacaggcaatcgcagctggcatcttacctttatcacccttgttcctccaacaatcatcagccctattacaacagttacctttggtgcatttattggcacaaaacatcagggcacaacaactacaacaacttgtgctagcaaaccttgctgcctactctcagcaacagcagtttcttccattcaaccaactaggttcattgaactctgcttcttatttgcaacaacaacaactaccattcagccagctacctgctgcctacccccagcaatttcttccattcaaccaactagcagcattgaactctcctgcttatttacagcagcaacaactactaccattcagccagctagctggtgtgagccctgctaccttcttgacacaaccacagttgtttgccgt

SEQ ID NO: 6513 - DNA, 623 bp, Zea mays
  unsure (1)..(623): unsure at all n locations; Clone ID: LIB3061-066-Q1-K6-D9
ctccgnctagnaacctccccaacacgagcgggggggaaacattgctggtttacaaatgccattaaaccctggttagagaagtgcaaatataattctaatgcagtcttagacatcacttcacgtcgagtgtcgaaatgtaacgttatatacttcgtatactgcaccttagctactttaatcattggggggggggggataatttttttgttatgatttcatgttcaatagctctgtacagcatgtgtgatgataacattactacttcctgtgatgttatatcctctctatgtgagtggtgatggcctcatggtaagtctacttctagttctatgtgtctacattattttaattttggcaatcttcacaatctaaaagtctgtcaaaacacgtcatggaagtccctgaaatatctcctatgtcaaaatacttgtccactcatgatgttattctttctgtggatggtctgaaaataaccagaactgatgattggatcaagattctgaaccacagtactacagcgaaatctagggatcctgaattccttgaaggctctcataaatatgttgccactagttctaccaaaggctattgcgtgccctattcatggatagatgcaagcaaaa

SEQ ID NO: 6514 - DNA, 606 bp, Zea mays
  Clone ID: LIB3061-066-Q1-K6-E1
cacagtgctcacttgctcctatgccttattccacagttcctcccaccagttacttcatgggcttcgaacatccagccgtgcaagcctacaggctacaactagcgcttgcggcgagcgccttacaacaaccaattgcccaattgcaacaacaatccttggcacatctaaccctacaaaccattgcaacgcaacaacaacaacaacaacagtttctgccatcactgagccacctagccgtggtgaaccctgtcacctacttgcaacagcagctgcttgcatccaacccacttgctctggcgaacgtagctgcataccagcaacaacaacagctgcaacagtttatgccagtgctcagtcaactagccatggtgaaccctgccgtctacctacaactactttcatctagcccgctcgcggtgggcaatgcacctacgtacctacaacaacagttgctgcaacaaattgtaccagctctgactcagctagctgtggcaaaccctgctgcctacttacaacagttgcttccattcaaccaactggctgtgtcaaactctgctgcgtacctacaacagcgacaacagttacttaatccattggcagtggcta

SEQ ID NO: 6515 - DNA, 458 bp, Zea mays
  unsure (1)..(458): unsure at all n locations; Clone ID: LIB3061-066-Q1-K6-E10
aacaccaaccncccccaacaacccaccccccccnncccccccccccccnccaccnaccccacccccnccccncanccnnccacancncccactccccccccacccccnccnnccacaacccccccccgggggggggggccggcnncncccncccncccnccccccacccccccnnncnncaaccaacccccncccccccccccccccccccccccannccccaccccnnccccccccccccccccccnccccccccccccccccccccccccccccacccccccccccccccncccnccccaccacccccccccccanccccccccccccccccccccccccccccccccnccccccccccccccccccccnccctcccccccccccccccccccccncccnccccnccccacccccccccccccccccccccccccccccccccccccccccccacc

SEQ ID NO: 6516 - DNA, 600 bp, Zea mays
  unsure (1)..(600): unsure at all n locations; Clone ID: LIB3061-066-Q1-K6-E11
cagcaagcaacatagnaaagtanaaggcgtggggggcggtagnagcaacaatggcgaccaagatattttccctccttatgctccttgctctttctacatgtgttgctaacgcgacaattttccctcaatgctcacaagctcctatagcttcccttcttcccccataccttccatcaattgtggggggggggtgggaaaacccagctcttcaaccatataggcttcaacaagcaatcgcagcaagcaacatacctttatcgcccttggtggttcaacaatcaccagccctatctttggtgcagtcattggtacaaaccatcagggcacaacagctgcagcaactcgtgctacctgtgatcaaccaagtagctctggcaaacctttctccctactctcagcaacaacaatttcttccattcaaccaactgtctacactgaaccctgctgcttatttgcagcaacaactattaccatttagccagctagctactgcctactctcagcaacaacaacttcttccatttaaccaattggccgcactgaaccccgctgcttatttgcagcagcaaatactactgccattttacgagctagctgcag

SEQ ID NO: 6517 - DNA, 599 bp, Zea mays
  unsure (1)..(599): unsure at all n locations; Clone ID: LIB3061-066-Q1-K6-E2
cgccgtccgttttngacattcagaaacacacctagcgaacgcacttagcaacgacctaacaacaatggctaccaagnaattatccctctttgcgcttcttgccctttttgtgagcgcaacaaatgcgttcattattccacaatgctcacttgctcctagtgccattattccacagttcctccctccagttacttcaatgggcttcgaacacccagctgtgcaagcctacaggctacaacaagcgcttgcggcgagcgtcttacaacaaccaattgcccaattacaacaacaattcttggcacatttaaccatacaaaccattgcaacgcaacagcaacaacaatttctaccagcactgagccaactagctgtggtgaaccctgtcgcctacttgcaacagcagttgcttgcatccaacccacttgctctggcaaacatagttgcgtaccaacaacaacaacaattgcaacagtttctaccagcgctcagtcaactagccatggtgaaccctgccgcctacctacaacagcaacaactgatttcatctagccctctcgctgtgggtaatgcacctacatacctgcaacaacagttgctgc

SEQ ID NO: 6518 - DNA, 591 bp, Zea mays
  unsure (1)..(591): unsure at all n locations; Clone ID: LIB3061-066-Q1-K6-E5
nancaacatagnaaagcacaatagtgtaccaacaatggcagccaaaatattttgcttccttatgctccttggtctttctgcaagtgctgctaccgcaaccattttcccacaatgctcacaagctcctatagcttcctttcttcccccatacctctcaccagcggtgtcttcagtatgtgaaaacccaattcttcaaccctacaggatccaacaggcaatcgcagcaggcatcttacctttatcacccttggtcctccaacaaccggcagccctattacagcagttacctttggtgcatttgttggcacaaaacattaaggcacaacaactacaacaacttgtgctaggaaaccttgctggctactctcagcaacagcagtttctttcattcaaccaactggctgcattgaactctgctgcttatttgcaacaacaactaccattcagtcagctagctgctgcctacccccagcaatttcttccattcaaccaactggcagcattgaactctgctgcttatttacaacagcaacagctaccaccattcatccagctagctgatgtgagccctgttgccttcttgacacaaca

SEQ ID NO: 6519 - DNA, 625 bp, Zea mays
  unsure (1)..(625): unsure at all n locations; Clone ID: LIB3061-066-Q1-K6-E6
caactagcaacatagnaaagcacaatagtgtaccaacaatggcagccaaaaattttgcttccttatgctccttggtctttctgcaagtgctgctaccgcaaccattttcccacaatgctcacaagctcctatagcttcctttcttcccccatacctctcaccagcggtgtcttcagtatgtgaaaacccaattcttcaaccctacaggatccaacaggcaatcgcagcaggcatcttacctttatcacccttgttcctccaacaaccgtcagccctattacagcagttacctttggtgcatttgttggcacaaaacatcaaggcacaacaactacaacaacttgtgctaggaaaccttgctgcctactctcagcaacagcagtttcttccattcaaccaactggctgcattgaactctgctgcttatttgcaacaacaactaccattcagtcagctagctgctgcctacccccagcaatttcttccattcaaccaactggcagcattgaactctgctgcttatttacaacagcaacagctaccaccattcagccagctagctgatgtgagccctgttgccttcttgacacaacaacagttgttgccgttctacctgcacgctgcg

SEQ ID NO: 6520 - DNA, 379 bp, Zea mays
  Clone ID: LIB3061-066-Q1-K6-E7
ccgggtcgaccagctccgaaccacacccaccaaaaagggagagggggcacaagaaaaaagggagcaagaactacctcctacctactgctgtttctacaccgtgcccacccaccaaatctacaacacaacctcctatccacccttcaccaccaaccttcataggggggggggaaatcttaaaacaaccctatccaacacatagcctaacaaaaaataccttaacaaacaaacctctatcccctgaacctccaacaacaccaaccctatcttgcacacacatcgcaacacatcactcaccacaacaactacaccaactctgcgacacctaaccaaccaccatactctacaaaaccttactccctaccatcaacaacaacaa

SEQ ID NO: 6521 - DNA, 621 bp, Zea mays
  unsure (1)..(621): unsure at all n locations; Clone ID: LIB3061-066-Q1-K6-E9
tagaacaactagcaacatagnaaagcacaatagggtaccaacaatggcagccaaaatattttgcctccttatgctccttggtctttctgcaagtgctgctacggcgaccattttcccacaatgctcacaagctcctatagcttcccttcttcccccgtacctctcaccagcggtgtcttcggtgtgtgaaaacccaattcttcaaccctataggatccaacaggcaatcgcagctggcatcttacctttatcacccttgttcctccaacaatcatcagccctattacagcagttacctttggtgcatttattggcacaaaacatcagggcacaacaactacaacaacttgtgctagcaaaccttgctgcctactctcagcaacaacagtttcttccattcaaccaactagctgcattgaactctgcttcttatttgcaacaacaacaactaccattcagccagctatctgctgcctacccccagcaatttcttccattcaaccaactgacagctttgaactctcctgcttatttacagcagcaacaactactaccattcagccagctagctggtgtgagccctgctaccttcttgacacaaccacaattgttgccgttcta

SEQ ID NO: 6522 - DNA, 567 bp, Zea mays
  Clone ID: LIB3061-066-Q1-K6-F10
agcttgtgaggttttcaaatattctggactggggggccaacaattaaaagagctaaggattctgccaacattcggagatcacagttccatgggaattttgtatgaagatatttcaaagttttataaaatggctcctataacccctgtttggaagagtaatgaagcagcagtgattattcaaagatcccagtgactcactatgatcgatcaaaacacctgctaccacatgattattcaaagttctatctgagctagcttgtgcttcaatttgatctatctgtccgtcctcacggtccacatttgttgcttgcgtcaagactaggccgaggtgatgtcgacgctcatctacagagtgaggaactcgccccccagcaggtgagaacaatgctcacagtgatttcattcatgaactttccttaagtaataacttcgagtttgtcgaggctgttctgaaattgtctttgaaggtaaataatttgtgcattatttggactggtttaaaattgtgttcaaaggcatatggagccaattttcgcagggattttccgggatgaacggattcaatcg

SEQ ID NO: 6523 - DNA, 598 bp, Zea mays
  unsure (1)..(598): unsure at all n locations; Clone ID: LIB3061-066-Q1-K6-F11
cagctcaaaaccaaatcgacggggtcggccctngtgcgagctaagcacccgcacgaccacccgcctcctgccggtcaccgggacctagcatcgccgggcggcggcgggggaggggaaggtaggcgatgaggaaacgtgagcgggagaatccgtgcgggatctgcgggcactaccagggtgggaggagggggaggtatgcggggtgtgcggccaccgctggaaaccgtcggacggggagggcgccccgtcgaggcacgagtccgccttccccacagaggtgctcaaggacttcctcttcctcgggagctacgacaacgcctcacgctccgaggtcctcaggacgctcagtatctcccacatccttaatactgtgcctgattgccacaatctgtacaagaattcattcacatatcacagtcttcaacgggacaggcctttggattttgatgaggcaaaccagtatctagagaaatgtgaaagagataaatcgcgtgttcttgttcattgcatgactggaaaaacaggtctgctgctattgttgcagccttcttgatgaagtctanagggtggagacttgcacagtcttttcaatgggtga

SEQ ID NO: 6524 - DNA, 570 bp, Zea mays
  unsure (1)..(570): unsure at all n locations; Clone ID: LIB3061-066-Q1-K6-F12
ggaatcaccgcaccaggacccttgttcgccgccgccgcctctgatctccgcgaggttgtcaggattcaatatgtcgaccagcacattcgctacttcctgcacgctgttgggcaatgttagaacaacgcangcctggggggggggggggaanagcccttcgtctctaagcttcttcagccaagttacgaaggttccaagcctgaagacctccaagaaactggatgtctccgccatggctgtatacaaggtgaagcttgtcgggcctgaaggtgaagagcacgagtttgatgctccagacgacgcctacatccttgacgcagccgagactgccggtgtggagttgccatactcgtgccgtgctggggcttgctccacctgtgccggcaaaatcgagtctggttcggttgaccagtcggatgggtccttccttgatgacgggcagcaggaggaaggttatgtgctgacatgcgtctcctacccaaagtccgactgcgtcatccacacccnacaagaaggcgacctgtactagggctagggctttccaatttggcgagggacaaaaaatgctct

SEQ ID NO: 6525 - DNA, 620 bp, Zea mays
  unsure (1)..(620): unsure at all n locations; Clone ID: LIB3061-066-Q1-K6-F2
cagcaagcaacatacctttatcgcccttgttgtttcaacaatcgccagccctatctttggtgcagtcattggtacaaaccatcagggcacaacagctgcagcaactcgtgctacctctgatcaaccaagtagctctggcaaacctttctccctactctcagcaacaacaatttcttccattcaaccaactgtctacactgaaccctgctgcttatttgcagcaacaactattaccatttagccagctagctactgcctactctcagcaacaacaacttcttccatttaaccaattggccgcactgaaccccgctgcttatttgcagcagcaaatactactaccatttagccagctagctgcagcaaaccgtgcttccttcttgacacagcaacagttgctgcctttctaccagcagtttgcggctaaccccgcaaccctcttacaactacaacaattgttgccctttgtccaacttgctttgacagacccagcggcctcctaccaacaacacatcattgngtggtgccctcttttagattgcttattagttgtaattcaataataaagttttttggatgatgtatgtggccaaccagaaataagaagttacatttccaaa

SEQ ID NO: 6526 - DNA, 613 bp, Zea mays
  Clone ID: LIB3061-066-Q1-K6-F3
taattgtttaccatggaccagattttgttaggaagatctgatgttgcaggttggggtgcattcattaaggtcagataaccgaacaaaaacctctgagtgcgatacttcctttcttgttctggctaattttccttgcaatatgtagaatcctgtaaataaaaatgattatcttggagaatatactggtgaattgatctctcacaaggaagcagacaaacgcggcaaaatttatgaccgggcaaactcatcttttctgttcgatttaaatgaccagtatgtgttggatgcttatcgcaagggggacaaattgaagttcgcaaatcactcatctaaccccaactgctatgcaaaggtgatgctggtggctggcgaccatcgggttggtatatatgcgaaggagcatattgaggctagcgaggaactcttttatgattatcgttatggacctgaccaggctccagcttgggctaggagacccgaaggatcaaagaaggacgaggcatccgtctctcaccgtcgagcacacaaagtggctcgatagctgaagagtcgctccggatgatacaatatgcagtaaacttaatacttaatacatgattcagtcctagttcat

SEQ ID NO: 6527 - DNA, 612 bp, Zea mays
  unsure (1)..(612): unsure at all n locations; Clone ID: LIB3061-066-Q1-K6-F7
gnacccaactagcaacatagnaaagcacaatagtgtaccaacaatggcagccaaaatattttgcttccttatgctccttggtctttctgcaagtgttgctaccgcaaccattttcccacaatgctcacaagctcctatagcttcccttcttcccccatacctctcaccagcggtgtcttcaatgtgtgaaaccccaattgttcaaccctacaggatccaacaggcaatcgcaacaggcatcttaccattatcacccttgttcctccaacaaccgtcagccctattacagcagttacctttggtccatttggtggcacaaaacatcagggcacaacaactacaacaacttgtgctagcaaaccttgctgcatactctcagcaacatcagtttcttccattcaaccaactggctgcattgaactctgctgcttatttgcaacaacaattaccattcagccagctagttgctgcctacccccagcaatttcttccattcaaccaactagcagcattgaactctgctgcttatttacagcagcaacaactactaccatttcaccagctagctgatgtgagccctgctgccttcttgacacaacaacagttgttgcc

SEQ ID NO: 6528 - DNA, 594 bp, Zea mays
  unsure (1)..(594): unsure at all n locations; Clone ID: LIB3061-066-Q1-K6-G1
gnccaactagcaacatagnaaagcacaatagtgtaccaacaatggcagccaaaatattttgcttccttatgctccttggtctttctgcaagtgttgctaccgcaaccattttcccacaatgctcacaagctcctatagcttcccttcttcccccatacctctcaccagcggtgtcttcaatgtgtgaaaccccaattgttcaaccctacaggatccaacaggcaatcgcaacaggcatcttaccattatcacccttgttcctccaacaaccgtcagccctattacagcagttacctttggtccatttggtggcacaaaacatcagggcacaacaactacaacaacttgtgctagcaaaccttgctgcatactctcagcaacatcagtttcttccattcaaccaactggctgcattgaactctgctgcttatttgcaacaacaattaccattcagccagctagttgctgcctacccccagcaatttcttccattcaaccaactagcagcattgaactctgctgcttatttacagcagcaacaactactaccattcagccagctagctgatgtgagccctgctgccttcttgacac

SEQ ID NO: 6529 - DNA, 619 bp, Zea mays
  Clone ID: LIB3061-066-Q1-K6-G11
ggcttcgacacccactgtgcagagttgtaggggacaacaagcgcttgcggcgagcgtcttagaacaaccaattgcccaattacaacaacaatccttggcacatctaaccatacaaaccatcgcaacgcagcagcaacaagcactgagccacctagccgtggtgaaccctatcgcgcgggggggggcagcagctgcttgcatccaacccacttgctttggcaaacgtagctgcataccaacaacaacaacagttgcaacagtttctaccagcgctcagtcaactagccatggtgaaccctatcgcctacctacaacagcaacaacttctttcatctagcccgctcgctatgggcaatgcacctacatacctgcaacaacagttgttgcaacaacagttgctgcaacaaattgtaccagctcttactcagctagctgtggcaaaccctgctgcctacttgcaacaactacttccattcaaccaactgactgtgtcgaactctgctgcgtacctacaacagcgacaacagttacttaatccactagcggtggctaacccattggtcgctgccttcctacagcagcaacaattgctgccatacaaccagttctctttgatgaa

SEQ ID NO: 6530 - DNA, 585 bp, Zea mays
  Clone ID: LIB3061-066-Q1-K6-G12
gggcagccaaaaattttgcttccttatgctccttggtctttctgcaagtgttgctaccgcaaccattttcccacaatgctcacaagctcctatagcttcccttcttcccccatacctctcaccagcggtgtcttcaatgtgtgaaacgggaattgttcaaccctacaggatccaacaggcaatcgcaacaggcatcttaccattatcacccttgttcctccaacaaccgtcagccctattacagcagttacctttggtccatttggtggcacaaaacatcagggcacaacaactacaacaacttgtgctagcaaaccttgctgcatactctcagcaacatcagtttcttccattcaaccaactggctgcattgaactctgctgcttatttgcaacaacaattaccattcagccagctagttgctgcctacccccagcaatttcttccattcaaccaactagcagcattgaactctgctgcttatttacagcagcaacaactactaccattcagccagctagctgatgtgagccctgctgccttcttgacacaacaacagttgttgccgttctacctgcacgctat

SEQ ID NO: 6531 - DNA, 619 bp, Zea mays
  unsure (1)..(619): unsure at all n locations; Clone ID: LIB3061-066-Q1-K6-G2
gtgnacaactagcaacatagnaaagcacaatagtgtaccaacaatggcagccaaaatattttgcctccttatgctccttggtctttctgcaagtgctgctacggcgaccattttcccgcaatgctcgcaagctcctatagcttcccttcttcccccgtacctctcaccagcggtgtcttcggtatgtgaaaacccaattcttcaaccctacaggatccaacaggcaatcacagctggcatcttacctttatcacccttgttcctccaacaatcatcagccctattacatcagttacctttggtgcatttattggcacaaaacatcagggcacaacaactacaacaacttgtgctagcaaaccttgctgcctactctcagcaacagcagtttcttccattcaaccaactagctgcattgaactctgcttcttatttgcaacaacaacaactaccattcagccagctacctgctgcctacccccagcaatttcttccattcaaccaactggcagcattgaactctcctgcttatttacagcagcaacaactactaccattcagccagctagctggtgtgagccctgctaccttcttgatacaaccacagttgttgccgttc

SEQ ID NO: 6532 - DNA, 619 bp, Zea mays
  Clone ID: LIB3061-066-Q1-K6-G3
ctctctcaacttctctccccgctaccgctccgagtcccaagtcccacccggccagcctccatcgctagtaccactcctagtcccaagtcccagccttccatcgacggcgagggagggagaggcgacctccatccgggctggttagattcatcgcttttcttgtcgctgtccctcggcctttccccctactgtgctccgagtctgggagaagcgactcgcgcacgcgctcggccaaaccaattaagcacagagcggggctctcgggcgagaacgcgctgaggcagtgctgggtttgcagttcgtgccgtagcgttttttttgtgtgtgtgccgaagcggagaggcgatggctgcgccgaggaaggggacggcgacgccgctgggcaccgtgttctcgccggaggagacgaagagggccgtggcgagggtggccgagtccgtcgctgggcgccgcgccgagctcgcccgcctccagggtttcgccgccgacaacgccgccctcgtctccctcgtcaacaggctccccgacgaactctctcacgatatcatggttccctttggtggcgccgcctttttcccagggcgtttaatacacacaaatgaactcttggtgcttctgg

SEQ ID NO: 6533 - DNA, 456 bp, Zea mays
  Clone ID: LIB3061-066-Q1-K6-G6
cacagcagtttcttccattcaaccaactagctgcattgaactctgcttcttatttgcaacaacaacaactaccattcagccagctacctgctgcctacccccagcaatttcttccattcaaccaactggcagcattgaactctcctgcttatttacagcagcaacaactactaccattcagccagctagctggtgtgagccctgctaccttcttgatacaaccacagttgttgccgttctaccagcacgctgcgcctaacgctggcaccctcttacaactgcaacaattgctgccattcaaccaacttgctttgacaaacccagcagcgttctaccaacaacccatcattggtggtgccctcttttagatttcttatgagttatagttcaataataaagttttttgtctgatgtttgtggcttcccagaaataagaaagtacatttctagattctt

SEQ ID NO: 6534 - DNA, 596 bp, Zea mays
  unsure (1)..(596): unsure at all n locations; Clone ID: LIB3061-066-Q1-K6-G7
tattttgacattcagnaacacaccaagcgaagcgcactagcaacgacctaacaacaatggctaccaagatattagccctccttgcgcttcttgccctttttgtgagcgcaacaaatgcgttcattattccacaatgctcacttgctcctagtgccattattccacagttcctcccaccagttacttcaatgggcttcgaacacctagctgtgcaagccaacatgcaacaacaagcgcttgcggcgagcgtcttacaacaaccaattgcccaattgcaacaacaatccttgccacatctaacaatacaagccatcacaacgcaacagcaacaacagttcctaccagcactgagccacctagccatggtgaaccctgccgcctacttgcaagagcagctgcttgcatccaacccacttgctctggcgaacgtagttgcaaaccagcaacaacaacagctacaacagtttctgccaacgctcagtcaactagccatggtgaaccctgccgcctacgtacaacaacaacaactgctttcatctagcccgctcgctgtgggcaatgcacctacatacctgcaacaacaattgttgcaacag

SEQ ID NO: 6535 - DNA, 619 bp, Zea mays
  Clone ID: LIB3061-066-Q1-K6-G8
tattttcagcattcaaaaaccaccagggggggggcactagcaacgacctaacaccaatggctaccaagatattagccctccttgcgcttcttgcccttttagtgagcgcaacaaatgcgttcattattccacagtgctcacttgctcctagtgccattattccacagttcctcccaccgggggcttcaatgggcttcgaacatccagccgtgcaagcctacaggctacaactagcgcttgcggcgagcgccttacaacaaccaattgcccaattgcaacaacaatccttggcacatctaaccctacaaaccattgcaacgcaacaacaacaacaacaacagtttctgccatcactgagccacctagccgtggtgaaccctgtcacctacttgcaacagcagctgcttgcatccaacccacttgctctggcgaacgtagctgcataccagcaacaacaacagctgcaacagtttatgccagtgctcagtcaactagccatggtgaaccctgccgtctacctacaactactttcatctagcccgctcgcggtgggcaatgcacctacgtacctacaacaacagttgctgcaacaaattgtaccagctctgactcagctagc

SEQ ID NO: 6536 - DNA, 619 bp, Zea mays
  Clone ID: LIB3061-066-Q1-K6-G9
gcgaaacgcactagcaacgacctaacagcgggggttccaagacattatccctccttgcgcttcttgccctttttgtgagtgcaacaaatgcgttcattattccacaatgctcacttgctccgagtgccattattccacagttcctccctccagttacttcaatgggcttcgaacacccagctgggcaagcctataggctacaacaagcgcttgcggcgagcgtcttagaacaaccaattgcccaattacaacaacaatccttggcacatctaaccatacaaaccatcgcaacgcagcagcaacaagcactgagccacctagccgtggtgaaccctatcgcctacttgcaacaacagctgcttgcatccaacccacttgctttggcaaacgtagctgcataccaacaacaacaacagttgcaacagtttctaccagcgctcagtcaactagccatggtgaaccctatcgcctacctacaacagcaacaacttctttcatctagcccgctcgctatgggcaatgcacctacatacctgcaacaacagttgttgcaacaacagttgctgcaacaaattgtaccagctcttactcagctagctgtggcaaaccctgctgccta

SEQ ID NO: 6537 - DNA, 593 bp, Zea mays
  unsure (1)..(593): unsure at all n locations; Clone ID: LIB3061-066-Q1-K6-H10
cgcctggccgcgagcctccaaggcctagcctnggggtgggggcgctagggtcaaagagacggggggaggaatcgagccggcggcttgcggcggcatcagcgatggcggcgaagcgggagatctcgagcaccctcaggaacctcaagtttatgcagcgcggcgcggctgcgcagaagggggaggagaaggccgaggtggaggtacaggaggaggaggtggtgatggcgccgagtggaggcttcgcctcgtccgcgcaggtcgttaggaagtgcatagttatcatggagggtaatcctcatccaggagctataaagggtcggatgtctttccaaaatttcaatccatctatcgataaactaaatgaagaggcaagaggtgaccagcaaacagaatcagcttcccccagtaactgtgaccaagacaatgcaaactccagcagagggaatgaagttccagcatcaagatgtagagattttggcattcccagttcagaaagcatatctctaaatgaactgaaaaggaaggagcccgaccttgatatggaaacaccggcatcttacaaggaaccaaaaaccaatgttggcggtaggtca

SEQ ID NO: 6538 - DNA, 613 bp, Zea mays
  unsure (1)..(613): unsure at all n locations; Clone ID: LIB3061-066-Q1-K6-H11
tcgttcatttanntccacaatgctcagtgggctcgcaatggggattattacacagttcctcccaccagttacttcatgggcttcgaacacccagctgtgcaagcctataggctacaacaagcaattgcggcgagcgtcttacaacaaccaatttcccagttgcaacaacaatccttggcacatgggggggggcaaaccatcncaacgcaacagcaacaacaattcctaccagcactgagccacctagccatggtgaaccctgccgcctacttgcaacagcagttgcttgcatcaaacccacttgctctggcaaacgtagttgcaaaccagccacaacaacagctgcaacagtttctgccagcgctcagtcaactagccatggtgaaccctgccgcctacctacaacagcaacaactgctttcatctagcccgctcgctgtggccaatgcacctacatacctgcaacaacaattgttgcaacagattgtaccagctctgactcagctagttgtggcaaaccctgctgcctacttgcaacagctgcttccattcaaccaactgactatgtcgaactctgctgcgtacctacaacagcgacaacagttacttaatc

SEQ ID NO: 6539 - DNA, 611 bp, Zea mays
  unsure (1)..(611): unsure at all n locations; Clone ID: LIB3061-066-Q1-K6-H12
gcaacatagnaaagcacaatagtgtgccagacgggggagccaaaaattttgcctccttatgctccttggtctttctgcaagtgctgctacggcgaccattttcccgcaatgctcgcaagctcctatagcttcccttcttcccccgtacctctcaccagcggtgtcttcggtatgtgaaaacggaatgcttcaaccctacaggatccaacaggcaatcacagctggcatcttacctttatcacccttgttcctccaacaatcatcagccctattacatcagttacctttggtgcatttattggcacaaaacatcagggcacaacaactacaacaacttgtgctagcaaaccttgctgcctactctcagcaacagcagtttcttccattcaaccaactagctgcattgaactctgcttcttatttgcaacaacaacaactaccattcagccagctacctgctgcctacccccagcaatttcttccattcaaccaactggcagcattgaactctcctgcttatttacagcagcaacaactactaccattcagccagctagctggtgtgagccctgctaccttcttgatacaaccacagttgttgccgttctacc

SEQ ID NO: 6540 - DNA, 603 bp, Zea mays
  Clone ID: LIB3061-066-Q1-K6-H5
ggaaaaccattcttctaccctggggggggggcggcaatcgcagcaggcatcttacctttatcacccttgttcctccaacaatcatcagccctattacagcagttacctttggtgcatttattggcacaaaacatcagggcacaacaactacaacaactcgtgctagcaaaccttgggggctactctcagcaacagcagttacctttggtgcatttgttggcacaaaacatcagggcacaacaactacaacaactcgtgctagcaaaccttgctgcctactctcagcaacaacagtttctgccattcaaccaactagctgcattgaactctgctgcttatttgcagcaacaacaactactaccattcagccagctagctgctgcctacccccggcaatttcttccattcaaccaactggcagcattgaactctcatgcttatgtacaacaacaacaactactaccattcagccagctagctgctgtgagccctgctgccttcttgacacagcaacatttgttgccgttctacctgcacactgcgcctaacgttggcaccctcttacaactgcaacaattgctgccattcgaccaacttgctttg

SEQ ID NO: 6541 - DNA, 568 bp, Zea mays
  Clone ID: LIB3061-066-Q1-K6-H6
gggctccaacatcatcagccctattacaacagttacctttggggcgggggggggggcaaaacatcagggcacaacaactacaacaacttgtgctagcaaaccttgctgcctactctcagcaacagcagtttcttccattcaaccaactaggttcattgaactctgcttcttatttgcaacaacaacaactaccattcaggcaggtacctgctgcctacccccagcaatttcttccattcaaccaactagcagcattgaactctcctgcttatttacagcagcaacaactactaccattcagccagctagctggtgtgagccctgctaccttcttgacacaaccacagttgttgccgttctaccagcacgttgcgcctaacgctggcaccctcttacaactgcaacaattgctgccattcaaccaacttgctttgacaaacccagcagtgttctaccaacaacccatcattggtggtgccctcttttagatttcttatgagttatagttcaataataaagttttttatctgatgtttgtggcttcccagaaataagaaagtacatttct

SEQ ID NO: 6542 - DNA, 590 bp, Zea mays
  unsure (1)..(590): unsure at all n locations; Clone ID: LIB3061-066-Q1-K6-H7
gttngagcggtccatttggtcttgggggagcgggggcggagatctattgcagcaacagaggaattgaagcgattcccaacacttcaatcagatatagctgctgctgcaaatgatagcttggaaagattccgtgaggatggacgaaagactgttcttcgtctagttgagatggaagccagctacctaacagtagagtttttccgtaaacttcctactgaaccagagaaagcagctgataagaacactccagtgagtgataggtatcaggacaatcatctcagaagaatcggatcgaatgtgtcatcttatattaacatggtctgtgagactctgaggaacacggttccgaaagccatcgtgcattgccaagtgaaagaagcaaaaagaaatttgcttaaccgtttctatgctcatgtgggaagcaaggagaagaaacagctgagcgcgatgttggatgaggaccccgctttgatggagaagagggatgccttggtcaagaggctagagctgtacaaatctgcaaggaatgagatcgactcggtcgcatggaaatgattggcttgtgacagctacatctggaatgtatgtaa

SEQ ID NO: 6543 - DNA, 610 bp, Zea mays
  Clone ID: LIB3061-066-Q1-K6-H9
ttcaaaaacacacaacgaacgcggggggggggcgtaacaccaatggctaccaagatattagccctccttgcgcttcttgcccttttagtgagcgcaacaaatgcgttcattattccacagtgctcacttgctcctagtgccattattccacagttcctcccaccagttacttcaggggggggggaacatccagccgtgcaagcctacaggctacaactagcgcttgcggcgagcgccttacaacaaccaattgcccaattgcaacaacaatccttggcacatctaaccctacaaaccattgcaacgcaacaacaacaacaacaacagtttctgccatcactgagccacctagccgtggtgaaccctgtcacctacttgcaacagcagctgcttgcatccaacccacttgctctggcgaacgtagctgcataccagcaacaacaacagctgcaacagtttatgccagtgctcagtcaactagccatggtgaaccctgccgtctacctacaactactttcatctagcccgctcgcggtgggcaatgcacctacgtacctacaacaacagttgctgcaacaaattgtaccagctctgactcagctagctgtgg

SEQ ID NO: 6544 - DNA, 468 bp, Zea mays
  Clone ID: LIB3061-066-Q1-N6-A1
gtgtgtttttttttttttttttttttttttttttttatttttttattttttttttttatttttttttttttttggtttttttttttttttttttttttttttttttttttttttttttttttttttttttttttttttttttttttttggggggggggggttttttttttttttttttttttttttttttttttgaaaaaaaaaaaagttttttttttttttgggggggggggggaattttggaaaaaaaatttttttttttgggtttttttttttaaaaaaaggtagggggggggccccaaaagggggggtgtggggaaaagttttttggtttttaaaaaaaaaggtgggggagggggaaaaaattttttttttgtaaaagggggggtttttaggggggtttggttttttaaaaaaggaaaaatttggggtgtttataaagagggggggggggttataaaaattttt

SEQ ID NO: 6545 - DNA, 463 bp, Zea mays
  Clone ID: LIB3061-066-Q1-N6-A10
ggggggggggggtgtttttttttttttttttttttttttttttttttttttttttaccataatggaaaaaattttagatagagttaactcatgatatacatcatacgaacaccacaggaactagaactttagtaaacaaactcatgacatccatgggggggggggggcaccacaagtaaacccaacatacccaaaggttgggaccacattccaccatcctacgacattacgaccatattgacaaacgccataattcttggaacccaattttatttaaaaaaacgaccgaggggaactgccgttccttaaaccacgcaggtaccacgaccgcaaaccgaggtttaaccggagatctgaatggactttactttaggctttttggggtccttctttcgcacaaggactggaaacaccccgttttccatggggggcgggatctggttccttttggggtttttgggca

SEQ ID NO: 6546 - DNA, 562 bp, Zea mays
  unsure (1)..(562): unsure at all n locations; Clone ID: LIB3061-066-Q1-N6-A11
gcgggggggggggggggggtgtgttgaacttaaaaatatangatctctaatcttttattactgaggagttgcacatatcagtatgagaactttattattacagtataaagcataaaaaaatctagaagatggcaccaccaatggtgggctgctgcaataaggggggggggggggggaaagcaagttggttaaatggcagcaattgttgttgttgtaagaaggcgacattgtttgccacatcctgtgggtagaatgggagcaactgttgctgttgcaagaaggcgttaatgtttcccacaacctgtgggtaaaatggcagcaattgttgttgttgttgcaagaaagcagcaatgtttgccacaacttgtagatggaatggaagcaactgttgctgcagtaagaaggcagcagggctcctgacaagttggttgaatggtagtagctgttgtgcctgcaagtaagcagcaggggtcaccccagctagttgattgaatggaagaaaattttgttgctgggggtaagcagcaagggtcgctgcaactacttggattgattgttggaa

SEQ ID NO: 6547 - DNA, 530 bp, Zea mays
  unsure (1)..(530): unsure at all n locations; Clone ID: LIB3061-066-Q1-N6-A12
gggggggggtggtttttttttttttttttgatccaaagcaggtaatgngaaatacaaaggttcataaaaggtttgctgcaacttctagggcagcttataacagtacatactagcagcacaaatggtcaaggaacagcatgccaaacaacgcatggggggcggggaacgctcnacttcctgtcaagcggctcttaccataccaaggttacacgatccatcgatgcaataccattgtaggttcttgttttgtagacgcaaacgcagccgatctatatgacagacccatcgttgatggttgcattcttcaagatcaccacgattccagaccttatgtagtacccttcttccgggtgatcagcctcttggatgcccttactgtttgtgatcaccacgttcttcccaatcctagcattcatgtcaatgatacagttccttatctttgtgttccttcctattccaactgggaccttcccagctaacagtagctttgaagcttcttcttcaatttcataggtgtccgctcccatcat

SEQ ID NO: 6548 - DNA, 456 bp, Zea mays
  Clone ID: LIB3061-066-Q1-N6-A3
gagaaaaatctcaatcaatatattgattatttctaggaaacacatgccggaatgagggccccattatcgagtacatctcatatgtaatctaaaaaaggcacctccaacgatgggttgctgcctcgacaagacagggtttatcaaaaagaactggttgtatggcaacaattgttgctgctgtaggaaggcagccaccaatgggttagccactgctagtggattaaataactgttgtcgctgttgtaggtacccaacaaagttcgacataatcagttggttgaatggaaacagctgttgcaagtaggcaacagggtttgccacaactagctgagtcaaagctggtacaatctgttgcaacaattgttgttgcaggtatgtaggtgcattggccacaacgagcgggctaaatgaaagcaattgttgctgttgtaggtaggcggcagggttcaccatggc

SEQ ID NO: 6549 - DNA, 437 bp, Zea mays
  Clone ID: LIB3061-066-Q1-N6-A4
agcacaacactggatcggtggagacctacgctaaagcatgtcaatttaatttaccatacaatctccgaacataggtaaatatagttgacagtcaattttgtggaaccgaacaggcgatggtatcgacccaaaaacaaaaacacaatccaatctagtatcaatccctcaaaagagctcagaagtttctttttttcacaagtactatatctgctgtagcttgtgtcttagtaataatatgtaaaaaaaaagcagccataagttgttcagacatcctctcgctaggagccctgccgaaaagcttcaagacttgctggagatgttgctggaaagccagtcaagcccctcatacaacccttcaccagatgtagcacaagtgctctggatgtaccagtgccgctgtcgcagggaatgcagaccaagcttgtcagtaatttcag

SEQ ID NO: 6550 - DNA, 564 bp, Zea mays
  Clone ID: LIB3061-066-Q1-N6-A5
gtgtgggtgtgtttttttttttttttttggtacaccggggcacatttattaatggtcagtcatcacagatgtagatgttcttgttacagataacaattctggaacaaaaaatcccttttatttacatgtactgaaacaaacgggggttcttgttggcgcacatcctcactcaaggcacacatcctcaattactatagcttagcctgcatccgagtgaggactggggctctcgcccttgaagccgtttgctgagtgagctggtaacctcaactcagtgttatacatggaccaagaaactaaatctccagaataaaactgacccctgtatgttagttcggatattgtatatttcttatgaaagatcaaatgatcctcggccttccaggatcgcataaagcaacttcttgcgcatgatttcttttgtggagtaggggggcagcttcagataattggcgcacgtcatcacactaggcaaatcattatcagcggactctactgccccatttgaatttgaaagtttcacagcacttgagagatgcttcctaactatagtaagcttggggc

SEQ ID NO: 6551 - DNA, 563 bp, Zea mays
  unsure (1)..(563): unsure at all n locations; Clone ID: LIB3061-066-Q1-N6-A6
gtgccgcagctcatggagatggtggaggacgtgcagatcgttctgctgggcacgggcaagaagaagttcgagcgcatgctcatgagcgccgaggagaagttcccaggcaaggtgcgcgccgtggtcaagttcaacgcggcgctggcgcaccacatcatggccggcgccgacgtgctcgccgtcaccagccgcttcgagccctgcggcctcatccagctgcaggggatgcgatacggaacgccctgcgcctgcgcgtccaccggtggactcgtcgacaccatcatcgaaggcaagaccgggttccacatgggccgcctcagcgtcgactgtaacgtcgtggagccggcggacgtcaagaaggtggccaccacattgcagcgcgccatcaaggtggtcggcacgccggcgtacgaggagatggtgaggaactgcatgatccaggatctctcctggaagggccctgccaagaactgggagaacgtgctgctcagccntcgggtcgccggcggcgagccaggggtcgaaggcgagggagatcgcgccgctcgccaaggagaacgtgg

SEQ ID NO: 6552 - DNA, 486 bp, Zea mays
  Clone ID: LIB3061-066-Q1-N6-A7
gtgtgtttttttttttttttttttttttttttttttttttggaaatgtaacttcttatttctgggtggccacatacatcatccaaaaaactttattattggaattacaactaataatcaatctaaaagagggccccaccaatgatgtgttgtgggggggaggctgctgggtttgtcaaagcaagttggacaaagggcaacaattgttgtagttgtaaaagggttgcggggttagccccaaactgcttgtaaaaaggcagcaactgttgctgtgtcaaaaaggaagcacgacttgctgcagctagctcgctaaatgggagtaatatttgctgctgcaaataagcagcggggttcagtgcggccaattggttaaatggaagaagttgttgttggtgaaagtaggcaataactaactggctaaatggtaatagttgttggtgcaaaaaaacaccagggttcaatgtagacaggtggtttaatggaaaaa

SEQ ID NO: 6553 - DNA, 536 bp, Zea mays
  unsure (1)..(536): unsure at all n locations; Clone ID: LIB3061-066-Q1-N6-B1
gaccagnaatttatatctgtataagcgatcgaggggaaacgaagggaaggaaacacatgccatgaaggaacacgagaatgagaggaaacgcatgcatgcagaatggcagcacacacagtagtagtagtactagcttgctactgccacgtgactggacgatgtctggatgtgtgtgtcgtcgtcccctgccgcctgccgggcctatctatctcctgggtgcttgggtgcatgcattgccttttggtccgaggagctagctatagctagcgcctgcaggtcctccaatgtccagcggcggcgcacggccgacgaccgcgctgccggtggtggccctgctgagcctcgccaggaggccgcgtttcggcaccgggaacgggctgtaggtcacgtcgtcgctcgaccccaccacctcccacctgtaggtggtgacaaggcggtggttgaggacgaacatctcgagcttgggcaggtcgttgccggggcacgcgtgcacgccgctccctaacggcaggaacgtgccgggccgcggggccacc

SEQ ID NO: 6554 - DNA, 389 bp, Zea mays
  unsure (1)..(389): unsure at all n locations; Clone ID: LIB3061-066-Q1-N6-B11
ctctatacggccgccctttgttttggtgtttttttaaataatttttttttttttttttttttttttttttttttttttttttttttttttttttttttttttttttttttttttttttttttttttttttttttttttttttttttttttttttttnaaaaattgggggggggggggggnnttcccccaaccccctccccaaaaatttttttttgaaatcccaccaaaaattcaccaaaaaaagccccccccccaaattttttatntgtaaaaagccccctttttttttaaaacctgttttccaaaggccaaaaaatttttttagctttaaaagagtgccctggtttaccccaacattcttttaaaaaaaccaaaatcttttttttttt

SEQ ID NO: 6555 - DNA, 580 bp, Zea mays
  unsure (1)..(580): unsure at all n locations; Clone ID: LIB3061-066-Q1-N6-B12
gggggtnttgtttggtttttaaaatataaatctctaatacttanttactgaggggtcgcacatatcagcatgagaactttattattacagtataaatcataaaaaatctagaagatggcaccaccaatggtgggcggttgcaataaggtggtagggggggggggggcatgttnnctaaatggtagcaattgttgttgttgtaagaaggcaacaatgtttgccacattctgtgggtagaatggtagcaattgttgctgttgcaagaaggcattaatgtttcccacaacttgtgggtaaaatggcaacaaatgttgttgtctcaagaaagcaacaatgtttgccacagcttgcagatggaatggcagaagctgttgttgcagtaagaaggcataagggctcccgacaagttggttaaatggtagtagctgttgtgcctgcaagtagatagcagggttcaccccagctagttgattgaatggaagaaactgttgttgctggaggtaagcagcaaggttcgctgcaactacttgattgattgttggtagcaactgttgttgtagttgttgtgccgcgattcttt

SEQ ID NO: 6556 - DNA, 263 bp, Zea mays
  Clone ID: LIB3061-066-Q1-N6-B2
agcggaggaaaatccaaataaatttatggttttttttaggaaaaacatttggggttggggggcccctttggggggccccttctttttggaataaaaaaagaggccccccacacaaggggtttttcaagggggggtttttaaaaaaaaaattggttttttgggacaattttttttttttttttgagaaaggggccccccaaggggttccacccgcccaaggagtaaaaaaagcggggggcttgtggggggcccccccaaaattt

SEQ ID NO: 6557 - DNA, 495 bp, Zea mays
  Clone ID: LIB3061-066-Q1-N6-B3
aaaaactggaaatgtaacttcttatttctgggtggccacatacatcatccaaaaaatttttttttgaattacaactaataagcaatctaaaagagggccccaccaatgatgtgttgttggtaggaggcccctcggtctgtcaaagcaagttggacaaagggcaacaattgttgtagttgtaaaagggttgcggggttagccccaaactgctggtaaaaaggcaacaactgttgctgtgtcaaaaaagaaacacggtttgctgcaactagctggctaaatgggagtagtatttgctgctgcaaataaacagcggggttcagtgcggccaattggttaaatggaaaaagttgttgttgcttaaagtaggcaatacctaactggctgaatgggaaaagttgttgctgcaaataagcagcagggttcaatgtaaacagttggttgaatggaaaaaatgttgttgctgaaagtaggaaaaagtttgccaaaactcttggt

SEQ ID NO: 6558 - DNA, 533 bp, Zea mays
  Clone ID: LIB3061-066-Q1-N6-B4
gctgggggggttttttttttttaggcacgaaaatccttcaaatatctttcaaaatccaagccaaggcaacaaaatgtgctactactcggtaggaagtgattactatgctgatggcccacaactttcttaaaccttgaacccacggctgttcctcctggcacgagccttctcgaacttccttcccttggagcgcacatatggcttggtgtggctgtgcggcactccaggagccttgccgaagtgcctcaccgcctcacgggcattcttggggcccctcaagaggactgtgttctcgccaagtggagcacggagagcaagctggtcaaatgtgaggcactccccaccagcattgacaatcctggcccttgccgtctcggtgaacctcagggcagtaaccttcattgctggaacctcttggatcctcttgtcatctgtgactgtgccaacaatcacagcaatgttctttttctttccttccatgaacttgacaaggcggggcatggagattggtgggcgattggttttgctcatga

SEQ ID NO: 6559 - DNA, 542 bp, Zea mays
  Clone ID: LIB3061-066-Q1-N6-B5
gggggtgtttttttttattttgagataaatctcaatcaatatattgattatttctaggaaacacacgtcggtatgagggcaccattatcgagtacatctcatatgtaatctaaaagaggcacctccaagatgggttgctgcctcgacaagacaggatgcatcaaagagaactggttgtatggcagcaattgttgctgctgtaggaaggcggcgaccaatgggttagccactaccaatggattaagtaactgttgtcgctgttgtaggtacgcagcagagttcgacagagtcagttggttgaatggaagcagctgttgcaagtaggcaacagggtttgccacagctagttgagtcagagctggtacaatctgttgcaacaattgttgttgcaggtatgtaggtgcattgcccacaacgagcgggctagatgaaagcagttgttgttgttgtacgtaggcggcagggttcaccatggctagttgactgagcgttggcaaaaactgttgtagctgttgttgttgctggtttgcaactacgttcgc

SEQ ID NO: 6560 - DNA, 557 bp, Zea mays
  unsure (1)..(557): unsure at all n locations; Clone ID: LIB3061-066-Q1-N6-B6
aagaactanaaatgtactttcttatttctgggaagccacaaacatcagnataaaaaactttattattgaactataactcataagaaactaaaagaggcaccaccaatgatgggttgttggtagaacactgctgggtttgtcaaagcaagttggttgaatggcagcaattgttgcagttgtaagagggtgccagcgttaggcgcaacgtgctggtagaacggcaacaactgtggttgtgtcaagaaggtagcagggctcacaccagctagctggctgaatggtagtagttgttgctgctgtaaataagcaggagagttcaatgctgctagttggttgaatggaagaaattgctgggggtaggcagcaggtagctggctgaatggtagttgttgttgttgcaaataagaagcagagttcaatgaacctagttggttgaatggaagaaactgctgttgctgagagtaggcagcaaggtttgctagcacaagttgttgtagttgttgtgccctgatgttttgtgccaataaatgcaccaaaggtaactgttgtaatagggc

SEQ ID NO: 6561 - DNA, 511 bp, Zea mays
  Clone ID: LIB3061-066-Q1-N6-B7
gcggggtggtgtttttttcagacaaaaaactttattattgaactataactcataagaaactaaaagaggcaccaccaatgatgggttgttggtagaatgctgctgggtttgtcaaagcaagttggttgaatggcagcaattgttgcagttgtaggggggggccagcgttaggcgcagcgtgctggtagaacggcaacaactgtggttgtgtcaagaaggtagcagggctcacaccagctagctggctgaatggtagtagttgttgctgctgtaaataagcaggagagttcaatgctgtcagttgggtgaatggaagaaattgctgggggtaggcagcagatagctggctgaatggtagttgttgttgttgcaaataaaaagcagagttcaatgcagttagttggttgaatggaagaaactgctgttgctgagagtaggcagcaaggtttgttagcacaagttgttgttgtttgttggtgcccttatgttttgggccaataaaagcaccaaa

SEQ ID NO: 6562 - DNA, 526 bp, Zea mays
  Clone ID: LIB3061-066-Q1-N6-B8
gtggggtggttttttttgagcaaactgtagagtgcggattactgattgtggatgggatgagcacgctctttggacagattctgctacatgattgtggccacaaggcaacctaacagaactctcttaagttacaactggctaagcactacagtgactgaggccctgtttggaaacacccagtttttaagaaactggtttatagaaattgaggtggttccaaacatactagtttatgactaagtttatagaaattagattctcagtttcttaaaaaccaagaagctggcctctcctagctaaaatataaaaactggtttctaaaaaaccgggttgcttccaaacagggccttacaagaaaattcagctatcggttcaaggttccacagctactaatcaaaaaccaaagaaaccaagctctgttgccctttccttctcgaaggttgtcgaatattgatatatgattgtcacaggcagcagtattccagttgctgaaccaattgcacccatgaaatcagccaggacagtc

SEQ ID NO: 6563 - DNA, 557 bp, Zea mays
  Clone ID: LIB3061-066-Q1-N6-B9
gtggttgtttttttttttttttttttttttttttttttttagcgcatgccagcgcaatggcttattgcgtttataatctccagcagtatcctgtttcgaataacaatgactacatggggattggggcctttgaacatcagtgatcaatgcagattattaatttattggagcgctagactgatatcatcgagctccttgggggactgatcctaactagataaaggggtgcatttttgacaattacacctcaacaacccccgggatcgggactccttgccctgctggcaggatcttgtatgctttctggatttgtctagggactggaccaattttcccgtcgccgatttcacgtccatcaatcattacaaccggggtaatttcacccattgttccgggtggccatacctcatctgcagcatggaattctgacagactaatgcgtcgttcatgtaacacaaagttttctttcaccacaagatccatgacagttgctcgcgtaatgcctggaaggcaatagtcagcatgagggggcaatacaattccctttttgaccataa

SEQ ID NO: 6564 - DNA, 402 bp, Zea mays
  Clone ID: LIB3061-066-Q1-N6-C10
ggggggtgtttttttttttttttttttttttttttttttttttttttttttttttttttttaaactgaaaactgactgctttatttattccccacagggggattactcaacagcccacatagtttgccgaaacgataaaccacaatgctgggggggagagagaagcatatttgccttggttactctagcaacacatgcttatagcttcacagattgatcaaatagcagctatgctccatttgcttcccaaccatggctccttggcatgtccttgctcttggcattctgatagccacaggtcaatgtgaacgacaatctccttccttactttggtcaaagcttcgggaggggagcacttggatgaatcaccttcaatgtttgaaggagcttgagggcatccaa

SEQ ID NO: 6565 - DNA, 466 bp, Zea mays
  Clone ID: LIB3061-066-Q1-N6-C11
ggggttgttgggggttttttttttttttttttttttttttttttttttttttttttttcgaacaaagggctcagccccgtcgttttattattattattaccgagattattattactgcatgctagctagctcgtcactattcaaaaataaacggggggggggggagggtcccacccccaccttttattggggacgagctaacaagagctgctgccctaacaagggaggttgggccctgggtcaacccggagctgctggcagtactgcttgtgatagccgacccgcccgttcatttgggcggggttgttcccgttgcactcaagggcgcccttaatggccctaatgggggcgccgaaaccctgcggcatcaggcggggcacgttgttcatccaaaaccaaagcgccttcttgaacgcaatcagggggtcctgccgcccccttttggggtcggcaacccctttaaaac

SEQ ID NO: 6566 - DNA, 544 bp, Zea mays
  unsure (1)..(544): unsure at all n locations; Clone ID: LIB3061-066-Q1-N6-C12
ggggggggggggtgtgttccttacaatcccatatataagatagtagccatcagcccatctgcttcccagaaacgagcaatgctcaacgttaaagtgataggaacaatttatgggggtgatgagttaccatgtctgtcctagcattcaaaatggggggggggggggggttaaaatcnnaacctgtctaaccaaaacgcgcacctcacgggggattcacagtttattggacgggaggaccaaaggggctctatgaggggaaatgtacagacggtgcagcagttcagacacggacaccatattcagatattttgttgatcctttcctgcaaggcacacctctggttcttcaaatcggaggccatggaagccacctctgctcgcagctcgagagattgcctggttggaatggttcttagtctatccatcagacctgcagctgtagattctgctttgtaaatggaacctataagagattgtatctgcttcccagtagatctcagatcagttcgcccacgctgcacatcggtttcaccgatagctacttt

SEQ ID NO: 6567 - DNA, 553 bp, Zea mays
  unsure (1)..(553): unsure at all n locations; Clone ID: LIB3061-066-Q1-N6-C2
agaaaaaacacgntaaaaatttagtaatatataggatgacagatatagttgatccaaagcaggtaatgggaaatacaaaggttcataaaaggtttgctgcaacttctagggcagcttataacagtacatactagcagcacaaatggtcaaggaacagcatgccagacaacgcatcttgcgcccgaacgctcgacttcctgtcaagcggctcttaccataccaaggttacacgatccatcgatgcaataccattgtaggttcttgttttgtagacgcaaacgcagccgatctatatgacagacccatcgttgatggttgcattcttcaagatcaccacgattccagaccttatgtagtacccttcttccgggtgatcagcctcttggatgcccttactgtttgtgatcaccacgttcttcccaatcctagcattcatgtcaatgatacagttccttatctttgngttccttcctattccaactgggaccttcccagctaacagtagctttgaagcttcttcttcagtttcataggtgtccgctcccatcatcac

SEQ ID NO: 6568 - DNA, 520 bp, Zea mays
  Clone ID: LIB3061-066-Q1-N6-C3
atcgaggaaaatctcaatcaatatattgattatttctaggaaacacacgtcggtatgagggcaccattatcgagtacatctcatatgtaatctaaaagaggcacctccaacgatgggttgctgcctcgacaagacaggattcatcaaagagaactggttgtatggcagcaattgttgctgctgtaggaaggcggcgaccaatgggttagccactaccaatggattaagtaactgttgtcgctgttgtaggtacgcagcagagttcgacagagtcagttggttgaatggaagcagctgttgcaagtaggcaacagggtttgccacagctagttgagtcagagctggtacaatctgttgcaacaattgttgttgcaggtatgtaggtgcattgcccacagcgagcgggctagatgaaagcagttgttgttgttgtacgtaggcggcagggttcaccatggctagttgactgagcgttggcagaaactgttgtagctgttgttgttgctggtttgcaactacc

SEQ ID NO: 6569 - DNA, 547 bp, Zea mays
  unsure (1)..(547): unsure at all n locations; Clone ID: LIB3061-066-Q1-N6-C5
ggggggttgttttttttttttttaaaatatagatctctaatacttanttactgagagggcgcacatatcagcatgagaactttattattacagtataaatcataaaaaatctagaagatggcaccaccaatggtgggcggttgcaataagggggggggatgtcgtcaaagcatgttggctaaatggtagcaattgttgttgttgtaagaaggcaacaatgtttgccacattctgtgggtagaatggtagcaattgttgctgttgcaagaaggcattaatgtttcccacaacttgtgggtaaaatggcaacaaatgttgttgtctcaagaaagcaacaatgtttgccacagcttgcagatggaatggcagaagctgttgttgcagtaagaaggcataagggctcccgacaagttggttaaatggtagtagctgttgtgcctgcaagtagatagcagggttcaccccagctagttgattgaatgggagaaactgttgttgctggaggtaagcagcaaggttcgctgcaactacttgattgattgttggt

SEQ ID NO: 6570 - DNA, 73 bp, Zea mays
  Clone ID: LIB3061-066-Q1-N6-C6
gggggggtttttttttttttttttttttttttttttttttttttttttttttttttttggtcgcttgggtttt

SEQ ID NO: 6571 - DNA, 448 bp, Zea mays
  Clone ID: LIB3061-066-Q1-N6-C9
aaaaatgtactttcttatttctgggaagccacaaacatcatccaaaaaacttcattattgaagtataactcataagcaatctaaaagaggcaccaccaatgatgggttgttggtagaacgctggtggggttgtcaaagcaagttggttgaatggcagcaattgttgcagttgtaagagggtgccagcgttaggcgcagcgtgcaggtagaacggcaacaactgttgttgtgtcaagaaggcaacagggctcacatcagctagctggctgaatggtggtagctgttgctgttgtaaataagcagcagagttcaatgctgccagttggttgaatggaagaaattgctgggggtaggcagcagctagctgactgaatggtagttgttgttgcaaataagcagcagagttcaatgcagccagttggttgaatggaagaaactgctgttgctg

SEQ ID NO: 6572 - DNA, 435 bp, Zea mays
  Clone ID: LIB3061-066-Q1-N6-D1
gggttgttgggtggtttttttttttttttttttttttttttttttttttttttttttttttttttttttttttttttttttttaaaaaaaaaactttattatgggactataaccaataaaaaatctaaaggggggcccccccaaggaggggggggggggggggcaaaaaaaaagcgaggttcaaggaccctagtggggggaagggaaaaaactgctgttgctgaaagaaggcaaaaaggtttgctaacccaagtgggggaagttgggggcccctgaggttttgggccaataaaggccccaagaggaaactgttgaaaaagggctggtaattgtggggggaacaggggggaaaaaggaaaaaggccagttggaattgcgtggtggatcctggggggggggagaaatggggttataacaataccaaaaacccccctg

SEQ ID NO: 6573 - DNA, 509 bp, Zea mays
  unsure (1)..(509): unsure at all n locations; Clone ID: LIB3061-066-Q1-N6-D10
ggcgttgtttgggtgtttttttttttttttttttttttttttttataaaaggcaaaacaacttataatttacaatggacagagtacagttggcatgttccattaaaatgatcttctctttgttcaagacaaaattacatgggttatttgctatgcgggggggggggcactttnaaataacaaatacttgagaaagtaatgactaataaacccgtccacaccacgctgcatacttttagaattctgcgttgcagtcttggggtaaaccaagctacatagcttaagggagtctccaaaatcggttcaccatccaaaaaaacaccggtaggcaattgattacagccaatgctgcagatgcatgaagcaagctacttaaaccattttccaagatatatgggatgtgtgcaatgaaaagtagaagtgcccatcgaggtcggtagcgggataacctaaccgaacgtgctgttgatgacagatcacccccataaacaaaagatcctttacaagggc

SEQ ID NO: 6574 - DNA, 440 bp, Zea mays
  Clone ID: LIB3061-066-Q1-N6-D11
gggggggggggttttttttttttttttttttttttttttttttttttttttttttttttttttttttttttttttttttttttttttttttttgggaaagggaacctcttatttttggggggccccctccctcacccaaaaaatttggggggggggggggggcaaaaacccatctaaaaaagggccccccccatgatgtgtttttgggaggaggcccctccgtctttcaaaacaagttggacaaagggccacaatttttgtatttttaaaagggttgccgggttacccccaaactgctggtaaaaaggcagcaactgttgctttttcaaaaagaaaacccggtttgctgcacctacctggctaaatgggaataatatttgctgctgcaaataacccgcggggttcacggcccccacattgttaaatgaaaaaaatttttt

SEQ ID NO: 6575 - DNA, 407 bp, Zea mays
  Clone ID: LIB3061-066-Q1-N6-D12
gggggggggggtgtttttggtccaaaactagtaccaatcaatacaggaccagtgtgttagtatttgtgtaaatacatgcttactgccgcgtccacccaaagtcctagtgttaccgatgaataataactgttacacaaacatgaaaatgggcgggggggggggggttcttgggttacgagcaaggctgcactgtcctgttcgatatctgttttttgttcgcaatcaatcaggcgctcggagctgagctgggtatcttgaattgcttcttcacgtaatgtgatgcctctgaatcatttctgtgacacaggaccctaaggagggttttggagtccgctccaaatttgctcttgccaccttgagtaacttctcgtaggtcatcaatgagcacgcgggtctcttgcttgatc

SEQ ID NO: 6576 - DNA, 543 bp, Zea mays
  Clone ID: LIB3061-066-Q1-N6-D2
atcgaacacccttgggagaccaatatcacattagaatctggaaatgtaacttcttatttctggttggccacatacatcatccaaaaaatttattattgaattacaactaataatcaatctaaaagagggcaccaccaatgatgtgttgttggtaggaggctgctgggtttgtcaaagcaagttggacaaagggcaacaattgttgtagttgtaagagggttgcggggttagccgcaaactgcttgtagaaaggcagcaactgttgctgtgtcaagaaggaagcacgacttgctgcagctagctcgctaaatggcagtagtatttgctgctgcaaataagcagcggggttcagtgcggccaattggttaaatggaagaagttgttgttgctgagagtaggcagtagctagctggctaaatggtaatagttgttgctgcaaataagcagcagggttcagtgtagacagttggttgaatggaagaaattgttgttgctgagagtagggagaaaggtttgccagaactacttggttgatcacaagta

SEQ ID NO: 6577 - DNA, 559 bp, Zea mays
  Clone ID: LIB3061-066-Q1-N6-D3
ggaagtagcatcatggtacatcattgattatcaatatcacgagattccagtagctatttcagttgatctaagaaaagaagacggttaaaagctcaaacagcaagaaatgacgtcaactgaacctaacagctggagcatttccaaaccgcagttcaagtatacagtaatcagtgtcaaaacaggctgggaaaaaacagcctaaactcaccagctgccaaccccctatcccattcccaaacatcatgaggaaacacaaatcacatttatgatgtggaacaagcttcgagctttgggaggacgctgcgccatgcatccgcaatgtctttagctagcttagcctgacccttggcaaattcatggaatgcgagtccaatatcagctgtcttttgctcctggaaacgagcaagctcttcattcattagtctaactatgtgttcaaacttcttagtagcctcctcactgtctgctttcaactctcgaaactcagattctgcttcggcatacttttcagggttcatgaacttcaatttttcaagattaagctctttatacttcctct

SEQ ID NO: 6578 - DNA, 563 bp, Zea mays
  Clone ID: LIB3061-066-Q1-N6-D4
gtggggtgttgtttttttgacttaaaaatagatctctaatcttttattactgagaagttgcacatatcagtatgagaactttattattacagtataaagcataaaaaaatctagaagatggcaccaccaatggtgggctgctgcaataaggggggggggttcgtcaaagcaagttggttaaatggcagcaattgttgttgttgtaagaaggcgacattgtttgccacatcctgtgggtagaatggtagcaactgttgctgttgcaagaaggcgttaatgtttcccacaacctgtgggtaaaatggcagcaattgttgttgttgttgcaagaaagcagcaatgtttgccacaacttgtagatggaatggaagcaactgttgctgcagtaagaaggcagcagggctcctgacaagttggttgaatggtagtagctgttgtgcctgcaagtaagcagcagggttcaccccagctagttagttgaaatggaagaaattgttgttgctgggagtaagcagcaaggttcgctgcaactacttgattgattgttggaagcaactgttgtt

SEQ ID NO: 6579 - DNA, 519 bp, Zea mays
  Clone ID: LIB3061-066-Q1-N6-D5
atcccgcagctcatggagatggtggaggacgtgcagatcgttctgctgggcacgggcaagaagaagttcgagcgcatgctcatgagcgccgaggagaagttcccaggcaaggtgcgcgccgtggtcaagttcaacgcggcgctggcgcaccacatcatggccggcgccgacgtgctcgccgtcaccagccgcttcgagccctgcggcctcatccagctgcaggggatgcgatacggaacgccctgcgcctgcgcgtccaccggtggactcgtcgacaccatcatcgaaggcaagaccgggttccacatgggccgcctcagcgtcgactgtaacgtcgtggagccggcggacgtcaagaaggtggccaccacattgcagcgcgccattcaagtggtcggcacgccggcgtacgaggagatggtgaggaactgcatgatccaggatctctcctggaagggccctgccaagaactgggagaacgtgctgctcagcctcggggtcgccggcggcgagccaggg

SEQ ID NO: 6580 - DNA, 520 bp, Zea mays
  Clone ID: LIB3061-066-Q1-N6-D6
gggggggggtttttttttttttttttttttttttttttttttttttttttttttttttttttttttttttttttttttttttccagaaaaaaaacttttttttggacctttaccccaaaaaaaatcaaaaggggggcccccccaagggggggggggggggggaaccccggggggtttgccaaaccagggggggggaagggcaccaattgtggcagttgaaagagggggcccccgttaggcccaccgggctggaaaaacggcaacaacggggggtgggtcaaaaagggagcagggcccaccccacctacctggctgaagggaagaagttgtggctgctgaaaaaaaccaggaaagtccaatgctgctagtgggtaaaagggaaaaaattgcgggggggaggcaacaggaacctggctaaaggggaattgttgttgttgcaaaaaaaaagcagagtccaaggaccctagtgggtggaagggaaaaaactgctgttgctaaaagaaggcaacaaggtttgcta

SEQ ID NO: 6581 - DNA, 530 bp, Zea mays
  Clone ID: LIB3061-066-Q1-N6-D7
ggggtggtttttttttttttttttttttttttttttttttttttttttttttatttttttttttttttttttttttttttttttttttttttttttttttttgggggaagggaactttttattttggggggggcccaaacataatccaagagggggggggggggggttacaacaaaaaaccaatttaaaagggggcccccccaaagaggggttttgggaagggggccgcggggtttggaaaagaaagggggaaaaagggcaaaaattggtgaatttgaaaaaggggtggggggttaggcgaaaactgggggaaaaaagggagaaattgggggtgggtaaaaaaggaagacaggttggcggaaactagcgggctaaaggggagaagaatttgggggggaaaaaaaaaagggggggtcagggggggcaattggtaaaaagagaaaaaaaggtggtggccgaaagaaagggaggaaaatacgagggaaaaaggggaaaaggggtgggggcgaaaaaacgggaggggtttaagg

SEQ ID NO: 6582 - DNA, 544 bp, Zea mays
  Clone ID: LIB3061-066-Q1-N6-D8
gccgtgggggtgttttttttaaaactaaaaatgtactttcttatttctgggaagccacaaacatcaggataaaaaactttattattgaactataactcataagaaactaaaagaggcaccaccaatgatgggttgttggtagaacactgctggggggggcgaagcaagttggttgaatggcagcaattgttgcagttgtaagagggtgccagcgttaggcgcaacgtgctggtagaacggcaacaactgtggttgtgtcaagaaggtagcagggctcacaccagctagctggctgaatggtagtagttgttgctgctgtaaataagcaggagagttcaatgctgctagttggttgaatggaagaaattgctgggggtaggcagcaggtagctggctgaatggtagttgttgttgttgcaaataagaaacagagttcaatgaacctagttggttgaatggaagaaactgctgttgctgagagtaggcagcaaggtttgctagcacaagttgttgtagttgttgtgccctgatgttttgtgccaat

SEQ ID NO: 6583 - DNA, 524 bp, Zea mays
  Clone ID: LIB3061-066-Q1-N6-E1
ggggggggttttttatcgagataaatctcaatcaatatattgattatttctaggaaacacatgtcggtatgagggcaccattgtcgagtacatctcatatgtaatctaaaagaggcacctccaacgatgggttgctgcaaggcagggttcatgaaagagaactggttgtatggcagcaattgttgttgctgctgcaggaaggtagcgaccaatgggttagccactgccaatggattaagtaactgttgtcgctgttgtaggtacccagcagagtttgacacaaccagttggttgaatggaagcaactgttgtaagtaggcagcagggtttgccacagctagctgagtcagagctggtacaatttgttgcagcaactgttgttgtaggtacctaggtgcattgcccaccgcgagcgggctagatgaaagtagttgtaggtagacgggagggttcaccatggctagttgactgagcactggcataaactgttgcaactgttgttgttgctggtatgcaactacctt

SEQ ID NO: 6584 - DNA, 457 bp, Zea mays
  unsure (1)..(457): unsure at all n locations; Clone ID: LIB3061-066-Q1-N6-E11
gcgtggggggggggttttttttttttttttttttttttttttttttggccacatacattatccaaaaaatttattattgaattacaactaataatcaatctaaaaggggcaccaccaatgatgtgttgttggtaggaggcttcttggtttggggggggggggggacaaaggcaacaattgttgtanttgtaagagggttgcggggttaaccccaaactgcttgtaaaaaggcagcaactgttgctgtgtcaaaaaggaagcacgacttgctgcagctagctcgctaaatggcagtagtatttgctgctgcaaataagcagcggggttcagtgcggccaattggttaaatggaaaaagtttttgttgctgagagtaggcagtaactagctggctaaatgggaatagttgttgctgcaaataaacagcaagggttcaatgtaaaacagttggtgtgaat

SEQ ID NO: 6585 - DNA, 550 bp, Zea mays
  Clone ID: LIB3061-066-Q1-N6-E2
aaatctcaatcaatatattgattatttctaggaaacacatgccgctatgagggcaccattatcgagtacatctcatatgtaatctaaaagaggcacctccaacgatgggttgctgccacaacaaggcagggttcatcaaagagaactggttgtatggcagcaattgttgctgctgtaggaaggcagcgaccaatgggttagccaccgctagtggtttaagtaactgttgtcgctgttgtaggtacgcagcagagttcgacacagtcagttggttgaatggaagcagctgttgcaagtaggcagcagggtttgccacagctagctgagtcagagctggtacaatctgttgcagcaactgttgttgcaggtatgtaggtgcattaaccacagcgagagggctagatgaaatcagttgttgctgttgtaggtaggcggcagggttcaccatggctagttgactgagcgctggtagaaactgttgcaattgttgttgttgtttggtatgcaactatgtttgccagagcaagtggggttggatgcaagcaactgc

SEQ ID NO: 6586 - DNA, 514 bp, Zea mays
  Clone ID: LIB3061-066-Q1-N6-E3
ctgggacgccacaaacatcatccaaaaaacttcattattgaactataactcataagcaatctaaaagaggcaccaccaatgatgggttgttggtagaacactgttgggtttgtcaaagcaagttggttgaatggcagcaattgttgcagttgtaagagggtgccagcgttaggcatagcgtgcaggtagaacggcaacaactgttgttgtgtcaagaaggcagcagggctcacatcagctagctggctgaatggtagtagttgttgctgctgtaaataagcagcagagttcaatgctgctagttggttgaatggaagaaattgctgggggtaggcagcaactagctggctgaatggtaattgttgttgcaaataagcagcagagttcaatgcagccagttggttgaatggaagaaactgatgttgctgagagtatgcagcaaggtttgctagcacaagttgttgtagttgttgtgccctgatgttttgtgccaccaaatggaccaaaggtaact

SEQ ID NO: 6587 - DNA, 287 bp, Zea mays
  Clone ID: LIB3061-066-Q1-N6-E4
ggtgtttttttgttttttttttttttaaaaaacacgaaatttttgaatttccgaaaacctacggttttacgggcgcgttggccaacaaaaaaatccacgagaggggttcataaacttcagaaagtgtgccccactgatctgggcccccccacgggggggcgccttccttggggggggccaggatcataaaaccctggttggcccaaggcaccaactgttatcaaatgtggagggcctctgggttagtccaataccccctgccaaaaagaacaaactgtgaacagggt

SEQ ID NO: 6588 - DNA, 551 bp, Zea mays
  unsure (1)..(551): unsure at all n locations; Clone ID: LIB3061-066-Q1-N6-E5
atctagaaagtactttcttatttctgggaagccacaaacatcatccaaaaaacttcattattgaagtataactcataagcaatctaaaagagggcaccaccaatgatgggttgttggtagaacgctgttgggtttgtcaaagcaagttggttgaatggcagcaattgttgcagttgtaagagggtgccagcgttaggcgcagcgtgcaggtagaacggcaacaactgttgttgtgtcaagaaggcaacagggctcacatcagctagctggctgaatggtggtagctgttgctgttgtaaataagcagcagagttcaatgctgccagttggttgaatggaagaaattgctgggggtaggcagcagctagctgactgaatggtagttgttgttgcaaataagcagcagagttcaatgcanccagttggttgaatggaagaaactgctgttgctgagagtaggcagcaaggtttcctagcacaagttgttgtagttgttgtgccttgatgttttgtgccaacaaatgcaccaaaggtaactgctgtaataaggc

SEQ ID NO: 6589 - DNA, 514 bp, Zea mays
  Clone ID: LIB3061-066-Q1-N6-E6
aaaaaggactttcttatttctgggaagccacaaacatcatccaaaaaacttcattattgaagtataactcataagcaatctaaaaggggccccaccaatgatgggttgttgggagaacgctgttgggtttgtcaaaacaagttggttgaatggcagcaattgttgcagttgtaaaagggtgccagcgttaggcgcagcgtgcaggtagaacggcaacaactgttgttgtgtcaagaaggcaacagggctcacatcaactaactggctgaatgggggtagctgttgctgttgtaaataaacagcagagttcaatgctgccagttggttgaatggaaaaaattgctgggggtaggcagcaactaactgactgaatggtagttgttgttgcaaataaacagcagagttcaatgcagccagttggttgaatggaaaaaactgctgttgctgaaagtaggcaacaaggtttcctagcacaagttgttgtagttgttgtgccttgatgttttgggccaac

SEQ ID NO: 6590 - DNA, 528 bp, Zea mays
  Clone ID: LIB3061-066-Q1-N6-E9
gggggggttttttttttttttttttttttttttttttaaaaagtactttcttatttctgggaagccacaaacatcagacaaaaaactttattattgaactataactcataagaaatctaaaagagggcaccaccaatgatgggttgttggggggaaggctggtgggtttgtcaaaacaagttggttgaatggcagcaattgttgcagttgtaaaagggggccagcgttaggcgcaacgtgctggtaaaaccgcaacaattgtggttgtgtcaaaaagggagcagggctcacaccaactagctggctgaatgggagtagttgttgctgctgtaaataagcaggagagttcaaagctgtcagttggttgaatggaagaaattgctgggggtaggcagcaaataactggctgaatggtagttgttgttgttgcaaataaaaagcagagttcaatgcagctagttggttgaatggaaaaaactgttgttgctgagagtaggcaacaaggtttgctagcacaagttgttgtag

SEQ ID NO: 6591 - DNA, 387 bp, Zea mays
  Clone ID: LIB3061-066-Q1-N6-F10
gtttgtggttttttttttttttttttttttttttttttttttttttttttttttttttttttttttttttttttttttttttttttttttttttttttaccctccatggtttgaaaaaaaaaaccgggcccgaaaaaaaaaaaaatggggggggggggggggttacatttcaacaaaaaaaagaaaaaaaaggaggtaaaaaaaaaagcccctattgacctaaaatttgaagataaaacaccttaaacttatctttaccaagtcccttttaaaaatatttccctggcgggttttttggttttaaatccaaaaaaaaaaaaaggggaatttttttttatagggcaacctttttggtaaaaaaaaattttaaagttaaaattctaaaaa

SEQ ID NO: 6592 - DNA, 543 bp, Zea mays
  unsure (1)..(543): unsure at all n locations; Clone ID: LIB3061-066-Q1-N6-F11
gcgcgcgcgtgggggggggtggtttttttttagatgagccacaaacatctatttcacacagtcattctaaagcaaaaatcggtttccagaggaccatttctcacgcgacaaggcgaaacctccctgaaacctaaacaccggataagtattcngtgcaccgggggggggggcgggtttacttccgcgacatgctgccgagcaggtttacttccgcgacatgcagattacagcgacatcgtgaaatcatcttaagagctgtccatcaggttctccattgaagttgggtttaccctgccatcactattgttatctcgagggttagcttctgctttcctctcaactccaaaagtgaaattgggggggcgatcatttgggttgaatcgctcgaatatggatggcatggtcgtttggttgaacacaggcgtttgcatgtcacctgctggttttgtataaccaaatccaagagaagcaaatgattcaatgggaacccaaggttggagttactgggtcccgaaaagcttcaactcatactcccaaaagctc

SEQ ID NO: 6593 - DNA, 462 bp, Zea mays
  Clone ID: LIB3061-066-Q1-N6-F12
acacgtacctccacttgttttctctaccccggccgccggggggggggggttatctccacacccaacaaacggcggggggcaatcctattatggtttgacatggactcctccttattataaacaaggtcccctatggccacggatctccccacatgaactggcacaacatcataaatggcagccacacaggggggggggggctgcattaatacaacgaactacgcgccgatatgcggagctgtgatccacaacacaccactaacggacatagctttacttctcaaactgaaagccctaatccttgtacaggtcacgtctcttgacaatgtggatgacgcacatagacttttgctgtgagacacatgtatccacatacccttcctcctactatccgagctcaaagaatgacccatccaacctgtcaaccctaccaaactagcttactcccattcatggggagca

SEQ ID NO: 6594 - DNA, 496 bp, Zea mays
  Clone ID: LIB3061-066-Q1-N6-F2
ggaaatgtaacttcttatttctggttggccacatacatcattccaaaaaactttattattgaattacaactaataagcaatctaaaagaggcaccaccaatgatgtgttgttggtaggaggccgctgggtctgtcaaagcaagttggacaaagggcaacaattgttgtagttgtaagagggttgcggggttagccgcaaactgctggtagaaaggcagcaactgttgctgtgtcaagaaggaagcacggtttgctgcagctagctggctaaatggtagtagtatttgctgctgcaaataagcagcggggttcagtgcggccaattggttaaatggaagaagttgttgttgctgagagtaggcagtagctagctggctaaatggtaatagttgttgctgcaaataagcagcagggttcagtgtagacagttggttgaatggaagaaattgttgttgctgaaagtagggagaaaagtttgccagagctacttggttga

SEQ ID NO: 6595 - DNA, 527 bp, Zea mays
  Clone ID: LIB3061-066-Q1-N6-F3
gacaaattatttcatctcaccaagaaaattacaaacaaggctatagtcgcagccattatttgatactctagcaatagccactcaagtttgagaacctgttggtgctcaaactaacaaggttgccaccttcccgacctgaggtccacatatgtttatacgcatttattctccaactcgatgaatgagagtttatttactaatggatagtatatagcatgtttatctaccaatgaactaggactgaatcatgtattaagtattaagtttactgcatattgtatcatccggagcgactcttcagctatcgagccactttgtgtgctcgacggtgagagacggatgcctcgtccttctttgatccttcgggtctcctagcccaagctggagcctggtcaggtccataacgataatcataaaagagttcctcgctagcctcaatatgctccttcgcatatataccaacccgatggtcgccagccaccagcatcacctttgcatagcagttggggttagatgagtgatttgcg

SEQ ID NO: 6596 - DNA, 546 bp, Zea mays
  Clone ID: LIB3061-066-Q1-N6-F4
gccgtgtttttttttttttaaaaatgtactttcttatttctgggaagccacaaacatcagacaaaaactttattattgaactataactcataagaaactaaaagaggcaccaccaatgatgggttgttggtagaacgctgctgggtttgtcaaagcaaggtggttgaatggcagcaattgttgcagttgtaagagggtgccagcgttaggcgcagcgtgctggtagaacggcaacaactgtggttgtatcaagaaggtagcagggctcacaccagctagctggctgaatggtagtagttgttgctgctgtaaataagcaggagagttcaatgctgccagttggttgaatggaagaaattgctgggggtaggcagcaggtagctggctgaatggtagttgttgttgttgcaaataagaagcagagttcaatgcagctagttggttgaatggaagaaactgctgttgctgagagtaggcagcaaggtttgctagcacaagttgttggagatgttgtgccctgatgttttggggccaaaaaagcaccaa

SEQ ID NO: 6597 - DNA, 469 bp, Zea mays
  Clone ID: LIB3061-066-Q1-N6-F5
gcgcggggggggtgtttttttttttattttttttttttttttttttttttttttttttttttttttttttttttttttttttttttttttttttttttttttttttttttttaaaaaaagggcctttttttttggggggggcccccaacccaagggagagagggggtgtttttggcccttaccccaaaaaaaaataaaaaggggggcccccccaaggggggggggggggaaaaaaccgggggggtttaaaaaaaaagggggggaaaagggaaaaatttgggcgctttgaaaaaggggccccgtttaggcccaacccccggggaaaaaccaaaaaaacggggggtgttaaaaaaggggggaggggcaacaccccttatggggggaaaagggagaaaatggtggcttcggaaaaaacccgggaaggtaaaagccctctaggtgggtgaaaagaaaaaaaaatggggggggg

SEQ ID NO: 6598 - DNA, 561 bp, Zea mays
  Clone ID: LIB3061-066-Q1-N6-F7
gtttgggtgttttttttttttttttagaaatgtactttcttatttctgggacgccacaaacatcatccaaaaaacttcattattgaactataactcataagcaatctaaaagaggcaccaccaatgatgggttgttggtagaacactggggggggggggaaagcaagttggttgaatggcagcaattgttgcagttgtaagagggtgccagcgttaggcatagcgtgcaggtagaacggcaacaactgttgttgtgtcaagaaggcagcagggctcacatcagctagctggctgaatggtagtagttgttgctgctgtaaataagcagcagagttcaatgctgctagttggttgaatggaagaaattgctgggggtaggcagcaactagctggctgaatggtaattgttgttgcaaataagcagcagagttcaatgcagccagttggttgaatggaagaaactgatgttgctgagagtattcagcaaggtttgctagcacaagttggtgtagttgttgtgccctgatgttttgtgccaccaaagggaccaaggtaactgct

SEQ ID NO: 6599 - DNA, 548 bp, Zea mays
  Clone ID: LIB3061-066-Q1-N6-F9
gtggggtgggttttttttttttttttttttttttttttttttttttttttatttttttttttttttttttttttttttttttttttttttttttttttttttttttttttaaaggggggggccttttttggttaacccccttttagggggggggggggggggggaacccaattttttaattgcaaacccccctaatggcattggtggggcaggggtttttttggggggttgggggggcccacccccccattggggggggggtttgggctgctttcaaaattgccccccccctttggggggcttggggggacccacaaaacccacatggggggggggggggccccccccggattttgggttgaacccttttgtaaattgcttggggaatgttttgggggtaaatttgcctaaaaacaaaaaaccattgttggtggaaaacctgggagctacttgggtgtttaaaacctgattggggaaaaagccttcccaaaggggtggcctgctcccttaggaattcaagacaattttttaaatttgggcccccggtt

SEQ ID NO: 6600 - DNA, 551 bp, Zea mays
  Clone ID: LIB3061-066-Q1-N6-G1
gttgtggttttttttaaaactagaaatgtactttcttatttctgggacgccacaaacatcatccaaaaaacttcattattgaactataactcataagcaatctaaaagaggcaccaccaatgatgggttgttggtagaacactgttgggtttgtcaaagcaagttggttgaatggcagcaattgttgcagttgtaagagggtgccagcgttaggcatagcgtgcaggtagaacggcaacaactgttgttgtgtcaagaaggcagcagggctcacatcagctagctggctgaatggtagtagttgttgctgctgtaaataagcagcagagttcaatgctgctagttggttgaatggaagaaattgctgggggtaggcagcaactagctggctgaatggtaattgttgttgcaaataagcagcagagttcaatgcagccagttggttgaatggaagaaactgatgttgctgagagtatgcagcaaggtttgctagcaccaagttgtgtagttgttgtgccctgatggtttgtgccaccaaatggaccaaaagt

SEQ ID NO: 6601 - DNA, 443 bp, Zea mays
  Clone ID: LIB3061-066-Q1-N6-G11
ttttttttttttttttttttttttttttttttttttttttttttttttttttttttttttttttttttttttttttttttttttttttttttttttttttttttttttagggaaaaaaattaaaaaaaattttttttgggggggggggagaaaacatcccctttttaagcccccctttttcagcccctttaattttaaattaaaaaaaggcccccccaaaaatgggtttttccccccacagaggggggttaataaaaaaaaaccttttttttgggaaaaattttttttttttaaaaagagcccccaccaaagggttacccccccttatgggataaaaaaacttttttcccttttttagttccccaaacaaatttccaacaaaccatttgttaaaataaattattttttaaaaaaaaccaaaagttttttccacattttttttt

SEQ ID NO: 6602 - DNA, 518 bp, Zea mays
  Clone ID: LIB3061-066-Q1-N6-G12
ggggggggtgttttaaaaatctaaaaagtactttcttatttctgggacgccacaaacatcatccaaaaaacttcattattgaactataactcataagcaatctaaaagaggcaccaccaatgatgggttgttggtagaacactgttggggggggggaagcaagttggttgaatggcagcaattgttgcagttgtaagagggtgccagcgttaggcatagcgtgcaggtagaacggcaacaactgttgttgtgtcaagaaggcagcagggctcacatcagctagctggctgaatggtagtagttgttgctgctgtaaataagcagcagagttcaatgctgctagttggttgaatggaagaaattgctgggggtaggcagcaactagctggctgaatggtaattgttgttgcaaataagcagcagagttcaatgcagccagttggttgaatggaagaaactgatgttgctgagagtatgcagcaagggttgctagcacaagttgttgtaattgttgtgcc

SEQ ID NO: 6603 - DNA, 438 bp, Zea mays
  Clone ID: LIB3061-066-Q1-N6-G2
aaaaaggacttttttatttttggggagccacaaacattaaacaaaaaatttttttttgaacttttactcctaaaaaatctaaaaggagggcccccccaatgatgggttgttggtaaaacgctgctgggtttgtcaaaacaagttggttgaatgggaacaattgttgcagttgtaaaagggggccagcgttaggcccagcgtgctggtaaaaccgcaacaactggggttgtattaaaaaggtagcagggctcacaccaactagctggctgaatgggaaaaattgttgctgctgtaaataaacaggagagttcaatgctcccagttggttgaatggaaaaaattgctgggggtaggcaacaagtaactggctgaatgggagttgttgttgttgcaaaataaaaacagagttcaatgcaacttgttggttgaaaggaaaaa

SEQ ID NO: 6604 - DNA, 526 bp, Zea mays
  Clone ID: LIB3061-066-Q1-N6-G3
aaaaaaaacctcgtttttaattcccttcttcgcttggacgtcccggtttcactctacagtcggcggaagacaatcactccagaacatgtctagcgtccaggatccacaacatgtctagcgtccaggatccacaacatgtctagcgtccaggagttcagacagcacagacaatttgaacgtgttcaagatgcaatctatcagacaccaaaggtccacccgagtgtccagactcaccgccctcctttctgcatcttgaaccttgacacgggccttgaagaagcacaagtaccaggttttgccaacgaactagccacagaaggttcaatggtggaaacattgtcgtcgtgctcaatgatagatcctgtaaaggcctttcgtccacttgatattatctttctgtcacgagataaagcggggtctgaagaattcttgagcacaggatcagactgtatagaatccactagcaagggaggagactttgacgaactaactacatattttgtcgtcttcaaaagtaacagcttta

SEQ ID NO: 6605 - DNA, 386 bp, Zea mays
  unsure (1)..(386): unsure at all n locations; Clone ID: LIB3061-066-Q1-N6-G4
gtggggggttttttttttttttttttttttttttttttttttttttttttttttttttttttttaacgaggaaaaactcaatcaatatattgattatttttaggaaacacacctcgggttgagggcccccttatcgaggacatcttatatggaggggggagaggggggacctccaacgagggggtggtggcttnacaagacaggattcatcaaaaagaactgggtgtatgggaacaattgttgttgttgtaggaagggggggaccaatggggtagcccctaccaatgggttaagtaactggtgtcgctgttgtaggggcccagaaaagtttaacaaagtcaattggttgaaaggaaacaacttttgcaagtaaggcaaaaagggtt

SEQ ID NO: 6606 - DNA, 438 bp, Zea mays
  Clone ID: LIB3061-066-Q1-N6-G5
gtgtgggggttttttttttttttttttttttttttttttttttttttttttttttttttggggaagggaagataatccacttttattcaccaattgttcgggcctgccctgaatttgtttcctaccatcgagataatccatatttattcacaaattattggggcctgccagcctcagcagcgcttcatgatttttttcctacgatcgcccgatcttttccaccaggcgtgtttcgatctccattctcttcctcatcaggggggggtacttttggaggagctcccgggcctgctccttgtcgccggccgggactgccaactttaagccaagggagggcttctccaggttgccctggtacaggcaccaaatggggacgaaactaccttgcgcgttgcataaccacccgtggggaggttttagcgctgcgcccagcgatgc

SEQ ID NO: 6607 - DNA, 467 bp, Zea mays
  Clone ID: LIB3061-066-Q1-N6-G6
gtgtttttttttttaaaaactaaaaatgtactttcttatttctgggaagccacaaacatcagacaaaaaatttattattgaactataactcataagaaactaaaagaggcaccaccaatgatgggttgttggtagaacgctgctggggttggcaaagcaagttggttgaatggcagcaattgttgcagttgtaagagggtgccagcgttaggcgcagcgtgctggtagaacggcaacaactgtggttgtatcaagaaggtagcagggctcacaccagctagctggctgaatggtagtagttgttgctgctgtaaataagcaggagagttcaatgctgccagttggttgaatggaagaaattgctgggggtaggcagcaggtagctggctgaatggtagttgttgttgttgcaaataaaaagcagagttcaatgcagctagttggttgaatggaagaaactgctgttg

SEQ ID NO: 6608 - DNA, 525 bp, Zea mays
  unsure (1)..(525): unsure at all n locations; Clone ID: LIB3061-066-Q1-N6-G7
ggtgtgtggttttttttttatcgagataaatctcaatcaatatattgattatttctaggaaacacacgtcggtatgagggcaccattatcgagtacatctcatatgtaatctaaaagaggcacctccaacgatgggttgctgcctcgacaagacgggagtcatcaaagagaactggttgtatggcagcaattgttgctgctgtaggaaggcggcgaccaatgggttagccactaccaatggattaagtaactgttgtcgctgttgtaggtacgcagcagagttcgacagagtcagttggttgaatggaagcagctgttgcaagtaggcaacagggtttgccacagctagttgagtcagagctggtacaatctgttgcaacaattgttgttgcaggtatgtaggtgcattgcccacagcgagcgggctagatgaaagcaattgttgttgttgtacgtaggcgggaaggttcaccatgnctaattgactgagcgttggcagaaactgttgtaacttgtgttggtgct

SEQ ID NO: 6609 - DNA, 512 bp, Zea mays
  unsure (1)..(512): unsure at all n locations; Clone ID: LIB3061-066-Q1-N6-G8
gctggggggggtttttttcgagataaatctcaatcaatatattgattatttctaggaaacacatgtcggtatgagggcaccattgtcgagtacatctcatatgtaatctaaaagaggcacctccaacgatgggttgctgcaaggcagggttcatgagggggaactggttgtatggcagcaattgttgttgctgctgcaggaaggtagcgaccaatgggttagccactgccaatggattaagtaactgttgtcgctgttgtaggtacgcagcagagtttgacacagccagttggttgaatggaagcaactgttgtaagtaggcagcagggtttgccacagctagctgagtcagagctggtacaatttgttgcagcaactgttgttgtaggtacgtaggtgcattgcccaccgcgagcgggctanatgaaagtagttgtaggtagacggcagggttcaccatggctagttgactgagcactggcataaactgttgcagctgttggtgttgctgg

SEQ ID NO: 6610 - DNA, 573 bp, Zea mays
  Clone ID: LIB3061-066-Q1-N6-G9
gccgccgtgggggggggtttttttttttttttttttcgaggaaaatctcaatcaatatattgattatttttaggaaacacatgccgctttgagggcaccattatcgagtacatctcatatgtaatctaaaaaaggcaccaccaaccatgggttgctgccacggcaggggagggttcatcaaaaagaactggttgtatggcagcaattgttgctgctgtaggaaggcagcgaccaatgggttagccaccgctagtggattaagtaactgttgtcgctgttgtaggtacccaccaaagttcgacacaatcagttggttgaatggaagtagttgttgcaagtaggcagcagggtttgccacacctagctgagtaagagctggtacaatttgttgcagcaactgttgttgcaacaactgttgttgcaggtatgtaggtgcattgcccatagcgagcgggctagatgaaaaaagttgttgctgttgtaggtaggcgatagggttcaccatggctagttgactgagcgctggtagaaactgttgcaactgttgttgttgttggtatgcagctacctttg

SEQ ID NO: 6611 - DNA, 597 bp, Zea mays
  unsure (1)..(597): unsure at all n locations; Clone ID: LIB3061-066-Q1-N6-H10
ctatgacgtcctgcacgctcgtagcttggacctctanacgccgggggtgtgggggggttttaaacaaaactgcattcatcactgctgtacagtaaagcctcacatcttacagcagagtagttgagtagaacacatcaatagaaagaaaaagattaacaccacataatctcactaagaatgcatgccacatgggggggggggggggggtaccanctctctanatataatcnacaaaacacancanatggccaattgggtacagctacaaacagagtacaagagctaactcgaacaccatttttcatttcttcggtcttagatgattgaagtcgagcttttcacgcttgttggacttgtgtgatccgcgaccattgctttgtgaagatgacctaccgccaacattggtttttgggtccttgtaagatgccggtggttccatatcaagggggggctccttccttttcagttcatttaggagatatgctttctgaactgggaatgccaaaatgtctacatcttggggctggaacttcattccctctgctggagtttgcattgtcttggtcacagttactggggggaagctgaatctgtttg

SEQ ID NO: 6612 - DNA, 577 bp, Zea mays
  unsure (1)..(577): unsure at all n locations; Clone ID: LIB3061-066-Q1-N6-H11
gcgtgggggggggtggtttatattgaaataaatctcaatcaatatattgattatttctaggaaacacatgccggaatgagggcaccattatcgagtacatctcatatgtaatctaaaagaggcacctccaacgatgggttgctgcctcnacaagggggggggggggaaananaactggttgtatggcagcaattgttgctgctgtaggaaggcagcgaccaatgggttagccactgctagtggattaagtaactgttgtcgctgttgtaggtacccagcagagttcgacatagtcagttggttgaatggaagcagctgttgcaagtaggcagcagggtttgccacaactagctgagtcagagctggtacaatctgttgcaacaattgttgttgcaggtatgtaggtgcattggccacagcgagccggctaaatgaaagcagttgttgctgttgtaggtaggcggcagggttcaccatggctagttgactgagccctggcagaaactgttgcagctgttgttgtggctggtttgcaactacctttgccagaacaagtgggtttgatgcaagcaactgc

SEQ ID NO: 6613 - DNA, 584 bp, Zea mays
  Clone ID: LIB3061-066-Q1-N6-H12
gggggggggggtgtgttttttttttttctaaaaatgtactttcttatttctgggaagccacaaacatcagacaaaaaactttattattgaactataactcataagaaactaaaaggggcaccaccaatgatgggttgttggtaaaacgctggggttgttggggaagcaagttggttgaatggcagcaattgttgcagttgtaagagggtgccagcgttaggcgcagcgtgctggtagaacggcaacaactgtggttgtatcaagaaggtagcagggctcacaccagctagctggctgaatggtagtagttgttgctgctgtaaataagcaggagagttcaatgctgccagttggttgaatggaaaaaattgctgggggtaggcagcaggtagctggctgaatggtagttgttgttgttgcaaataaaaagcagagttcaatgcagctagttggttgaatggaagaaactgctgttgctgagagtaggcagcaaggtttgctagcacaagttgttgtagttgttgtgccctgatgttttgtgccaataaatgcaccaaaggtaactgatgtaatagggctgatga

SEQ ID NO: 6614 - DNA, 408 bp, Zea mays
  Clone ID: LIB3061-066-Q1-N6-H4
gtttggtttttttatatttttttttttttttttttttttttttttttttttttttttttttttttttttttttttaaatatttttttttttttttttttttattttttaaaaaaatttatattaataaataataaattttaaaattagggggggggggggggtatatatatttatttttaagttttttattttttttgggtaatttttggtaaaaaaaaaaaagaaaagggagaagaatttagaaaaaaaagagatgagaaaaaaaagggagaaagtaaaaaaaaattaagtaaaaaaaaaaaaaaaataaagagttgtggtatggagattttgtgagtaaaagaatggaagagaaagaaattatgagaaggaataagataaagtgaaaaaaggaaaaagaagtatag

SEQ ID NO: 6615 - DNA, 568 bp, Zea mays
  Clone ID: LIB3061-066-Q1-N6-H5
gggggggggggtttttttttttattttttttttcttttttttattttttttatttttttttatcagcaaaaaaactttattattgaactataactcataagcaatctaaagggggcaccaccaatgatgggttgttggtagaacactggtgggggtgggaaagcaagttggtcgaatggcagcaattgttgcagttgtaagagggtgccaacgttaggcgcagtgtgcaggtagaacggcaacaaatgttgctgtgtcaagaaggcagcagggctcacagcagctagctggctgaatggtagtagttgttgttgttgtacataagcatgagagttcaatgctgccagttggttgaatggaagaaattgccgggggtaggcagcagctagctggctgaatggtagtagttgttgttgctgcaaataagcagcagagttcaatgcagctagttggttgaatggcagaaactgttgttgctgagagtaggcagcaaggtttgctagcacgagttgttgtagttgttgtgccctggtgttttgtgccaacaaatgcaccaaaggtaactgct

SEQ ID NO: 6616 - DNA, 574 bp, Zea mays
  Clone ID: LIB3061-066-Q1-N6-H6
gggggggtgtttttttttttaaaaagtactttcttatttctgggaagccacaaacatcaggataaaaaactttattattgaactataactcataagaaactaaagggggcaccaccaatgatgggttgttggtagaacactgctgggtttggcgaagcaagttggttgaatggcagcaattgttgcagttgtaagagggtgccagcgttaggcgcaacgtgctggtagaacggcaacaactgtggttgtgtcaagaaggtagcagggctcacaccagctagctggctgaatggtagtagttgttgctgctgtaaataagcaggagagttcaatgctgctagttggttgaatggaagaaattgctgggggtaggcagcaggtagctggctgaatggtagttgttgttgttgcaaataagaagcagagttcaatgaacctagttggttgaatggaagaaactgctgttgctgagagtaggcagcaaggtttgctagcacaagttgttgtagttgttgtgccctgatgttttgtgccaataaatgcaccaaaggtaactgttgtaatagggctgatg

SEQ ID NO: 6617 - DNA, 542 bp, Zea mays
  Clone ID: LIB3061-066-Q1-N6-H7
gcggtgtgtggggtggttttaaatcaacaaaagaatacatatacactcttatattaaccggagaccagatcatccacgcataacacaatcgtgttaaggccaagacggccaaataagcatgtccggcaaagactcgagtgaaaactgcgtacaggggggccgggggggggtcaaatgtaaaaaagaattgaacattctactgcaatcacacgtgtgctgctgcggttgtacattttacatacattccagatgtagctgtcacaagccaatcatttccatgcgaccgagtcgatctcattccttgcagatttgtacaggtctagccttttgaccaaggcatccctcttctccatcaaagcgggggcctcatccaacatcgcgctcagctgtttcttctccttgcttcccacatgagcatagaaacggttaagcaaatttctttttgcttctttcacttggcaatgcacgatgggtttcggaaccgtgttgctcagagtctcacaggaccatgttaatataagatgacacattcgatccgattc

SEQ ID NO: 6618 - DNA, 540 bp, Zea mays
  Clone ID: LIB3061-066-Q1-N6-H9
gccggggggggggttttattttttatttttttttttttatcgagataaatctcaatcaatatattgattatttctaggaaacacatgtcggtatgagggcaccattgtcgagtacatctcatatgtaatctaaaaaatggcacctccaacgagggggggggggaaggcagggttcatcaaagagaactggttgtatggcagcaattgttgttgctgctgcaggaaggtagcgaccaatgggttagccactgccaatggattaagtaactgttgtcgctgttgtaggtacccagcagagtttgacacaaccagttggttgaatggaagcaactgttgtaagtaggcagcagggtttgccacagctagctgagtcagagctggtacaatttgttgcagcaactgttgttgtaggtacctaggtgcattgcccaccgcgagcgggctaaatgaaagtagttgtaggtagacggcagggttcaccatggctagttgactgagcactggcataaactgttgcagctgttgttgttgctggtatgc

SEQ ID NO: 6619 - DNA, 597 bp, Zea mays
  unsure (1)..(597): unsure at all n locations; Clone ID: LIB3061-067-Q1-K6-A1
cccagcgtccgcagcccctgttgttgagttttatgcaaactggtatgaagtctgcagggaactagctctagatatctacaaagctgaacaacaatacaagtctgcagggaactagactctgagaacatgttgctgatgcggagagcattgtagccaagggcataagagatggtgcaattgatgccaccatagatcaagcaaatggctggatggtatggaaggaaactggtgatgtctactctacaaatgagccatagatcatacaaatgagcccttgatgccacccaggattggggttttgcagagcctgcgatttatgtgagttaacatatcgatcttgaattcacatcacgggaagacacgtggtatgggagttgggcgcaagctcaagagccaccgcaggaaccagaggtgggctgacaaagcatacaaaaagccacttgggcaatgagtggaaaaaaccttttgctggatcatctcacgctaagggcatcattctggagaaaattggtattgaggccaagcagccaaattcggccatccgtaagtgtgcnccgtgttcagctggtgaaggatggaaagaagattgctgccttt

SEQ ID NO: 6620 - DNA, 581 bp, Zea mays
  Clone ID: LIB3061-067-Q1-K6-A10
ggggggggggagggagggctggggaaacaaaaaactgtttatgttgtggtgccaatgtggcctgagggtgttccagaagtgcttccgttcaggcaatccttgactggcaaaggagaacaatggatatgatgtacactgacatcacacaagctctcgaagcgcggggggaatccaaacaaaccccaaggactatctcactttcttctgcttaggtaaccgtgaggtgaagcaggagggagaatatcaacctgaggaacacccagaacctggcactgattacatccgggctcaagaggctaggaggtttatgatctatgttcatgccaaaatgatgatagtggacgatgaatacatcatcattgggtccgccaacatcaaccagaggtccatggacggtgccagggactctgagatcgccatgggcgcgtaccagccgtaccacctggcgactaggcagcctgcccgtggccagatccatggcttccggatgtctctttggtacgaacacctggggatgctggacgacgtcttccatcgccccgagagcgtagagtgcgtgcagaaggtgaacaagatcgccg

SEQ ID NO: 6621 - DNA, 574 bp, Zea mays
  Clone ID: LIB3061-067-Q1-K6-A11
ggggacttatatacaacacttgctgttgtgagaagtgtgactgatgctatttatttcctccacatgttgcttcagttcagattggcttatgttgcaccagagtcactagtggtgggagctggagacttggttgacgaggcggggggggggggctatccattattttcgtggttactttttacttgatttctttgatgtgcttccactccctcaggtgatgatactgctagtagttcctaaagttgggttatctgctgcaaactatgctaagaatttattgcgtgtcactgttcttcttcaatatgtgccccgtatcatcagattcgtaccacttcttgatggtcagtccaccaatggattcatatttgagtcagcatgggctaattttgtgatcaaccttctaatgtttattttggcgggacatgtggttggttcatgttggtatctctttggcttacagagggttaaccaatgtctacgagatgcttgttctatatcgaccattccatattgtgattcttttatagactgtggacgtggcattgggagtggactgtacagacagcagtggttc

SEQ ID NO: 6622 - DNA, 613 bp, Zea mays
  unsure (1)..(613): unsure at all n locations; Clone ID: LIB3061-067-Q1-K6-A12
cacaatattgtaccaacatggcagccaaaatggggggggggggggaggctcctaaaaataaactacaagtgctgctacngcgaccattttcccgcaatgctcacaagctcctatagcttcccttcttcccccgtacctctcaccagcggtgtcttctgtttgtgaaaacccaattcttcaaccctgggggggggggggggcaatcgcagctggcatcttacctttatcacccttgttcctccaacaatcatcagccctattacagcagttacctttggtgcatttattggcacaaaacatcagggcacaacaactacaacaacttgtgctagcaaaccttgctgcctactctcagcaacagcagtttcttccattcaaccaactagctgcattgaactctgcttcttatttgcaacaacaacaactaccattcagccagctacctgttgcctacccccaacaatttcttccattcaaccaactggcagcattgaactctcctgcttatttacagcagcaacaactactaccattcagccagctagctggtgtgagccctgctaccttcttgacacaaccacagttgttgccgttctaccagcacgctgcgcct

SEQ ID NO: 6623 - DNA, 612 bp, Zea mays
  Clone ID: LIB3061-067-Q1-K6-A2
ttcttgccctttttgtgagcgcaacaaagcgttcattattccacaatgctcacttgctcctagtgccattattccacagttcctcccaccagttacttcaatgggcttcgaacacctagctgtgcaagccaacatgcaacaacaagcgcttgcggcgagcgtcttacaacaaccaattgcccaattgcaacaacaatccttgccacatctaacaatacaagccatcacaacgcaacagcaacaacagttcctaccagcactgagccacctagccatggtgaaccctgccgcctacttgcaagagcagctgcttgcatccaacccacttgctctggcgaacgtagttgcaaaccagcaacaacaacagctacaacagtttctgccaacgctcagtcaactagccatggtgaaccctgccgcctacgtacaacaacaacaactgctttcatctagcccgctcgctgtgggcaatgcacctacatacctgcaacaacaattgttgcaacagattgtaccagctctgactcaactagctgtggcaaaccctgttgcctacttgcaacagctgcttccattcaaccaactgactctgtcgaactctgctgcgtacct

SEQ ID NO: 6624 - DNA, 609 bp, Zea mays
  unsure (1)..(609): unsure at all n locations; Clone ID: LIB3061-067-Q1-K6-A3
ccagcaagcaacatagnaagtagaatccattagcaacaatagagcaacaatggcgaccaagatattttccctccttatgctccttgctctttctacatgtgttgctaacgcgacaattttccctcaatgctcacaagctcctatagcttcccttcttcccccataccttccatcaattatagcttcagtatgtgaaaacccagctcttcaaccatataggcttcaacaagcaatcgcagcaagcaacatacctttatcgcccttgttgtttcaacaatcaccagccctatctttggtgcagtcattggtacaaaccatcagggcacaacagctgcagcaactcgtgctacctgtgatcaaccaagtagctctggcaaacctttctccctactctcagcaacaacaatttcttccattcaaccaactgtctacactgaaccctgctgcttatttgcagcaacaactattaccatttagccagctagctactgcctactctcagcaacaacaacttcttccatttaaccaattggccgcactgaaccccgctgcttatttgcagcagcaaatactactgccatttagcgagctagctgcagcaagtcgtgc

SEQ ID NO: 6625 - DNA, 599 bp, Zea mays
  unsure (1)..(599): unsure at all n locations; Clone ID: LIB3061-067-Q1-K6-A5
ggnaaaaaaggtaccatgaatcgtgggggggggggttcgatggcattgtgttccactggctgtgcgtgaattgagtacttgatgaagaaatctgtcttttggtggcgcagaggataaaatatggggtggtaaggatgagggacctggcaatggatgtcttgacctgggacaggttctacctgaggggtcggctgcagaaaccggtccatgttcttgttgacaactgggatataaggaaggtcaactcaattaacctagaaatggcaacttcagcttctctactccttttaccagcggagttcacggagtacgacctatatgctcaaatctgcagtctatcatatatgggtgatttgagaatgctgtttgcggaagacaaagataaggtgaagaagattgttgagggtagttttcagtcgttccaattgatgtacagccccctcttgcaagagtatattgctgaaggcctattgaagacatcatcccatggacaatataaaactttccggcaggattgcggtccatctacaacaaatgaactgttctctgttcttccgtggacgatccaaagccaaatgcaaggaaggcacacattgcac

SEQ ID NO: 6626 - DNA, 450 bp, Zea mays
  unsure (1)..(450): unsure at all n locations; Clone ID: LIB3061-067-Q1-K6-A6
tccattcaacccaactgtctacactgnaaccctgctgcttaggggcggcagcaactattaccattcagccagctagctactgcctactctcagcaacaacaacttcttccatttaaccaattggccgcactgaaccccgctgcttatttgcagcagcaaatactactaccatttagccagctagctgcagcaaaccgtgcgtccttcttgacacagcaacagttgctgcctttctaccagcagtttgcggctaaccccgcaaccctcttacaactacaacaattgttgccctttgtccaacttgctttgacagaccgagcgggctcctaccaacaacacatcattggtggtgccctcttttagattgcttattagttgtaattcaataataaagttttttggatgatgtatgtggccaaccagaaataagaagttacatttccagatttt

SEQ ID NO: 6627 - DNA, 598 bp, Zea mays
  unsure (1)..(598): unsure at all n locations; Clone ID: LIB3061-067-Q1-K6-B1
gnacccaactagcaacatagnaagcacagagggtgaccaacaatggcagccaaaatattttgcctccttatgctccttggtctttctgcaagtgctgctacggcgaccattttcccacaatgctcacaagctcctatagcttcccttcttcccccgtacctctcaccagcggtgtcttcggtatgtgaaaacccaattcttcaaccctataggatccaacaggcaatcgcagctggcatcttacctttatcacccttgttcctccaacaatcatcagccctattacagcagttacctttggtgcatttattggcacaaaacatcagggcacaacaactacaacaacttgtgctagcaaaccttgctgcctactctcagcaacaacagtttcttccattcaaccaactagctgcattgaactctgcttcttatttgcaacaacaacaactaccattcagccagctatctgctgcctacccccagcaatttcttccattcaaccaactgacagctttgaactctcctgcttatttacagcagcaacaactactaccattcagccagctagcttggtgtgagccctgctaccttcttgaca

SEQ ID NO: 6628 - DNA, 551 bp, Zea mays
  Clone ID: LIB3061-067-Q1-K6-B10
aacaatgacgaccaagatattttccctccttatgctccttgctctttctacatgtgttgctaacgcgacaattttccctcaatgctcacaagctcctatagcttcccttcttcccccataccttccatcaattatggcgggagtatgtgaaaacccagctcttcaaccatataggcttcaacaagcaatcgcagcaagcaacatacctttatcgcccttgttgtttcaacaatcaccagccctatctttggtgcagtcattggtacaaaccatcagggcacaacagctgcagcaactcgtgctacctgtgatcaaccaagtagctctggcaaacctttctccctactctcagcaacaacaatttcttccattcaaccaactgtctacactgaaccctgctgcttatttgcagcaacaactattaccatttagccagctagctactgcctactctcagcaacaacaacttcttccatttaaccaattggccgcactgaaccccgctgcttatttgcagcaacaaatactactgccatttagcgagctagctg

SEQ ID NO: 6629 - DNA, 588 bp, Zea mays
  unsure (1)..(588): unsure at all n locations; Clone ID: LIB3061-067-Q1-K6-B12
cctaaaaaaaggaaagcggacccgttatgaatatatgagcaaatagnatgatattagagaagggctctatgtagatgagcccctganatgnncacaaaaatcctgttctattgcagtagttggtcatgagaagttaagtctgcagggcccaggggggggaggatcacaacttaaaaactggttgaacaaccggaaagctaagcttgctcgcattgcaaaagaaagggcggagaatgctgataaaccatctacttcccatcccggcgagtcttcagaaagtgccggggaggacaactatctaccccctgcaggtgtgatgactgttctatccaaaggtggtagcctgttgagcccggactgcactgagcaaacgtcgcaggcagagctatccccgaacacgacgatgatggtccgtccattcacgagatccttctcgttggaacccggccgcctcgtttcattagtcgacagcgatgggaaggaggttggcaggggcaagatcttccaagcgccagggaagagcacaacggagagccgcgtttgcgtggttgatgtcactgagctcaggaccgagaagtggagggagct

SEQ ID NO: 6630 - DNA, 469 bp, Zea mays
  unsure (1)..(469): unsure at all n locations; Clone ID: LIB3061-067-Q1-K6-B3
aaaaaaggaaaagggaactttttttttgggggggggcaaaaaaaaaaaaaaaaaggggggttttggaaaaaaaaaaaaaaaaaaaaaaaaaaagggggcccccaaaaggggggttgggggaggggggggggggggggggaaaaaaaagggggaaaaaaggaaaaaaattttgttatctaaaaaaaggagggggggggaccacaaaaactttttaaaaaaagaaaaaaaccttatctcctaaaaaaaaaaaaaatattcttcatacaacccactagctctgccaaacatattctcataccaacaacaacaacactttcaacantttctaccaccnctcaatcaactaaccatgaataaaccctaccccctacctacaacancaacaacaaatctcatcaacccctatcnctcccctttaatgcacctaccttcctacaacaacaaccacttcaacataatatacaaactc

SEQ ID NO: 6631 - DNA, 591 bp, Zea mays
  Clone ID: LIB3061-067-Q1-K6-B4
catacctctcaccacggtgtcttcagggtggggagagaacccaattcttcaaccctacaggatccaacaggcaatcgcagcaggcatcttacctttatcacccttgttcctccaacaaccgtcagccctattacagcagttacctttggtgcatttgttggcacaaaacatcaaggcacaacaactacaacaacttgtgctaggaaaccttgctgcctactctcagcaacagcagtttcttccattcaaccaactggctgcattgaactctgctgcttatttgcaacaacaactaccattcagtcagctagctgctgcctacccccagcaatttcttccattcaaccaactggcagcattgaactctgctgcttatttacaacagcaacagctaccaccattcagccagctagctgatgtgagccctgttgccttcttgacacaacaacagttgttgccgttctacctgcacgctgcgcctaacgctggcaccctcttacaactgcaacaattgctgccattcaaccaacttgctttgacaaacccaacaacgttctaccaacaacccatcattgggtggtgccctctttt

SEQ ID NO: 6632 - DNA, 609 bp, Zea mays
  Clone ID: LIB3061-067-Q1-K6-B5
tccgtttttttttttttatttactccaccagtacaggtccatttatttactcgcaatataaaattaccgatcggtacttaactacacacgcaagcaattagttcatgcgcttattaggttgtgccactggccaccactacactacattacactagcacaagcaagcagctacacatacttgtccatatcacataaacgaaacagcatatataagaagatgtcccaacatctttgcaccacgcgcgagatcaggggccctgcaggccgaactcttcagggcgcggccacgttctccttggcgagcggcgcgatctcctcgccttcgacccctggctcgccgccggcgaccccgaggctgagcagcacgttctcccagttcttggcagggcccttccaggagagatcctggatcatgcagttcctcaccatctcctcgtacgccggcgtgccgaccaccttgatggcgcgctgcaatgtggtggccaccttcttgacgtccgccggctccacgacgttacagtcgacgctgaggcggcccatgtggaacccggtcttgccttcgatgatggtgtcgacgagtccaccggtggacgcgcaggcgcagggcgt

SEQ ID NO: 6633 - DNA, 277 bp, Zea mays
  unsure (1)..(277): unsure at all n locations; Clone ID: LIB3061-067-Q1-K6-B6
caaatcttgcataanaggcaggttccgtggcaatcgtgggcatcttcgtcgccctcctcgccgtggccggcgaggcggctgtgttcacggtggtgaaccagtgcccgttcaccgtgtgggccgcgtccgtgccggtgggcggcgggcggcagctgaaccgggcgagactggcggagacggcccccggggcacgaggccgcgcgcatctggcgcgcacgggtgccagttcgacgcgagcggcgcgggagctgccgcacgggggactgcnggcgcgtgc

SEQ ID NO: 6634 - DNA, 611 bp, Zea mays
  unsure (1)..(611): unsure at all n locations; Clone ID: LIB3061-067-Q1-K6-B7
tcagnaacacaccaagcgnaacgcactagcaacgacctaacacgaggggtaccaagnaattagccctccttgcgcttcttgccctttttgtgagcgcaacaaatgcgttcattattccacaatgctcacttgctcctagtgccattattccacagttcctcccaccagttacttcaatgggcttcgaacacctaggggggcaagccaacatgcaacaacaagcgcttgcggcgagcgtcttacaacaaccaattgcccaattgcaacaacaatccttgccacatctaacaatacaagccatcacaacgcaacagcaacaacagttcctaccagcactgagccacctagccatggtgaaccctgccgcctacttgcaagagcagctgcttgcatccaacccacttgctctggcgaacgtagttgcaaaccagcaacaacaacagctacaacagtttctgccaacgctcagtcaactagccatggtgaaccctgccgcctacgtacaacaacaacaactgctttcatctagcccgctcgctgtgggcaatgcacctacatacctgcaacaacaattgttgcaacanattgtaccagctctgactcaactagct

SEQ ID NO: 6635 - DNA, 601 bp, Zea mays
  Clone ID: LIB3061-067-Q1-K6-B8
cactacacatcttagcccaagggaggcaagattttgccatccttgccctccttgctctttcagcaagcgttgctaccgcgactattattccacaatgctcacaacaatacctctctccggtgacagccgcgagatttgaatacccaactatacaatcctacaggctacaagaggccatcgcagcaagcatcttacggtcgttagcattgaccgtccaacaaccatatgccctattgcaacaaccatccttaatgaatctatatctccaaagaatcgcagcacaacaactacaacaacagttgcttccaacaatcaatcaagtagttgcagcgaaccttgctgcttacctccagcaacaacaatttcttccattcaatcaactagctggggtgaaccctgctgcttacttgcaggcacaacagctactaccattcaaccaacttgtcaggagccctgctgccttcttactgcagcaacagttgcttccattccatctacaagttgtggcaaacattgctgctttcttgcaacaacaacaacaattgctgccattttacccacaggttgtgggaaacattaacgccttcttgcaacagcaaca

SEQ ID NO: 6636 - DNA, 610 bp, Zea mays
  unsure (1)..(610): unsure at all n locations; Clone ID: LIB3061-067-Q1-K6-B9
caagtagcgacagctcgnacaagggggggggggggggtgcggcgctgaaaagagaggctaagatcgccgcagccgccgcggcggcggcggcgctgtgcttcgcggccctggtggccgtggccgtctgccaaggcgaggtcgagcggcagaggctcagggacctgcagtgctggcaggaggggcaggagagcccgctcgacgcgtgccgccaggtcctcgaccggcagctaaccggcggcggcgtcggcggcccgttccggtggggcaccgggctccggatgcggtgctgccagcagctccaggacgtgagccgcgagtgccgctgcgccgccatccggagcatggtcaggggctacgaggaggccatgccgcctctggagaaaggctggtggcccatgggggcggcagcagcagccgccgccgcagggaggaggaggaggacaggggggctactactacccctgcagccgggcaggagagggataccaaacgcagatgtatccaccgtgtcgtcccggcaccaccgggccaaggatcggccgcgtgaggcttacgaaggcccgggagtacgccgcggggttgccgatgatgtgccggctgtcggagcccc

SEQ ID NO: 6637 - DNA, 81 bp, Zea mays
  Clone ID: LIB3061-067-Q1-K6-C10
atgaaatgtactcgaaatggtgcccgtcatacgcgaactgaaaatactagaaaaatcaatatattgattgagatttatctc

SEQ ID NO: 6638 - DNA, 559 bp, Zea mays
  unsure (1)..(559): unsure at all n locations; Clone ID: LIB3061-067-Q1-K6-C11
gcacatanaagcacatagtgggcgggcggggcagccaaaatttttgcttccttatgctccttggtctttctgcaagtgttgctaccgcnaccattttcccacaatgctcacaagctcctatagcttcccttcttcccccatacctctcaccagcggtgtcttcaatgtgtgaaacggcgattgttcaaccctacaggatccaacaggcaatcgcaacaggcatcttaccattatcacccttgttcctccaacaaccgtcagccctattacagcagttacctttggtccatttggtggcacaaaacatcagggcacaacaactacaacaacttgtgctagcaaaccttgctgcatactctcagcaacatcagtttcttccattcaaccaactggctgcattgaactctgctgcttatttgcaacaacaattaccattcagccagctagttgctgcctacccccagcaatttcttccattcaaccaactagcagcattgaactctgctgcttatttacagcagcaacaactactaccattcagccagctagctgatgtgag

SEQ ID NO: 6639 - DNA, 627 bp, Zea mays
  Clone ID: LIB3061-067-Q1-K6-C12
cacgcgttcttaaaaaaaaaaaaaaaaaaaaaaggggggggagaggggggggggaaaaaaaaaaaaaaaaaaaaaaaaaaaaaaaaaaaaaaagaaaaaaaaaaaaaaaaaaaaaaaaggggcggccctttttaaaaggtacccaactttacttccccgtccttccaatttttttttttttttttagtgccccctaatgggggggggggggccctctttttacaacttcttacctggaaaacccctggggttacccaatttaatccctttgcaacacatccccttttccccagttggcttattaccaaaaaggccccccccgttcccctttccaaacatttgcccaccctaattggcaattgggaccccccctttaccggccctttaaccccggcggttttggtgtttccccccaggttgacctttacatttgccagccccttaccccccgttcttttcgtttttttcctttcttttttccccactttccccgtttttccccttaaatttttaaatcggggcctccttttagggttccattttattgttttacggcccctcgcccccaaaaaacttttttagggtaatggttcccttttgggcccttcgccctaataaacgtttttt

SEQ ID NO: 6640 - DNA, 607 bp, Zea mays
  unsure (1)..(607): unsure at all n locations; Clone ID: LIB3061-067-Q1-K6-C3
ngattgaaacaactagcaacatagnaaagcacaatagtgtaccaacaatggcagccaaaatattttgcttccttatgctccttggtctttctgcaagtgttgctaccgcaaccattttcccacaatgctcacaagctcctatagcttcccttcttcccccatacctctcaccagcggtgtcttcaatgtgtgaaaacccaattgttcaaccctacaggatccaacaggcaatcgcaacaggcatcttaccattatcacccttgttcctccaacaaccgtcagccctattacagcagttacctttggtccatttggtggcacaaaacatcagggcacaacaactacaacaacttgtgctagcaaaccttgctgcatactctcagcaacatcagtttcttccattcaaccaactggctgcattgaactctgctgcttatttgcaacaacaattaccattcagccagctagttgctgcctacccccagcaatttcttccattcaaccaactagcagcattgaactctgctgcttatttacagcagcaacaactactaccattcagccagctagctgatgtgagccctgctgccttcttgacaaacaacag

SEQ ID NO: 6641 - DNA, 606 bp, Zea mays
  unsure (1)..(606): unsure at all n locations; Clone ID: LIB3061-067-Q1-K6-C4
cctcatccgtatctccctccctcttctcggcggccgtggcggcgccgngagactatgcgcggcctccaccgctgcccgcaccagctcctcctggtctctccaccgccgcggtccgcccccgcgtgccgccagtcggccaccgcctcatcgcggggcctcaggagctccctcgccgtcttctccgcacccggggctcgggtagcggcggcggcgcgcgagcagaagtggggccacgtggagggtgatgaagacggtggagaggagggcctaggggaggcgctccacaggacgcgggagctcgtggagtgcgccatgttcgcggccgtcgctgggctggcctacttcctcagcaattccctcgccattgagaattatttcagttgctttttcccattgccgatagtcatttcctcattaagatggggactagaagccagcaggaaaaccgtggctactgttttactgctattcacattatctggccctgtaaaagcgtcaacttatctgctaatgcatggagtagttggtctcatcatgggtactgtttggaggtgagaagtacagaggttaaatattgaagcttctgctttcgtcatcggcttcttt

SEQ ID NO: 6642 - DNA, 531 bp, Zea mays
  unsure (1)..(531): unsure at all n locations; Clone ID: LIB3061-067-Q1-K6-C5
caacatagnaaagcacaatagtgtaccaacaatggcagccaaaaattttgcctccttatgctccttggtctttctgcaagtgctgctacggcgaccattttcccgcaatgctcgcaagctcctatagcttcccttcttcccccgtacctctcaccagcggtgtcttcggtatgtgaaaacccaattcttcaaccctacaggatccaacaggcaatcacagctggcatcttacctttatcacccttgttcctccaacaatcatcagccctattacatcagttacctttggtgcatttattggcacaaaacatcagggcacaacaactacaacaacttgtgctagcaaaccttgctgcctactctcagcaacagcagtttcttccattcaaccaactagctgcattgaactctgcttcttatttgcaacaacaacaactaccattcagccagctacctgctgcctacccccagcaatttcttccattcaaccaactggcagcattgaaccctcctgcttatttacagcagcaa

SEQ ID NO: 6643 - DNA, 606 bp, Zea mays
  unsure (1)..(606): unsure at all n locations; Clone ID: LIB3061-067-Q1-K6-C7
ggggcggactcggnagagccggggcggggggcgcggcgcagcagcagcagctggcagcaggggaggccgcggcggcgcgggtgcggcccgtggagacgctgcttcgcgcggcaccgctggggctctgcgtggccgccatgaccgtcatgctccgtaaccagcagagcaacgagtacggcgccgtcgcctactccgacctgggaggcttcaagtacctcgtctacgccaacggcctctgcgctgcctactcgctggtatccgcgttctacactgccgtgccgaggcctgccaccgtgtcgcgctcctggctcgtcttcctcctcgaccaggtgttcacgtacctgatcctggcggcgggcgcagcggcggcggagctgctgtacctcgcctacaacggtgacaaggaggtgacgtggagtgaagcttgcggcgttttcggcagcttctgccgtcaggcgcgcacctccgtcgccatcaccttcggcaccgtcctctggttcatcctcctgtccctcatctcctcgtaccgccttttcagcgcctacgaggcgcccccgtcgtcggcgctcggcagcaagggcgtcgagatcgccgcctacccgcgct

SEQ ID NO: 6644 - DNA, 594 bp, Zea mays
  unsure (1)..(594): unsure at all n locations; Clone ID: LIB3061-067-Q1-K6-C9
cctactggtacaagnagccatccaancaagcatttacggtcattagcattaaccctccaacaaccatataggattgtatagttgggtatcgaaatgcctcggttgttaccggaaacggtgttgatcggctgcatcgtcgattgttattcttcatcaatcaacttgctgcaggggggggggggggggggggtccaacaacatcantttctttccttcaatcaacgggggggggtgaaccctgctatctacttgcaggcacatcagctactaccatttaaccaacttgtcggcagcccttatgccttcttactgcaacaacagcttctgccattctatctgcaagctgcggcaaacattgttgctttcttgacacatcaacatttcttgccattttacccacaatttgtggcaaacattaatgccttcttgcatcatcatcatttgctcccattttacccacanaatgtggcatacattgttgccttcttactacacctacaattgcttccattttatcctactttcttttcctaaatcctaccaccttatttgcaaccacccaccatttgttggtgccctcttctactttttttt

SEQ ID NO: 6645 - DNA, 234 bp, Zea mays
  unsure (1)..(234): unsure at all n locations; Clone ID: LIB3061-067-Q1-K6-D10
tagnaaagcacatagtgtaccaacatggcggccaaaatttttgcttccttatgctccttggtctttctgcaagtgctgctaccgcaaccattttcccacaatgctcacaagctcctatagcttcctttcttcccccatacctctcaccagcggtgtcttcagtatgtgaaaacccaattcttgcaccctacaggatccaacaggcaatcgcagcaggcatcttacctttatcac

SEQ ID NO: 6646 - DNA, 596 bp, Zea mays
  Clone ID: LIB3061-067-Q1-K6-D11
gtcacaaatccattgacaacattgggggggggggggggatcagctaaaaaaaagaatacatggaacttgtgcagaaactgtcgaggacgatgctgatatcactatatcatgtgctcctgttgatgagagccgagcttctaaaaatgggctagtgaagattgatcatactggacgggggcgggaattctttgaaaaaccaaaggtgctgatttgaattctatgagagttgagaccaacttcctgagctatgctatagatgatgcacagaaatatccataccttgcatcaatgggcatttatgtcttcaagaaagatgcacttttagaccttctcaagtcaaaatatattcaattacatgactttggatctgaaatcctcccaagagctgtactagatcatagtgtgcaggcatgcatttttacgggctattgggaggatgttggaacaatcaaatcattctttgatgcaaacttggccctcactgagcagccttccaagtttgatttttatgatccaaaaacacctttcttcactgcaccccgatgcttgcctccgacgcaattggacaagtgcaagatgaaagatgcatttatctc

SEQ ID NO: 6647 - DNA, 381 bp, Zea mays
  Clone ID: LIB3061-067-Q1-K6-D12
aaccccggtcgacccagcgtccgcaccaagcaatctacaacatgggtggaatccagaatccgagggaggagcaacaacaacaaccatgtgagttatgtggatctcaacaagctactcaaagtgcggtggcaatcttgacagcagcacaatacctaccatcaatgtgcggcttgtaccactcatactaccaaaataatccatgcgggggggggggcattagtggtgtttgcaattgaagaattgtgtctacctagccgttatactcatataacggtgttaagcaataaagtaccatacattatgatgtttgtaaaaaaaaaaaaaaaaaaaaaaaaaaaaccaaaaaaaaaaaaaaaaaaaaaaaaagaaggacgataataa

SEQ ID NO: 6648 - DNA, 623 bp, Zea mays
  unsure (1)..(623): unsure at all n locations; Clone ID: LIB3061-067-Q1-K6-D5
nattgaaaccactagcaacatagnaaagcacaatagtgtaccagcatggcagccaaaaattttgcctccttatgctccttggtctttctgcaagtgctgctacggcgaccattttcccgcaatgctcgcaagctcctatagcttcccttcttcccccgtacctctcaccagcggtgtcttcggtatgtgaaaacccaattcttcaaccctacaggatccaacaggcaatcacagctggcatcttacctttatcacccttgttcctccaacaatcatcagccctattacatcagttacctttggtgcatttattggcacaaaacatcagggcacaacaactacaacaacttgtgctagcaaaccttgctgcctactctcagcaacagcagtttcttccattcaaccaactagctgcattgaactctgcttcttatttgcaacaacaacaactaccattcagccagctacctgctgcctacccccagcaatttcttccattcaaccaactggcagcattgaactctcctgcttatttacagcagcaacaactactaccattcagccagctagctggtgtgagccctgctacctcttgatacaaccacagttgttgccgttctacc

SEQ ID NO: 6649 - DNA, 430 bp, Zea mays
  unsure (1)..(430): unsure at all n locations; Clone ID: LIB3061-067-Q1-K6-E1
gcattcagnaacacaccaagcgaagcacattagcaacaactctaacaacaatggctaccaagatattatccctccttgcgcttcttgcgctttttgcgagcgcaacaaatgcgttcattattccacaatgctcacttgctccaagttccattattacacagttcctcccaccagttacttcaatgggcttcgaacacccagctgtgcaagcctataggctacaacaagcaattgcggcgagcgtcttacatcatccaatttccccgttgcttctgcattccttggctcatttaacactgcaaaccatggctgcgcagctgcggctgctgttcctgccggctctgtgcctcctgggcctggttgaaccctgccgcctgcttgctgcggagtttggttgcgtgattccagcttggtctgggcgtcgtgggtg

SEQ ID NO: 6650 - DNA, 488 bp, Zea mays
  unsure (1)..(488): unsure at all n locations; Clone ID: LIB3061-067-Q1-K6-E10
gtacaaccaatagctctggcaaggctttgtcccgggtatcancaacaacaataaacttccattcaaccaactatctacactgaaccctgctgcttatttgcagcaacaactattaccattcagccagctagctactgcctactctcatcaacaacaacttcttccatttaaccaatgggggggggggaacctcgctgcttatttgcagcagcaaatattactaccatttagccagctagctgcagcaagccgtgcttccttcttgacacagcaacagttgctgcctttctaccagcagtttgcggctaaccccgcaaccctcttacaactacaacaattgttgccctttgtccaacttgctttgacaaacccagcagcctcctaccaacaacacatcattggtggtgccctcttttagattgcttattagttgtaattcaataataaagttttttggatgatgtatgtggccaaccagaaatnngana

SEQ ID NO: 6651 - DNA, 458 bp, Zea mays
  unsure (1)..(458): unsure at all n locations; Clone ID: LIB3061-067-Q1-K6-E11
tcgattggnacaaaggcaacacatggttantgataccgggttttaaatagaaaataagttgtaattcaataataaagttttttggatgatgtatgtggccaaccagaaataagaagttacatttccagattttaatgtgaaaaaaaaaaaaataaaaaaaaaaaaaaaaaaaaaaaagaggggggggggggagaaaaaaaaaaaaaaaaaaaaaaaaaaaaaaaaaaaaaaaaagaaaaaaaaaaaaaaaaaaaaaacccaaaaaaaaaaaaaaaagggggggccccctttagaaaaaaaaaaattttaccccccctttatagaaaaaataatattttttttttagggcccccaaaaaaaaaaaatcggccccgttttttaaaacccctagagggaaaaaaccccggggccccccaaattaaaccccttaaaaaaaatcccctttttccccagggggg

SEQ ID NO: 6652 - DNA, 617 bp, Zea mays
  unsure (1)..(617): unsure at all n locations; Clone ID: LIB3061-067-Q1-K6-E3
cnacttgagctagcatatatttcaaaactataaataatttataaccgttcaaagtttctttctttgaatcaatgtagtaatcactctgatcatgtacgaagtaaaatttttgtaatttgtaaaatttggtaataagatttccgctgcaaaatattggtgtgtgtgatttgtattacttaatcccgcggttctggttgtaagtggtttatccggtgtccgtggggcaatcagacggatcctgttaagttatctggtgcacatgcatggccgtctgagttctttaagacaaggacaggtgcatgtgagcccgataccttgggaggttctgccacatcatgcttgcgactatcgcgtcgaattagtaagggtaagtaaatttgttattcgtgttagtgggttggtggatggtctgacttggtttaatatttattagattgcctgagtcgttttagtaatttggtcgatgtcgtaggatgaaaaagatctcaataggtctcagtgtttgcgggattgtaggtgttaaaaatgggaagttatattaatatatatatgatacacaggttaatcggtaaatcaagtaattaagatacacagtttaaagagttaataaaaagcta

SEQ ID NO: 6653 - DNA, 615 bp, Zea mays
  Clone ID: LIB3061-067-Q1-K6-E6
ctggctctcgctgcgagcgccacctccacgcatacaagcggcggctgcggctgccagccaccgccgccggttcatctaccgccgccggtgcatctgccacctccggttcacctgccacctccggtgcatctcccaccgccggtccacctgccgccgccggtccacctgccaccgccggtccatgtgccgccgccggttcatctgccgccgccaccatgccactaccctactcaaccgccccggcctcagcctcatccccagccacacccatgcccgtgccaacagccgcatccaagcccgtgccagctgcagggaacctgcggcgttggcagcaccccgatcctgggccagtgcgtcgagttcctgaggcatcagtgcagcccgacggcgacgccctactgctcgcctcagtgccagtcgttgcggcagcagtgttgccagcagctcaggcaggtggagccgcagcaccggtaccaggcgatcttcggcttggtcctccagtccatcctgcagcagcagccgcaaagcggccaggtcgcgggggctgttggcggcgcagatagcgcagcaactgacggcgatgtgcggcctgcagcagccgactccatgccccta

SEQ ID NO: 6654 - DNA, 446 bp, Zea mays
  Clone ID: LIB3061-067-Q1-K6-E7
cattggtcaggtactcctttctgttgggggcgagggcaacaatgctgcacatgccagtgaagctctgcgacgcgccaagttcaagttccctggccgccaaaagatattgagagcagaagtggggcttcaccaagttcagccgtgccgactacctgaagtacaagagtgagggtagaattggggctgatggtgtcaacgcaaagctgctcggtaaccatggaagacttgagaagcgtgctcctgggaaggctttcctcgaggccgttgcttaagtccaatctacagttggaatgcgaatccagacgttttgctttagcctatcttattttgctttgtgcaacatgaattttaagtgtatggggtattacagtgccttgtcttgtgtgaacctgcttatctcgtgctgaacatcgttatgcatggaagtacttatcttttgttctgct

SEQ ID NO: 6655 - DNA, 616 bp, Zea mays
  unsure (1)..(616): unsure at all n locations; Clone ID: LIB3061-067-Q1-K6-E8
cgnactagcaacatacatagtgagagggacgactagcaacatcttagcaccaatggcagccaagatttttgccatccttgccctccttgctctttcagcaagcgttgctaccgcgactattattccacaatgctcacaacaatacctctctccggtgacagccgcgagatttgaatacccaactatacaatcctacaggctacaagaggccatcgcagcaagcatcttacggtcgttagcattgaccgtccaacaaccatatgccctattgcaacaaccatccttaatgaatctatatctccaaagaatcgcagcacaacaactacaacaacagttgcttccaacaatcaatcaagtagttgcagcgaaccttgctgcttacctccagcaacaacaatttcttccattcaatcaactagctggggtgaaccctgctgcttacttgcaggcacaacagctactaccattcaaccaacttgtcaggagccctgctgccttcttactgcagcaacagttgcttccattccatctacaagttgtggcaaacattgctgctttcttgcaacaacaacaacaattgctgccattttacccacaggttgtggggaaacattaa

SEQ ID NO: 6656 - DNA, 609 bp, Zea mays
  unsure (1)..(609): unsure at all n locations; Clone ID: LIB3061-067-Q1-K6-E9
gaccttagctttactactcgagacncggaanacgcgatcgacaccatgagggtgttgctcgttgccctcgctctcctggctctcgctgcgagcgccacctccacgcatacaagcggcggctgcggctgccagccaccgccgccggttcatctaccgccgccggtgcatctgccacggggggggcacctgccacctccggtgcatctcccaccgccggtccacctgccgccgccggtccacctgccaccgccggtccatgtgccgccgccggttcatctgccgccgccaccatgccactaccctactcaaccgccccggcctcagcctcatccccagccacacccatgcccgtgccaacagccgcatccaagcccgtgccagctgcagggaacctgcggcgttggcagcaccccgatcctgggccagtgcgtcgagtttctgaggcatcagtgcagcccgacggcgacgccctactgctcgcctcagtgccagtcgttgcggcagcagtgttgccagcagctcaggcaggtggagccgcagcaccggtaccaggcgatcttcggcttggtcctccagtccatcctgcagcagcagccgcaaagcggccag

SEQ ID NO: 6657 - DNA, 600 bp, Zea mays
  unsure (1)..(600): unsure at all n locations; Clone ID: LIB3061-067-Q1-K6-F10
ggtggtttcagtactgacaactgggggaatgttaaggtggatacaaaccaaatcgatcgatttcaagacagtagaggaatcttcattggacagattgttaacaaatgttgatgaggaaggccatctatatggggtttctggaggttctgggggctatgcagaaacaatctttcgctatgggggggaggtaatttacaagagagaaatagagggtcctcttgacttcagaatcctccgaaattcagattttcgtgaaattacactggaggtggagggcaaacctgttttgaagtttgcactttgttatggattcaggaacctgcagaatgttgttaggaagattaagatgggaaaatgtgaataccacttcattgaagttatggcgtgcccttcaggttgtttgaacgggggaggtcaattaaagcctgttgaaggccaatctgccaaggaacttatccagcaattggagagtgtgtacacacaagatatattaatatctgatcctttccgtaaccctatcgcgaaaaaacttatgacgaatggctggggcaacctggttcanagaatgcaaagaagtatttgctcacagaatatcaccca

SEQ ID NO: 6658 - DNA, 602 bp, Zea mays
  unsure (1)..(602): unsure at all n locations; Clone ID: LIB3061-067-Q1-K6-F2
gccgagccgcggacgcgaagcgtgcgngagtacggcatgttcctgtggcacgcccgcggcgacacgggcggcgcggaggacatgttcaccggcgccattgacgcggagcccgagagcagccaccaccggagcagctacgcgtggttcctatggatgaccggcggcgtcgagacctgcctcatggacaccggcaggcagagcgacggcaacgacgcggattgaaccgcgcagcgcccttggcttgggatcggagacacaatccaaaagcagacaagaaaaagacgacgacgaccttacctttaccaccggcaagtgccccggccggccggcgggccggccatttagatggcgcgtctaggtatcgccgtacgtcgtgccgcatgcatgcatgcccggcggcgcaagatggctatgcagcaagcgtagtatatatcatccatgagcagcgccggccgttgtagataggtgcaagttttccagtgtgctagatgcatgtgcgcgtcaaggaggcagccagcccaatagcccatgcagggccaggaagcgaacaataataatgttggcaaagctgctagcgcatgttagagcgtgtgatgcatagt

SEQ ID NO: 6659 - DNA, 605 bp, Zea mays
  unsure (1)..(605): unsure at all n locations; Clone ID: LIB3061-067-Q1-K6-F3
gctattttgagagaanaaagctgtctcagactctgaacgccnacccgagnagagcagtggctccagagatggaagaactcgaagtgcacattctctgagttctgttttgagccaatacagaggcgatgatgatacagacttccctggttcagaggctacttctggttccaaacgatggggtaatgttgccgatgttacttatggacggcagaatcagaagcaaagggagcctctgaatttccctcaaagaaaagggcctctggacggcggatttttcagtcgcagatctttcaaggagattggctgcaacgatgaaatgctaggtgcgttgagaaattttgatttccctcgtccatctcatatccaggctatggcatatgggcctatcttagaggggaggagttgtgttgttgctgatcaaagtggatctggcaagacactggcatatctttgccctataatacaaaacttaaggaacgaagaagttcaagggctccataaatcatcccctaggaaccccagggtgatagtattgacccctactgctgaacttgcttctcaggtccttaacaactgccggttgatatcaaaatctggggttccat

SEQ ID NO: 6660 - DNA, 605 bp, Zea mays
  Clone ID: LIB3061-067-Q1-K6-F5
caagcgaaacacattagcaacaacctaacaacaatggctaccaagatttatccctccttgcgcttcttgcgctttttgcgagcgcaacaaatgcgttcattattccacaatgctcacttgctccaagttccattattacacagttcctcccaccagttacttcaatgggcttcgaacacccagctgtgcaagcctataggctacaacaagcaattgcggcgagcgtcttacaacaaccaatttcccagttgcaacaacaatccttggcacatctaacaatacaaaccatcgcaacgcaacagcaacaacaattcctaccagcactgagccacctagccatggtgaaccctgccgcctacttgcaacagcagttgcttgcatcaaacccacttgctctggcaaacgtagttgcaaaccagccacaacaacagctgcaacagtttctgccagcgctcagtcaactagccatggtgaaccctgccgcctacctacaacagcaacaactgctttcatctagcccgctcgctgtggccaatgcacctacatacctgcaacaacaattgttgcaacagattgtaccagctctgactcagctagttgtggca

SEQ ID NO: 6661 - DNA, 602 bp, Zea mays
  unsure (1)..(602): unsure at all n locations; Clone ID: LIB3061-067-Q1-K6-F7
gncctgnaanaactccgaccggtggcggggggggacaggatctgtgccgcgatggcgacgtcgaacaccgcgcggatggaggacggcggcggcgacctgcggagcaccatcaagaagtggaacatcatctaccctgtctacctcaactccaagaagacggtcgccgagggccgccgcatcggcggtgccaaggcctgcccggaccccacctgcatcgagatcgctgactgctgttcgcacctcaagatcccccacgccatcgagttggataaggcgtaccctcgggatttcttccaggtggggagggtcagggtgcagcttaagaaagatgacggctcccccgtcaatcctgctattaaaacgaagaagcagctgatgatccaagtagcagagctagttcccaagcatcacggaaggacaaagaagcaggagccagcgcccaatcccggtggcagttcaaagaacacaaaaggcgggaaaaagaaaaagtgatgcagtatcattgtgttgttttttgttctgttcgtcatcatacactaagcttctgtgaaaaagaaaaatcttggaccttgttgttatgttgccattgtgccatttttcat

SEQ ID NO: 6662 - DNA, 605 bp, Zea mays
  Clone ID: LIB3061-067-Q1-K6-F8
gctggggagaggaaacccgacaggggcagcaggtcatgaccattaccggcgccagtgagaaggttgcccttcagcactgaaagctagtgattggcacttggaaggagcttttgacttcttctatagccaacctcaggtttctgtggtcaatactcggcatcttgaagatattttcaacagatataaagaacctgatgctgatatgataatggtggaaggaatatctcaattttgcaatgatctgcaggttgatcctcaggatattgtcatgcttgtcatatcatggcacatgaaagccgccacaatgtgtgaatttactcgtcaggaattcattggtggactgcagtcaattggggtagattcaatcgagaagtttcgtggaaaattaccatcattacgagctgagctaaaagatgacaataaattccgtgatatatacaactttgcattcacttgggcaagggaaaagggtcaaaagtctctctcactggagacttctattggaatgtggcagttgctatttgctgaaaggaactggcctcttctggatcattggtgtcagtttttacaggtcagacacaataaagccatatctagagacacat

SEQ ID NO: 6663 - DNA, 602 bp, Zea mays
  unsure (1)..(602): unsure at all n locations; Clone ID: LIB3061-067-Q1-K6-F9
gcaacatagnaaagcacaatagtgtaccaacaatggcagccaaaatattttgcctccttatgctccttggtctttctgcaagtgctgctacggcgaccattttcccgcaatgctcgcaagctcctatagcttcccttcttcccccgtacctctcaccagcggtgtcttcggtatgtgaaaacccaattcttcaaccctacaggatccaacaggcaatcacagctggcatcttacctttatcacccttgttcctccaacaatcatcagccctattacatcagttacctttggtgcatttattggcacaaaacatcagggcacaacaactacaacaacttgtgctagcaaaccttgctgcctactctcagcaacagcagtttcttccattcaaccaactagctgcattgaactctgcttcttatttgcaacaacaacaactaccattcagccagctacctgctgcctacccccagcaatttcttccattcaaccaactggcagcattgaactctcctgcttatttacagcagcaacaactactaccattcagccagctagctggtgtgagccctgctaccttcttgatacaaccacagttgttg

SEQ ID NO: 6664 - DNA, 600 bp, Zea mays
  unsure (1)..(600): unsure at all n locations; Clone ID: LIB3061-067-Q1-K6-G10
naaacacaccaagcgaactacctagcagcgactgaacaacaatggctaccaagatattagccctccttgcgcttcttgccctttttgtgagcgcaacaaatgcgttcattattccacaatgctcacttgctcctagtgccattataccacagttcctccgaccagttacttcaatgggctggggacacctagctgtgcaagcctacaagctacaacaagcgcttgcggcgagcgtcttacaacaaccaattaaccaattgcaacaacaatccttggcacatctaaccatacaaaccatcgcaacacaacagcaacaacagttcctaccagcactgagccaactagatgtggtgaaccctgtcgcctacttgcaacagcaggtgcttgcatccaacccacttgctctggcaaacgtagctgcataccaacaacaacaacaattgcaacagtttctgccagcgctcagtcaactagccatggtgaaccctgccgcctacctacaacagcaacaactgctttcatctagccctctcgttgtgggtaatgcacctacatacctgcaacaacaattgctgcaacagattgtaccagctctgactc

SEQ ID NO: 6665 - DNA, 585 bp, Zea mays
  unsure (1)..(585): unsure at all n locations; Clone ID: LIB3061-067-Q1-K6-G12
gcggccgccactagcacatanaagcacggtatgtaccggggtggcaaccaaaaattttgcttccttatgctccttggtctttctgcaagtgttgctaccgcaaccattttcccacaatgctcacaagctcctatagcttcccttcttcccccatacctctcaccagcggtgtcttcaatgggggggagacccaattgttcaaccctacaggatccaacaggcaatcgcaacaggcatcttaccattatcacccttgttcctccaacaaccgtcagccctattacagcagttacctttggtccatttggtggcacaaaacatcagggcacaacaactacaacaacttgtgctagcaaaccttgctgcatactctcagcaacatcagtttcttccattcaaccaactggctgcattgaactctgctgcttatttgcaacaacaattaccattcagccagctagttgctgcctacccccagcaatttcttccattcaaccaactagcagcattgaactctgctgcttatttacagcagcaacaactactaccattcagccagctagctgatgtgagccctgctgcctt

SEQ ID NO: 6666 - DNA, 360 bp, Zea mays
  Clone ID: LIB3061-067-Q1-K6-G4
gtcacaacatagcgaataccgggggggggggaacgccaacaaaacccaacacgaggcatacttctccatctgcctctatcaacagcggttgatacgcttaccttgagacaggaacgcgaacagcaagacctattcccattggcagccgcgggcggggaaaccccaaacgtaacagcaagcaccggtccaacaagaaccaggcccttcaatccactcgggggaagacccagccacgaacagcaacaatagcccttcacctgcgaccgccaaacgaaaacaagcggtatcagtaaactactcccaggtcatccacaacaactacagaaacaggcagcacgaagcacaattgctaaagcggac

SEQ ID NO: 6667 - DNA, 587 bp, Zea mays
  Clone ID: LIB3061-067-Q1-K6-G6
ccccgcgtccgccggttttgtaatcctgcattaagtgcattaatttcaaagtggattggttctgatgactgggtgcttaatacagacaaactggcagaactgaagaagtttgctgataatgaagatctgcattcagagtggcgtgctgctaagaaggctaacaaaatgaaggttgtttctcttataagggagaagacaggagatattgtcagtccagatgcaatgtttgatgtgcaggtgaaaaggatacatgaatataagcggcagctgctaaatatccttggaattgtctaccgctacaagaagatgaaagaaatgagcacagaagaaagagcaaagagctttgttccaagggtatgcatattcggtgggaaagcatttgccacatatatacaggcaaaaaggatcgttaaatttattacagatgtggcagctaccgtgaaccatgattcagacattggagatttgttgaaggtcgtatttgttccagactataatgttagtgttgccgaggcgctaattcctgccagtgaattgtcacagcatatcagtactgctggaatggaagctagtgggaccagtaacat

SEQ ID NO: 6668 - DNA, 602 bp, Zea mays
  unsure (1)..(602): unsure at all n locations; Clone ID: LIB3061-067-Q1-K6-G7
gcattcagnaacacacctagcgagacgcactagcaacgacctaacaacaatggcttccaagacattatccctccttgcgcttcttgccctttttgtgagtgcaacaaatgcgttcattattccacaatgctcacttgctccgagtgccattattccacagttcctccctccagttacttcaatgggcttcgaacacccagctgtgcaagcctataggctacaacaagcgcttgcggcgagcgtcttagaacaaccaattgcccaattacaacaacaatccttggcacatctaaccatacaaaccatcgcaacgcagcagcaacaagcactgagccacctagccgtggtgaaccctatcgcctacttgcaacaacagctgcttgcatccaacccacttgctttggcaaacgtagctgcataccaacaacaacaacagttgcaacagtttctaccagcgctcagtcaactagccatggtgaaccctatcgcctacctacaacagcaacaacttctttcatctagcccgctcgctatgggcaatgcacctacatacctgcaacaacagttgttgcaacaacagttgctgcaacaaattgtaccag

SEQ ID NO: 6669 - DNA, 626 bp, Zea mays
  Clone ID: LIB3061-067-Q1-K6-G8
cccggtcgaccacctcgtgtttcgcctcctacaggggggggcggggtgttcgtctgcaacgactggcacaccggccctctctcgtgctacctcaagagcaactaccagtcccacggcatctacagggacgcaaagaccgctttctgcatccacaacatctcctaccagggccggttcgccttctccgactacccggagctgaacctcccggagagattcaagtcgtccttcgatttcatcgacggctacgagaagcccgtggaaggccggaagatcaactggatgaaggccgggatcctcgaggccgacagggtcctcaccgtcagcccctactacgccgaggagctcatctccggcatcgccaggggctgcgagctcgacaacatcatgcgcctcaccggcatcaccggcatcgtcaacggcatggacgtcagcgagtgggaccccagcagggacaagtacatcgccgtgaagtacgacgtgtcgacggccgtggaggccaaggcgctgaacaaggaggcgctgcaggcggaggtcgggctcccggtggaccggaacatcccgctggtggcgttcatcggcaggctggaagagcagaagggccccgacgtcatggcggccgctct

SEQ ID NO: 6670 - DNA, 618 bp, Zea mays
  unsure (1)..(618): unsure at all n locations; Clone ID: LIB3061-067-Q1-K6-H1
gnttttngagctacaggcagnacttgcagaatcatcaagttatcctgaaaatttcttttggaggctcttcattctactggctattctggtgctttagcaaacccactaattgtgccagaatattcagttagcagattgaatgcagatgtcctggagcaatttataactgagaactacactgcttccagaattgttctagctgcatcaggtgttgatcatgatgaattggtatctattgccgaaccccttctgtctgacattcccagtgtatctggaacaacaaggccaaaatcaacctacattggtggagaatacagaagaagtgcagattcatcgaacacagacgttgcattggcattcgaggtcccaagtggttggctcaaagaaaaagattgtgtcactgtatcagttcttcaggcacttctgggtggtggtggcaagttttcttggggaaggcaaggaaaggggttacattcacgtctaaaacgcctcgtaaatgaatttgatcagatcaagtcaatctctgctttcaaggatgttcacagtaatactggcatctttggaatccatacatctactgatgcatcatttgttccctaagctattgacctagcagcc

SEQ ID NO: 6671 - DNA, 235 bp, Zea mays
  Clone ID: LIB3061-067-Q1-K6-H10
ttgacaatccaagcacatactgggggggggggggggggccgaatataaaaacacaaattataccccttactctttctgcatcatgttgccaacgcgacacttttccctacaatggtcacaaacacctttaacttcccttattcccccattccttctctcaatcatcccctcacttttttagaaggggggggtcagccctataaagctccaaaagccattgcccccggcaacataa

SEQ ID NO: 6672 - DNA, 626 bp, Zea mays
  unsure (1)..(626): unsure at all n locations; Clone ID: LIB3061-067-Q1-K6-H11
cccggtcgacccagcgtccgtgcacatanaagcacatagggggggagagggggggcaaaaattaagcctccttatgctccttggtctttctgcaagtgctgctacggcgaccattttcccgcaatgctcgcaagctcctatagcttcccttcttcccccgtacctctcaccagcggtgtcttcggtatgggaggggggagttcttcaaccctacaggatccaacaggcaatcacagctggcatcttacctttatcacccttgttcctccaacaatcatcagccctattacatcagttacctttggtgcatttattggcacaaaacatcagggcacaacaactacaacaacttgtgctagcaaaccttgctgcctactctcagcaacagcagtttcttccattcaaccaactagctgcattgaactctgcttcttatttgcaacaacaacaactaccattcagccagctacctgctgcctacccccagcaatttcttccattcaaccaactggcagcattgaactctcctgcttatttacagcagcaacaactactaccattcagccagctagctggtgtgagccctgctaccttcttgatacaaccacagttgttgccgttctacc

SEQ ID NO: 6673 - DNA, 443 bp, Zea mays
  unsure (1)..(443): unsure at all n locations; Clone ID: LIB3061-067-Q1-K6-H12
ggggggggaacaaataaaaaaaatatnatgacttccctggacgaggacggggttcacctacaccagggaacagttactaccagaacgggaatgggaggttcagtcgcgtgaacaatggcgccaagcaagctcctntggccgcgggggggggggggggcnntangcttacatcaaactaggaagcataaggctacattcaagtgagctgagtgcaaggattattcttagtaggagcattgctgtcagacagcttggttatttttttttgtgccgtgttgggtcgctaagagattagtagttgcagtcgtccgtggatggtaggtgaattttgttgccgttgatgagcttgtcaactgggtgttggaccatggttcgtaactttgtgtcatctgccaatcaggattggtgggaggttagacactaatcttatgaagcggtgactg

SEQ ID NO: 6674 - DNA, 624 bp, Zea mays
  unsure (1)..(624): unsure at all n locations; Clone ID: LIB3061-067-Q1-K6-H4
naaaactggctggccagccgcgggcgcggggggtgccaactgagaattgcaaataaatacctgcaggattccatagttttgatgaggaaactgcttcagaagcaagagtctggttctaagaagcctaagaagggagctgcaccggcacctccgtccgaggaaaagaagatgagcattggcctcatatatgtgaacgagcactactctggatggaaagagcagtgcttgaaggtgctgcagtccaagttcgacagccaaagccgctccttctcacccgatcaggaaatcgcagaagctctgaaggagtgccccatcgggcaggaaatgaacctgaagcaggttcagaagctgtgcatgcccttcatcaagctgaagaaggacgaggcaagggaggttggtcctcaggcgctggacttgaagcttccgttcggtgagatggatgttctccgggagaacttggagctgatcaagaggcagctgggccttgagcaagtcgaggtgctctccgcgtcggacgaagctgctcgcgctaaggctggtgaacatgcttcgctgctggagaagaacccaccatcacccggcgaccccatcgccatctttctcagcaaacagagctgaaaactg

SEQ ID NO: 6675 - DNA, 609 bp, Zea mays
  unsure (1)..(609): unsure at all n locations; Clone ID: LIB3061-067-Q1-K6-H6
gngcccancaagcaacatagnaaagtagaaccattagcaacaatagagcaacaatggcgaccaagatattttccctccttatgctccttgctctttctacatgtgttgctaacgcgacaattttccctcaatgctcacaagctcctatagcttcccttcttcccccataccttccatcaattatagcttcagtatgtgaaaacccagctcttcaaccatataggcttcaacaagcaatcgcagcaagcaacatacctttatcgcccttgttgtttcaacaatcaccagccctatctttggtgcagtcattggtacaaaccatcagggcacaacagctgcagcaactcgtgctacctgtgatcaaccaagtagctctggcaaacctttctccctactctcagcaacaacaatttcttccattcaaccaactgtctacactgaaccctgctgcttatttgcagcaacaactattaccatttagccagctagctactgcctactctcagcaacaacaacttcttccatttaaccaattggccgcactgaaccccgctgcttatttgcagcagcaaatactactgccatttagcgagctagctgcagcaagtc

SEQ ID NO: 6676 - DNA, 591 bp, Zea mays
  unsure (1)..(591): unsure at all n locations; Clone ID: LIB3061-067-Q1-K6-H7
atttgagcttcanaacacaccaggcgaagcagatgagcaacaacctaacaacaatggctaccaagatattatccctccttgcgcttcttgcgctttttgcgagcgcaacaaatgcgttcattattccacaatgctcacttgctccaagttccattattacacagttcctcccaccagtggggggaatgggcttcnaacacccagctgtgcaagcctataggctacaacaagcaattgcggcgagcgtcttacaacaaccaatttcccagttgcaacaacaatccttggcacatctaacaatacaaaccatcgcaacgcaacagcaacaacaattcctaccagcactgagccacctagccatggtgaaccctgccgcctacttgcaacagcagttgcttgcatcaaacccacttgctctggcaaacgtagttgcaaaccagccacaacaacagctgcaacagtttctgccagcgctcagtcaactagccatggtgaaccctgccgcctacctacaacagcaacaactgctttcatctagcccgctcgctgtggccaatgcacctacatacctgcaacaacaattgttgcaac

SEQ ID NO: 6677 - DNA, 610 bp, Zea mays
  Clone ID: LIB3061-067-Q1-K6-H8
gcattcaaaacacaccaacgagggggctgggggggacctaacaccaatggctaccaagatattagccctccttgcgcttcttgcccttttagtgagcgcaacaaatgcgttcattattccacagtgctcacttgctcctagtgccattattccacagttcctcccaccagttactggggggggggtcgaacatccagccgtgcaagcctacaggctacaactagcgcttgcggcgagcgccttacaacaaccaattgcccaattgcaacaacaatccttggcacatctaaccctacaaaccattgcaacgcaacaacaacaacaacaacagtttctgccatcactgagccacctagccgtggtgaaccctgtcacctacttgcaacagcagctgcttgcatccaacccacttgctctggcgaacgtagctgcataccagcaacaacaacagctgcaacagtttatgccagtgctcagtcaactagccatggtgaaccctgccgtctacctacaactactttcatctagcccgctcgcggtgggcaatgcacctacgtacctacaacaacagttgctgcaacaaattgtaccagctctgactcagctagct

SEQ ID NO: 6678 - DNA, 505 bp, Zea mays
  unsure (1)..(505): unsure at all n locations; Clone ID: LIB3061-067-Q1-N6-A1
gcctgtgttgttggttttttttttttttttttttttttttttttttttttttttttttttttttttttttttttttttttttttttttttttttttttttttttttttttttggaaaaaaaagctttgttgttgggaaaaatttaactttaaaagggagggggggggggggttaacattggaaaaaaactggaaatgtaaaaaaaaggggccaacttaaaataaaaaggtttgggggtggaaaaaatttaactttgaaaaaaaagccttgggcagttaaaaccatttttgactcccgaaagggattaaaaaccttggtttttttttcttgaaaagggcaagtggggaccccccaaaaaccttaaaaactttaaacctgaccccaagaatgttttcacaagagtggccctttagggtttcgaccaaatccaaaaataaaaacctaataattctcccgaaaggagtttaggcaaccatttttngggcaaagggaagaaatgtttttt

SEQ ID NO: 6679 - DNA, 407 bp, Zea mays
  unsure (1)..(407): unsure at all n locations; Clone ID: LIB3061-067-Q1-N6-A10
gcgcgcgcggggggggggtggtttttttttttttttttttggtttttttttttttttttttaaaaaaaacagtggtttctgaactttcagtatctcaaacacaaacaggggggccccaagctgaggccagacagggaaaaagccatggcncttcctgggggggggggggggtttnntaaaaattnnctgnaggtattcctacttggtgccgaggacccgggcccgggtgtcagggaagttctccatcccgggcagctcagtaacggggccctcgggagtgacaccgatcgggtagctgaggaggggggccgggagggcctgctccaggtcattacttgagtacagggcccagtactttttggggatcttgttgaccttttgaacgcactctaccctttcggggcgct

SEQ ID NO: 6680 - DNA, 548 bp, Zea mays
  unsure (1)..(548): unsure at all n locations; Clone ID: LIB3061-067-Q1-N6-A11
ggggggggtgtgtttgattgaaaattntgtattcttttataatgaatatttatttacacctggtgacatcccgggtggcgggcaaataacatagctcctagtaatctgaatgcaacgtatatgtgcgtgtagtagctcaagcaaagggggggggggggggggaaaaaactttcntcttattatgtacacggaacaccaaagccaaaaatatttgccccgttagggtccaccaagtagacatgttcggagaaatttcagagctctagaagctttagatgctgaactgaaactgaaaagttagagcctagtcaggtagcgatcatcccctccgtctacgctgaaaagaatcatgtgtcaagatccaagcgaggcataagtctcttcgctcaacctcgacttctcagctcgcttcagccgccttttacgatacctccatgcaacctgaatacgagttgcagcaatggttcgccagtagggggattcatacctgatcgctccctgcactcgtggattacgcaggaatcgagcaaactgggaggggacttctt

SEQ ID NO: 6681 - DNA, 101 bp, Zea mays
  Clone ID: LIB3061-067-Q1-N6-A12
gtgggggggtgttttttttttttttctaaaaagtactcttcttaatttctggggaaccacaaacatcagacaaaaactttattattgaactataactcata

SEQ ID NO: 6682 - DNA, 558 bp, Zea mays
  Clone ID: LIB3061-067-Q1-N6-A2
ggggtttgttttttatcgagataaatctcaatcaatatattgattatttctaggaaacacacgtcggtatgagggcaccattatcgagtacatctcatatgtaatctaaaagaggcacctccaacgatgggttgctgcctcgacaagacaggatgcatcaaagagaactggttgtatggcagcaattgttgctgctgtaggaaggcggcgaccaatgggttagccactaccaatggattaagtaactgttgtcgctgttgtaggtacgcagcagagttcgacagagtcagttggttgaatggaagcagctgttgcaagtaggcaacagggtttgccacagctagttgagtcagagctggtacaatctgttgcaacaattgttgttgcaggtatgtaggtgcattgcccacagcgagcgggctagatgaaagcagttgttgttgttgtacgtaggcggcagggttcaccatggctagttgactgagcgttggcagaaactgttgtagctgttgttgttgctggtttgcaactacgttcgccaaagcaagtgggttggat

SEQ ID NO: 6683 - DNA, 405 bp, Zea mays
  Clone ID: LIB3061-067-Q1-N6-A5
ggatctgaagcattgacgtttctgggcctacaaaatttcagccgggttcaggctttcaggggggaaaaacataccatactggttgccatacactgggtggaaacccaaaactgggaaaagcctagcgtacaccattgggtgtgggtgtgtgggggggggggcaacattggcttaagccactctaaatcgccaagccttcgccatttttttcccgagggtttgagcagcaactgcaccccccgaggggagcaaaccacacactgtttgccgcacccttgaaaccattactcggggcctcagggccctccggacacaatttgctgccatttccttggaaaaaactacggggcggggggggactttttttccgggcaatgggtgccttccttgcatttggctttggat

SEQ ID NO: 6684 - DNA, 497 bp, Zea mays
  Clone ID: LIB3061-067-Q1-N6-A6
gggggtgtgtttttttttttttttttttttttttttttttttttttttttttttttttttttttttttttttaaaatcgggaaagggaacttcttatttggggggggccccataccccaaccaaaaaatttattattgaattacaactaaaaggggggggaaaagagggcccccccaatgatgtgtggggggggggaggccgcccggcctgtcaaagcaggcgggacaaagggcaacaattggtggaaatagaaaagggggggggggctagccccaaactggtggaaaaaaggcaacaaccggtgctgggacaaaaaagaaacacggtttgctgcacctaactggctaaaggggaataggatttgctggagaaaaaaaacagcggggttcagggcggccaattggttaaaaggaaaaagttgttgttgctgaaagtaggcaaaacccacctggcggaaagggaaaaggtggtgctgcaaaaaaacagcagggttcaa

SEQ ID NO: 6685 - DNA, 227 bp, Zea mays
  Clone ID: LIB3061-067-Q1-N6-A7
gtgtgttgtgtttttttttatttttttttttttttttttttttttttttttttttttttttttattttttttttttttttttttttttttttttttttttttttttttttttttttttttttttttttttttttttttttttttttttttgtgggggggggggtttttttttttttttttttttttaaaaaagaaaaggaggggagatttttttttttttttaaaaa

SEQ ID NO: 6686 - DNA, 446 bp, Zea mays
  Clone ID: LIB3061-067-Q1-N6-A8
ggggggggtttttttttttttttttttttttttattttttttttttttttttttttttttttttttttttttttttttttttttttttttttttttttttttttttttttttttttttttttttttttttttttttttttttttttttgggggggggggggttttttttttttttttaaaaaagggtttttttttttgggggggcccccccacatttttaaaaaaaattttttttgggctttttacccaaaacccttaaaaaagggggccccccccgaggggggggggggggaaccacctttgtttttttaaaaaaaaaggggggtgagggggaattattttttcattttaaaggggggcccccttttagtgtttgcgggggggaaaaaacaaacaatttttttttttttaaaaagggggggggggccaaaaaaaatttttggggg

SEQ ID NO: 6687 - DNA, 569 bp, Zea mays
  unsure (1)..(569): unsure at all n locations; Clone ID: LIB3061-067-Q1-N6-B1
gcggttttgttntggttttaaaaagtactttcttatttctgggaagccacaaacatcagacaaaaactttattattgaactataactcataagaaactaaagggggcaccaccaatgatgggttgttggtagaatgctgttgggtttgggagggggggggggttgaatggcagcaattgttgcagttgtaagagggtgccagcgttaggcgcagcgtgctggtagaacggcaacaattgtggttgtgtcaagaaggtagcagggctcacaccagctagctggctgaatggtagtagttgttgctgctgtaaataagcaggagagttcaaagctgtcagttggttgaatggaagaaattgctgggggtaggcagcagatagctggctgaatggtagttgttgttgttgcaaataagaagcaaagttcaatgcagctagttggttgaatggaagaaactgttgttgctgagaataggcagcaaggtttgctagcacaagttgttgtaattgttgtgcccttgatgtttttgtgccaataaatgcacccaaaggtaactggtgtaataaggc

SEQ ID NO: 6688 - DNA, 512 bp, Zea mays
  unsure (1)..(512): unsure at all n locations; Clone ID: LIB3061-067-Q1-N6-B10
tcctgcacgctactaagcttgatccctanacggccgggggggggggggggtttttttttttttttttttttttttttttttttttttttttttttttttttttttttttggggaagggaacttcttatttttggggggccccatacattatccaaaaaatttttttttggattaccactaataatgggggggggggggggggcccccaataatgtgtttttggtaggagggtgttgggtttttcaaaacaagttggacaaagggcaacaattgttgtatttttaaaaggggtggggggttagccccaaactggttgtaaaaagggagcaactgtggttttgttaaaaaggaaacacgaatttgtggaactagcttgttaaatgggaggagtatttggtggtgcaaaaaagcagggggggtgattgcgggccaattggttaaatggaaaaaattttttttgttaaaagtgggcgataactagttgggtaaatgggaaaaatttttggttgaaa

SEQ ID NO: 6689 - DNA, 203 bp, Zea mays
  unsure (1)..(203): unsure at all n locations; Clone ID: LIB3061-067-Q1-N6-B12
gtgtttgttgggttttgacactaacaccagtagtaaaaagtaaaatcagtaaccacctggaattgctcaaaacaattagttcatgaatacaacacagttaaccacagcttttaacataatgtttcnttagggcgcacagttntncnccttcttacttcatcgtggggggtggagtcggccttgctacgctacaggggaacaac

SEQ ID NO: 6690 - DNA, 522 bp, Zea mays
  Clone ID: LIB3061-067-Q1-N6-B4
gtgggttttttttttctaaaaatgtactttcttatttctgggaagccacaaacatcatccaaaaaacttcattattgaagtataactcataagcaatctaaaagaggcaccaccaatgatgggttgttggtagaacgctgttgggtttgtgaaagcaggttggttgaatggcagcaattgttgcagttgtaagagggtgccagcgttaggcgcagcgtgcaggtagaacggcaacaactgttgttgtgtcaagaaggcaacagggctcacatcagctagctggctgaatggtggtagctgttgctgttgtaaataagcagcagagttcaatgctgccagttggttgaatggaagaaattgctgggggtaggcagcagctagctgactgaatggtagttgttgttgcaaataagcagcagagttcaatgcaaccagttggttgaatggaagaaactgctgttgctgagagtaggcagcaaggtttcctagcacacgttgttgtagttgttgtgccttgatgtt

SEQ ID NO: 6691 - DNA, 552 bp, Zea mays
  unsure (1)..(552): unsure at all n locations; Clone ID: LIB3061-067-Q1-N6-B5
gtggcgcgagctcatggagatggtggaggacgtgcagatcgttctgctgggcacgggcaagaagaagttcgagcgcatgctcatgagcgccgaggagaagttcccaggcaaggtgcgcgccgtggtcaagttcaacgcggcgctggcgcaccacatcatgggcggcgccgacgtgctcgccgtcaccagccgcttcgagccctgcggcctcatccagctgcaggggatgcgatacggaacgccctgcgcctgcgcgtccaccggtggactcgtcgacaccatcatcgaaggcaagaccgggttccacatgggccgcctcagcgtcgactgtaacgtcgtggagccggcggacgtcaagaaggtggccaccacattgcagcgcgccatcaaggtggtcggcacgccggcgtacgaggagatggtgaggaactgcatgatccangatctctcctggaagggccctgccaagaactgggagaacgtgctgctcagcctcggggtcgccggcggcgagccaggggtcggaagcgaggagatcgcgccgctcgccaa

SEQ ID NO: 6692 - DNA, 119 bp, Zea mays
  Clone ID: LIB3061-067-Q1-N6-B6
ggttgtgtttttttttttgtttttttttttgaaacacttcataatgccccattaattaaggtgatagagttggtgacatagagatcacacgtgcttgttttgttggctttatttttgct

SEQ ID NO: 6693 - DNA, 555 bp, Zea mays
  unsure (1)..(555): unsure at all n locations; Clone ID: LIB3061-067-Q1-N6-B7
gctgggttttttttttttcagaaatatatcgagataaatctcaatcaatatattgattatttctaggaaacacacgtcggtatgagggcaccattatcgagtacatctcatatgtaatctaaaagaggcacctccaacgatgggttgctgcctcggcaggacaggattcatcaaagagaactggtgtgtatggcagcaattgttgctgctgtaggaaggcggcgaccaatgggttagccactaccaatggattaagtaactgttgtcgctgttgtaggtacgcagcagagttcgacagagtcagttggttgaatggaagcagctgttgcaagtaggcaacagggtttgccacagctagttgagtcagagctggtacaatctgttgcaacaattgttgttgcaggtatgtaggtgcattgcccacagcgagcgggctanatgaaaacagttgttgttgttgtacgtaggcggcagggttcaccatggctagttgactgagcgttggcagaaactgttgtagctggttgtggttgctggtttgcaactacgttcgcc

SEQ ID NO: 6694 - DNA, 585 bp, Zea mays
  Clone ID: LIB3061-067-Q1-N6-B8
gctgggtttttttttttgacttaaaaatagatctctaatcttttattactgagaagttgcacatatcagtatgagaactttattattacagtataaagcataaaaaaatctagaagatggcaccaccaatggtgggctgctgcaataagggggggggattcgtcaaagcaagttggttaaatggcagcaattgttgttgttgtaagaaggcgacattgtttgccacatcctgtgggtagaatggtagcaactgttgctgttgcaagaaggcgttaatgtttcccacaacctgtgggtaaaatggcagcaattgttgttgttgttgcaagaaagcagcaatgtttgccacaacttgtagatggaatggaagcaactgttgctgcagtaagaaggcagcagggctcctgacaagttggttgaatggtagtagctgttgtgcctgcaagtaagcagcagggttcaccccagctagttgattgaatggaagaaattgttgttgctggaggtaagcagcaaggttcgctgcaactacttgattgattgttggaagcaactgttgttgtagttgttgtgctgcgattcttt

SEQ ID NO: 6695 - DNA, 172 bp, Zea mays
  unsure (1)..(172): unsure at all n locations; Clone ID: LIB3061-067-Q1-N6-C10
gcgcgtgttgggggttttttttttttttttttttttttttttttgaggaaaatctcaatcaatatattgattatttctaggaaacacatgccggaatgagggccccattatcgagtacatctcatatgtcacctgaaacaaccccnaaattgggggggggggggggcaaacc

SEQ ID NO: 6696 - DNA, 542 bp, Zea mays
  unsure (1)..(542): unsure at all n locations; Clone ID: LIB3061-067-Q1-N6-C11
gggggggggggggtttttttttcatccaaaaaacttcattattgaactataactcataagcaatctaaaagaggcaccaccaatgatgggttgttggtagaacactgttgggtttgtcaaagcaagttggttgaatggcagcaattgttgcggtgggggggagggggccagcgttaggcatancgtgcaggtagaacggcaacaactgttgttgtgtcaagaaggcagcagggctcacatcagctagctggctgaatggtagtagttgttgctgctgtaaataagcagcagagttcaatgctgctagttggttgaatggaagaaattgctgggggtaggcagcaactagctggctgaatggtaattgttgttgcaaataagcagcagagttcaatgcagccagttggttgaatggaagaaactgatgttgctgagagtatgcagcaaggtttgctagcacaagttgttgtagttgttgtgccctgatgttttgtgccaccaaatggaccaaggtaactgctgtaataaggctgacggttgtt

SEQ ID NO: 6697 - DNA, 553 bp, Zea mays
  Clone ID: LIB3061-067-Q1-N6-C12
gccgtgggggggggtttttttttttttttcttttttttttttttttttttttttttttttttttttttttttttttttttttttttttttttttttttttttttttttttttttccaccccttttttcccccccgaaattcccaacccttccctgggggggggccagttttccctataatgagcccttttaaaccttggcaaaaaaaaaaaaaaaccttttcccttttaaaaatttttatcccttcaaaattccaaaaaaaaaacaacccgaaaccaaaaaattaaaaccctggggtccctaataagtaacctaacccacattaattgcgttcccctaactcccccttttccaatcgaaaaacctttcgccccaacttaataaaaaaatcccccaaccccccgaaaaaaccctttttctttttggcccccagggtttttttttttttcaccaataaaaccgccaacaccttattccccttaacccccttcccctaaaaaattttcaaaaacccctcccccctggtttcccccaaaaaacaaaaatccttttta

SEQ ID NO: 6698 - DNA, 532 bp, Zea mays
  Clone ID: LIB3061-067-Q1-N6-C2
ggggtgaacaagcagataagataaatagtcacattacagctagctgcaaaaatcgttcatgaattataagcatcaggcagacttaaaaacatggtagtcttagaacattgttctatatccttgcagagcaactagaaaaaactctcaacacagcacattcagaggatttatgcgttggcagcagcctgggcagcggcatcccgcttcctttgctcttctatgatgctcagcttgattcccttgcccttgggcaggctcacccacggcttattacccttgccgatggtgaacacgttgcccatacgggtggcgaactggtggcccagggagtcctccacgtgaatggtctcaaagctgcccttgtgcttctccctgttcttgataacacccacgcgggcagtgttccttccgccagtcaccatgacgacgttgccaacatcaaacttgatgaagtccacaatcttgttggtctccagatcgatcttgatggtgtcgttggccttgatgagggggtcagggtagcggatggtgc

SEQ ID NO: 6699 - DNA, 136 bp, Zea mays
  Clone ID: LIB3061-067-Q1-N6-C3
ctaaaaagtactttcttatttctgggacgccacaaactcatccaaaaaacttcattattgaactataactcataagcaatctaaaagaggcaccaccaatgatgggttgttggtagaacactgttgagtttgtcaa

SEQ ID NO: 6700 - DNA, 556 bp, Zea mays
  Clone ID: LIB3061-067-Q1-N6-C4
gcgcttggtgtttttttttagaacgataaatttatgcatgactaactccacaagctccgcaaagaagtttgtagtgaggctacaggtttgtacacagaagtcaggatgtttaaaatgccgtgtacaatctatatgggtcagaaagataactaaaacagaggggggaatttacaatggagcagaggatgatggagacaatccagttggtctccaatctgattatagaggaagaaaaaatgtcatcgcttgcgggttaaagaagccgatgacgaaagcagaagcttcaatatttaacctctgtacttttcacctccaaacagtacccatgatgagaccaactactccatgcattagcagataagttgacgcttttacagggccagataatgtgaatagcagtaaaacagtagccacggttttcctgctggcttctagtccccatcttaatgaggaaatgactatcggcaatgggaaaaagcaactgaaataattttcaatggcgagggaattgctgaggaagtagggcagcccagcgacggccgggaacatggggcac

SEQ ID NO: 6701 - DNA, 364 bp, Zea mays
  Clone ID: LIB3061-067-Q1-N6-C5
gctgtggggtttttttttttttttttttttttttttttttttttttttttttttttttttttttttttttttttttttttttttttttttttttttttttttttttttttaatttttttttttttttttttttttattttttatttttttatggggggggggggggggttttttttatttatttttaatttttatgttgtttagtggtagttttagaaaaaaaaaaaagaggggggtgtgggggggggagagagaagagagaaaaaaaagatttttgagagggagaagagagaaaaaaaaaaaaagagaggccacacaaaagagggggggggagaaaaaaaggggaggagtgagaaaaaaagaa

SEQ ID NO: 6702 - DNA, 484 bp, Zea mays
  unsure (1)..(484): unsure at all n locations; Clone ID: LIB3061-067-Q1-N6-C7
ggggggggggggtttttttagcagcagcagcagcagcactgtactaatcatatgtgacagcaaactatcaacgaagtatatatgcgataagccattattacatgatcgactacgcataacagagatttgcaacgaggccttcctccaacngcttcggggcgggtaggcggcgatctcnacgcccttgctgccgagcgccgacgacgggggcgcctcgtaggcgctgaaaaggcggtgcgaggagatgagggacaggaggatgaaacagaggacggggccgaaggggatggcgacggaggtgcgcgcctgacggcagaagctgccgaaaacgccgcaagcttcactccacgtcacctccttgtcaccgttgtaggcgagggacagcagctccgccgccgctgcgcccgccgccaggatcagggacgttgaacaccttggtccgaggagggaagacgagccatgagcgcggacacggggggcaggg

SEQ ID NO: 6703 - DNA, 201 bp, Zea mays
  Clone ID: LIB3061-067-Q1-N6-C9
gtgggtgtgtgtttttttttttttttttttttttttttttttttttttttttttttttttttttttttttttttttttttttttttttttttttttttttttttaaaaaaaaaaacctctaaaacttatttactgggggggggcccatataaacggggggaatttttttttcccggtttaaattataaaaaaattctaaaa

SEQ ID NO: 6704 - DNA, 508 bp, Zea mays
  Clone ID: LIB3061-067-Q1-N6-D1
ggaaatataacttcttatttctaggaggccacatacatcagccaaaaaacttcattattgaattacaactaataagcaatctaaaagaggcaccgccaatgatgtgttgttggtagaaggctgctgggtttgtcaaagcgagttggacaaagggcagcaactgttgcagttgtaagagggttgcggggttagccacaaactgctggtagaacggaagcacttgttgttgtgtcaagaaggaagcggggcttgttgtagctagctggccaaatggtagtagtatttgctgctggaaataagcagaggggttcagtgcggccaattggttaaatggaagaaattgttgctgctgagagtaggcagtagctagctggctgaatggtagtagttgttgttgctgcaaataagcagcagggttcagtatagacagttggttgaatggaagaaattgctgttgctgaaagtagggggaaaggtttgccagagctacttggctgatcactggtag

SEQ ID NO: 6705 - DNA, 603 bp, Zea mays
  unsure (1)..(603): unsure at all n locations; Clone ID: LIB3061-067-Q1-N6-D10
cacgctactaacttggatccttagacgccggcgggggggggggtgttaaaaagtactttcttatttctggggaagccacaaacatcatccaaaaaacttcattattgaagtataactcataagcaatctaaaagaggcaccaccaatgatgggttgttggtagaaccctgttnggtttgtggggggggggggggggaatggcancaatttttgcagttgtaagagggtgccagcgttaggcgcagcgtgcaggtagaacggcaacaactgttgttgtgtcaagaaggcaacagggctcacatcagctagctggctgaatggtggtagctgttgctgttgtaaataagcagcagagttcaatgctgccagttggttgaatggaagaaattgctgggggtaggcagcagctagctgactgaatggtagttgttgttgcaaataagcagcagagttcaatgcagccagttggttggaatggaagaaactgctgttgctgagagtaggcagcaaaggtttcctaacacaagttgtngtaattgattgtggccttgatgtttttgtggccaacaaatgcacccaaaggtaacctgctgtaaataaggg

SEQ ID NO: 6706 - DNA, 506 bp, Zea mays
  Clone ID: LIB3061-067-Q1-N6-D11
gggtgggggtgggttgtttaaaaatttagtaatatataggatgacagatatagttgatccaaagcagggtaatgggaaatacaaaggttcataaaaggtttgctgcaacttctagggcagcttataacagtacatactagcagcacaaatggtcaaggggggggggggcagacaactcatcttgcgcccgaacgctcgacttcctgtcaagcggctcttaccataccaaggttacacgatccatcgatgcaataccattgtaggttcttgttttgtagacgcaaacgcagccgatctatatgacagacccatcgttgatggttgcattcttcaagatcaccacgattccagaccttatgtagtacccttcttccgggtgatcagcctcttggatgcccttactgtttgtgatcaccacgttcttcccaatcctagcattcatgtcaatgatacagttccttatctttgtgttccttcctattccaactgggaccttcccagctaac

SEQ ID NO: 6707 - DNA, 473 bp, Zea mays
  Clone ID: LIB3061-067-Q1-N6-D12
gtttggggttttttaaaaaaattttttttttttttttttttttttttttttcaaacattaaaatttttttttctttattttttaacaccctaaaaccattaaaaccgctattttttcacaattacacaaattcaaaaaccactaatggggcgcgggggggatttattaatttctaactcttattttttcaatccaaaaaaaaaaacaaattttttttctcctttcaataaaacccccccactttaaaaaactcctttacatccacaaaactcacaaaataaaaaaccccactcctcctttactattaattaaaccattttacaaatttctttatccccaccccccaatccacccctaaattccttacctttaccaaaaacccccccacctttccctatattcattcaccccacacctctacataatcattttcataacccccccccctttaaaaatttaaacccctcacaatt

SEQ ID NO: 6708 - DNA, 560 bp, Zea mays
  Clone ID: LIB3061-067-Q1-N6-D5
ttttttttttttttttttttttttttttttttttttttttttttttttttttttttttttttttttttttttaaattttttttttttttttttttttttttttttttttttttttttttttttttttttttttttttttttttttttttgtgttttttttaaaaaaaaggatttttttttttgggggggccccaaaaaaaaaaaaaaaaaattttttttggggaataaaaataaaaagaaaaaaaaaaggggggcccccaagaggggggggggggggaaaaaaccgggggggttaaaaaaaaaggggggggaaaggggaaaatttggggaaattaaaaaggggggcgaatttagggggaagggtttggaaaaaacaaaaaaaaatggggggttaaaaagagggggagggggaaaacaaaaatagggggggaaaggggaaaagttggtgttggaaaaaaaaaagggagaaaataaagcggcgcagaggggggaaaagaaaaaaaaaagtgggggggggaagaaaaagaaacggcggaaaagagggagtttggtggtgtggg

SEQ ID NO: 6709 - DNA, 53 bp, Zea mays
  Clone ID: LIB3061-067-Q1-N6-D6
gagaaaactcatcaattttgattatttctaggaaacacatgtcggtatgaggg

SEQ ID NO: 6710 - DNA, 552 bp, Zea mays
  unsure (1)..(552): unsure at all n locations; Clone ID: LIB3061-067-Q1-N6-D7
gcggggggggggggttttaagaactanaaagtactttcttatttctgggaagccacaaacatcagacaaaaaactttattattgaactataactcataagaaactaaaagagggcaccaccaatgatgggttgttggtagaacgctgctgggtggggcgagagcgagttggttgaatggcagcaattgttgcagttgtaagagggggccagcgttaggcgcagcgtgctggtagaacggcaacaactgtggttgtatcaagaagggagcaggggtcacaccagctagctggctgaatgggagtagttgttgctgctgtaaataagcaggagagttcaatgctgccagttggttgaatggaagaaattgctggggggaggcagcaggtagctggctgaatggtagttgttgttgttgcaaataagaagcagagttcaatgcagctagttggttgaatggaagaaactgctgttgctgaaagtagggagcaagggtttgctagcacaagttgttgtagnttggtgggccccgatagttttgtgccaataaatgc

SEQ ID NO: 6711 - DNA, 444 bp, Zea mays
  unsure (1)..(444): unsure at all n locations; Clone ID: LIB3061-067-Q1-N6-E10
actaacttgnacctctaaaacgccgccgttttgttatttttttttttttatatttttttttttttttttttttttttttttttttttttttttttttttttttttttttttttttttttttttttttttttttttttttttttttttttttttttttggtttgcctaaaaataaatgcaggggggggggggggnaantccccctaaaaacctatttaaaaagggccccccccaaattttttttttttttaagagcttttttttttttttaaataaatttagacaaagggcaaaatttttttttttttaaaaaagtttctgggtttatccataaacttttttttaaaaagaaaatttttttttttataaaaaaaaaaactctttttcttttattttttttttaaaaattatttattttttttttttaaaataacctgaatatttt

SEQ ID NO: 6712 - DNA, 445 bp, Zea mays
  unsure (1)..(445): unsure at all n locations; Clone ID: LIB3061-067-Q1-N6-E11
acccctacttaatcttgggacctctaaaaccaccgcccttgtggggtgtgtttttttaaaaattttttttttttttttttttttttttttttttttttttttttttttttttttttttttttttttttttttttttttttttttttttttttttttttttttttttttttttttttttacaaaaaataggggggggggggggggtttttttttttnnnccccccccctcctctaaaaaaaattttttttttttttccccaaaaataacccttaaaaaaagaccccccccaaaattttgttccccttttcccaccctcccccccttttccccccccataattttccccccccccccccgggtcccaccctttttcttttatatttgtttttaaaatccttcaaaaattaataaaaaatttttttcccttttaaaaatttttccccc

SEQ ID NO: 6713 - DNA, 269 bp, Zea mays
  Clone ID: LIB3061-067-Q1-N6-E3
ggtgtttttttttgttttttttttttttttttttttttttttttttttttttattttttttttttttttttttttttttttttttttttttttttttttttttttttttttgggggaaaaataactttttttaaacaaaaaaaaaaaggccccaaaaaaaattccccgggggggggggggaaaaaaaaaaaaaaacaatggtttttaaaaaaaaaaaaaaaaaaaaaaaagggggggggggccccccccaacacaaaaaaaaggggggg

SEQ ID NO: 6714 - DNA, 569 bp, Zea mays
  Clone ID: LIB3061-067-Q1-N6-E5
gggggggggtttttttaaaactaaaaagtactttcttatttctgggaagccacaaacatcatccaaaaaacttcattattgaagtataactcataagcaatctaaaagaggcaccaccaatgatgggttgttggtagaacgctgttggggggggcaaagcaagttggttgaatggcagcaattgttgcagttgtaagagggtgccagcgttaggcgcagcgtgcaggtagaacggcaacaactgttgttgtgtcaagaaggcaacagggctcacatcagctagctggctgaatggtggtagctgttgctgttgtaaataagcagcagagttcaatgctgccagttggttgaatggaagaaattgctgggggtaggcagcagctagctgactgaatggtagttgttgttgcaaataagcagcagagttcaatgcagccagttggttgaatggaagaaactgctgttgctgagagtaggcagcaaggtttcctagcacaaattgttgtagttgttgtgccttgatgttttgtgcccacaaatgcaccaaaggtaactgctgtaatagggct

SEQ ID NO: 6715 - DNA, 79 bp, Zea mays
  Clone ID: LIB3061-067-Q1-N6-E6
caattgttcattcaggtcattgcttcacactggaccactgccacccatgggtgatgcgtgcacacatttattactccaa

SEQ ID NO: 6716 - DNA, 467 bp, Zea mays
  Clone ID: LIB3061-067-Q1-N6-E7
ggttgtggggtggtttttttagcagaacaaaagaaagtacttccatgcataacgatgttcagcacgaggaaagcaggttcacacaagaacaggcactgtaataccccatacacttaaaattcatgttgcacaaagcaaaataagataggctaaagggggggggggggattcccattccaactgtagattggacttaagcaacggcctcgaggaaagccttcccaggagcacgcttctcaagtcttccatgggtaccgagcagctttgcgttgacaccatcaggaacaattctaccctcactcttgtacttcaggtagtcggcacggctgaacttggtgaagccccactttctgctctcaataatcttttggcggccagggaacttgaacttggcgcgtcgcagagcttcactggcatgtgcagcattgttgtccttgcatcgaacagaaaggagtacctgaccaatg

SEQ ID NO: 6717 - DNA, 437 bp, Zea mays
  Clone ID: LIB3061-067-Q1-N6-E8
gggtggggggggggttttttttatttttttttttctttttttttttttttttttttttttttttttttttttgggacctaaaatatagatctctaatcttttattactgggaaggtgcccatatcagtttgggaactttatttttaccgtttaaagggggggggaatctaaaagatggcccccccaatggggggctgctgcaataaggggggggggttcgtcaaagcaaggtgggtaaatgggggcaattgttgttgttgtaagaaggggacattgtttgccacatcctgggggtagaatgggagcaactgttgctgttgcaagaaggcgttaatgtttcccccaacctggggggaaaatggcggcaattgttgttgtggttgcaagaaaacagcaatgtttgccacaacttgtaaatggaatggaagcaactgttg

SEQ ID NO: 6718 - DNA, 525 bp, Zea mays
  Clone ID: LIB3061-067-Q1-N6-E9
gggggtgtgtttttttattttttttttttttttttatttttttttttttttttttttttttttttttttttttttttttttttttttttttttttttttgggaacaaaactttttttttttcatttcaattgggcattcagggcattggggaggggggggctggcccccatgggggggcgggacacatttttacccaaacatcgccgctaaatgacccaactagctagctagcccgggggttttctacaacacatagttttttcagggggggacaccccccgcagcaacctaggggcatggagtcggtttttgaaagccccacattgccctaagttggtgggctttttgggccgccaacaacccccgaacctggccctttttcggttgctttttcaagatggactggaggaccaaacccaaaatcccctgggacccgggctgggggtccacctgcctgagctggggggaacacttgtgccccaacaactgggacttaggcgaacaatagggggtccccctcgggc

SEQ ID NO: 6719 - DNA, 490 bp, Zea mays
  Clone ID: LIB3061-067-Q1-N6-F1
gggtgggtgttttttttttttttttttcagacaaaaaactttattattgaactataactcataagaaatctaaaagagggcaccaccaatgatgggttgttggtagaacgctgctgggtttgtcaaagcaagttggttgaatggcagcaattgtggcagttgtaagagggtgccagcgttaggcgcagcgtgctggtagaacggcaacaactgtggttgtatcaagaaggtagcagggctcacaccagctagctggctgaatggtagtagttgttgctgctgtaaataagcaggagagttcaatgctgccagttggttgaatggaaaaaattgctgggggtaggcagcaggtagctggctgaatggtagttgttgttgttgcaaataagaagcagagttcaatgcagctagttggttgaatggaaaaaactgctgttgctgagagtaggcagcaaggtttgctagcacaagttgttgtagttgttgtgcc

SEQ ID NO: 6720 - DNA, 496 bp, Zea mays
  unsure (1)..(496): unsure at all n locations; Clone ID: LIB3061-067-Q1-N6-F10
cacgcgtactttcttggtcctctaaagcaccggcggggggggggggggttttttatttttattttatcttccaaacaaaaaaaaaacccaaagcccattatcaaacattgaaaagtcttcaaaacctactcccttcattttacacattgcattttaaaggttgtttccccttnncagctttgggggggggggggggatcatctaaaaacctattnnnctaacaaaaacttcttctctataattcaaaataaggacaagtttcaattcctttatgaccaatatttgcttaacaagtccctcctggctcttgaagaactaggaactcccagtgcaacaagaaacctttcaccagttctgtaactgtgaggccacactcttcaccactgggtgatattctgtgtgcaaatacttttttgcattttctgaaccaggttgccccagccattcctcatataattttttcccaatagggttaccgaaaggatcagatattaat

SEQ ID NO: 6721 - DNA, 438 bp, Zea mays
  Clone ID: LIB3061-067-Q1-N6-F2
tttttttttttttttttttttttttttttttttttttttttttttttttttttttttttttttttttttttttttatttataattttttttttaaaaaaaaaaaaaaaaaaaaaaaaaaaaaaaaaaaaaaaaaaaaaaaaaatttggggaaaaaaaaaaaaaaagagaaattgttaaaaaaaaaaaaaaaaaaaaaaaaaaaaaaaaaaaaaaaaaaaaggaaaaaaaaataaaaaaaaaaaaaaatgaggaaaaaaagaaagatgggaaaaagaaaaaggaagaaattctttggggggggaaaatttttaaaggaaggaaaaaaaagaaaaaaaaaaaaaaagacgggggggccaagaaagaaaaaaaaaaaaagagggaggagaaaaaaaagaagggccgcgcgggggaaaaatgggggggccggaccggggggg

SEQ ID NO: 6722 - DNA, 157 bp, Zea mays
  Clone ID: LIB3061-067-Q1-N6-F3
agaaattcgatcaatcgctatcaataccaggaggcagatcaagattcatggggaacgagaaccttttccgagaagagtcaagcgagggataggatagatgacccacaacgttccgaaacaaaaaacatgcttagagtttaggcagcaattgcacgca

SEQ ID NO: 6723 - DNA, 570 bp, Zea mays
  Clone ID: LIB3061-067-Q1-N6-F5
gaaatatattgagataaatctcaatcaatatattgattatttctaggaaacacatgccggaatgagggcaccattatcgagtacatctcatatgtaatctaaaagaggcacctccaacgatgggttgctgcctcgacaaggacagggtttatcaaagagaactggttgtatggcagcaattgttgctgctgtaggaaggcagcgaccaatgggttagccactgctagtggattaagtaactgttgtcgctgttgtaggtacgcagcagagttcgacatagtcagttggttgaatggaagcagctgttgcaagtaggcagcagggtttgccacaactagctgagtcagagctggtacaatctgttgcaacaattgttgttgcaggtatgtaggtgcattggccacagcgagcgggctagatgaaagcagttgttgctgttgtaggtaggcggcagggttcaccatggctagttgactgagcgctggcagaaactgttgcagctgttgttgtggctggtttgcaactacgtttgccagagcaagtgggtttgatgcaagcaactgctgttgc

SEQ ID NO: 6724 - DNA, 530 bp, Zea mays
  unsure (1)..(530): unsure at all n locations; Clone ID: LIB3061-067-Q1-N6-F7
gcgggggggggtttttttgaagatcttantaagttcttatacattgaaaaatggcacaatggcaacataacaacaacgtccaagactttttctttttcacagaagcttagtgtatgatgacgaacagaacaaaaaacaacacaatgatactgcgtgagtgggggtttttcccgccttttgtgttctttgaactgccaccgggattgggcgctggctcctgcttctttgtccttccgtgatgcttgggaactagctctgctacttggatcatcagctgcttcttcgttttaatagcaggattgacgggggagccgtcatctttcttaagctgcaccctgaccctccccacctggaagaaatcccgagggtacgccttatccaactcgatggcgtgggggatcttgaggtgcgaacagcagtcagcgatctcnatgcaggtggggtccgggcaggccttggcagcggcgatgcggcgggcctcggcgaccgtcttcttggagttgaggtagacagggtagatgatgttccac

SEQ ID NO: 6725 - DNA, 581 bp, Zea mays
  Clone ID: LIB3061-067-Q1-N6-F8
gcgtggggggtttttttttttaagaaaaactgaacaaatatatagtagagtcccaaactccgttgcattttcgataagttacagttcacgatcgcaggctgacagccaccacttcccaggcaagttatgtttccccacgtttataagcaaattcgagggtgtgccaacagtttggtgaatgaattgagcaggagtgccaatatcaggccctgggcgtcgagctgaccgagataaatcatgtttgtacagcccaaccattgtttggagatgcatctccccgttgttcatcttttacgctggacgagtccgttctcagtcagatattccacaaattcgtctatgaggtagggccaggcaccttcgtcgtcgtagttggataactgtggatcggtcgtcttcacaaattccagcagctgggaccatgtgtctctagatatggctttattgtgtctgacctgtaaaaactgacaccaatgatccagaagaggccagttcctttcagcaaatagcaactgccacattccaatagaagtctccagtgagagagacttttgacccttttcccttgcccaagtgaatgc

SEQ ID NO: 6726 - DNA, 529 bp, Zea mays
  Clone ID: LIB3061-067-Q1-N6-G1
ggggggttttttttttttttttttttttttatttttttttatcgagataaatctcaatcaatatattgattatttctaggaaacacatgccgctttgagggcaccattatcgagtacatctcatatgtaatctaaaaaaggcacctccaacggtgggttgctgccacaacaaggcagggttcatcaaaaagaactggttgtatggcagcaattgttgctgctgtaggaaggcagcgaccaatgggttagccaccgctagtggattaagtaactgttgtcgctgttgtaggtacccagcaaagttcgacacagtcagttggttgaatggaagcagctgttgcaagtaggcagcagggtttgccacaactagctgagtcagagctggtacaatctgttgcaacaactgttgttgcaggtatgtaggtgcattaaccacagcgagagggctagatgaaatcaattgttgctgttgtaggtaggcggcagggttcaccatggctagttgactgaacgctggtagaaactgtgc

SEQ ID NO: 6727 - DNA, 578 bp, Zea mays
  unsure (1)..(578): unsure at all n locations; Clone ID: LIB3061-067-Q1-N6-G10
ggggtgttgggggttttatcgagataaatgtcaatcaatatattgattatttctaggaaacacatgccggtatgagggcaccattatcgattacatctcatatgtaatctaaaagaggcacctccaacgatgggttgctgccacnacaagggggggggggggggaaganaactggctgtatggtaccaattgttgctgctgtaggaaggcagtgaccaatgggttaggcactgctagtggattaagtaactgttgtcgctgttgtaggtacgcagcagagttcgacacagtcagttggttgaatggaagcagctgttgcaagtaggcagcagggtttgccacagctagctgagtcagagctggtacaatctgttgcagcaattgttgttgcaggtatgtaggtgcattacccacaacgagagggctagatgaaagcagttgttgctgttgtaggtaggcggcagggttcaccatggctagttgactgagccctggcaaaaactgttgcaattgttgttgttgttgggtatgcagctacctttgccaaaaccagtgggttgggatgcaaacacctgctg

SEQ ID NO: 6728 - DNA, 572 bp, Zea mays
  unsure (1)..(572): unsure at all n locations; Clone ID: LIB3061-067-Q1-N6-G12
ggggggttgtgggggtttttttaaaaagtactttcttatttctgggacgccacaaacatcatccaaaaaacttcattattgaactataactcataagcaatctaaaagaggcaccaccaatgatgggttgttggtagaacactgttgagtggggcgagggggggtgnttgaatggcagcaattgttgcagttgtaagagggtgccagcgttaggcatagcgtgcaggtagaacggcaacaactgttgttgtgtcaagaaggcagcagggctcacatcagctagctggctgaatggtagtagttgttgctgctgtaaataagcagcagagttcaatgctgctagttggttgaatggaagaaattgctgggggtaggcagcaactagctggctgaatggtaattgttgttgcaaataagcagcagagttcaatgcagccagttggttgaatggaagaaactgatgttgctgagagtatgcagcaaggtttgctagcacaagttgttgtagttgttgtgccctgatgttttgtgccaccaaatggaccaaaggtaactgctgtaatagggctgac

SEQ ID NO: 6729 - DNA, 472 bp, Zea mays
  unsure (1)..(472): unsure at all n locations; Clone ID: LIB3061-067-Q1-N6-G2
aacaaagatgacagatgccatgccataaatcatgtcaatatatgtgcatgctngaaccaataacangaaaatacaattggaaaaaacaaaatcatcagaacacttggcttatgctataaaaattctttttatgcttctttgtagtgcttctttgtagcttatacatagttcctccgtatgcttttatgattccttatagaatgaagggacaccctaatttgcatcatgttcctgaccagcatagccctcaccccaacttggcattccgccgttgcatctcatcaactcctcgagctgcaagcaatactggaagtagcactccagccctgcgcgaagaactctcacccaagtgcttgatccatcccagctcgccgcagctgtgttttgatatagtattttcttattaatgtcatcccacacattcacaaatctatcacaccctccggtggcaaacattccaaagctgcacaag

SEQ ID NO: 6730 - DNA, 547 bp, Zea mays
  Clone ID: LIB3061-067-Q1-N6-G3
aattgtgagttatttggatttcatgtcaagggagatcgagacaaccagccttattcagcgacgcctgcaaataaaatgttcccagcgatcacgaaacccgcagtgcctaatacatgtccatgtgtatggccccatttggacccagcagctcataatcctgcggcggcggtgtagatccggaggcggaggtcggcggcatggatcccatcgccgtctggatgagctccatggcccccgcgcaatgcgtggctgctgctactcggttcatctctgtggcgctcagagttccaccgacgaccatggatgcaggctcttgatgagcttgcagtcgcaagaaaccgttgccgaccgaagcatggtcgtctgcggctgtggcggagaagtagccgacgatgctgtctcggataggcggcggcggcactggagcgtcggagctgggggtcggcgccgagatgggcatggacgacggcactgatgagctcatctctatcacccgcttcagggagtcctctcccatcttcaccttagctgttagggtctccatgtc

SEQ ID NO: 6731 - DNA, 554 bp, Zea mays
  Clone ID: LIB3061-067-Q1-N6-G5
ctaaaaatgtactttcttatttctgggacgccacaaacatcatccaaaaaacttcattattgaactataactcataagcaatctaaaagaggcaccaccaatgatgggttgttggtagaacactgttgggtttgtcaaagcaagttggttgaatggcagcaattgttgcagttgtaagagggtgccagcgttaggcatagcgtgcaggtagaacggcaacaactgttgttgtgtcaagaaggcagcagggctcacatcagctagctggctgaatggtagtagttgttgctgctgtaaataagcagcagagttcaatgctgctagttggttgaatggaagaaattgctgggggtaggcagcaactagctggctgaatggtaattgttgttgcaaataagcagcagagttcaatgcagccagttggttgaatggaagaaactgatgttgctgagagtatgcagcaaggtttgctagcacaagttgttgtagttgttgtgccctgatgttttgtgccaccaaatggaccaaaggtaactgctgtaatagggctgacg

SEQ ID NO: 6732 - DNA, 533 bp, Zea mays
  Clone ID: LIB3061-067-Q1-N6-G6
cctacaatcctgcctcgacatttattagcttacacacacacaccaaaaaccagatttagaaggcaaggtactgaacagtgctgccaaaacaccatgcatagtcccccatcatttatcgatgcctagattttgtctacacaaaactgaggtgaccagcgcttcctgctaaggggctgaggcaaattaatgtcgtcaccaactgttccttgatcctgagggttcacagaaatataggcgaaagaacctgatatccacctggtctagggaaggatggcagggctgatatcccaaatatccttggcgtactcatgaatcgtcctatcgctgctgaacttggatgagccagccgtgttgaggatagacatccttgtccataacttctgatctcggtacgcctcatcaactttttcttggcattcaatatagctggggaagtccttgccaacaaggaaataatctgcacgtccgtaaccttcatttccttccaaaaaacccatcaattcatcatagctgtaagtcccaaaaacaccact

SEQ ID NO: 6733 - DNA, 576 bp, Zea mays
  Clone ID: LIB3061-067-Q1-N6-G7
ggggggtgggttttttcagaaattatcgagataaatctcaatcaatatattgattatttttaggaaacacatgccgctatgagggcaccattatcgagtacatctcatatgtaatctaaaagatggcaccaccaacgatgggttgctgccacgaggggggagggttcatcaaagagaactggttgtatggcagcaattgttgctgctgtaggaaggcagcgaccaatgggttagccaccgctagtggattaagtaactgttgtcgctgttgtaggtacgcagcagagttcgacacagtcagttggttgaatggaagtagttgttgcaagtaggcagcagggtttgccacagctagctgagtaagagctggtacaatttgttgcagcaactgttgttgcaacaactgttgttgcaggtatgtaggtgcattgcccatagcgagcgggctaaatgaaagaagttgttgctgttgtaggtaggcgatagggttcaccatggctagttgactgagcgctggtagaaactgttgcaactgttgttgttgttggtatgcagctacgtttgccaaaacaaggg

SEQ ID NO: 6734 - DNA, 536 bp, Zea mays
  Clone ID: LIB3061-067-Q1-N6-G8
gggagtgggggcccttctgctcttccagcctgccgatgaacgccaccagcgggatgttccggtccaccgggagcccgacctccgcctgcagcgcctccttgttcagcgccttggcgctccacggcgccgtcgacaccgtcgtaccttcacgggcggtggggggggggcctgctggggtcccactcgctgacgtccatgccgttgacgatgccggtgatgccggtgaggcgcatgatgttgtcgagctcgcagcccctggcgatgccggagatgagctcctcggcgtagtaggggctgacggtgaggaccctgtcggcctcgaggatcccggccttcatccagttgatcttccggccttccacgggcttctcgtagccgtcgatgaaatcgaaggacgacttgaatctctccgggaggttcagctccgggtagtcggagaaggcgaaccggccctggtaggagatgttgtggatgcagaaagcggtctttgcgtccctgtagatgccgtgggactggtagttgctcttgaggtagca

SEQ ID NO: 6735 - DNA, 543 bp, Zea mays
  Clone ID: LIB3061-067-Q1-N6-H11
gggggggtgtgtttttttttttttttttcagacaaaaactttattattgaactataactcataagaaactaaagggggcaccaccaatgatgggttgttggtagaacgctgctgggtttgtcaaagcaagttggttgaatggcagcaatgggggggggggtaaaagggtgccaccgttaggcgcagcgtgctggtagaacggcaacaactgtggttgtatcaaaaaggtagcagggctcacaccagctagctggctgaatggtagtagttgttgctgctgtaaataagcaggagagttcaatgctgccagttggttgaatggaaaaaattgctgggggtaggcagcaggtagctggctgaatggtagttgttgttgttgcaaataagaagcagagttcaatgcagctagttggttgaatggaagaaactgctgttgctgagagtaggcagcaaggtttgctagcacaagttgttgtagttgttgtgccctgatgttttgtgccaataaatgcaccaaaagtaactgatgtaatagggctgatg

SEQ ID NO: 6736 - DNA, 540 bp, Zea mays
  Clone ID: LIB3061-067-Q1-N6-H12
ttttattaaaaaatttttttttttttttttttttttttttttttttttttttttttttttttttttttttttttttttttttttttttttttttttttttttttttttttttttttttttttttttttttttttttttgtggggggggggggaaaatttttttttccccccccccctttttttaaaaaaaaaaaaaaaaacaattcccccccatttccaaccccccttttcaaaaccttttaaccccaaaaaaatttaccttccctcccccccccaatttaatttttttttttttttcccccccacccccccaaaaaaaaaaaaccaacttttttttcaaaaatttccctaaaaaaaaaaatcttttcccccctttcatttaaaataacccttttttttcctttttttaataaaacccccccctttttttccttttccccaccaaaaaattttttttttcccctttttttcccccacaaaacccccctttttttttttttaaaaaaatttccccttctttaaaaaaaccccccctctttc

SEQ ID NO: 6737 - DNA, 445 bp, Zea mays
  unsure (1)..(445): unsure at all n locations; Clone ID: LIB3061-067-Q1-N6-H4
ggggggggggggggttttttttttttttttttttttttttttttttttttggaggaaagccgcatcaccttaacatactttggcgacaatagccgaactgggttacccagacaatggataacatattctgttgacggaaaaaaaaagaagaggggggggggcaaaccggaggacaacatgctatgtttacagacacgaaactggtttcacaaaaacaaaaacaaaaaagaagcaaatgtgcggggaagtaaataacaaaagggccatatgcaagggcggttttcagctttgtttgctgaggaaaatggcgatggggtcgcccggtgaaggtgggtttttttccagcagcgaagcatgttcaccagccttagcgcgagcagcttcttccgacgcggagaggaccttnacttgcttaagggccagctggcttttgatcaactccaag

SEQ ID NO: 6738 - DNA, 512 bp, Zea mays
  Clone ID: LIB3061-067-Q1-N6-H5
gggggggggggtgggtttttttttttttttttttttttttttttttttttttttttttttttttttttttttttttttttcggggaaacccgccccaaaatcattatttatccgacaagatcatttttgttaaacagttcgaaaaaaggggggggggggggggggaaaaaacctgggcacagcatacaaaacgacatgctcacaaaagcagttcaaaaaaagggggggcttccatgggccaaaatcaggccaacgagagctctccagggggaaaatttctttttaccaatttctcccatgattcggggggctcttgaaggaccctcaaggggtattccttgcttgggggcttgttgcccaaaccaaatttggggggaggctttccatcagggattttggagtctctgaaccaatctttgaggggagtcagtggccccggaaaagcttttaaacatcatccacgtggttcacaaaaaatgctttggggtcatccaaaaaaaggccacaatttt

SEQ ID NO: 6739 - DNA, 561 bp, Zea mays
  Clone ID: LIB3061-067-Q1-N6-H6
ggttgttttttttggaaatgtaacttcttatttctggttggccacatacatcatccaaaaaactttattattgaattacaactaataatcaatctaaaagaggcaccaccaatgatgtgttgttggtaggaggctgctgggtttgtcaaagcaagttggacaaagggcaacaattgttgtagttgtaagagggttgcggggttagccgcaaactgcttgtagaaaggcagcaactgttgctgtgtcaagaaggaagcacgacttgctgcagctagctcgctaaatggcagtagtatttgctgctgcaaataagcagcggggttcagtgcggccaattggttaaatggaagaagttgttgttgctgagagtaggcagtagctagctggctaaatggtaatagttgttgctgcaaataagcagcagggttcagtgtagacagttggttgaatggaagaaattgttgttgctgagagtagggagaaaggtttgccagagctacttggttgatcacaggtagcacgagttgctgcagctgttgtgccctgatggtttgtaccaat

SEQ ID NO: 6740 - DNA, 494 bp, Zea mays
  Clone ID: LIB3061-067-Q1-N6-H7
gcgtgggtgtggtggtgttattgaaataaatctcaatcaaatattgattatttctaggaaacacatgccggaatgagggcaccattatcgagtacatctcatatgtaatctaaaagaggcacctccaacgatgggttgctgcctcaacaaggcggggtggggggaaagaaaactggttgtatggcagcaattgttgctgctgtaggaaggcagcgaccaatgggttagccactgctagtggattaagtaactgttgtcgctgttgtaggtacgcagcagagttcgacatagtcagttggttgaatggaagcagctgttgcaagtaggcagcagggtttgccacaactagctgagtcagagctggtacaatctgttgcaacaattgttgttgcaggtatgtaggtgcattggccacagcgagcgggctagatgaaagcagttgttgctgttgtaagtaggcggcagggttcaccatggcttagttgactgagcgc

SEQ ID NO: 6741 - DNA, 575 bp, Zea mays
  unsure (1)..(575): unsure at all n locations; Clone ID: LIB3061-067-Q1-N6-H8
ggggggggtgtttttttttttttatatcgaggaaaatctcaatcaatatattgattatttctaggaaacacatgtcggtatgagggcaccattgtcgagtacatctcatatgtaatctaaaagaggcacctccaacgatgggttgctgcagggggggggggatcaaaaagaactggttgtatggcagcaattgttgttgctgctgcaggaaggtagcgaccaatgggttagccactgccaatggattaagtaactgttgtcgctgttgtaggtacccagcagagtttgacacagccagttggttgaatggaagcaactgttgtaagtaggcagcagggtttgccacagctagctgagtcagagctggtacaatttgttgcagcaactgttgttgtaggtacgtaggtgcattgcccaccgcgagcgggctagatgaaagtagttgtaggtagacggcagggttcaccatggctagttgactgagcactggcataaactgttgcagctgttgttgttgctggtatgcanctaccttcgccagagcaagtggggttggatgcaagcagctgctgttg

SEQ ID NO: 6742 - DNA, 609 bp, Zea mays
  unsure (1)..(609): unsure at all n locations; Clone ID: LIB3061-068-Q1-K6-A10
gcaacatanaagtggaatccagtagcaacaacanagcaacaatggcgaccaagatattttccctccttatgctccttgctctttctgcatgtgttgctaacgcgacaattttccctcaatgctcacaagctcctatagcttcccttcttcccccataccttccatcaatgatagcttcaggatgtgaaaacccagctcttcagccctataggctccaacaagcaatcgcagcaagcaacatacctttatcacccttgttgtttcaacaatcgccagccctatctttggtgcagtcattggtacaaaccatcagggcacagcagctgcagcaactcgtgctacctgtgatcaaccaagtagctctggcaaacctttctccctactctcagcaacaacaatttcttccattcaaccaactgtctacactgaaccctgctgcttatttgcagcaacaactattaccattcagccagctagctactgcctactctcagcaacaacaacttcttccatttaaccaattggccgcactgaaccccgctgcttatttgcagcagcaaatactactaccatttagccagctagctgcagcaaaccgtgcttccttct

SEQ ID NO: 6743 - DNA, 612 bp, Zea mays
  Clone ID: LIB3061-068-Q1-K6-A2
cgttcgcacatcccgtcgctccctcccatgggggcgtgtggtcgtccgccgattcgatccggttcttccaacccagggctgtgatggcgacgaagaggagcgtgggcaccctcggcgaggcggatctgaaggggaagaaggtgttcgtgcgcgccgacctcaacgtccctctcgacgacgcccagaagatcaccgacgacacccgcatccgcgcctccgtccccaccatcaagttcctcctcgagaagggcgccaaggtcatcctcgccagccacctgggtcgtccaaaaggtgtcaccccaaagtacagcttgaagcctcttgttccacgcttgtctgagctccttggagttgaagtcgtgatggccaatgattgcattggtgaggaagttgagaagttggctgccgctttgccagaaggtggagttctgctcctagagaatgttagattctacaaggaggaagagaagaacgaacctgagtttgctaagaagctagcatctgttgctgacctttatgtcaatgatgcttttggcacggcacacagagctcatgcttcaaccgaaggagttaccaagtatttgaagcctgctgttgctggcttcctcatgc

SEQ ID NO: 6744 - DNA, 609 bp, Zea mays
  unsure (1)..(609): unsure at all n locations; Clone ID: LIB3061-068-Q1-K6-A4
cttntaaagcaaagtaaataattctccaaacaattttaactaggtaacattcaaagaaaagtgttgtatgctctagttctggttacttaaggctgtagattatgacttatggtattctctaccttgtttctttacagttcatggtgttgagtatgcatttggagcacatgactattcgattagtggagtttttgaggtggaacctcggcagtgtcctggtttcaaatttcggaaatcaatatgcatgggaactaccagcctggatcctctccaaatcagagagttcatggagattcagtcagtaaattacaatggtgatacctaccatttgataagtaaaaactgcaaccatttctgtgaggatatctgcaaaaggttgacaggaaattttattccaaaatgggtgaatcgacttgctagaatgggtgctgtttgcaactgcattctaccagagtccctcaagatcaacgcggccggtcatgacccagcttctcgagctgaagatagcgagagaaaaatgctgacaagttccttcagttgcttctgttcaatctctctatgccaaagacatttctcaacatcttcgccgtctctgcgttcctccgcgaa

SEQ ID NO: 6745 - DNA, 602 bp, Zea mays
  unsure (1)..(602): unsure at all n locations; Clone ID: LIB3061-068-Q1-K6-A5
tttgnagaccaactagcaacataggaggcgggggggggaccaacaatggcagccaaaatttttgcctccttatgctccttggtctttctgcaagtgctgctacggcgaccattttcccgcaatgctcgcaagctcctatagcttcccttcttcccccgtacctctcaccagcggtgtgtgggggggtgtgaaaacccaattcttcaaccctacaggatccaacaggcaatcacagctggcatcttacctttatcacccttgttcctccaacaatcatcagccctattacatcagttacctttggtgcatttattggcacaaaacatcagggcacaacaactacaacaacttgtgctagcaaaccttgctgcctactctcagcaacagcagtttcttccattcaaccaactagctgcattgaactctgcttcttatttgcaacaacaacaactaccattcagccagctacctgctgcctacccccagcaatttcttccattcaaccaactggcagcattgaactctcctgcttatttacagcagcaacaactactaccattcagccagctagctggtgtgagccctgctaccttcttgataca

SEQ ID NO: 6746 - DNA, 613 bp, Zea mays
  unsure (1)..(613): unsure at all n locations; Clone ID: LIB3061-068-Q1-K6-A6
nagnaggtcatgctccagtgcattcaggggagggtgggagtctgtgaggccggagccacaggctcctttggaagactacaggctccatcttgagattttgcctctacagttgcatcttgatcaagagcaacttaacttcctaataaatttcttcaagaatgattcatgtaacaatgatcctgatgggcattgcgaaaatgatactgttgatgtgaagagcacaagcaatggaagcaatatggttgtggatgaggcattacttcctttctttcagaaatttgacgtaaagccacttattctgcacattaattatataccccgtcagtttgacccgattgccctaagcaagggaaattacgcagaacttctcaacattcttccatggaagggaattgatttgaagcttaagcatgtttctgcaatgggcatttacggatggaacagcataggtgatacggtagcagcggaatggttggaagacatttctaaaaatcaggtgcacaaattgctaaaagggcttcctccaataagatcactagttgctgttggttcagggaccagaaagttggtctcgttgcccatcaaaagctacaagaaggatcggaaattgctc

SEQ ID NO: 6747 - DNA, 435 bp, Zea mays
  Clone ID: LIB3061-068-Q1-K6-A7
tgatcagtgcagcccgacgcgacgcgctgtgggtggggctcatgccagtcgttgcggcagcagtgttgccagcagctcaggcaggtggagccgcagcaccggtaccaggcgatcttcggcttggtcctccagtccatcctgcagcagcagccgcaaagcggccaggtcgcggggctggggggggggcagatagcgcagcaactgacggcgatgtgcggcctgcagcagccgactccatgcccctacgctgctgccggcggtgtcccccactgaagaaactatgtgctgtagtatagccgctggctagctagctagttgagtcatttagcggcgatgattgagtaataatgtgtcacgcatcaccatgggtggcagtgtcagtgtgagcaatgacctgaatgaacaattgaaatgaaaagaaaaaagtattgttcc

SEQ ID NO: 6748 - DNA, 618 bp, Zea mays
  unsure (1)..(618): unsure at all n locations; Clone ID: LIB3061-068-Q1-K6-A8
agcgtccgcaaaacatatgaatacactagcagaggggagcaccaatgggagccaanatttttccctccttgccctccttgctctttcagcaagcgctgctacctctactattattccacaatgctcacaacaatacctctctccggtgacagccgcgggatttcaacacccaactatgcgggggggggtgctacatgaggccatcgtagcaagcatcttacggtcattagcattaaccctccaacagccatatgccctattgcaacaaccatccttagtgcatctgtatctccaaagaatcgcgacacaacaactacaacaacagttgctaccaacaatcaatcaagtagttgcagcgaaccttgctgcttatctccagcaacaacaatttcttccattcaatcaactagctggggtgaaccctgctgtctacttgcaggcacaacaactactaccatttaaccaacttgtcgggagccctgatgccttcttactgcaacaacagcttctgccattccatctgcaagctgtggaaaacattgcttctttcttgcgacaacaacaattgttgccattttacccacaggttggggggaaacattaatgccttcttgcaac

SEQ ID NO: 6749 - DNA, 616 bp, Zea mays
  Clone ID: LIB3061-068-Q1-K6-A9
gccctcactggtgctcctccaggtgccagatggccaacgcaaattgcaccaagaaatccatcgagaggccgtcgacaggggaattaatggcgtcgtcgtctagcagcagccaccgccgcctcatcctcgcagccgccgtcctgctctccgtgctcgcggctgccagcgccagcgccgggggggggtgcgtgccggggtgggccatcccgcacaacccgctcccgagctgccgctggtacgtgaccagccggacctgcggcatcgggccgcgcctcccgtggccggagctgaagaggagatgctgccgggagctggcggacatcccggcgtactgccggtgcacggcgctgagcatcctcatggacggcgcgatcccgccgggcccggacgcgcagctggagggccgcctagaggacctgccgggctgcccgcgggaggtgcagaggggattcgccgccaccctcgtcacggaggccgagtgcaacctggccaccatcagcggcgtcgccgaatgcccctggattctcggcggcggaacgatgccctccaagtaactgcgaagagcatagtgcatgaggaatgagcttgtagctagctcatatgtctgaataataag

SEQ ID NO: 6750 - DNA, 196 bp, Zea mays
  unsure (1)..(196): unsure at all n locations; Clone ID: LIB3061-068-Q1-K6-B11
tgccgttctaccancacccttcncctaacnctggcaccctcttacaactgcaacaattgctgccattcaaccttttttttttttcaaacctancantgttctaccggcgggcgctgattgntggtgccctcttttagaaatgtactttcttatttctaaaaaaccacaaacatcagacaaaagaaagtacatttct

SEQ ID NO: 6751 - DNA, 445 bp, Zea mays
  Clone ID: LIB3061-068-Q1-K6-B12
cccggtcgacccagcgtccgcaacaactgctttcatctagcccgggggggggggggggtgcacctacatacctgcaacaacaattgttgcaacagattgtaccagctctgactcaactagctgtggcaaaccctgttgcctacttgcaacagctgcttccattcaaccaactgactctgtcgaactctgctgcgtacctacagcagggacaacagttacttaatccattggtagtggctaacccattggtcgccgccttcctacagcagcaacaattgctgccatacaaccagttctctttgatgaatcctgtcttgtcgaggcagcaacccatcgttggaggtgccatcttttagattacatatgagatgtactcgataatggtgccctcataccgacgtgtgtttcctagaaataatcaatatattgattgagatttatctcg

SEQ ID NO: 6752 - DNA, 129 bp, Zea mays
  Clone ID: LIB3061-068-Q1-K6-B2
gcaacaattgctgccattcaaccaattgctttgacaaacccagcagcgttctaccaacaacccatcattggtggtgccctcttttagatttcttatgagttatagttcaataataaagttttttgtctg

SEQ ID NO: 6753 - DNA, 614 bp, Zea mays
  Clone ID: LIB3061-068-Q1-K6-B3
tccgccagtcttcatgggcttcgaacacctagctgtgcaagcctacaggctacaacaagcgcttgcggcgagcgtcttacaacaaccaattaaccaattgcaacaacaatccttggcacatctaaccatacaaaccatcgcaacacaacagcaacaacagttcctaccagcactgagccaactagatgtggtgaaccctgtcgcctacttgcaacagcaggtgcttgcatccaacccacttgctctggcaaacgtagctgcataccaacaacaacaacaattgcaacagtttctgccagcgctcagtcaactagccatggtgaaccctgccgcctacctacaacagcaacaactgctttcatctagccctctcgttgtgggtaatgcacctacatacctgcaacaacaattgctgcaacagattgtaccagctctgactcagctagctgtggcaaaccctgctgcctacttgcaacagctgcttccattcaaccaactgactgtgtcgaactctgctgcgtacctacaacagcgacaacagttacttaatccactagcagtgcctaacccattggtcactgccttcctacagcagcaacaattgctaccataca

SEQ ID NO: 6754 - DNA, 596 bp, Zea mays
  Clone ID: LIB3061-068-Q1-K6-B5
caagcaacttacctttatcacccctgggggtgggggagaatcgccagccctatctttggtgcagtcattggtacaaaccatcagggcacaacagctgcaacaactcgtgctaccagtgatcagccaagtagctctggcaaacctttctccctactctcagcaacaacaatttcttccattcaaccaactggctacactgaaccctgctgcttatttacaacaacaacaactactaccattcagccagctagctactgcctactctcagcagcaacaatttcttccatttaaccaattggccgcactgaacccctctgcttatttccagcagcaaatactactaccatttggccagctagctacaacaagccccacttcctttttgaaacaacaacaattgcttccgttctaccagcagtttgtggctaaccccgcaaccctcttacaactgcaacagttgctgccctttgtccaacttgctttgacaaacccagcagccttctaccaacaacacatcattggcggtgccatcttttagattgcttattagttgtaattcaataatgaagttttttggctgatgtatgtggcctcct

SEQ ID NO: 6755 - DNA, 618 bp, Zea mays
  Clone ID: LIB3061-068-Q1-K6-B6
aaacacaatatgtaccaacaatgggggggcgaaatattttgcttccttatgctccttggtctttctgcaagtgttgctaccgcaaccattttcccacaatgctcacaagctcctatagcttcccttcttcccccatacctctcaccagcggtgtcttcaatgtgtgaaaacccaattggtcaaccctacaggatccaacaggcaatcgcaacaggcatcttaccattatcacccttgttcctccaacaaccgtcagccctattacagcagttacctttggtccatttggtggcacaaaacatcagggcacaacaactacaacaacttgtgctagcaaaccttgctgcatactctcagcaacatcagtttcttccattcaaccaactggctgcattgaactctgctgcttatttgcaacaacaattaccattcagccagctagttgctgcctacccccagcaatttcttccattcaaccaactagcagcattgaactctgctgcttatttacagcagcaacaactactaccattcagccagctagctgatgtgagccctgctgccttcttgacacaacaacagttgttgccgttctacctgcacgctatgcctaacgct

SEQ ID NO: 6756 - DNA, 617 bp, Zea mays
  Clone ID: LIB3061-068-Q1-K6-B9
cgcaacagcaacaacagttcctaccaggggtggaggcacctacctggtgaaccctgccgcctacttgcaagagcagctgcttgcatccaacccacttgctctggcgaacgtagttgcaaaccagcaacaacaacagctacaacagtttctgccaacgctcagtcaactagccatggggaaccctgccgcctacgtacaacaacaacaactgctttcatctagcccgctcgctgtgggcaatgcacctacatacctgcaacaacaattgttgcaacagattgtaccagctctgactcaactagctgtggcaaaccctgttgcctacttgcaacagctgcttccattcaaccaactgactctgtcgaactctgctgcgtacctacaacagcgacaacagttacttaatccattggtagtggctaacccattggtcgccgccttcctacagcagcaacaattgctgccatacaaccagttctctttgatgaatcctgtcttgtcgaggcagcaacccatcgttggaggtgccatcttttagattacatatgagatgtactcgataatggtgccctcataccgacgtgtgtttcctagaaataatcaatatattgattgag

SEQ ID NO: 6757 - DNA, 565 bp, Zea mays
  Clone ID: LIB3061-068-Q1-K6-C10
caacaatagcgaccaagatattttccctccttatgctccttgctctttctgcatgtgttgctaacgcgacaattttccctcaatgctcacaagctcctatagcttcccttcttcccccataccttccatcaatgggggggggaggatgtgaaaacccagctcttcagccctataggctccaacaagcaatcgcagcaagcaacatacctttatcacccttgttgtttcaacaatcgccagccctatctttggtgcagtcattggtacaaaccatcagggcacagcagctgcagcaactcgtgctacctgtgatcaaccaagtagctctggcaaacctttctccctactctcagcaacaacaatttcttccattcaaccaactgtctacactgaaccctgctgcttatttgcagcaacaactattaccattcagccagctagctactgcctactctcagcaacaacaacttcttccatttaaccaattggccgcactgaaccccgctgcttatttgcagcagcaaatactactaccatttagccagctagctgcagcaaaccgtgc

SEQ ID NO: 6758 - DNA, 581 bp, Zea mays
  Clone ID: LIB3061-068-Q1-K6-C11
ggcaatcgcaacagcatcttacctgtgagggggggtcctccaacaaccgtcagccctattacagcagttacctttggtccatttggtggcacaaaacatcagggcacaacaactacaacaacttgtgctagcaaaccttgctgcatactctcagcaacatcagtttcttccattcggcggggtgggtgcattgaactctgctgcttatttgcaacaacaattaccattcagccagctagttgctgcctacccccagcaatttcttccattcaaccaactagcagcattgaactctgctgcttatttacagcagcaacaactactaccattcagccagctagctgatgtgagccctgctgccttcttgacacaacaacagttgttgccgttctacctgcacgctatgcctaacgctggcaccctcttacaactgcaacaattgctgccattcaaccaacttgctttgacaaacccaacagtgttctaccaacaacccatcattgggtggtgccctcttttagattgcttatgagttatagttcaataatgaagttttttggatgatgtttgtggcgtcccag

SEQ ID NO: 6759 - DNA, 617 bp, Zea mays
  Clone ID: LIB3061-068-Q1-K6-C12
cggccgcgtgggctagcacatagaagggcatagtgtaccaacaatggcagccaaaatattttgcttccttatgctccttggtctttctgcaagtgttgctaccgcaaccattttcccacaatgctcacaagctcctatagcttcccttcttcccccatacctctcaccagcggtgtgttcaatgtgtgaaaccccaattgttcaaccctacaggatccaacaggcaatcgcaacaggcatcttaccattatcacccttgttcctccaacaaccgtcagccctattacagcagttacctttggtccatttggtggcacaaaacatcagggcacaacaactacaacaacttgtgctagcaaaccttgctgcatactctcagcaacatcagtttcttccattcaaccaactggctgcattgaactctgctgcttatttgcaacaacaattaccattcagccagctagttgctgcctacccccagcaatttcttccattcaaccaactagcagcattgaactctgctgcttatttacagcagcaacaactactaccattcagccagctagctgatgtgagccctgctgccttcttgacacaacaacagttgttgccgttct

SEQ ID NO: 6760 - DNA, 608 bp, Zea mays
  unsure (1)..(608): unsure at all n locations; Clone ID: LIB3061-068-Q1-K6-C2
attttgagcattcagnaacacaccaagcgaagcgcactagcaacaacctaacaacaatggctaccaagatattatccctccttgcgcttcttgcgctttttgcgagcgcaacaaatgcgtccattattccacaatgctcacttgctcctagttccattattccacagttcctcccaccagttacttcaatggccttcgaacacccagctgtgcaagcctataggctacaacaagcgattgcggcgagcgtcttacaacaaccaattgcccaattgcaacaacaatccttggcacatctaacaatacaaaccatcgcaacgcaacagcaacaacagttcctaccagcactgagccacctagccatggtgaaccctgtcgcctacttgcaacagcagctgcttgcatccaacccacttgctctagcaaacgtagttgcaaaccagcaacaacaacaactgcaacagtttctgccagcgcttagtcaactagccatggtgaaccctgccgcctacctacaacagcaacaactgctttcatctagcccgctcgctgtggccaatgcacctacatacctgcaacaagaattgttgcaacagattgtaccagct

SEQ ID NO: 6761 - DNA, 567 bp, Zea mays
  Clone ID: LIB3061-068-Q1-K6-C4
gccgcaccggcaccgcagccacgcttgtcgtctcctacttcgcggtctgtggcgcgacctcgttgctgttccgtgccgctgtcgttaagggacgcaccgaggaggggagcttcggcctggccttgcctggccggctgcttgtcggcgccgtgctggtgtgcgttcttgtctctgtcaatctgctaggactgctcgtgcagagtgtcttctactacgcctgcaaggccttccacagccagcagattgaccgcactgcattgtatgagcaccttggaggctaccttggggagtacgtgccactcaagagcaatatccagatggagaacctttgagagttggagcataggacaagggtaatcttctcacctctcgttgctacatactagcagttttctatggatctttctcgaaagatgactatggtttacttggagctatatatctggtcttgttgattctaatatcctgtagtagtttagtttagaatctgtacaagtgaaaatgcgcagtatggaaccaatctacgaaatggaacgtagatgcatgaacaaggttgtctttcgtctc

SEQ ID NO: 6762 - DNA, 606 bp, Zea mays
  unsure (1)..(606): unsure at all n locations; Clone ID: LIB3061-068-Q1-K6-C5
caacatagnaaagtggaaacagtagcgcggtgggagcacaatggcggccaagatattttccatccttatgctccttgctctttctgcatgtgttgctaacgcgaccatttttcctcaatactcacaagctcctatagctgcccttcttcccccataccttccatcaatgaccgcttcagggtgggaaaacccagcccttcaaccctacaggctccaacaagcaatcgcaacaagcaacttacctttatcacccctgttctttcaacaatcgccagccctatctttggtgcagtcattggtacaaaccatcagggcacaacagctgcaacaactcgtgctaccagtgatcagccaagtagctctggcaaacctttctccctactctcagcaacaacaatttcttccattcaaccaactgtctacactgaaccctgctgcttatttacaacaacaacaactactaccattcagccagctagctactgcctactctcagcagcaacaatttcttccatttaaccaattggccgcactgaacccctctgcttatttccagcagcaaatactactaccatttggccagctagctacaacaagccccacttc

SEQ ID NO: 6763 - DNA, 597 bp, Zea mays
  unsure (1)..(597): unsure at all n locations; Clone ID: LIB3061-068-Q1-K6-C7
tgttgctgttgcgttgcgatggtttgggtgggtgagatgtgccaagnattgttgttgcaactgggaaattggttgttgtaagacgctcgccgcaattgcttgttgtagcctataggcttgcacagctgggtgttcgaagcccattgaagtaactggtgggaggaactgtgtaataatggaacttggagcaagtgagcattgtggaataatgaacgcatttgttgcgctcgcaaaaagcgcaagaagcgcaaggagggataatatcttggtagccattgttgttaggttgttgctaatgtgcttcgcttggtgtgtttctgaatgctcaccccaaatccccaaatcttcccagttccctcctcccgctcgacccagatcgaggcctcgatccaccggccatggcgctggagtgggtggtgctgggctacgcggcgggcgcggaggcggtcatgctgctgctgctgacgctgccggggctggacggcctgcgccggggcatggtctccgtggtgcggagcgcgctcaagcccatgatgtccgtggtgcccttctgcctcttcctgctcatggacatctactggaagtacgagacgcggc

SEQ ID NO: 6764 - DNA, 607 bp, Zea mays
  unsure (1)..(607): unsure at all n locations; Clone ID: LIB3061-068-Q1-K6-C8
gcagcttctgcttgctctggggggagaggggggggagagagcgagagagagagagagatctagtagagaggctagtaggtggtcctcgacgaantgttggcggtgttcagcgggcaggtggtggaggtgccggcggagctggtggcggcgggcagccggacgccgtcgcccaagacgagagggggggcagctcgtggggcgcttcctggccgcgtccgagccggccgtgtccgtgcagctcggcgaccacggccacctcgcctactcccacaccaaccaggcgctcctccgccccaggaccccgagggcagggtgccgctcttctgggggatcaccgccgacggctgcgtcgccttctccgacgacatcgacatgctcaaaggctcatgcggcaagtcgctcgcgccgttcccgcaaggctgcttctactccaacgccctcggagggctcaagtgctacgagaaccccaagcacaaggtcaccgctgtccccgccgacgaagaagagatctgcggtgccactttcaaggtggtggaagggtctactgtcctgacggcgctgcactgatcgatcatcatcaggcggaggcgatgcgacgatacagaac

SEQ ID NO: 6765 - DNA, 600 bp, Zea mays
  unsure (1)..(600): unsure at all n locations; Clone ID: LIB3061-068-Q1-K6-D1
naaaccaacaagcaacatagnaaagtgggaatccagtagcaacaacagagcaacaatggcgaccaagatattttccctccttatgctccttgctctttctgcatgtgttgctaacgcgacaattttccctcaatgctcacaagctcctatagcttcccttcttcccccataccttccatcaatgatagcttcagtatgtgaaaacccagctcttcagccctataggctccaacaagcaatcgcagcaagcaacatacctttatcacccttgttgtttcaacaatcgccagccctatctttggtgcagtcattggtacaaaccatcagggcacagcagctgcagcaactcgtgctacctgtgatcaaccaagtagctctggcaaacctttctccctactctcagcaacaacaatttcttccattcaaccaactgtctacactgaaccctgctgcttatttgcagcaacaactattaccattcagccagctagctactgcctactctcagcaacaacaacttcttccatttaaccaattggccgcactgaaccccgctgcttatttgcagcagcaaatactactaccatttagccagctagc

SEQ ID NO: 6766 - DNA, 605 bp, Zea mays
  unsure (1)..(605): unsure at all n locations; Clone ID: LIB3061-068-Q1-K6-D10
tccgggggggaccaccggcgtatggcacctggctnngagaggatggccttcaagaacaccaagcaccggagccacctcacatagtgagcgagctcgagcttgccgggggcaacgtcggcgcttcagcctccagggagcagatggtctacagctatgacacgctcaagggatacatgccggggggtggcgagatcctcatcgactgcatgcgcaacccgctcttcctccaggaagaagtcgaacggcagctggttcttgctcgagaagaagtaaatgagctacaaaagaaccctgagaagtttcttcatgaacagcttaaccttgttggatattcgggtgctcttgcaaatccgctaatagctcctgaggatgcccttgctagaatcaatgacaaaattattcaaaagttctatcatgaaaattttactgctgatcgcgtggttctagcagcatcaggtgttgatcacgaacacttgctaggctatgcagatttgttgttgaaagattggcacaaggggaccccaatggnaaaagccaaagtctacatatgttggtgggagattccagacacagagcanattcagatatgacacatgttgcattag

SEQ ID NO: 6767 - DNA, 562 bp, Zea mays
  unsure (1)..(562): unsure at all n locations; Clone ID: LIB3061-068-Q1-K6-D11
cggcgctgaaaagagaggctaagatcgccgcagccgccgcggcggcggcggcgctgtgcttcgcggccctggtggccgtggccgtctgccaaggcgaggtcgagcggcagaggctcagggacctgcagtgctggcagggggggggggggggcccgctcgacgcgtgccgccaggtcctcgaccggcagctaaccggcggcggcgtcggcggcccgttccggtggggcaccgggctccggatgcggtgctgccagcagctccaggacgtgagccgcgagtgccgctgcgccgccatccggagcatggtcaggggctacgaggaggccatgccgcctctggagaaaggctggtggccatgggggcggcagcagcagccgccgccgcanggaggaggaggaggacaggggggctactactacccctgcagccgggcaggagagggataccaaacgcagatgtatccaccgtgtcgtcccggcaccaccgggccaaggatcggccgcgtgaggcttactaaggcccgggagtacgccgcggggttgccgatgatgtgccggctgtc

SEQ ID NO: 6768 - DNA, 595 bp, Zea mays
  Clone ID: LIB3061-068-Q1-K6-D2
ctttcagttcagccgagcaccatcgtcacagtcagtagccaagcatatttctttctccgactccgagtgatttgcgctgaacgatcagtttccagagcgagcggagctgagcgagcttgcgttgcttgagagaccctgccatggcttcccaccaggacaaggctagctaccaggccggcgagaccaaggcccgcaccgaggagaagaccgggcaggcggtgggggcgaccaaggacacggcgcagcacgccaaggaccgggcggcggacgcggcggggcacgcggcgggcaagggccaggacgccaaggaggccaccaagcagaaggcgtccgacaccggcggctacctgggaaagaagaccgacgaggccaagcacaaggccggcgagacgacggaggcgaccaagcagaaggccagcgagacgacggaggcgaccaagcagaaggccggcgagacgacggaggccgctaggcagaaggcagccgacgccatggaggcagccaagcagaaggccgccgaggccgggcagtacgccaaggacaccggccgtctccggcaaggacaagtccggcggcgtcatccagcaggccactg

SEQ ID NO: 6769 - DNA, 567 bp, Zea mays
  Clone ID: LIB3061-068-Q1-K6-D3
aacaactacgaacgcatacacgacctacacatggctaccagtatttatccctctttgcgcttcttgccctttttgcgagcgcaacaaatgcgttcattattccacaatgctcacttgctcctagtgccattattccacaggtcctccctccagttacttcaatgggcttcgaacacccagctgtgcaagcctacaggctacaacaagcgcttgcggcgagcgtcttacaacaaccaattgcccaattacaacaacaatccttggcacatctaaccatacaaaccatggtaacgcaacagctacaacaatttctaccaacactgagccaactagctgaggggaaccctgtcacctacttgcaacagcagaagcttgcatacaacccactagctctggcaaacatagttgcataccaacaacaacaacaatagcaacaggttctaccatagcttacacaactagccatggtgaaccctgccgcctacctacaacagcaacaactgattgcatgtacccctctcgatgtggctaatgcacctacatacctgcaacaacagttgttgcaac

SEQ ID NO: 6770 - DNA, 601 bp, Zea mays
  Clone ID: LIB3061-068-Q1-K6-D4
cacccatgcccgtgccaacagccgcatccaagcccgtgccagctgcagggaacctgcggcgttggcagcaccccgatcctgggccagtgcgtcgagttcctgaggcatcagtgcagcccgacggcgacgccctactgctcgcctcagtgccagtcgttgcggcagcagtgttgccagcagctcaggcaggtggagccgcagcaccggtaccaggcgatcttcggcttggtcctccagtccatcctgcagcagcagccgcaaagcggccaggtcgcggggctgttggcggcgcagatagcgcagcaactgacggcgatgtgcggcctgcagcagccgactccatgcccctacgctgctgccggcggtgtcccccactgaagaaactatgtgctgtagtatagccgctggctagctagctagttgagtcatttagcggcgatgattgagtaataatgtgtcacgcatcaccatgggtggcagtgtcagtgtgagcaatgacctgaatgaacaattgaaatgaaaagaaaaaaagtactccatctgttccaaattaaaattggttttaaccttttaataggtttatacaataattgatatatgg

SEQ ID NO: 6771 - DNA, 603 bp, Zea mays
  Clone ID: LIB3061-068-Q1-K6-D6
ggcatctgttatatcatctactgtttcaaatgttttacttggagccagaccagcttttatagtgccagcctatgagctaaaatctgctgccggttggaatggctgctacactagcttcagtctgttcagtcccattgacttcagtactgcttctctttgagctgacaaaggattacaggattttgcttcctctcatgtgaacaagggagaatattgtgaactgaaggtcatgtatcagcgaaaagcaggctttcctcttgtagcaattgtgcacctgaaaaactacagtgcccttatgacaccacaatagtcgctcgaatgcaactgtccggcctagcatccaatcgacctcaaccactctgcatcccacgtgtgtgtggagctgatgaacatgtcgatgtgcaaattcctccagctcgagtacttggagattacatagtcttctccattgtttttctagactttgaggttctaagcatgagcaagctgggttatgatggtgttgtggcactgctggttgctgatatatcactttcaatcggtcttgaccagattgaagctctgtatcagtatgcccaatttcagtttgagtgtggtaactac

SEQ ID NO: 6772 - DNA, 511 bp, Zea mays
  unsure (1)..(511): unsure at all n locations; Clone ID: LIB3061-068-Q1-K6-D7
ccccccccccccnncccnnnnccccccccccccnccnnccccnnnnnccncccccccncccccnnccccccnccccccccccccccccccccccgcgcggaagaagggggggcccccccccnnccccccccccccnncncccccnncccccnccccccccccccccnccccccccccccccccccccccccccccccnncccccccccccccccccccccnnnnnccccancccccccccccccccccccccncccccccccccccnnccncccccccccccccncccccccccccccccccccccccccccccccccccccccccccccccccccccccccccccccncccccncccccccccccccccccnnccccccacccccccccccccncccccccccacccccccccccccccccccccccccccccccccccccccccccccccccacccccanccccanacccccccacacccccccccccccccccacccccccccccccc

SEQ ID NO: 6773 - DNA, 637 bp, Zea mays
  unsure (1)..(637): unsure at all n locations; Clone ID: LIB3061-068-Q1-K6-D8
cggtccgnattccgggctgcggctgccagccaccgccgccggttcatctaccgccgggggggggggggccacctccggttcacctgccacctccggtgcatctcccaccgccggtccacctgccgccgccggtccacctgccaccgccggtccatgtgccgccgccggttcatctgccgccgccaccatgccactaccctactcaaccgggcggggctcagcctcatccccagccacacccatgcccgtgccaacagccgcatccaagcccgtgccagctgcagggaacctgcggcgttggcagcaccccgatcctgggccagtgcgtcgagttcctgaggcatcagtgcagcccgacggcgacgccctactgctcgcctcagtgccagtcgttgcggcagcagtgttgccagcagctcaggcaggtggagccgcagcaccggtaccaggcgatcttcggcttggtcctccagtccatcctgcagcagcagccgcaaagcggccaggtcgcggggctgttggcggcgcagatagcgcagcaactgacggcgatgtgcggcctgcagcagccgactccatgcccctacgctgctgccggcggtgtcccccactgaagaaactatgtgctgtagtatag

SEQ ID NO: 6774 - DNA, 530 bp, Zea mays
  Clone ID: LIB3061-068-Q1-K6-D9
attggtgggcacaaaaacatcaggggcacaacaactacaacaacttgtgctagcaaaccttgctgcatactctcagcaacatcagtttcttccattcaaccaactggctgcattgaactctgctgcttatttgcaacaacaattaccattcagccagctagttgctgcctacccccagcaattgcttccattcaaccaactagcagcattgaactctgctgcttatttacagcagcaacaactactaccattcagccagctagctgatgtgagccctgctgccttcttgacacaacaacagttgttgccgttctacctgcacgctatgcctaacgctggcaccctcttacaactgcaacaattgctgccattcaaccaacttgctttgacaaacccaacagtgttctaccaacaacccatcattggtggtgccctcttttagattgcttatgagttatagttcaataatgaagttttttggatgatgtttgtggcgtcccagaaataagaaagtacatttctagattctt

SEQ ID NO: 6775 - DNA, 587 bp, Zea mays
  unsure (1)..(587): unsure at all n locations; Clone ID: LIB3061-068-Q1-K6-E1
gcagnacagcatgnagttttggattttctgagtgcatcctcaagncttactctgctggaaagtcctcctctgttatgaaaaccttggctgttaatgttgatgatgcaatggatgacattgttcgacaatttaaaggagtttcagatggtttgaaacgggcggttggcacatcaccttctagtgcaactgcccaatttgcagataataggatgtctctatcttggaaccaggaagagaaagataaccacaacttgcatcaaagaaacttggaaagggctcatagcctttcagatggtgatagtaactatgaagatcacatctcttctgtgaatagtggatgccattcagacaatgaggtcaataatagaggacatacttcaaatgatgttgagcacatcgaaacatgctctagtttggataaacaagccagcgaccaaataggaaaacctgcaaaggaatattctgattcttcaaacatgtcatctctaaatgcattcgaggatccaacaggaattcctcctgagtggatgccaacaaatgttagtgtgcctttattgaacctggttgacaaagtattccagctaaag

SEQ ID NO: 6776 - DNA, 546 bp, Zea mays
  unsure (1)..(546): unsure at all n locations; Clone ID: LIB3061-068-Q1-K6-E10
ccaaaaaaaatatgtacaanagaatttacactaccagaaacttctttccagttggcacccccgaatcccctgcgtccagcacctcatccaaccatcccgttctgtaggttcaaagaagtaaaaaacggatgtcattggggggggggggaaatgaagcactacgacttgtgcacaatgaatttgaatgaagtgttgtcgagagtagaagagatgtcacaagaagaagcatctgtttgcggtcttatggatatggatgagcctagtcctcccagttgtgatgattcagttgaggttgaggacgacagttgctatgaaggtttaactgatgcagagtgggcagctgagaattatgcagattgggaggaactttataaccgtagtatgtgatctaggaaaactataaagtgtcatgagaagtactattgctgtagtacctgatccaagttgtgaggacttctattatgttgtagtatgtgcttgtgcttctagttgtggtgacttctattatgttgtactacctccgttctcnaatatttatcgtccgct

SEQ ID NO: 6777 - DNA, 560 bp, Zea mays
  unsure (1)..(560): unsure at all n locations; Clone ID: LIB3061-068-Q1-K6-E11
aaccccggtcgacccagcgtccgtgttcctccaacaatcatcancgggggtacgtcagggggctttaaaaaataaataaggcacaaaacatcagggcacaacaactacaacaacttgtgctagcaaaccttgctgcctactctcagcaacagcagtttcttccattcaaccaactagctgcattgaactctgcttcttatgtggggggggggggcgnactaccattcagccagctacctgctgcctacccccagcaatttcttccattcaaccaactggcagcattgaactctcctgcttatttacagcagcaacaactactaccattcagccagctagctggtgtgagccctgctaccttcttgatacaaccacagttgttgccgttctaccagcacgctgcgcctaacgctggcaccctcttacaactgcaacaattgctgccattcaaccaacttgctttgacaaacccagcagcgttctaccaacaacccatcattggtggtgccctcttttagatttcttatgagttatagttcaataataaagttttttgtctg

SEQ ID NO: 6778 - DNA, 404 bp, Zea mays
  unsure (1)..(404): unsure at all n locations; Clone ID: LIB3061-068-Q1-K6-E2
ctagttcgacgcgccgccgtcaccgtcgtcgctcgcgctctccgcccggatcggagcgagagtaggggcgtgtcggcggtgaaagcgactgcgtcagccatggcggacgaggagcattcggagaggagagaggaggcnctnccgnagcttgcccccttcgacccgaccaagaagaagaaaaagaagaaggttgtcatccaagaaccttctgatgaagtggacaagcttgcagagaagacagaaacactgngcagtcgcagaacccccgctgaacttaacnnttcactggaatgaagaagaaaaagaagaagccggtggatcttgattcaactcttgatgagcttggagatggggaggacactcaagatgatcaagctgtagaggaacaaggggaaagcattgtg

SEQ ID NO: 6779 - DNA, 583 bp, Zea mays
  unsure (1)..(583): unsure at all n locations; Clone ID: LIB3061-068-Q1-K6-E3
cagcaacaacagttcctaccagcactgnagccaactagnagtggtgaaccctgtcgcctacttgcaacagcaggtgcttgcatccaacccacttgctctggcaaacgtagctgcataccaacaacaacaacaattgcaacagtttctgccagcgctcagtcaactagccatggtgaaccctgccgcctacctacaacagcaacaactgctttcatctagccctctcgttgtgggtaatgcacctacatacctgcaacaacaattgctgcaacagattgtaccagctctgactcagctagctgtggcaaaccctgctgcctacttgcaacagctgcttccattcaaccaactgactgtgtcgaactctgctgcgtacctacaacagcgacaacagttacttaatccactagcagtgcctaacccattggtcactgccttcctacagcagcaacaattgctaccatacagccagttctctttgatgaaccctgccttgtcgtggcagcaacccatcgttggaggtgccatcttttagattacatatgagatgtaatcgataatggggccctcataccggcatgtg

SEQ ID NO: 6780 - DNA, 586 bp, Zea mays
  unsure (1)..(586): unsure at all n locations; Clone ID: LIB3061-068-Q1-K6-E5
acagcaaatanaagtagaatccattagcaacaatagagcaacaatggcgaccaagaaattttccctccttatgctccttgctctttctacatgtgttgctaacgcgacaattttccctcaatgctcacaagctcctatagcttcccttcttcccccataccttccatcaattatagcttcagtatgtgaaaacccagctcttcaaccatataggcttcaacaagcaatcgcagcaagcaacatacctttatcgcccttgttgtttcaacaatcaccagccctatctttggtgcagtcattggtacaaaccatcagggcacaacagctgcagcaactcgtgctacctgtgatcaaccaagtagctctggcaaacctttctccctactctcagcaacaacaatttcttccattcaaccaactgtctacactgaaccctgctgcttatttgcagcaacaactattaccatttagccagctagctactgcctactctcagcaacaacaacttcttccatttaaccaattggccgcactgaaccccgctgcttatttgcagcagcaaatactactgccatttagcgagcta

SEQ ID NO: 6781 - DNA, 603 bp, Zea mays
  Clone ID: LIB3061-068-Q1-K6-E6
cccagcgtccgcccagcgtccgcatctggaaccccggcttcgacttcgacgacaaaatcctcggcttcatcaagggctacaagcgcacctttaatctcgcttgcattgaccacagaggcacaccgggacatccggcgaggacctgcacgcttgaaaccgacgacgaggccatatgctggggaattgcatattgtgtcaagggtggtccagaaaaagagctaaaagcaatgcagtacttggagagaagagagtgtgagtaccaccagaagatatccattgatttctacaaggaaggagatcccttgaaaccagctgtgacaggcgtcttagtgttcgtttccactccagatccaattggcaacaagtactatcttggccctgctcctttgcaggatatggcaaggcaaattgctacagccaatggccctactggctataatagggattacctgttctcaatggagaaggcattagccagcattagccacgaagatgattcgatcatagagcttgcaaacgaggtgaggaaggtgctcaacagaacaaaggagaccaagatcactggtgccaatgcttccctgaaaacacatgcccctcttgtgc

SEQ ID NO: 6782 - DNA, 581 bp, Zea mays
  Clone ID: LIB3061-068-Q1-K6-E7
atgagaccaatagcaacatagaaggacatagtgtaccaacaatggcagccaaaatattttgcctccttatgctccttggtctttctgcaagtgctgctacggcgaccattttcccgcaatgctcgcaagctcctatagcttcccttcttcccccgtacctctcaccagcggtgtctgcggtatgtgaaaacccaattcttcaaccctacaggatccaacaggcaatcgcagctggcatcttacctttatcacccttgttcctccaacaatcatcagccctattacaacagttacctttggtgcatttattggcacaaaacatcagggcacaacaactacaacaacttgtgctagcaaaccttgctgcctactctcagcaacagcagtttcttccattcaaccaactaggttcattgaactctgcttcttatttgcaacaacaacaactaccattcagccagctacctgctgcctacccccagcaatttcttccattcaaccaactagcagcattgaactctcctgcttatttacagcagcaacaactactaccattcagccagctagctggtgtgagccct

SEQ ID NO: 6783 - DNA, 586 bp, Zea mays
  unsure (1)..(586): unsure at all n locations; Clone ID: LIB3061-068-Q1-K6-E8
ttaagctcaacctgcccggnttggaggggggggcggagaagctggacttccagtcaagcttgtatttccaaggaatttgttgggtgggattgttccaggaagcaatcctggtgactacatgatgcttggccttggagacatggccattccagggatgcttctagctctggtactctgtgggggtgatgggaagttcaaggatgtgaattttccaccagatgtgtctcccccaaaacggcggaattatgtgtggtatgctgtaacaggttatggtattggcttggtagctgcactagctgctgggatcttgtctcagtctcctcaaccagccttactgtacctggtgccatcgacactgggacctgtcatgtacttgtcatggttacggaatgagctatgggagctatgggaagggtctgggacgattctgaacgagaaagctcatttgttggaggtctgagatccaagtggacaataagaaggatctgaacccaccgtgattgaatctaattaaacaatacttgacctcctcataccgaaggagagtatttataagctagaatgttcagtcatgtaagccatcacc

SEQ ID NO: 6784 - DNA, 616 bp, Zea mays
  unsure (1)..(616): unsure at all n locations; Clone ID: LIB3061-068-Q1-K6-E9
ccccggtcgacccagcgtccggnaagggaaggtcaatctccaaaggggggggtggggggagcacccatcttaatcagcaatcaattccgcagtcatctcaaactcatgaagcaggtaatctgagatctccagttgatgtcaatgttggagatggctctgagacctcacctgggcagcagaatggtctggtcactctctctgggagggggacttttttggatcaatgctcccggcgaaaagttcgaggaaatacttcaagccagcaaccaccaatggcttccaccgagcagggagagggtagaaatcttgcaacacccanaagtgtcaggagccactgaggaggccctacgctttgctggcatggtcagacaaattatgccatttatctcccaagttgaaacacagaatcaaagtgccccaccagacagcagcagcacacctgcacaggctgcatctgggagtgcagacagagctagggatgtcccaaatgattctacgagttcccgtcaacataaccgcgaccaaattgatgagcctaattctaaaaggcaaagaactagtgactgattggaatctacttgtgagctgagaatcttgccagttcttgatttacccc

SEQ ID NO: 6785 - DNA, 391 bp, Zea mays
  unsure (1)..(391): unsure at all n locations; Clone ID: LIB3061-068-Q1-K6-F1
natgnaaaccaactagcaacatagnaaagcacaatagtgtaccaacaatggcagccaaaatattttgcttccttatgctccttggtctttctgcaagtgctgctaccgcaaccattttcccacaatgctcacaagctcctatagcttcctttcttcccccatacctctcaccagcggtgtcttcagtatgtgaaaacccaattcttcaaccctacaggatccaacaggcaatcgcagcaggcatcttacctttatcacccttgttcctccaacaaccgtcagccctattacagcagttacctttggtgcatttgttggcacaaaacatcaaggcacaacaactacaacaacttgtgctaggaaaccttgcctgcctactctcagcaacagc

SEQ ID NO: 6786 - DNA, 609 bp, Zea mays
  Clone ID: LIB3061-068-Q1-K6-F10
aaaatccttctatcagtaccatcagaggatcgttcatggttatagtataggcaccaaatcaaatctgcaacatcaattatctaactccaaaaccatgaagctggtgcttgtggttcttgctttcattgctttagtatcaagtgtttcttgtacacagacaggcggctgcagctgtgggggggagcaaagccatgagcagcaacatcatccacaacaacatcatccacaaaaacaacaacatcaaccaccaccacaacatcaccagcagcagcaacaccaacaacaacaagttcacatgcaaccacaaaaacatcagcaacaacaagaagttcatgttcaacaacaacaacaacaaccgcagcaccaccaccaacaacaacaacaacagcaccaacaacaacatcaatgtgaaggccaacaacaacatcaccaacaatcacaaggccatgtgcaacaacacgaacagagccatgagcaacaccaaggacagagccatgagcaacaacatcaacaacaattccagggtcatgacaagcagcaacaaccacaacagcctcagcaatatcagcagggccaggaaaaatcacaacagcaacaatgtcattgcca

SEQ ID NO: 6787 - DNA, 400 bp, Zea mays
  unsure (1)..(400): unsure at all n locations; Clone ID: LIB3061-068-Q1-K6-F12
gcagtttgcggctaaccccgcacccgggtcgactacgacaattgttgccctttgtccaacttgctttgacagacccagcggcctcctaccagcagtttgcggctaaccccgcaaccctcttacaactacaacaattgttgccctttgtccaacttgctttgacagacccagcggcgcgcggggggggcaacacatcattggtggtgccctcttttagattgcttattagttgtaattcaataataaagttttttggatgatgtatgtggccaaccagaaataagaagttacatttccagattctaatgtgnnaaaaaaaaaaaaaaaaaaaaaaaaaaaaaaaaaaaaaaaaaaaaaaaaaaaaaaaaaaaaaaaataaaaaaaatacttaatttttttt

SEQ ID NO: 6788 - DNA, 616 bp, Zea mays
  unsure (1)..(616): unsure at all n locations; Clone ID: LIB3061-068-Q1-K6-F3
ngatgnanaccaacaagcaacatagnaaagtggnaatccagtagcaacaatagagcaacaatggcgaccaagatactttccctccttatgctccttgctctttctgcatgtgttgctaacgcgacaattttccctcaatgctcacaagctcctatagcttcccttcttcccccataccttccatcaatgatagcttcagtatgtgaaaacccagctcttcaaccctataggctccaacaagcaatcgcagcaagcaacatacctttatcacccttgtttcaacaatcgccagccctatctttggtgcagtcattggtacaaaccatcaaggcacagcagctgcagcaactcgtgctacctgtgatcaaccaagtagctctggcaaacctttctccctactatcagcaacaacaatttcttccattcaaccaactatctacactgaaccctgctgcttatttgcagcaacaactattaccattcagccagctagctactgcctactctcatcaacaacaacttcttccatttaaccaattggccgcactgaacctcgctgcttatttgcagcagcaaatattactaccatttagccagctagctgcagcaagccgtg

SEQ ID NO: 6789 - DNA, 606 bp, Zea mays
  unsure (1)..(606): unsure at all n locations; Clone ID: LIB3061-068-Q1-K6-F4
caaattgcaccaanaaatccatcgaggggccgtcgacagggggaattaatggcgtcgtcgtctagcagcagccaccgccgcctcatcctcgcagccgccgtcctgctctccgtgctcgcggctgccagcgccagcgccgggacctcctgcgtgccggggtgggccatcccgcacaacccgctcccgagctgccgctggtacgtgaccagccggacctgcggcatcgggccgcgcctcccgtggccggagctgaagaggagatgctgccgggagctggcggacatcccggcgtactgccggtgcacggcgctgagcatcctcatggacggcgcgatcccgccgggcccggacgcgcagctggagggccgcctagaggacctgccgggctgcccgcgggaggtgcagaggggattcgccgccaccctcgtcacggaggccgagtgcaacctggccaccatcagcggcgtcgccgaatgcccctggattctcggcggcggaacgatgccctccaagtaactgcgaagagcatagtgcatgaggaatgagcttgtagctagctcatatgtctgaataataagcacagcaagaagatgaatgcatttctcg

SEQ ID NO: 6790 - DNA, 614 bp, Zea mays
  unsure (1)..(614): unsure at all n locations; Clone ID: LIB3061-068-Q1-K6-F6
naancaacatagnaaagtggnaatccagtagcaacaatagagcaacaatggcgaccaagatattttccctccttatgctccttgctctttctacatgtgttgctaacgcgacaattttccctcaatgctcacaagctcctatagcttcccttcttcccccataccttccatcaattatagcttcaatatgtgaaaacccagctcttcaaccatataggcttcaacaagcaatcgcagcaagcaacatacctttatcgcccttgttgtttcaacaatcgccagccctatctttggtgcagtcattggtacaaaccatcagggcacaacagctgcagcaactcgtgctacctctgatcaaccaagtagctctggcaaacctttctccctactctcagcaacaacaatttcttccattcaaccaactgtctacactgaaccctgctgcttatttgcagcaacaactattaccatttagccagctagctactgcctactctcagcaacaacaacttcttccatttaaccaattggccgcactgaaccccgctgcttatttgcagcagcaaatactactaccatttagccagctagctgcagcaaaccgtgcttccttc

SEQ ID NO: 6791 - DNA, 610 bp, Zea mays
  unsure (1)..(610): unsure at all n locations; Clone ID: LIB3061-068-Q1-K6-F7
ccgnagtcaagctgaccgaaataccattgttaaacgaatcattatggacactaacagcacagatccatttaatggtctctatgtgggagcatttagtccatatggaccagaaattgtgcagcttcgtcggaagttcggccactggaacagtactgatgacgttgagtttttcgagtatgtcgaagcagtaaagttgactggtgatctgagtgttcctgctggccagataacgttccgtgctaagattgggaagggcaagcgacttgagaatcgaggagcatatccagaggaatttggtgtgattgccagttacaaaggtcagggtagaatagctcagcctggattcaaaaatcctcgatgggtggatggtgagctgttggtactcaatggcaagagtacaattccacaccttggaggcgcagagctcggtttcctgtatagtgtacctgagcagagttttctggttctcttcgatcggcttaatcttcccgagtgatgagactcctaaagggagcagactcctcacatgtagattgcatgaacgcgcagaggccggccacagctccaagtgaccgaaacaggtctgggngggccgtttccccatcgtctt

SEQ ID NO: 6792 - DNA, 587 bp, Zea mays
  unsure (1)..(587): unsure at all n locations; Clone ID: LIB3061-068-Q1-K6-F8
ccatggctaccaanatttagccctgcttgcgcttcttgcccttttagtgagcgcaacaaatgcgttcattattccacagtgctcacttgctcctagtgccattattccacagttcctcccaccagttacttcaatgggcttcgaacatccagccgtgcaagcctacaggctacaactagcgcttgcggcgagcgccttacaacaaccaattgcccaattgcaacaacaatccttggcacatctaaccctacaaaccattgcaacgcaacaacaacaacaacaacagtttctgccatcactgagccacctagccgtggtgaaccctgtcacctacttgcaacagcagctgcttgcatccaacccacttgctctggcgaacgtagctgcataccagcaacaacaacagctgcaacagtttatgccagtgctcagtcaactagccatggtgaaccctgccgtctacctacaactactttcatctagcccgctcgcggtgggcaatgcacctacgtacctacaacaacagttgctgcaacaaattgtaccagctctgactcagctagctgtggcaaaccctgctgcctact

SEQ ID NO: 6793 - DNA, 608 bp, Zea mays
  unsure (1)..(608): unsure at all n locations; Clone ID: LIB3061-068-Q1-K6-F9
gcaacatagnaaagcacaatagtgtaccaacaatggcagccaaaaattttgcctccttatgctccttggtctttctgcaagtgctgctacggcgaccattttcccgcaatgctcgcaagctcctatagcttcccttcttcccccgtacctctcaccagcggtgtcttcggtatgtgaaaacccaattcttcaaccctacaggatccaacaggcaatcgcagctggcatcttacctttatcacccttgttcctccaacaatcatcagccctattacaacagttacctttggtgcatttattggcacaaaacatcagggcacaacaactacaacaacttgtgctagcaaaccttgctgcctactctcagcaacagcagtttcttccattcaaccaactaggttcattgaactctgcttcttatttgcaacaacaacaactaccattcagccagctacctgctgcctacccccagcaatttcttccattcaaccaactagcagcattgaactctcctgcttatttacagcagcaacaactactaccattcagccagctagctggtgtgagccctgctaccttcttgacacaaccacagttgttgccgttct

SEQ ID NO: 6794 - DNA, 199 bp, Zea mays
  unsure (1)..(199): unsure at all n locations; Clone ID: LIB3061-068-Q1-K6-G1
gcattcagnaaacacaccaagcgaacacattagcaacaacctaacaacaatggctaccaagnaattatccctccttgcgcttcttgcgctttttgcgagcgcaacaaatgcgttcattattccacaatgctcacttgctcncaagttnnnccattnattacacanngttcctcccaaccaagttacttcaatgggcttc

SEQ ID NO: 6795 - DNA, 591 bp, Zea mays
  Clone ID: LIB3061-068-Q1-K6-G10
cagaaccaacagcaatcgcaacaggcgtgtgaccattatcacccttgttcctccaacaaccgtcagccctattacagcagttacctttggtccatttggtggcacaaaacatcagggcacaacaactacaacaacttgtgctagcaaaccttgctgcatactctcagcaacatcaggttcttccattcaaccaactggctgcattgaactctgctgcttatttgcaacaacaattaccattcagccagctagttgctgcctacccccagcaatttcttccattcaaccaactagcagcattgaactctgctgcttatttacagcagcaacaactactaccattcagccagctagctgatgtgagccctgctgccttcttgacacaacaacagttgttgccgttctacctgcacgctatgcctaacgctggcaccctcttacaactgcaacaattgctgccattcaaccaacttgctttgacaaacccaacagtgttctaccaacaacccatcattggtggtgccctcttttagattgcttatgagttatagttcaataatgaagttttttggatgatgtttgtggcgtccc

SEQ ID NO: 6796 - DNA, 629 bp, Zea mays
  unsure (1)..(629): unsure at all n locations; Clone ID: LIB3061-068-Q1-K6-G11
accccggtcgacccagcgttcggcccgctcctcaccacgcggggaggggtncagcancggggnggaccctaaactcccggccggttacgacttcgagaagctggccaaggcggcggccatcgcgtccatgtgcgtgcacgtcgaggcgtcgcaccggccgttcatgggcgatgtcgtgcaggcgctgaagctgatccacagggggggggggggcgacnagacctgcagcggctccttcntgggcggcgcaacagaggagtccccgtggaacgacgtcagcaggagctcgtggaacgacgacccgccggccactccgggcccggcgctccccctgggatacggctcggaccctgccggcgccgacgagcgcaggccacggtcggcgtcgagcgcggtgctggacaagatcgagtccctggcgatgtacgactggtccggcccgctgcgcaccaaggggaggggcagcttctacaggctgagggggagcatgagcgagcacggtcgcccctcggacgacggtagcgtcgaaggttacttgatgtagccggcggcccgacgaccgtgcgcagcatattgccgcggcaggcatacctcgcgtttcttttgtctgtctagaattgtatagctgc

SEQ ID NO: 6797 - DNA, 592 bp, Zea mays
  Clone ID: LIB3061-068-Q1-K6-G12
aaaaaaaaaaaaaaaaaaaaaagggggggggggggggggaaaaaaaaaaaaaaaaaaaaaaaaaaaaaaaaaccccccccttcccccacttcccaacttacttatttaaattccccttaccaccttcttaacccccattgccaacccaattttttttcttttttttgcccctccttcctttttcaccagggggggctcccccccctttttttccccattcctcccaccattccctttttcaaaaaatacccccaaattttaattccccttttttccattcctccagcctacaaaagcccttcccaccaacctttttccgttctttacctttacccttccaacacccttttccctttttccaccacccttccttattaattctttttctccaaaaattcccagcccaacacctccaacaccgtttttttccaccatttaatcaattatttccaccaacccttcctttttaccttcaacaacaccatttttttcctttcattcacctacctgggttaaccccttttttttatttccagccccaacatttcctacctttcacccaatttttcggaaccccttttccctttttttt

SEQ ID NO: 6798 - DNA, 606 bp, Zea mays
  Clone ID: LIB3061-068-Q1-K6-G4
cgcctctctttcggttctcacggcgacgactgggcgagcgccgcctcccctccctcgctccgtgaggtcctcgccggcgacgagtgccgccgcccgtttccatgttttttccgccgattagtgtccaccagatctagtgaaggctggtaacttgacgcaaggtgttcaagaaatttaagccacacactcttcatcataggcccaggcaatatttgtgttaatctcagggacctccagtagattgctgagagttatccttgatacaggggaatatagacacagaattttttgaacattgatctgtagccagtgctgcaatggctacaaagcttgtggttctcggtatcccctgggatgttgacactgaagggttacgagagtacatggccaagtttggacccctagatgattgtgtcgtcatgaaggagcggtcttctgggcgatctcgtgggtttggctatgtaacattcgcatcagccgacgatgcaaagaatgttcttgattgcgagcatgttcttgggagccgtacattagaagtgaagatagctactccaaaggaagaaatgaaatcacaaggaacaaagaaagctacaaggatatttgttg

SEQ ID NO: 6799 - DNA, 565 bp, Zea mays
  Clone ID: LIB3061-068-Q1-K6-G5
ggccgcccttttttttttttttttttttttttttttttttttttttttttttttttttttttttttttttttttttttttttttttttttttttttttggggggaaaaccaggggaacggggattaattaaaaattgccgggggggggaacgggttaatttctcgctaataaaaaatctggattcgggacgagctccaacagcaacatacccccaaagggcttaactttttttttggggggttgggggaggcccaactttttggcttttttttgattgcaaccagggactgaagaagaggcttttaccggaattaaaaaatgggccccccaatctgatccacatgggggaaccaactcttttactcagtctcaattaaaagaggggaaggggcttttgtttctccctttggggccggaatcctttttctgggggaggggttcggaggggtcggggacccaaaaaaaagggcttttctcccccgggggccccttttttaaatcccccccggcgcccccaccaaagggggcgccgggggcccgccccccccccccgaaaagggggaa

SEQ ID NO: 6800 - DNA, 609 bp, Zea mays
  unsure (1)..(609): unsure at all n locations; Clone ID: LIB3061-068-Q1-K6-G8
gccaagtcgatgaaaaggcttgttgcgcgggggagctgctggtggcctttggaatctctctgtaggcgaggaccacaaggcggctattgcagtatctggtggcattaaggccctggtcgatctaatatttcgttggcctgctggaactgatggagttcttgaacgtgctgctggcgcgcttgcaaacctggctgctgatgacaagtgtagcttggaagttgcaaaggctggtggtgtccatgctttggttacacttgctagatcatgtaaacttgatggtgtcctagaacaggctgcaagaggtctggctaacttagctgcacatggggacaacaatgacaacaatgctgctgtaggtcaggaagcaggggctctggaggcactggtgcaactaacaagttctcaaaacgagggtgtaagacaagaagctgctggtgctttgtggaacctgtcatttgatgacagaaaccgtgaagccattgctgcagtgggtggcgttgaagctttggttgccctagtgcaacaatgtttgaatgcttcagaaggtcttcangagagagctgctggtgcattgtggggattatctgtttcagaagctaatagcattgc

SEQ ID NO: 6801 - DNA, 602 bp, Zea mays
  unsure (1)..(602): unsure at all n locations; Clone ID: LIB3061-068-Q1-K6-G9
cacccatctgtttcgcggnaaaacccgggctggtgggagactcggagtgtagaggactagaggggcgaagcgatccgaactccgagaaccccagggccagggctcagtccacagcgagagcagagaacgcagcggcctgccggcctccgcccctcactcccgcagccatggccgccgccgccgccgtggttgccgagcccaagaccaagtacgatcgccagctcaggatatggggtgatcaaggccaaactgcactggagaaggccagcatatgcttgcttaactgtggtcctaccggaacagaagcattgaagaatctcgtgcttggaggaataggaagtgtgactgttgttgatggctccaaagttgaagcatctgatctggggaacaattttatgttggatgaaggatgtttggggcaaccaagagctaaatctatatgttcattcctacaagagcttaatgacgctgttaaagccaagtttgttgaggagtttccaacgcatttgatagacactaatccttcattcttttcccagtttactgttgtcattgctactcagcttccagagagttctttactgaagctagatgatatttgc

SEQ ID NO: 6802 - DNA, 543 bp, Zea mays
  Clone ID: LIB3061-068-Q1-K6-H11
ttatgctccttggtatttctgcaagtgctgctacggcgaccattttcccgcaatgctcacaagctcctatagcttcccttcttcccccgtacctctcaccagcggtgtcttcggtttgtgaaaacgggggggggggaaccctacaggatccaacaggcaatcgcagctggcatcttacctttatcacccttgttcctccaacaatcatcagccctattacagcagttacctttggtgcatttattggcacaaaacatcagggcacaacaactacaacaacttgtgctagcaaaccttgctgcctactctcagcaacagcagtttcttccattcaaccaactagctgcattgaactctgcttcttatttgcaacaacaacaactaccattcagccagctacctgttgcctacccccaacaatttcttccattcaaccaactggcagcattgaactctcctgcttatttacagcagcaacaactactaccattcagccagctagctggtgtgagccctgctaccttcttgacacaaccacagttg

SEQ ID NO: 6803 - DNA, 640 bp, Zea mays
  unsure (1)..(640): unsure at all n locations; Clone ID: LIB3061-068-Q1-K6-H12
aaaaccccgttcgacccagcgttcgctagattgataataatgtggggggggggggggggggggcnaantcattnaaaacaatgacctnaatgaacaattgaaatgaaaagaaaaaaaaaaaaaaaaaaaaaaaaaaaaaaaaaaaaaaaaaaaaaaaaaaaaaaaaaaaaaaaaaaaaaaaaaaaaaaaaaaaaaaaaaaaagggggggggggggggggaaaaaaaaaaaaaaaaaaaaaaaaaaaaaaaggggggggaaaaaaaaaaagttccctttttaactaccccttctttaaaaagaaaaattttttttatggggcccccaaaataaattaaagggcccgggtttaaaaaactttgggttggaaaaaaccgggggttaccaaaataaaatccttttaaaaaaattccctttttccaaagtggggaaaaaaaaaaaaaggccccacacaatcccccttccaaaaattttcccccccttaaatggaaaagggaccccccctttgggggggttttaaaccccggggggttgggggtttcccccaagggggccctttaattttgcaaacccttaaccccccttttttttcttttttccccttccttttttccccccttcccccgtttaccccgaaaaat

SEQ ID NO: 6804 - DNA, 603 bp, Zea mays
  unsure (1)..(603): unsure at all n locations; Clone ID: LIB3061-068-Q1-K6-H2
gcaacatagnaagtggnaaacagtagcaacaatagnagcaacaatggcggccaagaaattttccatccttatgctccttgctctttctgcatgtgttgctaacgcgaccatttttcctcaatactcacaagctcctatagctgcccttcttcccccataccttccatcaatgaccgcttcagtttgtgaaaacccagcccttcaaccctacaggctccaacaagcaatcgcaacaagcaacttacctttatcacccctgttctttcaacaatcgccagccctatctttggtgcagtcattggtacaaaccatcagggcacaacagctgcaacaactcgtgctaccagtgatcagccaagtagctctggcaaacctttctccctactctcagcaacaacaatttcttccattcaaccaactgtctacactgaaccctgctgcttatttacaacaacaacaactactaccattcagccagctagctactgcctactctcagcagcaacaatttcttccatttaaccaattggccgcactgaacccctctgcttatttccagcagcaaatactactaccatttggccagctagctacaacaagccc

SEQ ID NO: 6805 - DNA, 601 bp, Zea mays
  Clone ID: LIB3061-068-Q1-K6-H3
gaaacacaatatgtaccaacaatggcagccaaaatattttgcctccttagctccttggtctttctgcaagtgctgctacggcgaccattttcccgcaatgctcgcaagctcctatagcttcccttcttcccccgtacctctcaccagcggtgtcttcggtatgtagaaaacccaattcttcaaccctacaggatccaacaggcaatcgcagctggcatcttacctttatcacccttgttcctccaacaatcatcagccctattacaacagttacctttggtgcatttattggcacaaaacatcagggcacaacaactacaacaacttgtgctagcaaaccttgctgcctactctcagcaacagcagtttcttccattcaaccaactaggttcattgaactctgcttcttatttgcaacaacaacaactaccattcagccagctacctgctgcctacccccagcaatttcttccattcaaccaactagcagcattgaactctcctgcttatttacagcagcaacaactactaccattcagccagctagctggtgtgagccctgctaccttcttgacacaaccacagttgttgccgttctacc

SEQ ID NO: 6806 - DNA, 608 bp, Zea mays
  Clone ID: LIB3061-068-Q1-K6-H7
ggcgccgcttgccgactacaacatgcaggagggagagcccctccattggtgctgcgcctcaggggaggcatgcagatcttcgtgaagaccctgaccggcaagactatcaccctcgaggtggagtcttcagacaccatcgacaatgtcaaggccaagatccaggacaaggagggcatcccaccggaccagcagcgtttgatcttcgctggcaagcagctggaggatggccgcacccttgcggattacaacatccagaaggagagcaccctccacctggtgctccgtctcaggggtggtatgcagatctttgtgaagacactcactggcaagacaatcacccttgaggtggagtcttcggataccattgacaatgtcaaggccaagatccaggacaaggagggcatcccacccgaccagcagcgcctcatcttcgccggcaagcagctggaggatggccgcaccctggcggattacaacatccagaaggagagcactctccacctggtgctccgcctcaggggtggcatgcagatttttgtgaagacattgactggcaagaccatcaccttggaggtggagagctctgacaccattgacaatgtgaaagc

SEQ ID NO: 6807 - DNA, 600 bp, Zea mays
  unsure (1)..(600): unsure at all n locations; Clone ID: LIB3061-068-Q1-K6-H8
cctaattccgcatccccggctgnggcggcggggggggggccggcagcggcaccggctcaccagcgataccaggaagaaggggaggtacagtcccgcgtacagccccccgaggagaggacatggcggcaggggaaggagcccacctcccaggagaggatatggcggtggccgtggtgaccagggggctgtcagcctcctggtccgcaacattccattgagatgcaggcctgaggaactacgtgtccctttcgaacggttcggccctgttcgggatgtttacctgccaagagattatcacactggggagccaagaggatttgggttcgtggagttcgttgatgcttatgacgcttctgaggcacagtaccacatgaatcgccagatgtttgctgggcgtgaaataactgttgtacttgctgcggatacacggaaaaggcctgaggacatgcgtagacgaactggaccaagaggttattctggtcatgaagggcgtcgtccgaatcgtcatggtgcaggacggtcccgttctcgttcatactcgcgttcccgctcaccacgccctcgtggtcgtggtagatcacagtcatactcccctgcccc

SEQ ID NO: 6808 - DNA, 600 bp, Zea mays
  Clone ID: LIB3061-068-Q1-K6-H9
tacagtaccatcaatcatcattcatggggggggggtgggcaccaaatcaaatctgcaacatcaattatctaactccaaaaaccatgaagctggtgcttgtggttcttgctttcattgctttagtatcaagtgtttcttgtacacagacaggcggctgcagctgtggtcaacaacaaagggggggggggcaacatcatccacaacaacatcatccacaaaaacaacaacatcaaccaccaccacaacatcaccagcagcagcaacaccaacaacaacaagttcacatgcaaccacaaaaacatcagcaacaacaagaagttcatgttcaacaacaacaacaacaaccgcagcaccaccaccaacaacaacaacaacagcaccaacaacaacatcaatgtgaaggccaacaacaacatcaccaacaatcacaaggccatgtgcaacaacacgaacagagccatgagcaacaccaaggacagagccatgagcaacaacatcaacaacaattccagggtcatgacaagcagcaacaaccacaacagcctcagcaatatcagcagggccaggaaaaatcacaacagcaacaatgtcattgccagg

SEQ ID NO: 6809 - DNA, 494 bp, Zea mays
  unsure (1)..(494): unsure at all n locations; Clone ID: LIB3061-068-Q1-N6-A10
ggcggggggggggtttcacattaaaactggaaagtaacttcttatttctggttggccacatactatcatccaaaaaactttattattgaattacaactaataagcaatctaaaagaggcaccaccaatgatgtgttgttgntaggagggcgggccgtctggggaancaanttnnaccaaaggcaacaattgttgtanttgtaagagggttgcggggttagccccaaactgctggtagaaaggcagcaactgttgctgtgtcaagaaggaagcacggtttgctgcagctagctggctaaatggtagtagtatttgctgctgcaaataagcagcggggttcagtgcggccaattggttaaatggaagaagttgttgttgctgagagtaggcagtagctagctggctgaatggtaatagttgttgctgcaaataagcagcagggttcaatgtagacagttggttgaatggaagaaattgttgttgctggagagtagg

SEQ ID NO: 6810 - DNA, 541 bp, Zea mays
  Clone ID: LIB3061-068-Q1-N6-A2
gttgttttttttttcatacaaatccacggggggttttgttagttccaaatttccgaattccagttacttcacccacagcagcgaggaagtaaaagcttatttcacgactcatctagcaaaacacgatggcaagcctatccccaaaagtccatgtgtggaggagtaaaccttaaccttgcagcgttacaccaaggtccgaaacaagatgacacgcaaagctggcagaacctgagtagcagcagcagcagcagcagcggatctaggcgtcatcgagggcaaggacaccaggtagagtcttgccttccaagagttccaagctcgcaccgccgccggtcgaaatgtggctcatcttgtccgccagcccagccttctcgacagcagcgacagagtcgccgccgccgatgatggtagtgacacccttcgtggttgtaagctcagctagcttcttggcaatcgcctcagttccagctgcaaacttctcgaactcaaacactccctatggggccgttccaaataacagtcttggtgggtgtccaatgct

SEQ ID NO: 6811 - DNA, 465 bp, Zea mays
  Clone ID: LIB3061-068-Q1-N6-A4
gttgttggtggttttttttttttttttttccaaaagtctagggtggagtttcctccagctcactgtatttcaaattcaaatgtaagaaataatttttacacaatctttgtacagatgttcaagcacagctggatccgacgctcgagtatgcggagggcggggggtcaatcaatacctcttcatccttctctgatgaaggtcgtagaagagattgctgacaaaaaaggatccttgtgccttatgagttaaatatgatacacaggacctcaactgtcagctctttttcagtcgggtagaattggactgcttggtatcccaagaagtgccgttcgcggaggaacccagagacggcgaagatgttgaaaaatgtttttggcttttagagattgaacaaaagcaactgaaggaacttgtcaacatttttctttcgctatctttaacttaagaagctgggttataaccggc

SEQ ID NO: 6812 - DNA, 575 bp, Zea mays
  Clone ID: LIB3061-068-Q1-N6-A5
gccgtggggggtggttttttttctaaaaagtactttcttatttctgggaagccacaaacatcagacaaaaaatttattattgaactataactcataagaaactaaaagaggcaccaccaatgatgggttgttggtagaacgctgctgggtttgtcaaagcaagttggttgaatggcagcaattgttgcagttgtaagagggtgccagcgttaggcgcagcgtgctggtagaacggcaacaactgtggttgtatcaagaaggtagcagggctcacaccagctagctggctgaatggtagtagttgttgctgctgtaaataagcaggagagttcaatgctgccagttggttgaatggaagaaattgctgggggtaggcagcaggtagctggctgaatggtagttgttgttgttgcaaataagaagcagagttcaatgcagctagttggttgaatggaagaaactgctgttgctgagagtaggcagcaaggtttgctagcacaagttgttggagttgttgtgccctgatgttttgtgccataaatgcaccaaaggtaactgatgtaatagggctgatg

SEQ ID NO: 6813 - DNA, 538 bp, Zea mays
  Clone ID: LIB3061-068-Q1-N6-A6
cccgcacaactcacgcagcagccacattatgtacattggggacagtcatgaagataatttacatccgcacaacccacacagcaaccacattatgtacatcgggggcagtcatgcaacgaaggagggattacaaaacttccacgtgccttcgtggggcaaaatatgagtgctaattaaacccttatgtgtcaatttagtggggggctttgatgccaaatataatctgtcttacgatctgtacacactgtacaagtttgcacctcaccattggacgagactggcaaaggagctcctaaaaccagtttcagggagatggtgtaaggctcgccaaagaatgaaccgaccaccaatgacgtctatgcttgggagggtccctggtatttgtacatggattccttcttatgctcaggatcaaggctgttccttagcccaagaagtgcataatgtaaagcacgagcagatgctgagattggagctactgcagcagctggtgctccacagattgcagtagccagaactgatccgacaccagcccctc

SEQ ID NO: 6814 - DNA, 542 bp, Zea mays
  unsure (1)..(542): unsure at all n locations; Clone ID: LIB3061-068-Q1-N6-A8
agatctataatacttanttactgagaggtcgcacatatcagcatgagaactttattattacagtataaatcataaaaaatctagaagatggcaccaccaatggtgggcgattgcaataaggtggtgggattcgtcaaagcatgttggctaaatggcagcaattgttgttgttgtaagaaggcaacaatgtttgccacattatgtgggtagaatggcagcaattgttgctgttgcaagaaggcattaatgtttcccacaacctgtgggtaaaatggcaacaattgttgttgtcgcaagaaagaagcaatgttttccacagcttgcagatggaatggcagaagctgttgttgcagtaagaaggcatcagggctcccgacaagttggttaaatggtagtagttgttgtgcctgcaagtagacagcagggttcaccccaactagttgattgaatggaagaaattgttgttgctggagataaccagcaaggttcgctgcaactacttgattgattgttggtagcaactgttgttgtagttgttgtgt

SEQ ID NO: 6815 - DNA, 557 bp, Zea mays
  Clone ID: LIB3061-068-Q1-N6-A9
gggggggggttttttttttatcacaaaaacaaatccggatcccctttaattattgttccggatgaacgatccgagaaatgcattcatcttcttgctgtgcttattattcagacatatgagctagctacaagctcattcctcatgcactatggtggggggggttacttggagggcatcgttccgccgccgagaatccaggggcattcggcgacgccgctgatggtggccaggttgcactcggcctccgtgacgagggtggcggcgaatcccctctgcacctcccgcgggcagcccggcaggtcctctaggcggccctccagctgcgcgtccgggcccggcgggatcgcgccgtccatgaggatgctcagcgccgtgcaccggcagtacgccgggatgtccgccagctcccggcagcatctcctcttcagctccggccacgggaggcgcggcccgatgccgcaggtccggctggtcacgtaccagcggcagctcgggagcgggttgtgcgggatggcccaccccggcacgcaggaggtcccggcgctggcgctggcagc

SEQ ID NO: 6816 - DNA, 605 bp, Zea mays
  unsure (1)..(605): unsure at all n locations; Clone ID: LIB3061-068-Q1-N6-B1
cacgcgtcgttatcttggnacctctanacggccggggggttgtttgtggttttttttttttttgaagcagaatttcatgtgcttattattataagttccgaacgcaccataatcagagtccttatgaatccaccagtacaaaactgccccacggagagtgaaaaaacatatttattccgacgcaaacggggggggggaaccagtaaataccactggctgagtacttagaacattgttgtgggtgattcaggttttattcacgaaagctgggatactatcctcatttcagttgagtaactgcggcgtgtatggcatttgcaagatggggcacagtccttatgctcaaaccggccatgctgatcctcccatcagatgtcatataaatgtggtattcctgcctcatgaatgcgacttgttcgctattcagcccagtgaaagtaaaaatcccaatttgcttaatgatatgggtccaatcaccaggggtgtcctttggattccagcgcattaaatagtggttgcctcatggtaatgatcctattagccatgggctttagttccagagtccattcggtggaacatttggcttgtccctgagtggggcagca

SEQ ID NO: 6817 - DNA, 447 bp, Zea mays
  Clone ID: LIB3061-068-Q1-N6-B11
cgtacttacttggatccttaacggccggggggggggggttttttttttttttttttttttgttgtttttttttttagaaagggctttcttttggccggtggtgtggggcgttccccagaaataaaaaagggccttttttaaagggggcccccccaagaagggttgtttgtaaaacaggggggggggggggaaaacaagttggttgaatggccacaattgttgccgttgtaagagggggcccccgtttggggccacgtgctggttgaaccggaacaactgggggtgggtcaaaaaaggagcaggggttacacccactaactggctgaaagggagaaattggtgctcgggcccctggggccaccccggaatttcgggccgggacctggaggggttccaactttccctataggggggggtattaaagcttgggggaatcaagggcataac

SEQ ID NO: 6818 - DNA, 97 bp, Zea mays
  unsure (1)..(97): unsure at all n locations; Clone ID: LIB3061-068-Q1-N6-B12
caaaataaactcaatcaatatattttattattttctaaaaaaacacacctcnttttaagccccccattatcnattccatcttttttttaatctaaaa

SEQ ID NO: 6819 - DNA, 170 bp, Zea mays
  Clone ID: LIB3061-068-Q1-N6-B2
ggggtggttttttttttttttttttttttttttttttttttcaaacaaaaactttattattgaactataactcataaaaaatctaaaagggggccccaccaatgatgggttgttggtaaaacgctgctgggtttgtcaaagcaagttggtggaagggcagcaattgttgc

SEQ ID NO: 6820 - DNA, 573 bp, Zea mays
  unsure (1)..(573): unsure at all n locations; Clone ID: LIB3061-068-Q1-N6-B5
gccgggggggggtgtttttttttttttttttttttttttggaaatgtaacttcttatttctaggaggccacatacatcagccaaaaaacttcattattgaattacaactaataagcaatctaaaaaaggcacccccaatgatgtgttgttggtagagagggtggtgggtttgtcaaagcaagttggacaaagggcagcaactgttgcagttgtaagagggttgcggggttagccacaaactgctggtagaacggaagcaattgttgttgtttcaaaaaggaagtggggcttgttgtagctagctggccaaatggtagtagtatttgctgctggaaataagcagaggggttcagtgcggccaattggttaaatggaaaaaattgttgctgctgaaagtaggcagtanctagctggctgaatggtagtagttgttgttgttgtaaataagcagcagggttcaatgtaaacagttggttgaatggaagaaattgttgttgctgagagtagggagaaaggtttgccagaactacttggctgatcactggtagcaccagttgttgcaactgttgtgcc

SEQ ID NO: 6821 - DNA, 566 bp, Zea mays
  Clone ID: LIB3061-068-Q1-N6-B6
gggtgggtttttttaaaaatgtactttcttatttctgggacgccacaaacatcatccaaaaaacttcattattgaactataactcataagcaatctaaaagaggcaccaccaatgatgggttgttggtagaacactgttgagtttgtcaaagcaaggtggttgaatggcagcaattgttgcagttgtaagagggtgccagcgttaggcatagcgtgcaggtagaacggcaacaactgttgttgtgtcaagaaggcagcagggctcacatcagctagctggctgaatggtagtagttgttgctgctgtaaataagcagcagagttcaatgctgctagttggttgaatggaagaaattgctgggggtaggcagcaactagctggctgaatggtaattgttgttgcaaataagcagcagagttcaatgcagccagttggttgaatggaagaaactgatgttgctgagagtatgcagcaaggtttgctagcacaagttgttgtagttgttgtgccctgatgttttgtgccaccaaatggaccaaaggtaactgctgtaatagggctgacg

SEQ ID NO: 6822 - DNA, 485 bp, Zea mays
  Clone ID: LIB3061-068-Q1-N6-B7
gcggggggggtgttttttaagaactagaaatgtactttcttatttctgggaagccacaaacatcagacaaaaactttattattgaactataactcataagaaactaaaagaggcaccaccaatgatgggttgttggtagaacgctgctgggggggggcaaagcaagttggttgaatggcagcaattgttgcagttgtaagagggtgccagcgttaggcgcagcgtgctggtagaacggcaacaactgtggttgtatcaagaaggtagcagggctcacaccagctagctggctgaatggtagtagttgttgctgctgtaaataagcaggagagttcaatgctgccagttggttgaatggaaaaaattgctgggggtaggcagcaggtagctggctgaatgggagttgttggtgttgcaaataagaagcagaggtcaatgcagctagttggttgaatggaagaaactgctgttgctgagaataggca

SEQ ID NO: 6823 - DNA, 479 bp, Zea mays
  Clone ID: LIB3061-068-Q1-N6-B8
gccgtggtgggggttttttttttaacatcataatgtatgggactttattgcttaacaccgttatatgagtataacgggtaggtagacacaattcttcaattgcaaacaccactaatgtcattgctgctgcatggattattttggtagtatggggggggggggccgcacattgatggtaggtattgtgctgctgtcaagattgccaccgcactttgagtagcttgttgagatccacataactcacatggttgttgttgttgctcctcctggattatggattgaaccatgttgtaaattgcttggtgaatgtattgtggctcaatctgcctaagatcatgacaacattgttgctgcaatacctggcagctacttggttgtatcaaacgtgattggagaaaaggcattaccaaagggctgcgctgctgccttaggaattcatgacaattttttagatttgagctactgctatagtagttata

SEQ ID NO: 6824 - DNA, 70 bp, Zea mays
  Clone ID: LIB3061-068-Q1-N6-B9
ggggataaatctcatgcaatatattgattatttctaggaaacacacgtcggtatgaggggcacctttatc

SEQ ID NO: 6825 - DNA, 462 bp, Zea mays
  unsure (1)..(462): unsure at all n locations; Clone ID: LIB3061-068-Q1-N6-C10
gcgggggttggggggggggtgntttttttttttcacattaaaaatgctggagatgtaacttcttatttctggttggccacatacatcatccaaaaaactttattattgaattacaactaataagcaatctaaaagagggcaccaccaatgattttttttggggggggggggggtctttctttcaaancaagttggacaaagggcaacaattgttgtagttgtaagagggttgcggggttagccgcaaactgctggtagaaaggcagcaactgttgctgtgtcaaaaaggaagcacggtttgctgcagctagctggctaaatggtagtagtatttgctgctgcaaataagcagcggggttcagtgcggccaattggttaaatggaagaaattgttgttgcttagagtaggcagtagctagctggctgaatggtaatagttgttgctggaaataagcaacaggg

SEQ ID NO: 6826 - DNA, 204 bp, Zea mays
  unsure (1)..(204): unsure at all n locations; Clone ID: LIB3061-068-Q1-N6-C11
ggggggggtttttttttttttttttttttttttttctgggaccccacaaacatcatccaaaaaacttcattattggaactataactcattaagcaatctaaaaaaaggcccccccccaataatgggtttttttggtaaaaacactttttnntttttttcaaaggcggggggggtggaatnccaacaaatttttccctttttaaa

SEQ ID NO: 6827 - DNA, 550 bp, Zea mays
  Clone ID: LIB3061-068-Q1-N6-C12
ggggtggttttttttttttttttttttcatccaaaaaacttcattattgaactataactcataagcaatctaaaaggggcaccaccaatgatgggttgttggtagaacactgttgggtttgtcaaagcaagttggttgaatggcaggagggggggcggttgtaaaagggtgccagcgttaggcatagcgtgcaggtagaacggcaacaactgttgttgtgtcaagaaggcagcagggctcacatcagctagctggctgaatggtagtagttgttgctgctgtaaataagcagcaaagttcaatgctgctagttggttgaatggaaaaaattgctgggggtaggcagcaactagctggctgaatggtaattgttgttgcaaataagcagcagagttcaatgcacccagttggttgaatggaaaaaactgatgttgctgagagtatgcagcaaggtttgctagcacaagttgttgtagttgttgtgccctgatgttttgtgccaccaaatggaccaaagtttactgctgaaatagggctgacggttgttgga

SEQ ID NO: 6828 - DNA, 443 bp, Zea mays
  Clone ID: LIB3061-068-Q1-N6-C2
aaaacccaaccaaattttggttttttttaagaaaaaaaaccccgggttgggggcccccttttgggggcccctttttttggaaaaaaaaagagggggccccccaaaggggggggggggcccccccaagggggggttttaaaaaaaaaaccgggggggggggaaaaatttttttttttttggagggggcccccccaagggggggcccccccccaaagggaaaaaaaaccgggggcccttgggggggccccccaaaaaggtccaaaaaattttggggggaaaaggaaaaaatttttaaaaagaggaaaaaaggtttcccccactttggggggatagaggggggcaaaattggggaaaaaattttttttgggggttttgggggggtttgggcccagaggggggggtaaaaaaaaaaaatttttttttttttggggaggggggggggt

SEQ ID NO: 6829 - DNA, 382 bp, Zea mays
  Clone ID: LIB3061-068-Q1-N6-C3
ggggccaaaacaataagggggggggtttttttgggtaaacccccttttgggggtaaaagggggggggaacccaattttttttttgggaacccccccattgggttttggggggggggggtttttttggggggggggggggggccccccccccccttgggggggggttttgggccttttaaaaaatccccccccccttttggggggggggggggaaccccaaaaaccaaaggggggggggggggggcccccccgggattaggggaaaacccccttttaaaattgggggggaaaagttttggggccaaattgcccaaaaaaaaaaaaacattggggggggaaaccccggggatttttggggggttaaaaacggggggggaaaaag

SEQ ID NO: 6830 - DNA, 571 bp, Zea mays
  Clone ID: LIB3061-068-Q1-N6-C4
ggggtgttttttttttgagacgaaagacaaccttgttcatgcatctacgttccatttcgtagattggttccatactgcgcattttcacttgtacagattctaaactaaactactacaggatattagaatcaacaagaccagatatatagctccaagggaaccatagtcatctttcgagaaagatccatagaaaactgctagtatgtagcaacgagaggtgagaagattacccttgtcctatgctccaactctcaaaggttctccatctggatattgctcttgagtggcacgtactccccaaggtagcctccaaggtgctcatacaatgcagtgcggtcaatctgctggctgtggaaggccttgcaggcgtagtagaagacactctgcacgagcagtcctagcagattgacagagacaagaacgcacaccagcacgggggccgacaagcagccggccaggcaaggccaggccgaagctcccctcctcggtgcgtcccttaacgacagcggcacgggaacagcaacgaggtcgcgccacaaaccgcggaataggagacgactagcgtggctgc

SEQ ID NO: 6831 - DNA, 575 bp, Zea mays
  Clone ID: LIB3061-068-Q1-N6-C5
gttggtgtttttttttggaaatgtaacttcttatttctaggaggccacatacatcagccaaaaaacttcattattgaattacaactaataagcaatctaaaagaggcaccgccaatgatgtgttgttggtagaaggctgctgggtttgtcaaagcaaggtggacaaagggcagcaactgttgcagttgtaagagggttgcggggttagccacaaactgctggtagaacggaagcaattgttgttgtttcaaaaaggaagtggggcttgttgtagctagctggccaaatggtagtagtatttgctgctggaaataagcagaggggttcagtgcggccaattggttaaatggaagaaattgttgctgctgagagtaggcagtagctagctggctgaatggtagtagttgttgttgttgtaaataagcagcagggttcagtgtagacagttggttgaatggaagaaattgttgttgctgagagtagggagaaaggtttgccagaactacttggctgatcactggtagcacgagttgttgcagctgttgtgccctgatggtttgtaccaatgactgcac

SEQ ID NO: 6832 - DNA, 544 bp, Zea mays
  unsure (1)..(544): unsure at all n locations; Clone ID: LIB3061-068-Q1-N6-C7
tgggggggtgaggaaccggacgcgtgggaaggcgcgaacgcgagccccatcagtcgtcgcgcttcttgagcttgtcgacgcgctgctgcatctggtcgagcctgacgacgagctgggtgacggagaagaggatccagtanaggaggagcgcggcggcgatgaggagcgcgttgcgctgcgacttcatgacggacttgtggtggcggaggtgctcggagggggtgcaggcgtgctcgtcgtcgcaggtgggccgcgtctcgtacttccagtagatgtccatgagcaggaagaggcagaagggcaccacggacatcatgggcttgagcgcgctccgcaccacggagaccatgccccggcgcaggccgtccagccccggcagcgtcagcagcagcagcatgaccgcctccgcgcccgccgcgtagcccagcaccacccactccagcgccatggccggtggatcgaggcctcgatctgggtcgagcgggaggagggaactgggaagatttggggatttggggtgagcattcaggaacacaccaagcga

SEQ ID NO: 6833 - DNA, 544 bp, Zea mays
  Clone ID: LIB3061-068-Q1-N6-C8
ggcattccacacgcaaccgatcgatatgacgattatactcctatttattagcaccagctatatatagccatgtctggagtctggagtctggactagcaagcaaccgagatcgatgcatgatacagagatagattcatcgggttgcatgagcatggcttgttgccagccactatgttacacccaccacgcatgtacaaagttctgtatcgtcgcatcgcctccgcctgatgatgatcgatcagtgcagcgccgtcaggacagtagacccttccaccaccttgaaagtggcaccgcagatctcttcttcgtcggcggggacagcggtgaccttgtgcttggggttctcgtagcacttgagccctccgagggcgttggagtagaagcagccttgcgggaacggcgcgagcgacttgccgcatgagcctttgagcatgtcgatgtcctcggagaaggcgacgcagccgtcggcggtgatcccccagaagagcggcaccctgcccttggggtcctgggggcggaggagcgcctggttggtgtgggagta

SEQ ID NO: 6834 - DNA, 538 bp, Zea mays
  Clone ID: LIB3061-068-Q1-N6-D1
ggggtggttgttttttttttttttttttaaaatctggaaatgtaacttcttatttctggttggccacatacatcatccaaaaactttattattgaattacaactaataagcaatctaaaagagggcaccaccaatgatgtgttgttggtgggaggccggtcggtctgtcaaagcaagttggacaaagggcaacaattgttgtagttgtaagagggttgcggggttagccgcaaactgctggtagaaaggcagcaactgttgctgtgtcaagaaggaagcacggtttgctgcaactagctggctaaatggtagtagtatttgctgctgcaaataaacagcggggttcagtgcggccaattggttaaatggaagaagttgttgttgctgagagtaggcagtagctagctggctgaatggtaatagttgttgctgcaaataagcagcagggttcaatgtaaacagttggttgaatggaaaaaattgtgttgctgaaagtagggagaaaggtttgccagagctacttggttgatcacaggta

SEQ ID NO: 6835 - DNA, 586 bp, Zea mays
  Clone ID: LIB3061-068-Q1-N6-D10
gggggggggggggtttttaaaatgctaatgggccatgggagaaactgttgatatttgccattcatcagcctctcatttactatgtgttgcttgaacagttacaattgaacatagctgttgaaatcctaaactcactaaactgcatgttctgaagaggggggcggggggctaagctagggcacttcatacaagtgattgtttagttttccacgaaaggatccttcaagaccaccagagtccagaggtcattgtgtaggggtactattgtagccgcttgcaaataaattcatatgggggaactttgtcaacatttccccagctagccattgtgggttgcgtagctagcatcttcctggcaaatgttgcaacatcatctagagtaatttcttccatacattgaaggaagtagtcaataggcttcctgcaaccataagataacagctgccttccaatatctttggcaacaactaccctagattcaagattcattaatacagatggaaatcgttggaatttttttgctcggttgcagttcaacccattgtcactttttccaggaggtggcgacagcaatttaattcactta

SEQ ID NO: 6836 - DNA, 533 bp, Zea mays
  Clone ID: LIB3061-068-Q1-N6-D11
ggtgtgtggtttttttttttttacgaagaaccggcgccagtactatctggcactggcaacattcccattttatcctcatagttattatcattattgtacgaacacgcgagaatattgcgagcccacgtcagagctacgtcattctgggttggggcgcgcacagtacacatgctgcgccttgcacgtcgcgccgactcactcttttttttttaaccctggtagctagtactggtcgccgccggagaagatgctgcactcctggggctccgacaggcggcacatcatcggcaaccccgcggcgtactcccgggccttcgtaagcctcacgcggccgatccttggcccggtggtgccgggacgacacggtggatacatctgcgtttggtatccctctcctgcccggctgcaggggtagtagtagcccccctgtcctcctcctcctccctgcggcggcggctgctgctgccgcccccatggccaccagcctttctccagagcgggatgggcctcctcgtagcccctgaccatgctcc

SEQ ID NO: 6837 - DNA, 149 bp, Zea mays
  Clone ID: LIB3061-068-Q1-N6-D12
gtgtggtgtgtggtgttttttttttttttttttttttttaaataatcttgtatacactccaaaagttgtgatatgaataaaccaaacagccaaagggcatgaccgtctctcgatcgatcctggctctctctctctctctctctctctct

SEQ ID NO: 6838 - DNA, 563 bp, Zea mays
  Clone ID: LIB3061-068-Q1-N6-D2
attaattacgatttaccaactttattatcacaacaaaggacactcaaacccgcccgactcgtttacagacatgatgacgcagaaaaaacacagcaacgtacatgcgaatcaaacttacaacaccaaatttcgtagaaaaggaaaccatgacacttgaaacacatgcacaaccctatactggactcgcgaacaagcaaacagggtcacggacgacaggatcggaccaagtgctgcgtgtgcatacacgcgtctagtgatccctggtgatggtagaggagtccttgttggtgttggtgttggcgtcgccctgcttgtcgtccccgcccatccccagcgtgctcatcaccgcgtccttggcgcccgccgccgcgctcttcacctgctcagtggcctgctggatgacgccgccggacttgtccttgccggagacggcggtgtccttggcgtactgcccggcctcggcggccttctgcttggctgcctccatggcgtcggctgccttctgcctagcggcctccgtcgtctcgccggccttctgcttggtcgcctccgtcgtctcgctg

SEQ ID NO: 6839 - DNA, 570 bp, Zea mays
  Clone ID: LIB3061-068-Q1-N6-D4
ggcgtgggggggttttttacagaaaacatatatcaattattgtataaacctattaaaggttaaaaccaattttaatttggaacagaaggagtactttttttcttttcatttcaattgttcattcaggtcattgctcacactgacactgccacccatgggggtgcgtgacacattattactcaatcatcgccgctaaatgactcaactagctagctagccagcggctatactacagcacatagtttcttcagtgggggacaccgccggcagcagcgtaggggcatggagtcggctgctgcaggccgcacatcgccgtcagttgctgcgctatctgcgccgccaacaggcccgcgacctggccgctttgcggctgctggtgcaggatggactggaggaccaagccgaagatcgcctggtaccggtgctgggggtccacctgcctgagctgctggcaacactgctggcgtaactactggcactgaggggagcagtagggcgtttgtcgtggggcttcactgatgccttaggaacttgacgcactggcccaggatcggggtgctgccaacgccg

SEQ ID NO: 6840 - DNA, 59 bp, Zea mays
  unsure (1)..(59): unsure at all n locations; Clone ID: LIB3061-068-Q1-N6-D6
ccccccggggggtttttttttttttttttttttttttttttttttttttttttgntttt

SEQ ID NO: 6841 - DNA, 558 bp, Zea mays
  unsure (1)..(558): unsure at all n locations; Clone ID: LIB3061-068-Q1-N6-D8
gtgttgttttttttttttttttttttttttttttggataaacctattaaaaggttaaaaccaattttaatttggaacagatggagtactttttttcttttcatttcaattgttcattcaggtcattgctcacactgacactgccacccatgggggtgcgtgacacattattactcaatcatcgccgctaaatgactcaactagctagctagccagcggctatactacagcacatagtttcttcagtgggggacacccccggcagcagcgtaggggcatggagtcggctgctgcaggccgcacatcgccgtcagttgctgcgctatctgcgccgccaacagccccgcgacctggccgctttgcggctgctgctgcaggatggactggaggaccaaacccaagatcgcctggtaccggtgctgcggctccacctgcctgagctgctggcaacactgctgccgcaacgactggcactgaggcgagcagtagggcgtcnccctcgggctgcactgatgcctcaggaactcgacgcactggcccaagatcggggtgctgccaa

SEQ ID NO: 6842 - DNA, 155 bp, Zea mays
  unsure (1)..(155): unsure at all n locations; Clone ID: LIB3061-068-Q1-N6-D9
gggtgttttttttaaaaactaaaatgtactttcttatttctggggcgccaccaaacatcatccaaaaanacttcattattgaactataactcataagcaatctaaaagaggcaccaccaatgatgggttgttgggtagaacactgttggggtttt

SEQ ID NO: 6843 - DNA, 500 bp, Zea mays
  Clone ID: LIB3061-068-Q1-N6-E1
gcgggtgtggggggttttttttttttttttttttttttttttttttttcgcgcaacattttgatttactcagcaacacaaacagtacagttatacacttggaactttaaaaactttacaagcctcagcataagaacaggggggagaataacttaatggggggggggggattaaagaatgatacattacattcaacacctacaagatctcactgtaagtagatctggttgactacatcagggggataatttacataacctctggtatacatttggacagatcattcttaagcaccaagcacttcctcaatccaacttatgccccatcaaaatataattgcaaaggctttgggtttcagtaactcaccggggagcaatgcaagggcgttcaaaattggtgggactcctttttgaattagcatgttttcttttgggtcaaagttggtatgtgaatgaggtttgctttttgcggcctttctcatgtgtgtcttctattaagctg

SEQ ID NO: 6844 - DNA, 520 bp, Zea mays
  unsure (1)..(520): unsure at all n locations; Clone ID: LIB3061-068-Q1-N6-E10
gggggggggggggtgtttatttacacagtttagtttaaaataaatacggcgataaatattcgaacggggggtcaacgtatgaagtacacactgaagccagcctactacaacatatagaatcctcacacggggggggggggggcancaatantacttctcatnacactttatagttttcctagatcacatactacgggtataaagttcctcccaatctgcataattctcagctgcccactctgcatcagttaaaccttcatagcaactgtggtgctcaacctcaactgaatcatcacaactgggaggactagggtcatccatatccataagaccgcaaacagatgctttttcttgtgacatgtgttctactctcgacaacacttcattcaaattcattgtgcacaagtcgtagtgcttcattttcacaactgacgaatgacatccgttttttacttctttgaacctacagaacggaatggttggatgaggtgctggactcaggggatttgggggtgccaac

SEQ ID NO: 6845 - DNA, 550 bp, Zea mays
  Clone ID: LIB3061-068-Q1-N6-E11
ggggggggggtttttttcaaacaaaaaactttattattgaactataactcataagaaactaaaagaggcaccaccaatgatgggttgttggtagaacgctgctgggtttgtcaaagcaagttggttgaatggcagcaattgttgcaggggggggggggggccagcgttaggcgcagcgtgctggtagaacggcaacaactgtggttgtatcaagaaggtggcagggctcacaccagctagctggctgaatggtagtagttgttgctgctgtaaataagcaggagagttcaatgctgccagttggttgaatggaagaaattgctgggggtaggcagcaggtagctggctgaatggtagttgttgttgttgcaaataagaagcagagttcaatgcagctagttggttgaatggaagaaactgctgttgctgagagtaggcagcaaggtttgctagcacaagttgttgtagttgttgtgccctgatgttttgtgccaataaatgcaccaaaggtaactgatgtaatagggctgatgattgttggaggaacact

SEQ ID NO: 6846 - DNA, 535 bp, Zea mays
  Clone ID: LIB3061-068-Q1-N6-E2
cggcaaaactttgatgaacttgtattagtgaccgcatcaagaagtttaacagactgcatttgacactaaccagcagtcacaggattatgatcgcagggagtcgtagatcaggattcacactcgccagttttcataggctggggacatcaatagatgaatcctttgaatgcagacaaagggcatcgttgatatatcttgctcaacattgcgccgcagaatctctagtcaacaaataatcaactattgttgagttggtattgaccccaacaccatccacatatagatgctcatgccttccgacgaccgacttgagcaacgaatccagctttgattggagcaacggaccttgaagatccacactgttcgcagcgaaggaagaacagacgattttccttggacagaatggtatcagggctcttgcatccattgcagatgacgtactcattgatgtatctcctcaggattgcttcaaagtttttgggggcaaatcttcctttgatcaccaacctttgctgcccatcaagtgacccgcttg

SEQ ID NO: 6847 - DNA, 570 bp, Zea mays
  Clone ID: LIB3061-068-Q1-N6-E4
gcgcgtggggttttttttttggaacaatacttttttcttttcatttcaattgttcattcaggtcattgctcacactgacactgccacccatggtgatgcgtgacacattattactcaatcatcgccgctaaatgactcaactagctagctagccagcgggtatactacagcacatagtttcttcagtgggggacaccgccggcagcagcgtaggggcatggagtcggctgctgcaggccgcacatcgccgtcagttgctgcgctatctgcgccgccaacagccccgcgacctggccgctttgcggctgctgctgcaggatggactggaggaccaagccgaagatcgcctggtaccggtgctgcggctccacctgcctgagctgctggcaacactgctgccgcaacgactggcactgaggcgagcagtagggcgtcgccgtcgggctgcactgatgcctcagaaactcgacgcactggcccaggatcggggtgctgccaacgccgcaggttccctgcagctggcacgggcttggatgcggctgttggcaccggcatgggtgtggctgggga

SEQ ID NO: 6848 - DNA, 548 bp, Zea mays
  unsure (1)..(548): unsure at all n locations; Clone ID: LIB3061-068-Q1-N6-E5
ggtgggggggggggtttttttttttttatccaaaaaatttattanttgaattacaactaataatcaatctaaaagaggcaccaccaatgatgtgttgttggtaggaggctgctgggtttgtcaaagcaagttggacaaagggcaacaattggtgggggggggagagggttgcggggttagccgcaaactgcttgtagaaaggcagcaactgttgctgtgtcaagaaggaagcacgacttgctgcagctagctcgctaaatggcagtagtatttgctgctgcaaataagcagcggggttcagtgcggccaattggttaaatggaagaagttgttgttgctgagagtaggcagtagctagctggctaaatggtaatagttgttgctgcaaataagcagcagggttcagtgtagacagttggttgaatggaagaaattgttgttgctgagagtagggagaaaggtttgccagagctacttggttgatcacaggtagcacgagttgctgcanctgttgtgcccttgaggtttgtaccaatgactgcaccaaa

SEQ ID NO: 6849 - DNA, 565 bp, Zea mays
  unsure (1)..(565): unsure at all n locations; Clone ID: LIB3061-068-Q1-N6-E7
gcgtggggggggtttttttagaaagtactttcttatttctgggaagccacaaacatcagataaaaactttattattgaactataactcataagaaatctaaaagagggcaccaccaatgatgggttgttggtagaacactgctgggtttgtcggggcgggggggttgaatggcagcaattgttgcagttgtaagagggtgccagcgttaggcgcaacgtgctggtagaacggcaacaactgtggttgtgtcaagaaggtagcagggctcacaccagctagctggctgaatggtagtagttgttgctgctgtaaataagcaggagagttcaatgctgctagttggttgaatggaagaaattgctgggggtaggcagcangtagctggctgaatggtagttgttgttgttgcaaataagaagcagagttcaatgaacctagttggttgaatggaagaaactgctgttgctgagagtaggcagcaaggtttgctagcacaagttgttgtagttgttgtgccctgatgttttgtgccaataaatgcaccaaagtaactggtgtaatagg

SEQ ID NO: 6850 - DNA, 508 bp, Zea mays
  Clone ID: LIB3061-068-Q1-N6-E8
ggcgcgcggggggggggggttttttttttttttttttttttttttttttttttttttttttttttttttttaaaaagctgaaatgcattgaacttttttattacaaacaggtacatgatttggaagggtttccttttgcgagcgaaactaggtgatgggggggggggggggacattctaacttataaaaactctccttcggggtggggggggcaagttttgtttaattagattcaatcacgggggggtcagatcctttttattggccacttgggtctcaaacctccaacaaatgagctttctcgttcaaaatcgtcccaaacccttcccatagctcccatagctcattccgtaaccatgacaagtccatgacagggcccaatgtcgatggccccaggtacaataagggtgggtgaggagactgaaacaagatcccaacagctagggcagctaccaagccaataccataacctgttacagcataccacacataattccccccttttggg

SEQ ID NO: 6851 - DNA, 567 bp, Zea mays
  unsure (1)..(567): unsure at all n locations; Clone ID: LIB3061-068-Q1-N6-F1
gccgcctgggtgttgtgttttctaaaaagtactttcttatttctgggaagccacaaacatcatccaaaaaacttcattattgaagtataactcataagcaatctaaaagaggcaccaccaatgatgggttgttggtagaacgctgttgggtttgtcaaggggaggtggttgaatggcagcaattgttgcagttgtaagagggtgccagcgttaggcgcagcgtgcaggtagaacggcaacaactgttgttgtgtcaagaaggcaacagggctcacatcagctagctggctgaatggtggtagctgttgctgttgtaaataagcagcagagttcaatgctgccagttggttgaatggaagaaattgctgggggtaggcagcagctagctgactgaatggtagttgttgttgcaaataagcagcagaattcaatgcanccagttggttgaatggaagaaactgctgttgctgacagtaggcagcaaggttttcctagcacaagttgntgtaggttgttgtgccttgatgttttgtgccaacaaatgccccaaaggtaactgctgtaata

SEQ ID NO: 6852 - DNA, 403 bp, Zea mays
  unsure (1)..(403): unsure at all n locations; Clone ID: LIB3061-068-Q1-N6-F10
cacgcgtnacgtnaatcttggnatcctcttaaacggccggggtggtggggggggttttttttatttttttttttttgagcattataattacaattagtattcttattcaaatatcatagtacaaacatcataatgtatggtactttattgcttaacaccgttataggagtataaccgctaggtaaacacaggggggggggggggaacaccactaatgtcattgctgctgcatggattattttggtggtatgagtggtacaagccgcacattggtggtaggtattgtgctgctgtcaagattgccaccgcactttgagtagcttgttgagatccacataactcacatggggtgttggtggtgctcctcctggattatggattgaaccatgttgtagattgcttg

SEQ ID NO: 6853 - DNA, 517 bp, Zea mays
  Clone ID: LIB3061-068-Q1-N6-F2
atcgagataaatctcaatcaatatattgattatttctaggaaacacatgccgctatgagggcaccattatcgagtacatctcatatgtaatctaaaagatggcacctccaacgatgggttgctgctgtaggaaggcagcgaccaatgggttagccaccgctagtggattaagtaactgttgtcgctgttgtaggtacccagcagagttcgacacagtcagttggttgaatggaagcagctgttgcaagtaggcagcagggtttgccacagctagctgagtcagagctggtacaatctgttgcagcaactgttgttgcaggtatgtaggtgcattaaccacagcgagagggctagatgaaatcagttgttgctgttgtaggtaggcggcagggttcaccatggctagttgactgagcgctggtagaaactgttgcaattgttgttgttggtggtatgcaactatgtttgccagagcaagtgggttggatgcaagcaactgctgttgcaagtaggcgac

SEQ ID NO: 6854 - DNA, 472 bp, Zea mays
  Clone ID: LIB3061-068-Q1-N6-F4
gccttgggggggttttttttttttttttttttttttttttttttttttttttttttttttttttttatatcacaagaacaaatccggatcccctttaattattgttccgggtgaacgatccgagaaagcattcatcttcttgctgggcttattattgaggcgtatgagctagctacaagctcattcctcatgcactatgctcttcgcagttacttgggggggattgttcccccgcccagaatccaggggcattcggggacccccttgatgggggccaggttgcactcggcctccgtgaccagggtggggggaaatccccttttcacctcccgcgggcaggccggcaggttctttaggggggctttcaactgcgcgtccgggcccggggggatcgcgccctccatgaggatgcttagcgccttgccaccggcataccccgggatgtccgccagctcccgggagaattttcttt

SEQ ID NO: 6855 - DNA, 510 bp, Zea mays
  Clone ID: LIB3061-068-Q1-N6-F5
gctgtgtggggggtttttttttttttttatttttttttttttttttttttttttttttttttttttttttttttttttttttttttttttttttttttttttttttttttttttttttttttttttttttttttttttttttttttttaaaaaggggggggggggttttttttttgggggggcccccaaacaaaaaaaaaaaaattttttttggggccttaccccaaaaaaaaaaaaaaaggggggcccccccaaagggggggggggggaaaaaaaccggggggtttaaaaaaaaaagggggggaaaggggaaaaattttggcctttaaaaaaggggcccccctttagccccccggtgttgaaaaaaacaaaaaaattgggggttgtaaaaaaaggggggggggcacaaaaaaaaaatggggaaaaaaaaaaaattttttttccctttaaaaaagaggaggagaaaaaaccctcccatgggggaaaaaaaaaaaaattgggggggggggg

SEQ ID NO: 6856 - DNA, 501 bp, Zea mays
  Clone ID: LIB3061-068-Q1-N6-F7
ggctgggggggtggtttttttttttttgagataaatgatgagactttatttgccttgttttatattattataattgtaacatcacgatacaccagaacgatttttattcaattcggtaattactgaaatcaacgatgacgggtaaaactcggaggacgggggtgcccatacccaatacagctacaactgtggcattggagagcaaactaccatgctataacatatatattattagtattaagactcctccgttagtttagaccagcaatggtgtcgactttccctcacactctgaaacgagttaagcacatgagctcctaaaaagtaggtgcggagaaaggattggcaggaagcccaaagggcagaagacgatggggaaacggccccccagacctgtttcggtcacttggagctgtggccggcctctgcgcgttcatgcaatctacatgtgaggagtctgctccctttaggaggctcatcactcgggaagaataagccgat

SEQ ID NO: 6857 - DNA, 550 bp, Zea mays
  Clone ID: LIB3061-068-Q1-N6-F8
atcgaggaaaatctcaatcaatatattgattatttctaggaaacacatgtcggtatgagggcaccattgtcgagtacatctcatatgtaatctaaaagaggcacctccaacgatgggttgctgcaaggcagggttcatgaaagagaactggttgtatggcagcaattgttgttgctgctgcaggaaggtagcgaccaatgggttagccactgccaatggattaagtaactgttgtcgctgttgtaggtacgcagcagagtttgacacagccagttggttgaatggaagcaactgttgtaagtaggcagcagggtttgccacagctagctgagtcagagctggtacaatttgttgcagcaactgttgttgtaggtacgtaggtgcattgcccaccgcgagcgggctagatgaaagtagttgtaggtagacggcagggttcaccatggctagttgactgagcactggcataaactgttgcagctgttgttgttgctggtatgcagctacgttcgccagagcaagtgggttggatgcaagcagctgctgttgc

SEQ ID NO: 6858 - DNA, 571 bp, Zea mays
  Clone ID: LIB3061-068-Q1-N6-G1
ggtgtgggttttttttttttttttttttttttgagataaatctcaatcaatatattgattatttctaggaaacacatgccggaatgagggcaccattatcgagtacatctcatatgtaatctaaaaaaggcacctccaacgatgggttgctgcctcgacaagacagggtttatcaaagagaactggttgtatggcagcaattgttgctgctgtaggaaggcagcgaccaatgggttagccactgctagtggattaagtaactgttgtcgctgttgtaggtacccaacaaagttcgacatagtcagttggttgaatggaagcagctgttgcaagtaggcagcagggtttgccacaactagctgagtcagagctggtacaatctgttgcaacaattgttgttgcaggtatgtaggtgcattggccacagcgagcgggctaaatgaaagcagttgttgctgttgtaagtaggcggcagggttcaccatggctagttgactgagcgcttgcagaaactgttgcagctgttgttgtggctggtttgcaactacgtttgccaaaacaagtgggtttg

SEQ ID NO: 6859 - DNA, 486 bp, Zea mays
  unsure (1)..(486): unsure at all n locations; Clone ID: LIB3061-068-Q1-N6-G10
ctctaaacggccgggggggggggggggtttttttataaaaagtactttgttatttctggggacgccacaaacatcatccaaaaaacttcattattgaactataactcataagcaatctaaaagagggcaccaccaatgatgggttgttggtaaaacactgggggggggggggggggcganttttttnaattncancaattntttcanttntaaaaaggtgccaactttaagcataacttgcangtagaacggcaacaactgttgttgtgtcaagaaggcagcagggctcacatcaactagctggctgaatggtagtagttgttgctgctgtaaataagcagcagagttcaatgctgctagttggttgaatggaagaaattgctgggggtaggcagcaactagctggctgaatggtaattgttgttgcaaataaacatcaaagttcaatgcagccagttggttgaatggaaaaaactgatgttgctg

SEQ ID NO: 6860 - DNA, 509 bp, Zea mays
  unsure (1)..(509): unsure at all n locations; Clone ID: LIB3061-068-Q1-N6-G11
ggcggggggggggggggttttntaactctaatatntnattcaattccacatacccaaattctgaacatctcttgaccaaactgcatcngatacgtccgatgtccagaacgatgtattcttcgcaacaggcaccaaaatctcgtcaaacaggggggggggggggggacanacaaaaaaaaccccaggggtgcctgccgcggcaatctgctgcgcacgggcgtcgggccgccggctacatcaagtaaccttcgacgctaccgtcgtccgaggggcgaccgtgctcgctcatgctccccctcagcctgtagaagctgcccctccccttggtgcgcagcgggccggaccagtcgtacatcgccagggactcgatcttgtccagcaccgcgctcgacgccgaccgtggcctgcgctcgtcggcgccggcagggtccgagccgtatcccaagggggagcgccgggcccccgatggccggcgggtcgtcgttccaccagctcctgctgacgtcgtt

SEQ ID NO: 6861 - DNA, 574 bp, Zea mays
  Clone ID: LIB3061-068-Q1-N6-G4
gtgtttttttttttttcgcaaatgatacttttttattacacatacagcacttccatacagtaactacaaggactgccttcatcttgtcaataatgtgaatcacgacaaatccaaaatcacaacatgaaacaaaatgatagattccacgcgtaaggtacccccctcacttagcattcttagacaggtaattcttttctccatctcctcagtttccttccctagaggtaaactaaaacacgttcagtaaggtcggtatcgccaatccgaccttgatctgctgcttccgctgctggggccatagccgtaattataatctagaccaccgcagaacctgccaaaagatctcattgaaccataagctccgtaaaggtccatgggatcaatgtaaccaccaccagctgaatcattctcaagtggtgcagctgtgtctattgcaacctcatggcccagaatttcatggcttctacgagatacccgttctgccacaccctcatcagcgaaggtgacaaacccaaaacctcggtggccacttcttttggggtcctttggaatttacgcatttacgattcgacca

SEQ ID NO: 6862 - DNA, 528 bp, Zea mays
  Clone ID: LIB3061-068-Q1-N6-G5
gcccgggcgcactgggccatgcacgagtaccgcctcctccccgccggcctccacccctatggctgcgccgccggcgccggcgccaacgcgcctccgcccactaatgtgagctcccacggcggcgacgcggcggccgactgggtggtctgccgcattttcaggagggccaggccggcccaccgcgcccgccttggtggtggcgccagggaggaactagaagaggagcacgcggcggaggagagcccgtcgtcctgcgtcaccgacgcctccgagaccctcgaccaggaagaggatgacggcgacgaagggagcagcagcagcaccgtcgcctcctctaactgagactgagtagaagagttggctaccccatgtcgatcagatcgcgggcgccatgttctaattgccgtagaagcctcatcatcagtacctagttgcaatcaatagagagacaagaagatcggcctccaacaaaccaacaaaaaaaaagctaagcgctttggtggtatgttgctgttggagctcgtcgcg

SEQ ID NO: 6863 - DNA, 436 bp, Zea mays
  Clone ID: LIB3061-068-Q1-N6-G8
ggggggtttttttttttttttttttttttttttttttttttttttttttttttttttttttttttttttttttttttttttttttttttttttttaaagggggaatccacaacccccccccaaaatcccccaaaacaatcctagggggagaaagggcggaaccgcccctttataaaggtccctttttcccaggaggaaaaacccaactttttacaagacccccccccacccccaaaccctaacaaaaaaggaaaaaaatcccctaaataaagctatatccccctttaaaatttccatcccccttaaaaaaatttacttttccccccaaaaaaaaccttaaaaaattgcaccctcaaccttaaacccccaaaacccgaaggggccccactttttttttcattcaaccacttcacaagtggggggtataccctcgggg

SEQ ID NO: 6864 - DNA, 584 bp, Zea mays
  unsure (1)..(584): unsure at all n locations; Clone ID: LIB3061-068-Q1-N6-H1
gcttgggggggggttttaaaaaaaatccanaccatcctgcatctattcttcaagccgcgaattatgaaaacctacaaacagttggtcacttggtattggtatagagaaggtaaaaaaaacttcgaaccaacttcatataccattgtgcggcgccggacgtgaagccacgaactaggtggccacaaacagcaggggcaagttcatgtatgctatacccaactgagaacgctacagaacaaatacccaaaatactctcaatgatttatagaatgtgctgattgaatggttgcggagatggcttatgcctaggggtcccatcacatgtgactggtttcagctcccaggttgtggagctggctcttcggtggttggtgcaggtctttgttgaaggagaggcgaaagcgccttaacaacgatgctcatgttgggcctgaactctgcttcgtactgtgcacatagagctgccactgcagcaagcttagcgactccctttgggagatattctcccttcaacctggggatctacacattgcttcaccttggtcttcacttaacctttggagtaccccatgtgactaaacttt

SEQ ID NO: 6865 - DNA, 531 bp, Zea mays
  Clone ID: LIB3061-068-Q1-N6-H11
ggggggggggtgttttttttttttttcagacaaaaaatttattattgaactataactcataaaaaactaaaaggagggcaccaccaatgatgggttgttggtagaacgctgctgggtttgtcaaagcaagttggttgaatggcagcaattgtggggggggggagagggtgccagcgttaggcgcagcgtgctggtaaaacggcaacaactgtggttgtatcaaaaaggtagcagggctcacaccagctagctggctgaatggtagtagttgttgctgctgtaaataagcaggagagttcaatgctgccagttggttgaatggaaaaaattgctgggggtaggcagcaggtagctggctgaatggtagttgttgttgttgcaaataaaaagcagagttcaatgcagctagttggttgaatggaagaaactgctgttgctgagagtaggcagcaaggtttgctagcacaagttgttgtagttgttgtgccctgatgttttgtgccaataaatgcaccaaaggtaactgatgta

SEQ ID NO: 6866 - DNA, 491 bp, Zea mays
  unsure (1)..(491): unsure at all n locations; Clone ID: LIB3061-068-Q1-N6-H4
gcgggtgtgttgggttttggaacaatacttttttcttttcatttcaattgttcattcaggtcattgctcacactgacactgccacccatggtgatgcgtgacacattattactcaatcatcgccgctaaatgactcaactagctagctagccgggggggtggctacagcacatagtttcttcagtgggggacaccgccggcagcagcgtaggggcatggagtcggctgctgcaggccgtacatcgccgtcagttgctgcgctatctgcgccgccaacagccccgcgacctggccgctttgcggctgctgctgcaggatggactggaggaccaagccgaagatcgcctggtaccggtgctgcggcttcacctgcctgagctggtggcaacactgctggcgcaacgactggcactgaggcgagcagtatggcgtcgccgtcggggtgcactgatgcctcagaaactgnacgcactggcccaggatcggggtgc

SEQ ID NO: 6867 - DNA, 451 bp, Zea mays
  Clone ID: LIB3061-068-Q1-N6-H5
gggggggggggtgtgtttttttttttttttttttttttttttttttttttttttttttttttttttttttttttttttttcggggaaaccccccccaaaatcattttttatcccacaagatcatttttgttaaacagttcgaaaaaaaggtgggggggggggggggagaaacctggtcccaacatacaaaacgacctgctcacaaaagcagttcaaaaaaagggggggggttccatgggccaaaaacaggccaacgagagctctccagcgggaatatttttttttaccaatttctcccatgattcggggggctcttgaatgaccttcagggggtattcctttcttgcgggcttgttgcccaaaccaaatttgttgggggggtttccatcagggattttggagcctctgaaccaatcttttatggcagtcagggtcccccgaaaatgctttt

SEQ ID NO: 6868 - DNA, 495 bp, Zea mays
  Clone ID: LIB3061-068-Q1-N6-H7
gggggggtgtgggtgttttttttttttttttttttttttaagttcaaacatcaaacttattcatgatttgtcatagttctggggagtacgcacacacaacacaaccgggccatttttaaaccaacactgacacgactcatgacaccaacagggtgtgggggggggagcctccatatggagagggggcaccagacgacgcaggcgcatcggcagcttaaacgacccatgacttactgaccaccacggggacggagcacaaggtggggggggctctccttttggatgttgtagtctgctaaggtgcggccatcctccagctgtttgccggcgaaaatcaaaccctgctggtcccgggggatgccctccttggcctggatcttggccttcacattggcgatggggtccgagctctcaacctccaggggtatgggttttccagtcagggtgtttacaaagatctggataccacctttgaggcggagaacaaggggaagg

SEQ ID NO: 6869 - DNA, 526 bp, Zea mays
  Clone ID: LIB3061-068-Q1-N6-H8
ggggggggggggttttttttttatatcgagataaatctcaatcaatatattgattatttctaggaaacacatgtcggtatgagggcaccattgtcgagtacatctcatatgtaatctaaaagaggcacctccaacgatgggttgctgcaagggggggttgggtgaaagagaactggttgtatggcagcaattgttgttgctgctgcaggaaggtagcgaccaatgggttagccactgccaatggattaagtaactgttgtcgctgttgtaggtacgcagcagagtttgacacagccagttggttgaatggaagcaactgttgtaagtaggcagcagggtttgccacagctagctgagtcagagctggtacaatttgttgcagcaactgttgttgtaggtacgtaggtgcattgcccaccgcgagcgggctagatgaaagtagttgtaggtagacggcagggttcaccatggctagttgactgagcactggcataaactgttgcagctgttgttgttgctgggatgc

SEQ ID NO: 6870 - DNA, 595 bp, Zea mays
  Clone ID: LIB3061-069-Q1-K6-A1
ctctctcccgtataagtcagtggtaaactaagagtggcatccatattagtggcaaaagttagatctcccttgatccaaacagccccatacgttgccttgggcaatcgagctaatcaatctccgtgcaattccacctcccgaagacccgaactgagtccctccaccgacccaaaccctagcgcgcacccacctccctccccctttcccggcgtgcggtccggcgttggagatgcgggcgctgctcgcggacggcgggatggcgctggcgatggcgccggaggttaacgagtcgtcgggcggtgctgcgttgtcgcaggggctgttatggtgggcgtcggagtgccacggggtgttgtacagccttgcggtgatgctgccgtcgctggccttcgtgggattcctagcatggcaggcgcggcggagcttccgtaggatcagctacggccgctctcacgtcgtcgtcgtcgcgtactacgcgctcctctgggtcgtcgccgtactcaacctcctctggtgcttcctgcaggcatggcaatgtatgcctgacagggcattttcttggaatgtattgtcactgttcacaaaatcaggaatg

SEQ ID NO: 6871 - DNA, 612 bp, Zea mays
  unsure (1)..(612): unsure at all n locations; Clone ID: LIB3061-069-Q1-K6-A10
tcttgttcctccaacaatcatcagcgccgtggacgagtgaggtacctctttgtagaccatataaatgcgacgncaaaggtaaccttgatgtatactagggccttgatgattgttggnagggaacaaggcgtggctcatagggatagatcccgggcatttcatggaccggttccagcaggcgtcccagcttcttctattgggagtggagggggggggacaacaactacaacaacttntgctancaaaccttgctgcctactctcancaacancantttcttccattcaaccaactanctgcattgaactctgcttcttatttgcaacaacaacaactaccattcanccagctacctgctgcctacccccagcaatttcttccattcaaccaactggcatcattgaactctcctgcttatttacagcancaacaactactaccattcanccanctanctggtgtgagccctgctaccttcttgatacaaccacanttgttgccgttctaccancacccttcncctaacgctggcaccctcttacaactgcaacaattncttgcccttcaaccaactttctttgaccaacccaccatctttctaccaaccaccca

SEQ ID NO: 6872 - DNA, 357 bp, Zea mays
  Clone ID: LIB3061-069-Q1-K6-A3
gcgtttctattgtaccagctctgactcagctagctgtggcaaaccctgctgcctacttacaacagttgcttccattcaaccaactggctgtgtcaaactctgctgcgtacctacaacagcgacaacagttacttaatccattggcagtggctaacccattggtcgctaccttcctgcagcagcaacaacaattgctgccatacaaccagttctctttgatgaaccctgccttgcagcaacccatcgttggaggtgccatcttttagattacatatgagatgtactcgacaatggtgccctcataccgacatgtgtttcctagaaataatcaatatattgattgagatttatctcgat

SEQ ID NO: 6873 - DNA, 567 bp, Zea mays
  Clone ID: LIB3061-069-Q1-K6-A4
caaccgtcagccctattacagcagttacctttggtgcatttgttggcacaaaacatcaaggcacaacaactacaacaacttgtgctaggaaaccttgctgcctactctcagcaacagcagtttcttccattcaaccaactggctgcattgaactctgctgcttatttgcaacaacaactaccattcagtcagctagctgctgcctacccccagcaatttcttccattcaaccaactggcagcattgaactctgctgcttatttacaacagcaacagctaccaccattcagccagctagctgatgtgagccctgttgccttcttgacacaacaacagttgttgccgttctacctgcacgctgcgcctaacgctggcaccctcttacaactgcaacaattgctgccattcaaccaacttgctttgacaaacccaacagcgttctaccaacaacacatcattggtggtgccctcttttagattgattattagttgtaattcaataataaagttttttggatgatgtatgtggccaaccagaaataagaagttacatttccagattcttta

SEQ ID NO: 6874 - DNA, 609 bp, Zea mays
  unsure (1)..(609): unsure at all n locations; Clone ID: LIB3061-069-Q1-K6-A5
gcaacataccatagtgaagtacactagcaacatcttagcaccaatggcagccaagatttttgccatccttgccctccttgctctttcagcaagcgttgctaccgcgactattattccacaatgctcacaacaatacctctctccggtgacagccgcgagatttgaatacccaactatacaatcctacaggctacaagaggccatcgcagcaagcatcttacggtcgttagcattgaccgtccaacaaccatatgccctattgcaacaaccatccttaatgaatctatatctccaaagaatcgcagcacaacaactacaacaacagttgcttccaacaatcaatcaagtagttgcagcgaaccttgctgcttacctccagcaacaacaatttcttccattcaatcaactagctggggtgaaccctgctgcttacttgcaggcacaacagctactaccattcaaccaacttgtcaggagccctgctgccttcttactgcagcaacagttgcttccattccatctacaagttgtggcaaacattgctgctntcttgcaacaacaacaacaattgctgccattttacccacaggttgtngggaaacattaacg

SEQ ID NO: 6875 - DNA, 613 bp, Zea mays
  unsure (1)..(613): unsure at all n locations; Clone ID: LIB3061-069-Q1-K6-A6
ccgcaccttttcccacatgctcacagggggctatagcttcccttcttcccccatacctctcaccagcggtgtcttcaatgtgtngaaaacccaattgttcaaccctacaggatccaacaggcaatcgcaacaggcatcttaccattatcacccttgttcctccaacaaccgtcagccctatggcagcagttacctttggtccatttggtggcacaaaacatcagggcacaacaactacaacaacttgtgctagcaaaccttgctgcatactctcagcaacatcagtttcttccattcaaccaactggctgcattgaactctgctgcttatttgcaacaacaattaccattcagccagctagttgctgcctacccccagcaatttcttccattcaaccaactagcagcattgaactctgctgcttatttacagcagcaacaactactaccattcagccagctagctgatgtgagccctgctgccttcttgacacaacaacagttgttgccgttctacctgcacgctatgcctaacgctggcaccctcttacaactgcaacaattgctgccattcaaccaacttgctttgacaaactcaacagtgttctaccaac

SEQ ID NO: 6876 - DNA, 590 bp, Zea mays
  unsure (1)..(590): unsure at all n locations; Clone ID: LIB3061-069-Q1-K6-A7
ttttgagcttcanaacacaccaggcgagcgcactagcaacgacctaacaacaatggctaccaagatattagccctccttgcgcttcttgccctttttgtgagcgcaacaaatgcgttcattattccacaatgctcacttgctcctagtgccattattccacagttcctcccaccagttacttcaatgggcttcgaacacctagctgtgcaagccaacatgcaacaacaagcgcttgcggcgagcgtcttacaacaaccaattgcccaattgcaacaacaatccttgccacatctaacaatacaagccatcacaacgcaacagcaacaacagttcctaccagcactgagccacctagccatggtgaaccctgccgcctacttgcaagagcagctgcttgcatccaacccacttgctctggcgaacgtagttgcaaaccagcaacaacaacagctacaacagtttctgccaacgctcagtcaactagccatggtgaaccctgccgcctacgtacaacaacaacaactgctttcatctagcccgctcgctgtgggcaatgcacctacatacctgcaacaacaattgttgcaac

SEQ ID NO: 6877 - DNA, 613 bp, Zea mays
  Clone ID: LIB3061-069-Q1-K6-A9
ctccgttggttgtgaaacccattcgggggggggggggatccaacaggcaatcgcagctggcatcttacctttatcacccttgttcctccaacaatcatcagccctattacagcagttacctttggtgcatttattggcacaaaacatcagggcacaacaactacaacaacttgtgcggggggggggggctgcctactctcagcaacaacagtttcttccattcaaccaactagctgcattgaactctgcttcttatttgcaacaacaacaactaccattcagccagctatctgctgcctacccccagcaatttcttccattcaaccaactgacagctttgaactctcctgcttatttacagcagcaacaactactaccattcagccagctagctggtgtgagccctgctaccttcttgacacaaccacaattgttgccgttctaccagcacgctgcgcctaacgctggcaccctcttacaactgcaacaattgctgccattcaaccaacttgctttgacaaacccaacagcattctaccaacaacccatcattggtggtgccctcttttagatttcttatgagttatagttcaataataaagttttttgtctg

SEQ ID NO: 6878 - DNA, 588 bp, Zea mays
  Clone ID: LIB3061-069-Q1-K6-B10
caccccattcctccttcggatctcgcatggggcgcagcgcaggtgtgaaggaagggggacgcggaggaagaggggctcgcgttcgggaagctcttcagccggctcttcgccaagaaggagatgcggatcctcatggtcggcctcgacgccgccggtaaaaccaccatcctctacaagctcaagctcggcgagatcgtcaccaccatccccaccatcggtttcaatgttgaaactgttgagtacaagaacattagcttcactgtctgggatgtcgggggtcaggacaagatcagacctctttggaggcattacttccagaacacccagggtcttatctttgttgtggacagcaatgaccgtgaccgtgttgttgaagccagagatgagctccacaggatgctgaacgaggatgagctacgtgatgctgtgctgcttgtttttgccaacaagcaagatcttcccaatgccatgaatgctgctgagattactgacaagcttggattacactccctgcgccagcgacactggtacatccagagcacttgtgccacaactggcgagggtctgtatgaaggcctggactggctg

SEQ ID NO: 6879 - DNA, 195 bp, Zea mays
  Clone ID: LIB3061-069-Q1-K6-B2
caactgcaacaattgctgccattcaaccaacttgctttgacaaacccacagcgttctaccaacaacccatcattggtggtgccctcttttagattgcttatgagttatacttcaataatgaagttttttagaaatgtactttcttatttctgggaagccacaaacatcatccaaaaaataagaaagtacatttct

SEQ ID NO: 6880 - DNA, 355 bp, Zea mays
  Clone ID: LIB3061-069-Q1-K6-B3
ggtaaaacttatttctccatacctataacctccggtgtgtttaatgagctggaaccatactcttttaaccctcgaggtccaaacagtagtcagacctggctttggagcattattagcctcgaaccttcaagaaccggcagctgtattacatcaggctccttgggaccatccagtgggacatggcataagggcacacctactacaagaactagcgctagcaaaccttgatgcatacgcttacaatgatcagtgccgttcattcaaccaactgactgtatcgatctatgctgcttatttgtgacaactattaccattaacacaggttgttgttgaataccccgagcgttttgttcca

SEQ ID NO: 6881 - DNA, 280 bp, Zea mays
  unsure (1)..(280): unsure at all n locations; Clone ID: LIB3061-069-Q1-K6-B4
cacagcacatanaagtagaatccattagcaacaatagagcaacaatggcgaccaagatattttccctccttatgctccttgctctttctacatgtgttgctaacgcgacaattttccctcaatgctcacaagctcctatagcttcccttcttcccccataccttccatcaattatagcttcagtatgtgaaaacccagctcttcaaccatataggcttcaacaagcaatcgcagcaagcaacataccttttatcgcccttgttgtttcaacaatcaccag

SEQ ID NO: 6882 - DNA, 226 bp, Zea mays
  Clone ID: LIB3061-069-Q1-K6-B6
agcgtccgcactaacaacacagaacgccaggggggaccacaaggcaagcaaaaagctcccatacctacctccttggctctgtacctcatgatgcatgggacgggcgacagattgtccaaaagagactgcgaagactcctaaaggatcccacattccaccgtacctggcatcagcagtgtctgaagctggagaaaacgaccattcatcaaccctacaggcaacagac

SEQ ID NO: 6883 - DNA, 594 bp, Zea mays
  unsure (1)..(594): unsure at all n locations; Clone ID: LIB3061-069-Q1-K6-B7
cggncgcgtggggttcaacaacaacagcaacgaaccggagcaccaccaccaacaacaacaacaacaacaacaacaacatcaccaacaatcacaaggccatgtgcaacaacacgaacagagccatgagcaacaccaaggacagagccatgagcaacaacatcaacaacaattccagggtcatgacaagcagcaacaaccacaacagcctcagcaatatcagcaggggccatggaaaaatcacaacagcaacaatgtcattgccaggagcagcaacagactacaaggggcagctataactactatagcagtagctcaaatctaaaaaattgtcatgaattcctaaggcagcagtgcagccctttggtaatgccttttctccaatcacgtttgatacaaccaagtagctgccaggtattgcagcaacaatgttgtcatgatcttaggcagattgagccacaatacattcaccaagcaatctacaacatggttcaatccataatccaggaggagcaacaacaacaaccatgtgagttatgtggatctcaacaagctactcaaagtgcggtggcaatcttgacagcagcacaataccta

SEQ ID NO: 6884 - DNA, 471 bp, Zea mays
  unsure (1)..(471): unsure at all n locations; Clone ID: LIB3061-069-Q1-K6-B8
ggnaacctgtgctcgccaacggnagagctaagaccggttagctggaccgcccaaccgatgctccatagctagccgcgagcgacggtcgacgtccccaagagctcgaccgaatcgctgtacaagggaactggtgaccaaccaaggcaggctgtggaactgggcaggcatggcgccctagagcgttgcggctccatctcgtcgctgctggagagcagctggctagctgttagcgttttccctagtttctctctctctctctgtcgctgtgttccccgtttcagtttacttatagcccgaagacttttctgtagtattggaatgccagagacctttggccggacaagaggaatttgcgaaggccgtctggctgggtgtgttgcgtcgtcattggggtctagtatggccagttgtgttcgtcgttatattgagtggatccgaatgaatgtgggttagattggagctttccttttc

SEQ ID NO: 6885 - DNA, 610 bp, Zea mays
  Clone ID: LIB3061-069-Q1-K6-C10
gtccttcgcgcagcagcactacgctggcgttgggcggcaagcctttcttccccgggttggtggagtacatcatttccggccccgtggtggcgatggtgtgggaggggaaggacgtcgtgttgactggccgcaggatcattggggccaccaggccttgggaggcagcccccggtaccattcgtggggactacgccgtggaagtcggcaggaatgtcatccatggaagcgactccgtggagaacgggaagaaggagatcgctctctggttccctgaaggtgtggcacagtggaagagcaaccttcatccctggatctacgaggcttgagcagttgagcttggatgccttgcctgcttccatggaaaccagagttttgtttgagtattatctgttggctctggctgaagagtcataatttagcgctctgtgtgttacaccagagttaagtctgcctgaacttatgtggcatttgtttgagtttctaccttcgtgccctgttttctaatgtaccgtggttgtgaaccggtcaatgtgatctgaaataaaacattgcgtgccaagtttgtgttacaagtttgatgcactggggaatgccaggcaactaatgtggt

SEQ ID NO: 6886 - DNA, 377 bp, Zea mays
  Clone ID: LIB3061-069-Q1-K6-C11
tggccaacataagaagaagtacatttccaaaatactaaaaaaaaaaaaaaaaaaaaaaaaaaaaaaaaaaaaaaaaaaaaaataaaaaaaaaaaaaaaaaaaaaaaaaaaacattcaaaaaaaaaaaaaaaaaacaaacttttttaataaaaaaaaaaaaaaaaactcaattgggggagagagaggaaactaatttttaccggcctcccattcccataccaactggaaaaaaaaatcccatcccccaactaaaaaaacccctaacaaaaccaaccttaatcccctaaaaacctatccaaaaaaccaaaaccgaccgaaccccaaaaaaatcccaaacaaaaactttccaaaaaaaaaacccctcttaaatcccaaaa

SEQ ID NO: 6887 - DNA, 240 bp, Zea mays
  unsure (1)..(240): unsure at all n locations; Clone ID: LIB3061-069-Q1-K6-C12
gcgatgtgcggcctgcagctgcggggggggggggcctgcccttaaaaaaaaaataccggcggtgtctactactgaggaaactatgtactgtagtaataatgtaatggagccgctgactagctacctagctcgctagtttactcatttatcttcgatgagtaacgtantgtcacccatggggggggtggcantgtgagcaatgacctnaatgaaccattgaaatggaaaggaataatatac

SEQ ID NO: 6888 - DNA, 230 bp, Zea mays
  unsure (1)..(230): unsure at all n locations; Clone ID: LIB3061-069-Q1-K6-C2
gcgttcttaaaacccagccggnaaaacatcgcctgcatttcgatctgtttcaccgcaattcgcattgttagtcgtgtattggagttatgtgtacttggtttccaagaactttggttccttctcgttttttttccttgtttgagcgtttttgggcagcgctggcctggttcctagtatggtgggaattggctgcaccttttgcttcgaataaaaatgcctgctcgttcacc

SEQ ID NO: 6889 - DNA, 608 bp, Zea mays
  Clone ID: LIB3061-069-Q1-K6-C4
cggcgctaagcggggctggccatcgcggtgcggctgctcgagcccatcaaggaggagttcccaatcctctcttacgccgatttctaccagctcgcgggagttgtggccgtggaggtcaccggtgggcctgagattcccttccaccccggtagggaggacaagcctcaacccccacctgagggccgccttcctgacgccactaagggttctgaccacctgaggcaagtttttggcaagcagatgggcttgagcgatcaggacattgttgccctctctggtggccacaccttgggaaggtgccacaaagagcggtctggtttcgagggggcctggactacaaaccctttggtctttgacaactcttacttcaaggaacttctgagtggtgataaggagggccttcttcagctcccaagtgacaaagccctgctgagcgaccctgttttccgccctcttgtcgagaaatatgctgcggatgagaaggctttctttgatgactacaaagaggcccacctcaagctctccgaactggggtttgctgatgcttaaatagaccctatcttggagtgatacattctgctgcctgtatggaatcatgtggtcttttg

SEQ ID NO: 6890 - DNA, 432 bp, Zea mays
  Clone ID: LIB3061-069-Q1-K6-C7
tgatatacatatgagaagtaatcgataatggggccctcataccggcatgtgtttcctagaaataatcaatatattgattgacatttactctcgaaaaaaaaaaaaaaaaaaaaaaaaaaaaaaaaaaaaaaaaaaaaaaaaaaaaaaaaaaaaaaaaaaaaaaaaaattaaaaaaaaaaaaaagggggggcgcgtttaaaagaacccaagctaacgtccccgggcatgcaacgtaaaagcttttttatagggccaccaaaattaaattaacgggccggcgtttaaaaacgtcggaacgggaaaaaccctggggtaaccaaactaaatcgccttgaaaaaaatccccttttccccagtgggcgaaaaaccaaaaaggccccccccaatcgcccttccaaacagtggcccaccctaaatggcaaagggaacccc

SEQ ID NO: 6891 - DNA, 615 bp, Zea mays
  unsure (1)..(615): unsure at all n locations; Clone ID: LIB3061-069-Q1-K6-C8
acctataccaccacttgnaagncggagcagcagccgtcatagcaggttatttggagaaggatggatcggcggcaatcaagcagcagcgggatgatggagggaccgttccgattcttgccggccgaagtgaaagagatggaggagcgcctgtttccggtcaccaatcgcaggctggatcacatcctcatggatgagctcgctctgaaatttagctgcttccggcgccgtgctggcatggttcccgtcaagccaaagcaggtgctcaactggttttataacaaccgtaacaagacttctgccaaggtagcagccagggaagcacatgctccatgggagttttgggccaaccatcagcaagctagagctagaggaggctcatccatcagcaagctgaagccaaagaaggcgactacgcacgcaggatcttcttcaggtgatttatagatgttacctgtgactatgatcactgatattgcttctttgtaatttgtcgctcatgtttacatgcttcctcgttactgccaggcacttctattctattaggacattgctactgtttttcccctcatttttatatatcagtgttatttgaaaatcagggaataattatatcga

SEQ ID NO: 6892 - DNA, 612 bp, Zea mays
  unsure (1)..(612): unsure at all n locations; Clone ID: LIB3061-069-Q1-K6-C9
tgcttccttatgctccttggtctgggggcagtngggctaccgcnaccattttcccacaatgctcacaagctcctatagcttcctttcttcccccatacctctcaccagcggtgtcttcagtatgtngaaaacccaattcttcaaccctacaggatccaacaggcaatcgcagcaggcatcgggcctttatcacccttgttcctccaacaaccgtcagccctattacagcagttacctttggtgcatttgttggcacaaaacatcaaggcacaacaactacaacaacttgtgctaggaaaccttgctgcctactctcagcaacagcagtttcttccattcaaccaactggctgcattgaactctgctgcttatttgcaacaacaactaccattcagtcagctagctgctgcctacccccagcaatttcttccattcaaccaactggcagcattgaactctgctgcttatttacaacagcaacagctaccaccattcagccagctagctgatgtgagccctgttgccttcttgacacaacaacagttgttgccgttctacctgcacgctgcgcctaacgctggcaccctcttacaactgcaacaattgctgcca

SEQ ID NO: 6893 - DNA, 601 bp, Zea mays
  Clone ID: LIB3061-069-Q1-K6-D1
gcttctctcgctagcgggttcggcagtagaaaccctaaaaaaaaagaaccgccctccccttcgctagcggaaccgccctcccctcgccggggtaggggtttcgggggtagacgcccgccatggacgcgttccggaaacagctggacgtgctcatgggcgccaaccgcaacggcgacgtcgaggaggtgagccgcaactactacgaccgcgacgtctgccgcctcttcctcgccggtctctgcccacacgacctctttcagctcacgaaaatggatctcggtccttgttctaagattcattctcttcaactgcggaaagattatgaagaagcgaaagcaaagggaacagaaaattttgatagagaactcgaggatatgatagaaaggctcattgtggagtgtgacaggaaaattcagagggccctaaaacggcttgcagatgatgatgccaatgctgctattgcgatatcggtctctgaggttactctgacggatgacatactgcagctgtcaaaacagataaaggagaaaatggcagaagttgatgcctttgattttgaagggagaactgacgacaaaataaaggcccaggaagtagtgga

SEQ ID NO: 6894 - DNA, 485 bp, Zea mays
  unsure (1)..(485): unsure at all n locations; Clone ID: LIB3061-069-Q1-K6-D10
gnactctgcttcttatttgcaacaacaagaactaccattcagccagctacctgctgcctacccccagcaatttcttccattcaaccaactggcagcattgaactctcctgcttatttacagcagcaacaactactaccattcagccagctagctggtgtgagccctgctaccttcttgatacaaccacagttgttgccgttctaccagcacgctgcgcctaacgctggcaccctcttacaactgcaacaattgctgccattcaaccaacttgctttgacaaacccagcagcgttctaccaacaacccatcattggtggtgccctcttttagatttcttatgagttatagttcaataataaagttttttgtctgatgtttgtggcttcccagaaataagaaagtacatttctagattcttatgtgcttctagtctccaaatgtggttgatagttattttgctctaagatcgacagtaatgaagtat

SEQ ID NO: 6895 - DNA, 603 bp, Zea mays
  unsure (1)..(603): unsure at all n locations; Clone ID: LIB3061-069-Q1-K6-D11
gcaacatagnaagcacaatagtgtaccggcggggggagccaaaaattttgcctccttatgctccttggtctttctgcaagtgctgctacggcgaccattttcccacaatgctcacaagctcctatagcttcccttcttcccccgtacctctcaccagcggtgtcttcggtatgtgaaaacgcgagttcttcaaccctataggatccaacaggcaatcgcagctggcatcttacctttatcacccttgttcctccaacaatcatcagccctattacagcagttacctttggtgcatttattggcacaaaacatcagggcacaacaactacaacaacttgtgctagcaaaccttgctgcctactctcagcaacaacagtttcttccattcaaccaactagctgcattgaactctgcttcttatttgcaacaacaacaactaccattcagccagctatctgctgcctacccccagcaatttcttccattcaaccaactgacagctttgaactctcctgcttatttacagcagcaacaactactaccattcagccagctagctggtgtgagccctgctaccttcttgacacaaccacaattgttgcc

SEQ ID NO: 6896 - DNA, 605 bp, Zea mays
  unsure (1)..(605): unsure at all n locations; Clone ID: LIB3061-069-Q1-K6-D2
gggcgtctcatcaatgaagctgtttcaatcccagtgattggtgatggagacaatggttacgngaaactctatgaatatcaagagaaccataaaaggatatatcaatgctggttttgctggaattatgcttgaggatcaggtggcacctaaagcatgtggacatactgaaggaaggaaagtcatatcaagggaggaagctgtcatgcacataaaagctgctgtagatgctaggaaagagagtggctctgacattgttattgtagcaaggacagattctcgccaagctatttctcatgatgaagcattatggagggtgaaagcatttgctgatgctggagcagatgttctatttattgatgcccttgcttcagtagaagagatgaaagcattttgtgcggttgcaccagaagttccaaagatggcaaacatgttagaaggtggtggtaaaactcccatattgagccctgctgaacttgaggaaattggtttcaggcttgtagtatatcctttatccttagttggggtatcaatgcgtgcaatgcaggatgctctagttgcgataaaagacggcggtgtacctccacctagcgtcctgccatcttttc

SEQ ID NO: 6897 - DNA, 262 bp, Zea mays
  unsure (1)..(262): unsure at all n locations; Clone ID: LIB3061-069-Q1-K6-D3
cccagcgtccgcagnaacgcggnaaacttccgcgcgctgtgcnacgggcgagagggcgtgggcaagtccgggaagccgctccactacaagggctccaccttccaccgcgtcatccccgagttcatgtgccagggcggcgacttcacccgcggcaacggcaccggcggcgagtccatctacggcgagaagttccccgacgagaagttcgtgcgcaagcacaccgcccccggtgtgctctccatggncaacgccgggcccaaca

SEQ ID NO: 6898 - DNA, 602 bp, Zea mays
  Clone ID: LIB3061-069-Q1-K6-D5
caacatcttacccaagggagccaagattttgccctccttgccctccttgctctttcagcaagcgctgctacctcgacttttattccacaatgctcacaacaatacctctctccggtgacagccgcgggatttcaatacccaactatacaatcctacatggtacaagaggccatccaagcaagcatcttacggtcattagcattaaccctccaacaaccatatgctctattgcaacagccatccttagtgcatctgtatctccaaagaatcgcggcacaacaactacaacaacagttgctaccaacaatcaatcaagtagttgcagcgaaccttgctgcttacctccagcaacaacagtttcttccattcaatcaactagctggggtgaaccctgctatctacttgcaggcacaacagctactaccatttaaccaacttgtcgggagcccttatgccttcttactgcaacaacagcttctgccattccatctgcaagctgtggcaaacattgttgctttcttgagacaacaacatttgttgccattttacccacaagttgtgggaaacattaatgccttcttgcaacagcaacaattgctacc

SEQ ID NO: 6899 - DNA, 416 bp, Zea mays
  unsure (1)..(416): unsure at all n locations; Clone ID: LIB3061-069-Q1-K6-D7
aacaaaaaaacaacaatagcaaccaaaataaactccctccttatcctccttgctctctctacatctcttgctcaccccacaatcctccctcaatactcacaacctcctataccttcccttcttcccccataccttccgtggggggtggcttcnacataaaaaaaacccacccctccaaccatacanccttcaacaaccaatcccaacaaccaacatacctttaccncccttnttncatcaacactcaccaaccctatcttccctacantcattcnnacaaaccatcaacacccaacaactnaaccaactcnncctacctncaaccaaccaantacctccaacaaacctaactccctactctcaccancaacaatncctttcattcaaccaactccctacactcaaccccccctact

SEQ ID NO: 6900 - DNA, 609 bp, Zea mays
  unsure (1)..(609): unsure at all n locations; Clone ID: LIB3061-069-Q1-K6-D8
ctcgnattaggtctccttctccagcttgtgaggacgacactggttgacactgattgtagcacttcgtggcgccttattgggtcgcgggtgcggtttgcgctctacaaattttgggtttggtttcgctgaaccctcatgacccaagcgaagtccactcctgggaggagggagatgggccgggcgcgatcgccggaaccgctcgatttcttcatatggactgtcgaggatgttggattatggctggaagaaataaatcttggtggctacaaacaagtatttcaagaaaatagtgtcaatggagaatatctagaaagcttgtccatgtttactactgagcagattctgcgctttattaggcggtgccatatgaaatggggagactttatcacactgtgcaaagagttgaggcgcattaaagtggcgtgccttaaaggggagcaagaagcccgcaggccatggtgggcgccggcatgcctctccgtagttttcgtgagggcagccaagcagaacaggaagtcccgtgttgtctcgttgaagctggaaccataatgcttgtcaagcacttcgaaccgtcgtgcgctagcctaaagtggtatggaagctgttttg

SEQ ID NO: 6901 - DNA, 591 bp, Zea mays
  Clone ID: LIB3061-069-Q1-K6-D9
cccagcgtccgtgcgtctgtccagggggatgtcaagttgtggcccttcaagtcatttctgggcctggtgagaagccaatgattgttgtccagcacaagggtgaggagaagcagtttgcagctgaagagatctcctctatggttcttatcaagatgcgtgagattgctgaagcttaccttgggggcacgatcaagaatgctgtggtcacagtccctgcctacttcaatgactcacagaggcaggccacaaaggatgctggggtgattgctggccttaatgtgctgcgtatcatcaacgagccaacagctgcagctatcgcctatggtcttgacaagaaggctaccagtgtcggtgagaagaatgtcctcatctttgatcttggaggtgggacctttgatgtctccctcctcaccattgaggaaggaatctttgaggtcaaggccacagctggtgacacccatcttggtggtgaggactttgacaacaggatggtcaaccacttcgtccaggagttcaagaggaagaacaagaaggatatcactggcaaccccagggctctccggaggctgaggaccgcttgtgagagggcga

SEQ ID NO: 6902 - DNA, 602 bp, Zea mays
  unsure (1)..(602): unsure at all n locations; Clone ID: LIB3061-069-Q1-K6-E1
gtccaactagcaacatagnaaagcacaatagtgtaccaacaatggcagccaaaaattttgcctccttatgctccttggtctttctgcaagtgctgctacggcgaccattttcccgcaatgctcgcaagctcctatagcttcccttcttcccccgtacctctcaccagcggtgtcttcggtatgtgaaaacccaattcttcaaccctacaggatccaacaggcaatcgcagctggcatcttacctttatcacccttgttcctccaacaatcatcagccctattacaacagttacctttggtgcatttattggcacaaaacatcagggcacaacaactacaacaacttgtgctagcaaaccttgctgcctactctcagcaacagcagtttcttccattcaaccaactaggttcattgaactctgcttcttatttgcaacaacaacaactaccattcagccagctacctgctgcctacccccagcaatttcttccattcaaccaactagcagcattgaactctcctgcttatttacagcagcaacaactactaccattcagccagctagctggtgtgagccctgctaccttcttgacacaaccac

SEQ ID NO: 6903 - DNA, 584 bp, Zea mays
  Clone ID: LIB3061-069-Q1-K6-E10
ctgggtcttcaaaccttagctggaggggtggggggcgcagaagaacccgatcgacaccatgagggtgttgctcgttgccctcgctctcctggctctcgctgcgagcgccacctccacgcatacaagcggcggctgcggctgccagccaccgccgccggttcatctaccgccgccggggcatgtgccacctccggttcacctgccacctccggtgcatctcccaccgccggtccacctgccgccgccggtccacctgccaccgccggtccatgtgccgccgccggttcatctgccgccgccaccatgccactaccctactcaaccgccccggcctcagcctcatccccagccacacccatgcccgtgccaacagccgcatccaagcccgtgccagctgcagggaacctgcggcgttggcagcaccccgatcctgggccagtgcgtcgagtttctgaggcatcagtgcagcccgacggcgacgccctactgctcgcctcagtgccagtcgttgcggcagcagtgttgccagcagctcaggcaggtggagccgcagcaccggtaccaggcgatcttcggcttggtcc

SEQ ID NO: 6904 - DNA, 568 bp, Zea mays
  Clone ID: LIB3061-069-Q1-K6-E11
aacaataacaaaacaagatattttccatccttatgctccttgctctttctgcatgtgttgctaacgcgaccatttttcctcaatactcacaagctcctatagctgcccttcttcccccataccttccatcaatgaccggtggagggggtgaaaacccagcccttcaaccctacaggctccaacaagcaatcgcaacaagcaacttacctttatcacccctgttctttcaacaatcgccagccctatctttggtgcagtcattggtacaaaccatcagggcacaacagctgcaacaactcgtgctaccagtgatcagccaagtagctctggcaaacctttctccctactctcagcaacaacaatttcttccattcaaccaactgtctacactgaaccctgctgcttatttacaacaacaacaactactaccattcagccagctagctactgcctactctcagcagcaacaatttcttccatttaaccaattggccgcactgaacccctctgcttatttccagcagcaaatactactaccatttggccagctagctacaacaagccccac

SEQ ID NO: 6905 - DNA, 616 bp, Zea mays
  unsure (1)..(616): unsure at all n locations; Clone ID: LIB3061-069-Q1-K6-E12
ggtngacttcctccacctgnaagccggggagggggggggggccctaatcccagcgccacctcgatggcgaccacctctttcttccatccgctcgccgccccgatggaccgcggtggcgtttgttttcgtcgctgcccgttcagcctaaccatccccgcccgtacagcgccccggcgaccgggggggggtgtcgtcgtccgcgctaagcgcgccggcagccaggcccctgctgccgccgcctcgcgtcagcccgcgaatcccagcgcggtcccgaagcgggacgtggaagaagaggaggaggaggtcgaggaggagatgccctggatccaggacaaggcgctggacctcgtggagttcactggcaccgtcacacaggccatcccagggccccgtgtcggctctagccctgttccatggcttctcgcggttcccctcgcctacgtcggggtctcctttgtgctcgcggtcgtccgcaccgtgcgcaggttcacctcgccgcacactaagaagaagcgaagggtgagtaagaatatattcttgttgaagtcactagatgatctgtttcagaagggcagggaggcaataaattatcctgctcttcaggacctaatgcaaa

SEQ ID NO: 6906 - DNA, 621 bp, Zea mays
  Clone ID: LIB3061-069-Q1-K6-E3
ggcagcagcacacagccccatcccaatcctagtcgatcttcttcccctcctcaagaagaaaagagctgaaccatggggaagagaagtcagctgctaagccacctcctaagaagcggatggacaagcttgacactgtcttttcctgcccattctgcaaccacgggagtagtgttgagtgccgaattgacatgaagaatctgattggcgaagcatcttgtagaatctgtcaggaaaacttcagcacaactgttaatgcactcactgagcctattgatatatatagtgaatggattgatgagtgtgagcgtgtcaacactgttgaaggcgacgatgatgcgtgagcttgccccatgcgatgaaactgttacctacaatcgtaatgtaatgtgctggtattctcgaatgccatagcccatagtcagccatggcttggaataacgtagtggctgactgatatgccagtaggcacctgtctagtacttacagaactacaaaaagtttgtactatacatatatggacaaccttataagtggctatgtgtgtacctatcctaacgcttatcccagatggtgtatcagcgtttttctgtgagattgttttcaagcaaggggttgttcatt

SEQ ID NO: 6907 - DNA, 484 bp, Zea mays
  Clone ID: LIB3061-069-Q1-K6-E4
caaactttctccctactctcagcaacaacaatttcttccattcaaccaactgtctacactgaaccctgctgcttatttgcagcaacaactattaccatttagccagctagctactgcctactctcagcaacaacaacttcttccatttaaccaattggccgcactgaaccccgctgcttatttgcagcagcaaatactactgccatttagcgagctagctgcagcaagtcgtgcttccttcttgacacagcaacagttgctgcctttctacaagcagtttgcggctaaccccgcaaccctcttacaactacaacaattgttgccctttgtccaacttgctttgacaaacccagcagcctcctaccaacaacacatcattggtggtgccctcttttagattgattattagttgtaattcaataataaagttttttggatgatgtatgtggccaaccagaaataagaagttacatttccagattct

SEQ ID NO: 6908 - DNA, 363 bp, Zea mays
  unsure (1)..(363): unsure at all n locations; Clone ID: LIB3061-069-Q1-K6-E5
ggcaatccatgtcttggtgngaaagggtgcataaatgagtacccaactggtcgtctcctgagagagcaaattgtttgagattggtgccggtactagtgaggtaagaagaatgataattggccgtgagctcttcaaagaggactgaaacttctattttgcaagccagatatcagagcatattgttagctggaggaggtgagggcgatttagatatttagcaaatcacccctgtggttcaatgcttttgtataaccgcagacatacatcaaataaagttcacttgtacttgctgcttgcagtggctctatttttctgtcaataaagttttttatgtctctgacttatgcaatgttgttcagttgc

SEQ ID NO: 6909 - DNA, 620 bp, Zea mays
  Clone ID: LIB3061-069-Q1-K6-E6
attttcagcattcaaaacacaccaagcgaggcgcactagcaacgacctaacaccaatggctaccaagatattagccctccttgcgcttcttgcccttttagtgagcgcaacaaatgcgttcattattccacagtgctcacttgctcctagtgccattattccacagttcctcccaccagttacttcaatgggcttcgaacatccagccgtgcaagcctacaggctacaactagcgcttgcggcgagcgccttacaacaaccaattgcccaattgcaacaacaatccttggcacatctaaccctacaaaccattgcaacgcaacaacaacaacaacaacagtttctgccatcactgagccacctagccgtggtgaaccctgtcacctacttgcaacagcagctgcttgcatccaacccacttgctctggcgaacgtagctgcataccagcaacaacaacagctgcaacagtttatgccagtgctcagtcaactagccatggtgaaccctgccgtctacctacaactactttcatctagcccgctcgcggtgggcaatgcacctacgtacctacaacaacagttgctgcaacaaattgtaccagctctgactcagctagctg

SEQ ID NO: 6910 - DNA, 638 bp, Zea mays
  unsure (1)..(638): unsure at all n locations; Clone ID: LIB3061-069-Q1-K6-E7
cggtccgnattccgggtgaatacactagcaacatcttacccaagggagccaagattggggccctccttgccctccttgctctttcagcaagcgctgctacctcgacttttattccacaatgctcacaacaatacctctctccggtgacagccgcgggatttcaatacccaactatacaatcctacatggtacaagaggccatccaagcaagcatcttacggtcattagcattaaccctccaacaaccatatgctctattgcaacagccatccttagtgcatctgtatctccaaagaatcgcggcacaacaactacaacaacagttgctaccaacaatcaatcaagtagttgcagcgaaccttgctgcttacctccagcaacaacagtttcttccattcaatcaactagctggggtgaaccctgctatctacttgcaggcacaacagctactaccatttaaccaacttgtcgggagcccttatgccttcttactgcaacaacagcttctgccattccatctgcaagctgtggcaaacattgttgctttcttgagacaacaacatttgttgccattttacccacaagttgtgggaaacattaatgccttcttgcaacagcaacaattgctaccattctac

SEQ ID NO: 6911 - DNA, 615 bp, Zea mays
  Clone ID: LIB3061-069-Q1-K6-E8
attcaaaaacacaccaagcgaacgcactgagcaacgagcctaacaacaatggctaccaagatattagccctccttgcgcttcttgccctttttgtgagcgcaacaaatgcgttcattattccacaatgctcacttgctcctagtgccattattccacagttcctcccaccagttacttcaatggggttcgaacacctagctgtgcaagccaacatgcaacaacaagcgcttgcggcgagcgtcttacaacaaccaattgcccaattgcaacaacaatccttgccacatctaacaatacaagccatcacaacgcaacagcaacaacagttcctaccagcactgagccacctagccatggtgaaccctgccgcctacttgcaagagcagctgcttgcatccaacccacttgctctggcgaacgtagttgcaaaccagcaacaacaacagctacaacagtttctgccaacgctcagtcaactagccatggtgaaccctgccgcctacgtacaacaacaacaactgctttcatctagcccgctcgctgtgggcaatgcacctacatacctgcaacaacaattgttgcaacagattgtaccagctctgactcaactagct

SEQ ID NO: 6912 - DNA, 624 bp, Zea mays
  unsure (1)..(624): unsure at all n locations; Clone ID: LIB3061-069-Q1-K6-E9
ccaacaagcaacatagnaaagtggnaatccagtagcaacaacanagcaacaatggcgaccaagatattttccctccttatgctccttgctctttctgcatgtgttgctaacgcgacaattttccctcaatgctcacaagctcctatagcttcccttcttcccccataccttccatcaatgatagcttcagtatgtgaaaacccagctcttcagccctataggctccaacaagcaatcgcagcaagcaacatacctttatcacccttgttgtttcaacaatcgccagccctatctttggtgcagtcattggtacaaaccatcagggcacagcagctgcagcaactcgtgctacctgtgatcaaccaagtagctctggcaaacctttctccctactctcagcaacaacaatttcttccattcaaccaactgtctacactgaaccctgctgcttatttgcagcaacaactattaccattcagccagctagctactgcctactctcagcaacaacaacttcttccatttaaccaattggccgcactgaaccccgctgcttatttgcagcagcaaatactactaccatttagccagctagctgcagcaaaccgtgcttccttcttgaca

SEQ ID NO: 6913 - DNA, 593 bp, Zea mays
  unsure (1)..(593): unsure at all n locations; Clone ID: LIB3061-069-Q1-K6-F10
naagnaagtggnaatccagtagcaacagatagcggcagtggcgaccaagatttttccctccttatgctccttgctctttctgcatgtgttgctaacgcgacaattttccctcaatgctcacaagctcctatagcttcccttcttcccccataccttccatcaatgatagcttcagtatggggagaaacccagctcttcagccctataggctccaacaagcaatcgcagcaagcaacatacctttatcacccttgttgtttcaacaatcgccagccctatctttggtgcagtcattggtacaaaccatcagggcacagcagctgcagcaactcgtgctacctgtgatcaaccaagtagctctggcaaacctttctccctactctcagcaacaacaatttcttccattcaaccaactgtctacactgaaccctgctgcttatttgcagcaacaactattaccattcagccagctagctactgcctactctcagcaacaacaacttcttccatttaaccaattggccgcactgaaccccgctgcttatttgcagcagcaaatactactaccatttagccagctagctgcagcaaac

SEQ ID NO: 6914 - DNA, 618 bp, Zea mays
  unsure (1)..(618): unsure at all n locations; Clone ID: LIB3061-069-Q1-K6-F11
gtaaaccaacaagcaacatagnaaagtgggaatgcatggagcaacaatagaagcaacaatggcgaccaagatattttccctccttatgctccttgctctttctacatgtgttgctaacgcgacaattttccctcaatgctcacaagctcctatagcttcccttcttcccccataccttccatcaaggggggcgtcaatatgtgaaaacccagctcttcaaccatataggcttcaacaagcaatcgcagcaagcaacatacctttatcgcccttgttgtttcaacaatcgccagccctatctttggtgcagtcattggtacaaaccatcagggcacaacagctgcagcaactcgtgctacctctgatcaaccaagtagctctggcaaacctttctccctactctcagcaacaacaatttcttccattcaaccaactgtctacactgaaccctgctgcttatttgcagcaacaactattaccatttagccagctagctactgcctactctcagcaacaacaacttcttccatttaaccaattggccgcactgaaccccgctgcttatttgcagcagcaaatactactaccatttagccagctagctgcagcaaaccgtgc

SEQ ID NO: 6915 - DNA, 615 bp, Zea mays
  Clone ID: LIB3061-069-Q1-K6-F12
cagcagcttctgcttgctctggggggaatggtataggggagcgaaagagactattagagaggctagctaggtggtcctcgaacgaagatgttggcggtgttcagcgggcaggtggtggaggtgccggcggagctggtggcggcgggcatccggacgccgtcgcccaagacgaaggcgtggggggggggggggcgcttcctggccgcctccgagccggccgtgtccgtgcagctcggcgaccacggccacctcgcctactcccacaccaaccaggcgctcctccgccccaggtcgttcgcggcgaaagacgaggtgttctgcctgttcgagggggtgctggacaacctgggtcgtctgagccagcagcacgggctgtcaagcaagggcgccaacgaggtgctcctcgtcatcgaggcctacaagacgctgcgcgaccgcgcgccctacccggccagcttcatgctcgcccagctcaccggctcctacgccttcgtcctcttcgacaagtccaccaactccctgctcgtcgcatccaaccccgagggcagggtgccgctcttctgggggatcaccgccgacggctgcgtcgccttcttcgacgacatcgacatgctc

SEQ ID NO: 6916 - DNA, 127 bp, Zea mays
  Clone ID: LIB3061-069-Q1-K6-F2
ggcgccctttttttttttttttttttttttttttttttttttttttttttttttttttttttttttttttttttttttttttttttttttttttttttttttttttttttttttttttttttttttt

SEQ ID NO: 6917 - DNA, 592 bp, Zea mays
  unsure (1)..(592): unsure at all n locations; Clone ID: LIB3061-069-Q1-K6-F3
ccaactagcaacatagnaaagcacaatagtgtaccaacaatggcagccaaaatattttgcttccttatgctccttggtctttctgcaagtgctgctaccgcaaccattttcccacaatgctcacaagctcctatagcttcctttcttcccccatacctctcaccagcggtgtcttcagtatgtgaaaacccaattcttcaaccctacaggatccaacaggcaatcgcagcaggcatcttacctttatcacccttgttcctccaacaaccgtcagccctattacagcagttacctttggtgcatttgttggcacaaaacatcaaggcacaacaactacaacaacttgtgctaggaaaccttgctgcctactctcagcaacagcagtttcttccattcaaccaactggctgcattgaactctgctgcttatttgcaacaacaactaccattcagtcagctagctgctgcctacccccagcaatttcttccattcaaccaactggcagcattgaactctgctgcttatttacaacagcaacagctaccaccattcagccagctagctgatgtgagccctgttgccttcttgacac

SEQ ID NO: 6918 - DNA, 598 bp, Zea mays
  Clone ID: LIB3061-069-Q1-K6-F4
ctccgaacgaactagcaacatacatagtggaatacactagcaacatcttagcaccaatggcagccaagatttttgccatccttgccctccttgctctttcagcaagcgttgctaccgcgactattattccacaatgctcacaacaatacctctctccggtgacagccgcgagatttgaatacccaactatacaatcctacaggctacaagaggccatcgcagcaagcatcttacggtcgttagcattgaccgtccaacaaccatatgccctattgcaacaaccatccttaatgaatctatatctccaaagaatcgcagcacaacaactacaacaacagttgcttccaacaatcaatcaagtagttgcagcgaaccttgctgcttacctccagcaacaacaatttcttccattcaatcaactagctggggtgaaccctgctgcttacttgcaggcacaacagctactaccattcaaccaacttgtcaggagccctgctgccttcttactgcagcaacagttgcttccattccatctacaagttgtggcaaacattgctgctttcttgcaacaacaacaacaattgctgccattttacca

SEQ ID NO: 6919 - DNA, 298 bp, Zea mays
  Clone ID: LIB3061-069-Q1-K6-F5
caatcgccagccctatctttggtgcaggggttggtacaaaccatcaaggcacagcagctgcagcaactcgtgctacctgtgatcaaccaagtagctctggcaaacctttctccctactatctgcaacaattgctgccattcaaccaacttgctttgacaaacccagcagcgttctaccaacaacccatcattggtggtgccctcttttagatttcttatgagttatagttcaataataaagttttttgtctgatgtttgtggcttcccagaaataagaaagtacatttctagattctt

SEQ ID NO: 6920 - DNA, 591 bp, Zea mays
  unsure (1)..(591): unsure at all n locations; Clone ID: LIB3061-069-Q1-K6-F7
natgnaaacagcaagcaacataggaagtgagaatccattagcaacaatagagcaacaatggcgaccaagnaattttccctccttatgctccttgctctttctacatgtgttgctaacgcgacaattttccctcaatgctcacaagctcctatagcttcccttcttcccccataccttccatcaattatagcttcagtatgtgaaaacccagctcttcaaccatataggcttcaacaagcaatcgcagcaagcaacatacctttatcgcccttgttgtttcaacaatcaccagccctatctttggtgcagtcattggtacaaaccatcagggcacaacagctgcagcaactcgtgctacctgtgatcaaccaagtagctctggcaaacctttctccctactctcagcaacaacaatttcttccattcaaccaactgtctacactgaaccctgctgcttatttgcagcaacaactattaccatttagccagctagctactgcctactctcagcaacaacaacttcttccatttaaccaattggccgcactgaaccccgctgcttatttgcagcagcaaatactactgccattt

SEQ ID NO: 6921 - DNA, 618 bp, Zea mays
  Clone ID: LIB3061-069-Q1-K6-F8
ctccgacggacgccaccgcaacgccgcggaaccccatcctcgggagcctctcctccgacggtcgatggcccggctccctgacgccatcctcgcaacgccaaccccagcctcgagaccgtcatctccgacgccatccccaagtgcctccgccgctgctccacatcctcttcccctctacaaggggattctgatatcatcaagactacaccaggtgagcagtaaaagagtggtggcagtacatcctctctagagttgttactcagttttgaaaaaggatgatttggaacaatgtgtatgagaaaggcttatttgatgtgatgcatgatcacaaagataatccaaaattcaaaggtcaaaatggttggaatcgtgatggatggaatagtatcactacgaagttcaatggaaagttccctctagctcatttctctaaacaacaaccacaagagaaggagagagagcttaaaggatactacaaggcaataagggattcaagaaaaaaaaagcggggctggttggaatgacactctatgcatggtactggccaaaccagaagtttggccatggctgattcgtgctcacccaaaagttcaaagtttcgcaacaagccattccctc

SEQ ID NO: 6922 - DNA, 611 bp, Zea mays
  Clone ID: LIB3061-069-Q1-K6-G10
ccggtcgacccagcgtccgtttttcagcattcaaaaacacaccgagggcggagggggtagcaacgacctaacaccaatggctaccaagatattagccctccttgcgcttcttgcccttttagtgagcgcaacaaatgcgttcattattccacagtgctcacttgctcctagtgccattattccacagttcctcccaccagtggctggaatgggcttcgaacatccagccgtgcaagcctacaggctacaactagcgcttgcggcgagcgccttacaacaaccaattgcccaattgcaacaacaatccttggcacatctaaccctacaaaccattgcaacgcaacaacaacaacaacaacagtttctgccatcactgagccacctagccgtggtgaaccctgtcacctacttgcaacagcagctgcttgcatccaacccacttgctctggcgaacgtagctgcataccagcaacaacaacagctgcaacagtttatgccagtgctcagtcaactagccatggtgaaccctgccgtctacctacaactactttcatctagcccgctcgcggtgggcaatgcacctacgtacctacaacaacagttgctgcaac

SEQ ID NO: 6923 - DNA, 608 bp, Zea mays
  unsure (1)..(608): unsure at all n locations; Clone ID: LIB3061-069-Q1-K6-G11
gtgttgattttaacaaaacagtagggcattggcacgaggacagtggactggttgtttccctgtcaagtggcacattgtgaaggatgttccgaacagtttgctgaagcacatcattcttngagaacaatngaaaacaagccagtgacaaacagcagagatacacatgaggtgaagcttgagcaggggcttcaagtgcttaaggttttcaaggatcatgtgtgcaagacatccatactggatgactttggcttttacgataatcgtgagaagatgatgcaatataggaaagcaaaacagcagcagtcactgaaaaaggtcatcgatgtgaagctgcctaacgccaccgacgcagatacaagtcttgtaggaactgtatcaacggaactcaccaatgttgaggctgatgtcttgaacaaagagctttcattagacaaagcagtagagaaaaacgaggagaaaggaaatgatgtcgccccacaggacctgaaatcatcagctgagaagtcggcaagcccaaatggctgttaaattttttttttggttagctcggccattgacagtggtatggggcgggaacctgaggctgggggttgtttgaggaaatcctg

SEQ ID NO: 6924 - DNA, 615 bp, Zea mays
  unsure (1)..(615): unsure at all n locations; Clone ID: LIB3061-069-Q1-K6-G2
agcgtccgcaactagcaacatagnaaagcacaatagtgtaccaacaatggcagccaaaatttttgcctccttatgctccttggtctttctgcaagtgctgctacggcgaccattttcccgcaatgctcgcaagctcctatagcttcccttcttcccccgtacctctcaccagcggtgtcttcggtatgtgaaaacccaattcttcaaccctacaggatccaacaggcaatcacagctggcatcttacctttatcacccttgttcctccaacaatcatcagccctattacatcagttacctttggtgcatttattggcacaaaacatcagggcacaacaactacaacaacttgtgctagcaaaccttgctgcctactctcagcaacagcagtttcttccattcaaccaactagctgcattgaactctgcttcttatttgcaacaacaacaactaccattcagccagctacctgctgcctacccccagcaatttcttccattcaaccaactggcagcattgaactctcctgcttatttacagcagcaacaactactaccattcagccagctagctggtgtgagccctgctaccttcttgatacaaccacagttgttg

SEQ ID NO: 6925 - DNA, 610 bp, Zea mays
  unsure (1)..(610): unsure at all n locations; Clone ID: LIB3061-069-Q1-K6-G3
gcacatanaagtagaatccattagcaacaatagagcaacaatggcgaccaagatattttccctccttatgctccttgctctttctacatgtgttgctaacgcgacaattttccctcaatgctcacaagctcctatagcttcccttcttcccccataccttccatcaattatagcttcagtatgtgaaaacccagctcttcaaccatataggcttcaacaagcaatcgcagcaagcaacatacctttatcgcccttgttgtttcaacaatcaccagccctatctttggtgcagtcattggtacaaaccatcagggcacaacagctgcagcaactcgtgctacctgtgatcaaccaagtagctctggcaaacctttctccctactctcagcaacaacaatttcttccattcaaccaactgtctacactgaaccctgctgcttatttgcagcaacaactattaccatttagccagctagctactgcctactctcagcaacaacaacttcttccatttaaccaattggccgcactgaaccccgctgcttatttgcagcagcaaatactactgccatttagcgagctagctgcagcaagtcgtgcttccttcttg

SEQ ID NO: 6926 - DNA, 609 bp, Zea mays
  unsure (1)..(609): unsure at all n locations; Clone ID: LIB3061-069-Q1-K6-G5
ctgctaccgttgntgcttgcgtcctgcttgctgcgacaggccaaagcctttctaatggccatggtgatcccactcagtcagtcggccatatcgtttctgcttgacgctgtatggggaaggaggaaaggcaaccgcgacgacaggaggagaccattccaagaggaagattaccctgaggacgccgctggctttgcggcaggtggtcgaggcaatggataccgcagccgcagcagcagcagcagcaactattatgaggggagaaggaggacgagcaactaccagtcaagtgtttctaacaattttgctggtgctgcctcaactggtgttggagctgacgataacaccaagagcagcagcagtggatatggaggatgggatgagcttctggacaacgacactgctgctcaggagacaaagaggaggagctcattctcagctggcaccactgatcgaagcacaaaatcgcagccttcagcgactggggaggaagatgcagattatactgccactccttcaacaagaacgagaatgagacgacggcggacgccaggaacgatggggttgggcagtaccatgtacaagcaggcaccactcgtgatgcgcttgttg

SEQ ID NO: 6927 - DNA, 610 bp, Zea mays
  unsure (1)..(610): unsure at all n locations; Clone ID: LIB3061-069-Q1-K6-G6
gttctanaagctcgtcaggccctacaggagaggagagaactgtagaaattaatgataacctcctctcaggatttggaattgcttggaacagccacaacagaacatattgtaagctctgttgatgagactagtccagaacgctctcatgatggcatggccggctatcatccaggagctgtcaatcctttggagcaacttggactgttcataaaggtagacgatgaggaagacgacgagcagtgttccctgcattaaagaaagaagagaaaggagaaatcagctgatggtgctgtgtttttccatgccctgtcacgggctaggggctggtgccaacctattgatccaaagtgatcacctgttgcgggccatcatgtgtggcaatggttctaaactggggtggtgagagccgtccattttgttaaaaatatgcatgggaaggatgaagatcatcttgcatagtcatttgcttccaggaggcgcacaggaggtggagtaaaaacgaacgtatttatggtgcctagaggacggttttttcagccactgccaaaacggcttgaatgacgccaccgaagtagtggagttcaaatggctcattgtttgccgcaacctc

SEQ ID NO: 6928 - DNA, 543 bp, Zea mays
  unsure (1)..(543): unsure at all n locations; Clone ID: LIB3061-069-Q1-K6-G7
gnacggcaagnagctggacggccgcaacatcaccgtcaacgaggcccagtcccgcggcggccgtggaggcggcggcggcggcgggtacggtggtggccgtggaggcggcggctacggcggtggcgggcgccgtgatggcggcggcggctacggcggtggcggcggctacggtggtggcggcggcggctacggtggtggtggcggcggctacggcggtggcaaccgtggcggcggctacggcaactccgacgggaactggaggaactgagcggtggggcccgcgcggccaagttatcctgttcgctaccgtgttgtttaccctagtccagagtgtttatcttcgttcgtctcgtgtttgttgttgcccatctgtgtttttgattgaaggtcgctctgtgtcagttgttagtgctgtgttcatcctcggctccagcagacccatgcatcaaccagcatggactgcggatcgatgggtgctgttacccccgtcaggctttattctaagttaaatcctaaggaaaaaatggtgcttcttggtgctgc

SEQ ID NO: 6929 - DNA, 605 bp, Zea mays
  unsure (1)..(605): unsure at all n locations; Clone ID: LIB3061-069-Q1-K6-G8
gtcgccctcaattcgttccgtccaggggggggaggaaatcgagcagccaaggagaggagaagaggctcgtacgaagcagaccgcccgcaagtccaccggaggcaaggccccgcgcaagcagctcgccaccaaggcggcgaggaagtctgcgccgacgaccggcggcgtgaagaagccccacaggtacaggcccgggacggtggctctgcgcgagatccgcaagtaccagaagagcacggagctgctgatccggaagttgcccttccagcgcctggtccgtgagatcgctcaggacttcaagacggatctgcggttccagagccacgccgtcctggccctccaggaagccgccgaggcctacctcgtcggcctgttcgaggacaccaacctctgcgccatccacgccaagcgcgtcaccatcatgcccaaagacatccagctcgcccgccgcatccgcggcgagcgcgcgtaggcgtatctcgcgcccggccccantggcggcggagggatggaggagggcaatttgtaaccttatgctgtttgttcgcttttagacggcgtggtgaagaactagtgtaaaaaccgctttaaagtctattttgtgc

SEQ ID NO: 6930 - DNA, 104 bp, Zea mays
  unsure (1)..(104): unsure at all n locations; Clone ID: LIB3061-069-Q1-K6-G9
ttatacctccttgcgcttcttgccctttttgtcagtgcagcanatgccttcattattccacagtgctcacttcctcctngtgccattattccacagttcctccc

SEQ ID NO: 6931 - DNA, 583 bp, Zea mays
  Clone ID: LIB3061-069-Q1-K6-H1
gcattctcgccggtgctgctgcaatgaacgccacccccggccaaccgcctgaaactacctctgccgccggcgccgccatccccacatggcgagccaggggagccctcggcctctgcttccgatccgaaggagaagaaggactactcgacggcgatactagagaggaaaaagtcaccgggccggcttgtcgtcgacgaggccaccaacgacgataactccgtcgtcgcactgcaccctgacaccatggagaggctgcagctcttccgcggcgatactgtgctcctcaagggtaagaagaggaaagacactgtttgcattgtccttgcggatgaaacctgtgaggagccaaaggttcggatgaacaaggttgtccgccagaacctgagggtgaggcttggtgatgtggtttctgtccaccagtgccaggatgtgaaatatgggaagcgtgtgcacattcttccaattgatgatacagttgaaggcattacagggaacctgtttgatgccttcttgaaaccatacttcctagaagcatacaggcccgtgaggaaaggagaccttttccttgtcaggggtggaatga

SEQ ID NO: 6932 - DNA, 600 bp, Zea mays
  unsure (1)..(600): unsure at all n locations; Clone ID: LIB3061-069-Q1-K6-H10
agcgtccttttttcagcattcaaaacacaccaggctagtccggtagcaacgacctaacaccaatggctaccaagatattagccctccttgcgcttcttgcccttttagtgagcgcaacaaatgcgttcattattccacagtgctcacttgctcctatgccagtttccacattcctcccaccaggggggggatgggcttcnaacatccagccgtgcaagcctacaggctacaactagcgcttgcggcgagcgccttacaacaaccaattgcccaattgcaacaacaatccttggcacatctaaccctacaaaccattgcaacgcaacaacaacaacaacagtttctgccatcactgagccacctagccgtggtgaaccctgtcacctacttgcaacagcagctgcttgcatccaacccacttgctctggcgaacgtagctgcataccagcaacaacaacagctgcaacagtttatgccagtgctcaatcaactanccatggtgaaccctgccgtctacctacaactactttcatctaccccgctcccggtgggcaatgcacctacctacctacaacaacaattgctgcaacaaattttacc

SEQ ID NO: 6933 - DNA, 549 bp, Zea mays
  Clone ID: LIB3061-069-Q1-K6-H11
aaatgttttttggcagctttctcagtgaatcagtatcaccgcagaaccttttcggacacccggatgttgagaaatgcccattcctgaggaatatcattggagctacaaccttttccctcgcttggggggggggggggctgctcaaggaggcaagggtccaatttttgaggaagggtcaggctttgagtctgcattcaagcttttccatggccgagatggaatagttcccctttcagaaagatcatatgtatctgatgaaaaccacaatgagagcattgatgtcaggactgaacctgctctgccgtttaatccattggctgctagagcagccacaataagtctatcagcatttggaccatttggttttggctttttcaacggcaagggcaaaaggcagaacaagaaacccaacaatctagatcagtcccaccagaagcccaagacaccagatcagtcttccatgaaacaaaaaggagtcaacccaccatcacatgaggcattcagcgatgagtggttggaaaatggccagtgcccacttgcgcggtctta

SEQ ID NO: 6934 - DNA, 590 bp, Zea mays
  unsure (1)..(590): unsure at all n locations; Clone ID: LIB3061-069-Q1-K6-H12
tattgaaaccaacagcaacatagggggggggggggggggcaacaacagagcaacaatggcgaccaagatattttccctccttatgctccttgctctttctgcatgtgttgctaacgcgacaattttccctcaatgctcacaagctcctatagcttcccttcttcccccataccttccggggggggggcgtcantatgtgaaaacccagctcttcagccctataggctccaacaagcaatcgcagcaagcaacatacctttatcacccttgttgtttcaacaatcgccagccctatctttggtgcagtcattggtacaaaccatcagggcacagcagctgcagcaactcgtgctacctgtgatcaaccaagtagctctggcaaacctttctccctactctcagcaacaacaatttcttccattcaaccaactgtctacactgaacctcgctgcttatttgcagcagcaaatattactaccatttanccagctagctgcagcaagccgtgcttccttcttgacacagcaacagttgctgcctttctaccagcagtttgcggggtaaccccgcaaccctcttacaactacaac

SEQ ID NO: 6935 - DNA, 614 bp, Zea mays
  Clone ID: LIB3061-069-Q1-K6-H4
cacatctaaccctacaaaccattgcaacgcaacagcaacaacaacaacagtttctgccatcactgagccacctagccgtggtgaaccctgtcacctacttgcaacagcagctgcttgcatccaacccacttgctctggcgaacgtagctgcataccagcaacaacaacagctgcaacagtgtatgccagtgctcagtcaactagccatggtgaaccctgccgtctacctacaactactttcatctagcccgctcgcggtgggcaatgcacctacgtacctacaacaacagttgctgcaacaaattgtaccagctctgactcagctagctgtggcaaaccctgctgcctacttacaacagttgcttccattcaaccaactggctgtgtcaaactctgctgcgtacctacaacagcgacaacagttacttaatccattggcagtggctaacccattggtcgctaccttcctgcagcagcaacaacaattgctgccatacaaccagttctctttgatgaaccctgccttgcagcaacccatcgttggaggtgccatcttttagattacatatgagatgtactcgacaatggtgccctcataccgacatgtgtttcct

SEQ ID NO: 6936 - DNA, 602 bp, Zea mays
  Clone ID: LIB3061-069-Q1-K6-H5
gcggccgctcctctcccgccgcgcctcctcgtgctgcctgtccgcgctcctccgtcgcggcgctgtcccggagcagtcgctggtgttgcgcccggctgttgtcgcggcggcctcccgcctcggcttccagcgcgggatggcgcggcggcctggcggggacggctacgtctcgacgcggtctggcgcgggcggggaccgcgcgcccatggccacggagatggcgccgctgttccccgggtgcgactacgagcattggctcatcgtgatggacaagcccggcggggagggcgccagcaagcagcagatgattgactgctacatccagaccctcgccaaggtccttggaagcgaggaggaggcgaagaagaagatctacaacgtctcgtgcgagcgctacttcgggtttgggtgcgagatcgatgaggagacatctaacaagctcgaggggctccctggtgttctctttgtgctcccggattcgtatgttgatgctgaatacaaggactacggagctgaactcttcgtcaacggtgagattgttcagaggactcccgagaggcagaggagggtggagcccgtgccgcagagggcagcagacaggc

SEQ ID NO: 6937 - DNA, 229 bp, Zea mays
  unsure (1)..(229): unsure at all n locations; Clone ID: LIB3061-069-Q1-K6-H7
gccgcaatcgtatcagccatggcgaccgccgcgcacgagggcgtgacccagcgcgtcgctgccagtggcagcagggacgacggcgccagcggcggcatcgcggcggtctcgggtcccaacaagaancccggcgggggggggggggggggcgncctccnttcnntcccccccccnntntccatccccncnncnctcntnnctctntccttcttcnccncnnnccactcca

SEQ ID NO: 6938 - DNA, 561 bp, Zea mays
  Clone ID: LIB3061-069-Q1-K6-H8
ctaacaacaatggctaccaagatattatccctccttgcgcttcttgcgctttttgcgagcgcaacaaatgcgttcattattccacaatgctcacttgctccaagttccattattacacagttcctcccaccagttactgggggggggggggaacacccagctgtgcaagcctataggctacaacaagcaattgcggcgagcgtcttacaacaaccaatttcccagttgcaacaacaatccttggcacatctaacaatacaaaccatcgcaacgcaacagcaacaacaattcctaccagcactgagccacctagccatggtgaaccctgccgcctacttgcaacagcagttgcttgcatcaaacccacttgctctggcaaacgtagttgcaaaccagccacaacaacagctgcaacagtttctgccagcgctcagtcaactagccatggtgaaccctgccgcctacctacaacagcaacaactgctttcatctagcccgctcgctgtggccaatgcacctacatacctgcaacaacaattgttgcaacagattgtaccagct

SEQ ID NO: 6939 - DNA, 524 bp, Zea mays
  unsure (1)..(524): unsure at all n locations; Clone ID: LIB3061-069-Q1-K6-H9
cacaattgttgtagttgttgtgctggggggggggggctgcatactctcagcaacatcagtttcttccattcaaccaactggctgcattgaactctgctgcttatttgcaacaacaattaccattcagccagctagttgctgcctacccccagcaatttcttccattcaaccaactagcagcgggtgggctctgctgcttatttacagcagcaacaactactaccattcagccagctagctgatgtgagccctgctgccttcttgacacaacaacagttgttgccgttctacctgcacgctatgcctaacgctggcaccctcttacaactgcaacaattgctgccattcaaccaacttgctttgacaaacccaacagtgttctaccaacaacccatcattggtggtgccctcttttagattgcttatgagttatagttcaataatgaagttttttggatgatgtttgtggcgtcccanaaataagaaagtacatttctntnnnanaaaannnnnnnnnnnnnnaa

SEQ ID NO: 6940 - DNA, 339 bp, Zea mays
  Clone ID: LIB3061-069-Q1-N6-A1
aaaaaacaaacgggggggggggaaattcaggggtgaaaaaacttgaaaattgaagggggggccgggaaaatttaaaaatttccatttattaccacggggaggtaaaaaaaatttttggtttaccggggggggccccaaatagaaacacattttaatttaaaatggggggggtaaaaagggcaaaacccccccattaaatccaggcaggataaaaaaacccagcattctttattttaaaaaaaaaaaagctttttaagaaaatgtttttcttttggaaaaaacccttaaaaaaaaaaattttggggggggagggaaaacgaatgaaaacttaccattggg

SEQ ID NO: 6941 - DNA, 410 bp, Zea mays
  Clone ID: LIB3061-069-Q1-N6-A10
gcggggggggggttgttaaaaactaaaaatgtctttgttattctgggagcccaaacatcagacaaaaactttattattgaactataactcataagaaactaaaaggggcgccacccaagatgggttgttggtaaaacccttctggggggtgagggggggttttttaatggcaacaattgttgcagttgtaagagggggccaacgttaggcgcaacgtgctggtagaacgggaacaactgggggtgtattaaaaagggagaaggggttacaccaactaactggctgaatgggagtagttgttggtggtgtaaataaacaggagagatcaatgctgccaattggttgaatggaaaaaattgttgggggtaggcagaaagtaactgggtgaatgggagatgttggtgttgcaa

SEQ ID NO: 6942 - DNA, 413 bp, Zea mays
  unsure (1)..(413): unsure at all n locations; Clone ID: LIB3061-069-Q1-N6-A11
ggcgtggggggggggggtttatcaaaaaaactcaatcaaatattgattatttctaggaaacacacgttggtttgagggcaccattatcgagtcatctcatatgtaatctaaaagaggcaccttcaactatgggttgctgcctctacatgggggggggggggggagagaactggttgtatggcagcaattgttgctggtgtaggaagggggggaccaatgggttagccactaccaatggattaagtaactgttgtcgctgtngtaggtacgcagcagaattcgacagtatcagttgggtgaatggaagcagctgttgcaagtaggcaacaaggttttgccacaattaagtgagtgaaagctggatcaatctgttgcgacaattgattgtgcaggtatttaggtgcattgtccac

SEQ ID NO: 6943 - DNA, 160 bp, Zea mays
  Clone ID: LIB3061-069-Q1-N6-A12
gtggaagcaaatggcccaaaaaaaaagagccctaaatggttgtgcacagtgtgaaaaaacaactggcgttttttctaacaatgagaacataattatgttttacgcaagccagggcccagtctttgacaaaattccgaaccaaattacaggaaacatggag

SEQ ID NO: 6944 - DNA, 323 bp, Zea mays
  Clone ID: LIB3061-069-Q1-N6-A4
tttttttttttttattttttttttttttttttttttttttttttttttttttttttttttttttttttttttttttttttttttttttttttttttttttttttttttttttttttttttttttttttttttttttttttttttttttgggggggggtggtttttttttttttttttttttgaaaaaagggggggaaggaaatttttttttggggggggggaaaaaaaatagaaaaaaaatttttttttggaggaaaaaaaggaaaaaaaggaaggggggggggccccaattgggtggtgggaaaaaaaaaagttttgtgttt

SEQ ID NO: 6945 - DNA, 496 bp, Zea mays
  Clone ID: LIB3061-069-Q1-N6-A5
gggtggggggggggtttttttttttttttttttttttatagatctctaatcttttattactgaggaagttgcacatatcagtatgagaactttattattacagtttaaagcataaaaaaatttagaagatggcaccaccaatggtgggctgctgcaggggggggggaggattcgtcaaagcaagttggttaaatggcagcaattgttgttgttgtaagaaggcgacattgtttgccacatcctgtgggtagaatgggagcaactgttgctgttgcaagaaggcgttaatgtttcccacaacctgggggtaaaatggcagcaattgttgttgttgttgcaagaaagcagcaatgtttgccacaacttgtagatggaatggaagcaactgttgctgcagtaagaaggcagcagggctcctgacaagttggttgaatggtagtaactgttgtgcctgcaagtaaacagcagggttcaccccagctagttgattgaatgg

SEQ ID NO: 6946 - DNA, 555 bp, Zea mays
  unsure (1)..(555): unsure at all n locations; Clone ID: LIB3061-069-Q1-N6-A6
aaaaactanaaagtactttcttatttctgggacgccacaaacatcatccaaaaaacttcattattgaactataactcataagcaatctaaaagaggcaccaccaatgatgggttgttggtagaacactgttgagtttggcaaagcaagttggttgaatggcagcaattgttgcagttgtaagagggtgccagcgttaggcatagcgtgcaggtagaacggcaacaactgttgttgtgtcaagaaggcagcagggctcacatcagctagctggctgaatggtagtagttgttgctgctgtaaataagcagcagagttcaatgctgctagttggttgaatggaagaaattgctgggggtaggcagcaactagctggctgaatggtaattgttgttgcaaataagcagcagagttcaatgcagccagttggttgaatggaagaaactgatgttgctgagagtatgcagcaaggtttgctagcacaagttgttgtagttgttgtgccctgatgttttgtgccaccaaatggaccaaaggtaactgctgtaatagggctg

SEQ ID NO: 6947 - DNA, 536 bp, Zea mays
  Clone ID: LIB3061-069-Q1-N6-A7
cagaaatatatcgagaaaatctcaatcaatatattgattattttctagggaaacacacgtcggtatgagggcaccattatcgagtacatctcatatgtaatctaaaaaaggcacctccaaccatgggttgctgcctcggcggggcagggttcatcaaagagaactggttgtatggcagcaattgttgctgctgtaggaaggcggcgaccaatgggttagccactaccaatggattaagtaactgttgtcgctgttgtagggacccaacaaagttcgacagagtcagttggttgaatggaagcagctgttgcaagtaggcaacacggtttgccacagctagttgagtcaaagctggtacaatctgttgcaacaattgttgttgcaggtatgtaggtgcattgcccacagcgagcgggctagatgaaagcagttgttgttgttgtacgtaagcggcagggttcaccatgggtagttgactgagcgttggcagaaactgttgtaactgttgttgttgctggtttgcaactaccttcgcc

SEQ ID NO: 6948 - DNA, 176 bp, Zea mays
  Clone ID: LIB3061-069-Q1-N6-A8
gcgggggggggggtttttggaacatacttttttcttttcatttcaattgttcattcaggtcattgctcacactgacactgccacccatggtgatgcgtgacacattattactcaatcatcgccgctaaatgactcaactagctagctagcgcagcgggtgggggtgcagcacatag

SEQ ID NO: 6949 - DNA, 576 bp, Zea mays
  Clone ID: LIB3061-069-Q1-N6-A9
ggggttgttgggttttttctgggaagccacaaacatcagacaaaaaactttattattgaactataactataagaaactaaaagaggcaccaccaatgatgggttgttggtagaatgctgttgggtttgtcaaagcaagttggttgaatggggggggggggggcagttgtaagagggtgccagcgttaggcgcagcgtgctggtagaacggcaacaattgtggttgtgtcaagaaggtagcagggctcacaccagctagctggctgaatggtagtagttgttgctgctgtaaataagcaggagagttcaaagctgtcagttggttgaatggaagaaattgctgggggtaggcagcagatagctggctgaatggtagttgttgttgttgcaaataagaagcagagttcaatgcagctagttggttgaatggaagaaactgttgttgctgagagtaggcagcaaggtttgctagcacaagttgttgtagttgttgtgccctgatgttttgtgccaataaatgcaccaaaagtaactgctgtaatagggctgatgattgttggaggaacaagggtgataa

SEQ ID NO: 6950 - DNA, 544 bp, Zea mays
  Clone ID: LIB3061-069-Q1-N6-B1
cacattaaaactggaaatgtaacttcttatttctggttggccacataccatcatccaaaaaactttattattgaattacaactaataagcaatctaaaagaggcaccaccaatgatgtgttgttggtaggaggccgctcggtctgtcaaagcaagttggacaaagggcaacaattgttgtagttgtaagagggttgcggggttagccgcaaactgctggtagaaaggcagcaactgttgctgtgtcaagaaggaagcacggtttgctgcagctagctggctaaatggtagtagtatttgctgctgcaaataagcagcggggttcagtgcggccaattggttaaatggaagaagttgttgttgctgagagtaggcagtagctagctggctgaatggtaatagttgttgctgcaaataagcagcagggttcagtgtagacagttggttgaatggaagaaattgttgttgctgagagtagggagaaaggtttgccagagctacttggttgatcacaggtagcacgagttgctgcagctgctgtgccc

SEQ ID NO: 6951 - DNA, 516 bp, Zea mays
  Clone ID: LIB3061-069-Q1-N6-B10
aaaatgtagcatgatattggaagtccaatccttgtgcgaaatgaaacaggtccaaagaacatccaacagtatagtagggtaataaacgttgaacagtaacatcattacacatcaaacaaaaaattatatagtgccggtgggaagacatctaacaggttgcaactgcgattctgtcctgagtttccatgatacatccggagctcctagtcagttcgcggttgacattcaagggaggcctcaagccttgctcgcaatgttgctggacagccagtccaggccttcatacagaccctcgccagttgtggcacaagtgctctggatgtaccagtgtcgctggcgcagggagtgtaatccaagcttgtcagtaatctcagcagcattcatggcattgggaagatcttgcttgttggcaaaaacaagcagcacagcatcacgtagctcatcctcgttcagcatcctgtgggagctcatttttggcttcaacaacacggtcacggtcattggtgtccacaacaa

SEQ ID NO: 6952 - DNA, 452 bp, Zea mays
  Clone ID: LIB3061-069-Q1-N6-B4
tttttttttttttttttttttttttttttttttttttttttttttttttttttttgggaaaggaacttcttatttctggggggccacatacatcatccaaaaaatttattattgaattacaactaataatcaatctaaaaggggcccccccaatgatgtgttgttggtaggaggctgctgggtttgtcaaagcaagttggacaaagggcaacaattgttgtagttgtaaaaggggtgcggggttagccccaaactgcttgtaaaaaggcagcaactgttgctgtgtcaaaaaggaagcacgacttgctgcaactagctcgctaaatggcagtagtatttgctgctgcaaataagcagcggggttcaatgcggccaattggttaaaaggaaaaagtttttgttgctgaaagtaggcaataactagctggctaaatgggaatagttgttgctgc

SEQ ID NO: 6953 - DNA, 541 bp, Zea mays
  Clone ID: LIB3061-069-Q1-N6-B7
agcattataattacaattagtattcttattcaaatatcatagtacaaacatcataatgtatggtactttattgcttaacaccgttataggagtataacggctaggtagacacaattcttcaattgcaaacaccactaatgtcattgctgctgcatggattattttggtagtatgagtggtacaagccgcacattgatggtaggtattgtgctgctgtcaagattgccaccgcactttgagtagcttgttgagatccacataactcacatggttgttgttgttgctcctcctggattatggattgaaccatgttgtagattgcttggtgaatgtattgtggctcaatctgcctaagatcatgacaacattgttgctgcaatacctggcagctacttggttgtatcaaacgtgattggagaaaaggcattaccaaagggctgcactgctgccttaggaattcatgacaattttttagatttgagctactgctatagtagttatagctgcaccttgtagtctgttgctgctcctggcaatgaca

SEQ ID NO: 6954 - DNA, 541 bp, Zea mays
  Clone ID: LIB3061-069-Q1-N6-C1
gtggttgttgggttttttttttttttttttttttttttttttttttttaaaaccaaaactttattatgaccatgcatatattattgggcataccacacatgataatggggggcgtcttactggattattacatatatagatagaaagagatgggggggggggatttcccaaatatcatgaatcaatagtagggcggaatgggagcggaaaccccacaggggttggggcggtagctgggcagctggtactggtagagtccacccatgggcgggatgttttgcgccatcattatggccatggggttgagaccctgggctgccagcagctgctgctgctgctgcataaaagctggcttgtacaggctgttgttggcggcagcggcacgcttaaactgcataattatttgcagttgctgcgcgacggactgcacgtccatgatcctcatatgctggtggcagaactgttgccggagcggctggaacatggcgctcggttgcccaaacccggcgtagtagggcgcccccgccagggggctgcactg

SEQ ID NO: 6955 - DNA, 541 bp, Zea mays
  Clone ID: LIB3061-069-Q1-N6-C10
gtttgtttgtggtttttgagaggaaaaaaaaagatggcaaaatgtttattaccacattagttgcctggcattcccagtgcatcaaacttgtaacacaaacttggcacgcaatgttttatttcagatcacattgaccggttcacaaccacgggggggtgggggacagggcacgaaggtagaaactcaaacaaatgccacataagttcaggcagacttaactctggtgtaacacacagagcgctaaattatgactcttcagccagagccaacagataatactcaaacaaaactctggtttccatggaagcaggcaaggcatccaagctcaactgctcaagcctcgtagatccagggatgaaggttgctcttccactgtgccacaccttcagggaaccagagagcgatctccttcttcccgttctccacggagtcgcttccatggatgacattcctgccgacttccacggcgtagtccccacgaatggtaccgggggctgcctcccaaggcctggtggccccaatgatcctgcgggcagtcaac

SEQ ID NO: 6956 - DNA, 141 bp, Zea mays
  unsure (1)..(141): unsure at all n locations; Clone ID: LIB3061-069-Q1-N6-C11
aaataatatattttttttttttttttttttttttttnttttttttttttttttatttttttatatttttttttttttttttattttgtttatttttattttttttttttattattatactataaattttttgggggggggg

SEQ ID NO: 6957 - DNA, 273 bp, Zea mays
  unsure (1)..(273): unsure at all n locations; Clone ID: LIB3061-069-Q1-N6-C12
ctctaaacggccggcggtgggggggggggggggtatattattcctttccatttcaatggttcattcaggtcattgctcacactgccacccatggtgatgggggacactacgttactcatcgccgctaaatgagtaaactatcgagctaggtagctagtcancngctccggggggggggggacantacatantttcctcantagtanacaccccccgcagctgcgttgcaagggcagggacctggctgctgcagctgcaggccgcacatcgccg

SEQ ID NO: 6958 - DNA, 258 bp, Zea mays
  Clone ID: LIB3061-069-Q1-N6-C2
gggtgggggggtttttttttttttttttttttggggaacgagcaggcatttttattcgaagcaaaagtgcagccaattcccaccatactaggaaccaggccagcgctgcccaaaaacgctcaaacaaggaaaaaaaacgagaaggaaccaaagggtggtggaaaccaagtacacataactccaatacacgactaacaatgcgaattggggggaaacagatcgaaatgcaggcgatggttctccggcctgggcttcttc

SEQ ID NO: 6959 - DNA, 481 bp, Zea mays
  Clone ID: LIB3061-069-Q1-N6-C4
actgcagccttaaaatcatagatttacttgtttcagttgcatacagcatcagagtctaggaaaacgggcaaaggggcccaattcaagcatcgacgaagtaccaatgtaccaacaacaggcgtagggctcaacatcgacaaatttattacgagaaagacaatacgacaatctggttggtcacattgactccagatgcaaaagaccacatgattccatacaggcggcagaatgtatcactccaagataggggctatttaagcatcagcaaaccccagttcggagagcttgaggggggcctctttgtagtcatcaaagaaaggctttttatccgcagcatatttttcgacaaggagggcggaaaacagggtcgctcaacagggctttgtcacttgggagctgaagaaggcccttcttatcaccactcaaaagttccttgaagtaagagttgtcaaagaccaaagggtttgtagtccaggccccc

SEQ ID NO: 6960 - DNA, 546 bp, Zea mays
  Clone ID: LIB3061-069-Q1-N6-C6
gggtgggtgtgttttttttttttttttttttaaaaagtactttcttatttctgggacgccacaaacatcatccaaaaaacttcattattgaactataactcataagcaatctaaaaaagggcaccaccaatgatgggttgttggtagaacactggggggggtgtcaaaacaagttggttgaatggcagcaattgttgcagttgtaagagggtgccagcgttaggcatagcgtgcaggtagaacggcaacaactgttgttgtgtcaaaaaggcagcagggctcacatcagctagctggctgaatggtagtagttgttgctgctgtaaataagcagcaaagttcaatgctgctagttggttgaatggaagaaattgctgggggtaggcagcaactagctggctgaatggtaattgttgttgcaaataagcagcagagttcaatgcagccagttggttgaatggaagaaactgatgttgctgagagtatgcagcaaggtttgctagcacaagttgttgtagttgttgtgccctgatgttttgtgccacc

SEQ ID NO: 6961 - DNA, 514 bp, Zea mays
  Clone ID: LIB3061-069-Q1-N6-C7
gggtgggggttttttattttttttttttttttttttttttttttttttttttttttttttttttttttttttttttttttttttttttttccgggaaaagggcaaccaaaaattgggttattttagggaaccccaccccggtaggggggccccgggggggggaccccccaaaaggaaaactggggcccggggggccccccggaaaatccggcccgggcccggggggcgaccccccttcccctaaaggggggcgaataaaagctgggggaaaacaggggaaaagggggtccccgggggaaaatgtaaccccccaaaaattccacacaaaaaacgacccggaaccaaaaagggaaaagccggggggccccaaggggggagcaaaccaccataaatgggggggggctaactgccccctttccagacggaaaaccggtgggcccccctgcaaaaaaaaaagggccaaccccccgggaagagggggtttgggaatgggccccccggggggttttttttt

SEQ ID NO: 6962 - DNA, 446 bp, Zea mays
  Clone ID: LIB3061-069-Q1-N6-C8
atcaactccaaattgggttttagcacaattaatattagtttgcattatgtagcaatgctcatgactcatgagccaccaacatattttttctgggacacagaacatacaaaatcttttaaaaaggggttatattgaacacttcatcaaattggtgggggacttaagctattttcgttccttttggcagctcataccaagtttgagggttgtagtcatattctacgtatggacggggcaacttttttaaggaaacgatgtcctcaaaattatcatgcccataaagaacaaggattttgcaatcacattcttttcctgaaatatgtgttttcctttcaatagcatgcacttcagcatcaaaatagagaccactctgttcaccttaccttggaacaaaaaacagggtcccaaaaataaacattttcacattcttgggccttgtttggcac

SEQ ID NO: 6963 - DNA, 551 bp, Zea mays
  Clone ID: LIB3061-069-Q1-N6-C9
ggtgtttttttttttaaaaatgtactttcttatttctgggaagccacaaacatcatccaaaaaacttcattattgaagtataactcataagcaatctaaaagaggcaccaccaatgatgggttgttggtagaacgctgttgggtttgtcaaagcaaggtggttgaatggcagcaattgttgcagttgtaagagggtgccagcgttaggcgcagcgtgcaggtagaacggcaacaactgttgttgtgtcaagaaggcaacagggctcacatcagctagctggctgaatggtggtagctgttgctgttgtaaataagcagcagagttcaatgctgccagttggttgaatggaagaaattgctgggggtaggcagcagctagctgactgaatggtagttgttgttgcaaataagcagcagagttcaatgcagccagttggttgaatggaagaaactgctgttgctgagagtaggcagcaaggtttcctagcacaagttgttgtagttgttgtgccttgatgttttgtgccaacaaatgcaccaaaagtaactgc

SEQ ID NO: 6964 - DNA, 549 bp, Zea mays
  Clone ID: LIB3061-069-Q1-N6-D1
gtgtgttttttttgggatttttataatgaattgtgcaaaagaacacttacagctccacctccaccaaacagcgtcatcatgtttcaggtacaggatgttcgaagctatttgtgggagcgagtggtacgtcgagtaacacagacagctaagggtgaagcgcagcttattataatattatatatatatatataataaaggaagaaattgcacgaattttaagggaagccgttcgcaagtacaacttcatttgattccagatgcgtttaataaatgcttaacactccatgcgaatttagcgtcaagtagaccggtcttcagaagatacgaagcacaagctcaaaccatatcttgaacagacgccgccagtactcctaaatctgtcaggcatggtgtaacatttagtatctctcgtggcgcctgctgcgctccctggagcgtgaacgctctctgctccttgaatcatgtccacgggaagcggtaataatccgtattccgatcacggtcatggcgcctgtccctatcatgacgtttatcacgaacccctttcta

SEQ ID NO: 6965 - DNA, 404 bp, Zea mays
  unsure (1)..(404): unsure at all n locations; Clone ID: LIB3061-069-Q1-N6-D10
gcgtttgtttggttttttttttttttttttttttttttttttttttttttttttttttttttttttttttttttttttttttttttttttttttttttttttttttttttttttttttttttttttttttttttttttttttttttttttgggggggggggggggggnattttaaaaaaaaaaaatttaaaaccaatttgggggaatataaaacaaaaaaaaattaaaaaaggtttttttttttttgggggagaccaaaaaaataaaaaaaaaaattttttttttaattaattatttaaaaaaaataaaaaaggggggcccacaaaaggggggtttataaaaaaaaattatatttttttaaaaaagaaagtgttgaataggaaaatttttgttatttttaaaaa

SEQ ID NO: 6966 - DNA, 556 bp, Zea mays
  Clone ID: LIB3061-069-Q1-N6-D4
gcctgtggttttttttttaagaactagaaatgtactttcttatttctgggaagccacaaacatcagacaaaaaactttattattgaactataactcataagaaactaaaagaggcaccaccaatgatgggttgttggtagaacgctgctggggttggcaaagcaagttggttgaatggcagcaattgttgcagttgtaagagggtgccagcgttaggcgcagcgtgctggtagaacggcaacaactgtggttgtatcaagaaggtagcagggctcacaccagctagctggctgaatggtagtagttgttgctgctgtaaataagcaggagagttcaatgctgccagttggttgaatggaagaaattgctgggggtaggcagcaggtagctggctgaatggtagttgttgttgttgcaaataagaagcagagttcaatgcagctagttggttgaatggaagaaactgctgttgctgagagtaggcagaaaggtgaggctagcacaagttgttgtaattagtgtgccctgatgttttgtgcccataaatgcaccaaag

SEQ ID NO: 6967 - DNA, 380 bp, Zea mays
  Clone ID: LIB3061-069-Q1-N6-E1
gtttttttttttttttttttttttttttttttttttttttttttttttttttttttttttttttttttttttttattttttttttttttttttttttttttttttttttttgtttttttttttttttttatttttttttttttttttaaaaaaagggggttttttttttggggggacccccaaacttagaaaaaaaaatttttttgggggatttatcaaaaaaaaaaataaaagaagggggccccccaaggggggggggggggaaaaaaacggtggggtggaaaaaaaaagggggggggaagggaaaaaattttggcaaaaaaaaagggggggcaagattagggcaaaccggggggaaaaaaaaaaaaatcggggggtgt

SEQ ID NO: 6968 - DNA, 421 bp, Zea mays
  unsure (1)..(421): unsure at all n locations; Clone ID: LIB3061-069-Q1-N6-E10
gtggggtgggtggtttttttttttttttttttttttttttttttttttttttttttttttttttaaaatgggaacaatactttttttttttcatttcaattggtcattcaggggattggtcaccctgaccctgccccccatggggattcggggggggggggggggaaacatccccgctaaatgactcaactaggtagctagcccgcggctattctccagcacatagttttttcagggggggacaccccccgcagcagcgtaggggcctggagtcggttgttgtaagcccaacatcaccgtaagttggtgggctttttgggccggcaaaagccccgagacctggcccttttgngggtggttttgaaggatggactggaagaccaaacccaaaatccccttggaccggggctggtggttcacc

SEQ ID NO: 6969 - DNA, 178 bp, Zea mays
  Clone ID: LIB3061-069-Q1-N6-E11
gggggggggggtttttttaattttttttgtggggggtttttttttttttttttttttttttttttgagatttatttgtttttttttgggagggggcgtttttttttctaaaaaaaccttttttttttttcaccataatatttatctaggggggggggggggggctcccttattatttt

SEQ ID NO: 6970 - DNA, 574 bp, Zea mays
  Clone ID: LIB3061-069-Q1-N6-E12
gggggtgtggggggtttataataatagtattctcgttgactcaaaaatgggcaggtctgacagacgttatcctaatcgagaggcaatttacaaaacctccaggctccagccgaaagtatcctgtgttcacaggccaagtcctacttcaacagggtaagaaggtgaacgaaaagattcgagaaactcacatcaatctaaaattgcaacactatcaacgacgatgtttagcattattccaccaccataactcaagacgatgatgggggaccttgttctaggtctagatcgtccaccatcttctgtatagattcgatatcacctgttgctgatagggtgtgaatccgcaggctgtctgcatcctcatctgtaactccgaagatttctttgactacaagtgagctgtcccgtgaacagaactccggaagttctgataagtataggatttttccaaacagtgcttgtacagcaagcttccgcttaaaaccttgctctgtaaaaccagataagtccataactactggccctttttcccggacaattcgtcttgaaatctcatttaaaatttcagcaactt

SEQ ID NO: 6971 - DNA, 551 bp, Zea mays
  Clone ID: LIB3061-069-Q1-N6-E3
aaatacaaaaatcatttattcatgattaagcatactgctgcaccgacaactgttcctggtaaaacacttgacaacccgtccatgaaaccgaactgcattaagacacaaaccacatgtacttcaaacttcgaagaacaccctcctggcagagaccacaggcacaaagacaacccaggtgtacacagcaaagaatagactgatcggtttatgatgcgtacagtcttgatctcgatctctcaatctccagcaatgtgcacaagaaatgaacgggactttatgaaaaactaatgagcggtactccaggtgccaaagctgcatagtgccatccaatgatccaaagctcagcctccagaccgaaaccgctttcagcgttgaatgaactgaaaacaattgtatctatgaatatcttccgctgcagattatattctggttgcatttggtttaccctgtattgtcggcacaacagcggccatctggttgactgcagcataattctctttttcccgagaagacccaatgaatgaacaaccccttgcttgaaaacaatctca

SEQ ID NO: 6972 - DNA, 465 bp, Zea mays
  Clone ID: LIB3061-069-Q1-N6-E4
ttgttttttttttttttttaaaatctggaaatgtaacttcttatttctggttggccacatacatcatccaaaaactttattattgaattacaactaataatcaatctaaaagaggcaccaccaatgatgtgttgttggtaggaggctgctgggtttgtcaaagcaagttggacaaagggcaacaattgttgtagttgtaagagggttgcggggttagccgcaaactgcttgtagaaaggcagcaactgttgctgtgtcaagaaggaagcacgacttgctgcagctagctcgctaaatggcagtagtatttgctgctgcaaataagcagcggggttcagtgcggccaattggttaaatggaagaagttgttgttgctgagagtaggcagtagctagctggctaaatggtaatagttgttgctgcaaataagcagcagggttcaatgtagacagttggttgaatgga

SEQ ID NO: 6973 - DNA, 407 bp, Zea mays
  Clone ID: LIB3061-069-Q1-N6-E5
taaaacgggccggcgcgggggggggttttttttttttttgcaactgaacaacattgcataagtcagagacataaaaaactttatttgacaggaaaaatagagccactgcaagcagcaagtacaagtgaactttatttgatgtatgtctgcgggtatacaaaagcattgaaccgggggggggatttgctaaatatctaaatcgccctcacctcctccagctaacaatatgctctgatatctggcttgcaaaatagaagtttcagtcctctttgaagagctcacggccaattatcattcttcttacctcactagtaccggcaccaatctcaaacaattttgcatctctcaggagacgaccagttgggtactcatttatgtacccatttccaccaagacactggattgcc

SEQ ID NO: 6974 - DNA, 493 bp, Zea mays
  Clone ID: LIB3061-069-Q1-N6-E6
cgagaaaaatttaaatcaatttttggattttttttaggaaacacatgtgggtttgagggcccctttgccaagtccatttaatttgtaatttaaaaaaggcccctccaacgatgggttgttgcagggcagggttaataaaagagaactggttgtttggcaccaattgttgttgctgttgcaggaaggtagcaaccaaggggttacccactgccaagggtttaagtaactgtggccgttgttgtaggtccccaccaaatttggccacacccagttggttgaatggaaccaactgttgtaagtaggcagcagggtttgccacagttagctgagtcaaagctggtccaattggttgcaccacctgttgttgtaggtccttaggtgcattgcccaccgcaagcggcttaaataaaagtagttgtaggtaaacggcagggttaaccatggttagttgactgaccactggcttaaactgttgcacttgttgttgttgctg

SEQ ID NO: 6975 - DNA, 529 bp, Zea mays
  Clone ID: LIB3061-069-Q1-N6-E7
gtgtgtgttttttttgaattaaaaatagatctctaatacttagttactgagaggtcgcacatatcagcatgagaactttattattacagtataaatcataaaaaatctagaagatggcaccaccaatggtgggcggttgcaataaggggggagggggcggcaaagcatgttggctaaatggtagcaattgttgttgttgtaagaaggcaacaatgtttgccacattctgtgggtagaatggtagcaattgttgctgttgcaagaaggcattaatgtttcccacaacttgtgggtaaaatggcaacaaatgttgttgtctcaagaaagcaacaatgtttgccacagcttgcagatggaatggcagaagctgttgttgcagtaagaaggcataagggctcccgacaagttggttaaatggtagtagctgttgtgcctgcaagtagatagcagggttcaccccagctagttgattgaatggaagaaactgttgttgctgggagtaagcagcaaggttcgctgcaactacttg

SEQ ID NO: 6976 - DNA, 365 bp, Zea mays
  Clone ID: LIB3061-069-Q1-N6-E8
ggggggggtgtttttttttttttttttttttttttttttttttttttttttttttttttttttttttttttttttttttttttttttttttttttccttttttttttttttttttttttaaattttttttttttaaccgggaaaaacccgaggggggggggggggaattttaaggaaaaacaccccgggggggggggcccattatcggggccatccaaaagggaaaaaaaaaaaggggccccccaacaaggggggggggccccccaaagacaggggtcaaaaaaaaaaacggggtgggggggaaaaaatgttcctgctggagaaaggggggaaccaaaggggaagccccccccaagggataaaaa

SEQ ID NO: 6977 - DNA, 525 bp, Zea mays
  Clone ID: LIB3061-069-Q1-N6-E9
ggaaatgtaacttcttatttctggttggccacatacatcatccaaaaaatttattattgaattacaactaataagcaatctaaaagaggcaccaccaatgatgtgttgttggtaggaggcccctccgtctgtcaaagcaagttggacaaagggcaacaattgttgtagttgtaagagggttgcggggttagccccaaactgctggtagaaaggcagcaactgttgctgtgtcaaaaaggaagcacggtttgctgcagctagctggctaaatggtagtagtatttgctgctgcaaataagcagcggggttcaatgcggccaattggttaaatggaaaaagttgttgttgctgaaagtaggcagtacctagctggctgaatggtaatagttgttgctgcaaataaacagcagggttcaatgtaaacagttggttgaatggaagaaattgttgttgctgaaagtagggagaaaggtttgccaaagctacttggttgatcacaggtagcaccagttgctgcaactgctg

SEQ ID NO: 6978 - DNA, 417 bp, Zea mays
  unsure (1)..(417): unsure at all n locations; Clone ID: LIB3061-069-Q1-N6-F10
cattgaaaatctggaaaatgtaacttcttatttttggtgggccacatacatcatccaaaaactttattattgaattacaactaataagcaatctaaaagaggcaccaccaatgatttgtggggggggggggggcgttctttctttcaaancaagttgaacaaagggcaacaattgttgtatttgtaagagggttgcggggttagccgcaaactgctggtaaaaaggcagcaactgttggtgtgtcaaaaaggaagcacggtttgctgcagctagctggctaaatgggagtagtatttgctggtggaaataagcaggggggttcagtgcggccaattggttaaatggaagaagttgttgttttttaaagtaggcaaaagctagctggctgaatggtaatagttgttggtgaaaataag

SEQ ID NO: 6979 - DNA, 547 bp, Zea mays
  unsure (1)..(547): unsure at all n locations; Clone ID: LIB3061-069-Q1-N6-F12
gggggttgttggggtttgaaaggaacaaagtttgttatttgccaacagattacacacatgattggcattccacacgcaaccgatcgatatgacgattatactcctatttattagcaccagctatatatatatagccatgtctggagtctggggtggggggggggccganatcgatgatacagagatagattcatcggtttgcatgagcatgacttgttggcagccactatgttacaccaccatccaccaacgcatgtacaaagttctgcatcatcatcgcatcgcctccgcctgatgatgatagatcagtgcagcgccgtcaggacagtagacccttccaccaccttgaaagtggcaccgcagatctcttcttcgtcggcggggacagcggtgaccttgtgcttggggttctcgtagcacttgagccctccgagggcgttggagtagaagcagccttgcgggaacggcgcgagcgacttgccgcatgagcctttgagcatgtcgatgtcgtcggagaaggcgacgcagccgtcggcggtgatccccc

SEQ ID NO: 6980 - DNA, 550 bp, Zea mays
  Clone ID: LIB3061-069-Q1-N6-F3
ctaaaaagtactttcttatttctgggaagccacaaacatcatccaaaaaacttcattattgaagtataactcataagcaatctaaaagaggcaccaccaatgatgggttgttggtagaacgctgttgggtttgtcaaagcaagttggttgaatggcagcaattgttgcagttgtaagagggtgccagcgttaggcgcagcgtgcaggtagaacggcaacaactgttgttgtgtcaagaaggcaacagggctcacatcagctagctggctgaatggtggtagctgttgctgttgtaaataagcagcagagttcaatgctgccagttggttgaatggaagaaattgctgggggtaggcagcagctagctgactgaatggtagttgttgttgcaaataagcagcagagttcaatgcagccagttggttgaatggaagaaactgctgttgctgagagtaggcagcaaggtttcctagcacaagttgttgtagttgttgtgccttgatgttttgtgccaacaaatgcaccaaaggtaactgctgtaataaggctg

SEQ ID NO: 6981 - DNA, 567 bp, Zea mays
  unsure (1)..(567): unsure at all n locations; Clone ID: LIB3061-069-Q1-N6-F4
ggggggtttttttttgacttaaaatatagatctctaatcttttattactgagaagttgcacatatcagtatgagaactttattattacagtagtaaagcattaaaaaaatctagaagatggcaccaccaatggtgggctgctgcaataagggggggggaggcgtcaaagcaagttggttaaatggcagcaattgttgttgttgtaagaaggcgacattgtttgccacatcctgtgggtagaatggtagcaactgttgctgttgcaagaaggcgttaatgtttcccacaacctgtgggtaaaatggcagcaattgttgttgttgttgcaagaaagcagcaatgtttgccacaacttgtagatggaatggaagcaactgttgctgcagtaagaaggcagnagggctcctgacaagttggttgaatggtagtagctgttgtgcctggaagtaagcagcagggttcaccccagctagttgattgaatggaagaaattgttgttgctggaggtaagcagaaaggttgggtgcaactacttgattgaatgttgggaagcaactgttggtgtag

SEQ ID NO: 6982 - DNA, 459 bp, Zea mays
  unsure (1)..(459): unsure at all n locations; Clone ID: LIB3061-069-Q1-N6-F6
gggcggactagcgatttattcatccattcaacctcatcacaatctggtcctttctactggcacttgggataattaactaaaaaacacccaccgaccgcggggtaattggggacataacctcaatgggatacacagacatgccgccgcagagcaaaacacgtcgcagatcccctctttttctaactccggccctctctctctctccctctgggcccgcaaaaactaggcgttggaggcacgttagcgccaggttttcctcccatgcttacccagccacagccgtccacaccttggatgctcacagctcgtccttgacgggctcggcgggggctgccttctcggatgccggtggcccctgggtggtggtggtggtggcngcccctgccgtctccttgctcttcttgatgaagtcgacgatgtcgtccgccgtcctgccgctgtcgtaggatgtcaccttcc

SEQ ID NO: 6983 - DNA, 539 bp, Zea mays
  unsure (1)..(539): unsure at all n locations; Clone ID: LIB3061-069-Q1-N6-F7
ggcttgtttggttttttttatcgaacacccttgggagaccaatatcacattagaatctggaaatgtaacttcttatttctgggtggcgcacatacatcatccaaaaaactttattattgaattacaactaataatcaatctaaaagagggcaccaccggggggggggggttggtaggaggctgctgggtttgtcaaagcaagttggacaaagggcaacaattgttgtagttgtaagagggttgcggggttagccgcaaactgcttgtagaaggcagcaactgttgctgtgtcaagaaggaagcacgacttgctgcagctagctcgctaaatggcagtagtatttgctgctgcaaataagcagnggggttcagtgcggccaattggttaaatggaagaagttgttgttgttgagagtaggcagtagctagctggctaaatggtaatagttgttgctggaaataagcagcagggttcaatgtagacagttggttgaatggaagaaattgttgttgctgagagtagggaagaaaggtttgcc

SEQ ID NO: 6984 - DNA, 475 bp, Zea mays
  unsure (1)..(475): unsure at all n locations; Clone ID: LIB3061-069-Q1-N6-G1
gtttggttttttaattaatgcagacctatctgcttccacaagctcatgtatagatcaatagatgtgtctccacaacggcgacatacatgcttgatagtagtagcaatatatatatatgtagagctacatacatagtacatgcatgaaaggatgaagtgaacttggttggggggtcatgcatggttcgctttcgttcgtaagcacgcaagcatcagttgttcttaacaactggtggagctcctgatctgtccatgaggacgagcaccggtgtggcgggcggcgccctggcacagtccaccttcacctccttcgccgccgccgccttctcagggacatggaaggcagacgcagggaaggtcctggtgatcccagcaacgctcttgcagacaagcttcccgccagccgncgggtcgccaagagcggggatcttctcgacgggcacccacagcatgagctccctggtctttatcccctt

SEQ ID NO: 6985 - DNA, 286 bp, Zea mays
  unsure (1)..(286): unsure at all n locations; Clone ID: LIB3061-069-Q1-N6-G10
atccaaataaatcccaaccaaaatatttattatttcttagaaacccctttccttttaaancccccattttcgggggggggggggggggggtccaaaaaaancccccccacccttggggtgctgcaaggcagggttcatcaaaaaaaaccggttttttggccccaatttttttttcttcttccggagagtttccccccatgggttagccccttcccatgggttaaataactgttgtcccttttgggggtcccccccattgttttcccccccccgttgttttaatgga

SEQ ID NO: 6986 - DNA, 583 bp, Zea mays
  unsure (1)..(583): unsure at all n locations; Clone ID: LIB3061-069-Q1-N6-G11
gggtgggtggtggggttttgtaaacacttaattggattcctttgtccatttcaggtacttaaaccagccagcattaaataagcactacgtttgtccagaatctaaaagggggggaactgggatttagagaggagaaaggcgaatanatggggagggggggggggggcccatnaaccaccattntaaaacccanttaatcgtccttctattcctaaatacctgccatgccaggacactgacctcacctatcacccaaacacacaagcaactaactaatcctcaagctcctatgaactacagaaaacaagggcaagaaacaagctcaatgggatctcaggatttcctcaaacaacccccagcctcaggttcccgccccataccactgtcaatggccgagctaaccaaaaaaaaaatttaacagccatttgggcttgccggacttctcagctgatgatttcaggtcctgtggggcgacatcatttcctttctcctcgtttttctctactgctttggctaatgaaagctctttgttcaagacatcagcctcaacattggtgagttccggtgatacagttcctacaag

SEQ ID NO: 6987 - DNA, 558 bp, Zea mays
  Clone ID: LIB3061-069-Q1-N6-G2
agaaatgtactttcttatttctgggaagccacaaacatcagacaaaaaatttattattgaactataactcataagaaactaaaagaggcaccaccaatgatgggttgttggtagaacgctgctgggtttgtcaaagcaagttggttgaatggcagcaattgttgcagttgtaagagggtgccagcgttaggcgcagcgtgctggtagaacggcaacaactgtggttgtatcaagaaggtagcagggctcacaccagctagctggctgaatggtagtagttgttgctgctgtaaataagcaggagagttcaatgctgccagttggttgaatggaagaaattgctgggggtaggcagcaggtagctggctgaatggtagttgttgttgttgcaaataagaagcagagttcaatgcagctagttggttgaatggaagaaactgctgttgctgagagtaggcagcaaggtttgctagcacaagttgttgtagttgttgtgccctgatgttttgtgccaataaatgcaccaaaggtaactgatgtaatagggctgatgattgt

SEQ ID NO: 6988 - DNA, 542 bp, Zea mays
  Clone ID: LIB3061-069-Q1-N6-G3
agaatctgggaatgtaacttcttatttctggttggccacataccatcatccaaaaaactttattattgaattacaactaataatcaatctaaaagaggcaccaccaatgatgtgttgttggtaggaggctgctgggtttgtcaaagcaagttggacaaagggcaacaattgttgtagttgtaagagggttgcggggttagccgcaaactgcttgtagaaaggcagcaactgttgctgtgtcaagaaggaagcacgacttgctgcagctagctcgctaaatggcagtagtatttgctgctgcaaataagcagcggggttcagtgcggccaattggttaaatggaagaagttgttgttgctgagagtaggcagtagctagctggctaaatggtaatagttgttgctgcaaataagcagcagggttcagtgtagacagttggttgaatggaagaaattgttgttgctgagagtagggagaaaggtttgccagagctacttggttgatcacaggtagcacgagttgctgcagctgttgtgccctga

SEQ ID NO: 6989 - DNA, 497 bp, Zea mays
  Clone ID: LIB3061-069-Q1-N6-G4
gcagttcaaggatcttttcattgccatgtgtgcacaaattcctcatgcagaagacaaagctgcttgtccggggcaacatcgccttaaaacaggcaacagactgccactacccctaaaggagctgagcctgctctgcgtgcgtcatggccaaccagcagcagccagcacctgaaccaaaaaaacctgaagcagcacctgaaccaagaaactggaccagttgggcctcaaacagcaaatagctggcagctgaagtatcgcctcggattagtctggtgttctttatctacatcttgatgctgaagtagtcggaatcaaaatgatgcagccttacatatccatcttcaccgccacttgaaaaactccgcccatcaggattaaatgccaaagcattaattggcccaaaagtcctttaacaccaccaatttcctcttgcaaaatcttgtgatagaatttagcctcgaattaccagcacgggggatctggcatagtcacattca

SEQ ID NO: 6990 - DNA, 574 bp, Zea mays
  Clone ID: LIB3061-069-Q1-N6-G5
gtggggttttgtttttctgaaatcataaacgaaccaccgtggacgaatatataacaatcaattcagagcagcctgaaccatgatcccaggaacgggaagactgccaccaacaagcgcatcacgagtggtgcctgcttgtacatggtactgcccaaccccatcgttcctggcgtccgccgtcgtctcattctcgttcttgttgaaggagtggcagtataatctgcatcttcctccccagtcgctgaaggctgcgattttgtgcttcgatcagtggtgccagctgagaatgagctcctcctctttgtctcctgagcagcagtgtcgttgtccagaagctcatcccatcctccatatccactgctgctgctcttggtgttatcgtcagctccaacaccagttgaggcagcaccagcaaaattgttagaaacacttgactggtagttgctcgtcctccttctcccctcataatagttgctgctgctgctgctgcggctgcggtatccattgcctcgaccacctgccgcaaagccagcggcgtcctcagggtaatcttcctcttggaatggtctcctcc

SEQ ID NO: 6991 - DNA, 553 bp, Zea mays
  Clone ID: LIB3061-069-Q1-N6-G6
agacctaagtctgtcttattcactgatatcacgtgcttaaatccgtactcgttgtcgagcagaatataaacacaacggatgttacactgattgcgcaagaaattgtagctacagacaagactggacgttcatctacaaaaaaacgatttttcttgtaaacttttcgatcatgctcaacaaaaggtagcacttccgtcactacatcaaaattcggatttacagcaggaagcaactagcccaaattctacaatctaaaacagatgagacaacaaaaggagagaagaagctataagccgctgaacaaacccgcttgaaattgaggttgcggcaaacaatgagccatttgaactccactacttcggtggcgtcattcaagccgttttggcagtggctgaaaaaaccgtcctctaggcaccataaatacgttcgtttttactccacctcctgtgcgcctcctggaagcaaatgactatgcaagatgatcttcatccttcccatgcatatttttaacaaaatggacggctctcaccaccccagtttagaaccattgcca

SEQ ID NO: 6992 - DNA, 408 bp, Zea mays
  unsure (1)..(408): unsure at all n locations; Clone ID: LIB3061-069-Q1-N6-G7
gccttggtgggttttttgcagcaccaaaaagcaccatttttttccttaggatttaacttagaataaagcctgacgggggtaacagcacccatcgatccgcagtccatgctggttgatgcatgggtctgctggagccgaggatgaacacagcactgagagggggcgacagagcgaccttcaatcaaaaacacagatgggcaacaacaaacacgagacgaacgaagataaacactctggactagggtaaacaacacgggagcgaacaggataacttgggcgcgcgggccccaccggtcagttcctccagttcccgtcggagttggcgtagccgccgccacggttgccaccgccgtagnctgcggcaccaccaccgtaggcggcgtcgncaccaccgtagccgtcggcacc

SEQ ID NO: 6993 - DNA, 570 bp, Zea mays
  unsure (1)..(570): unsure at all n locations; Clone ID: LIB3061-069-Q1-N6-G8
ggctttgtttgggtgtttcaaatgtgtcgtttggcaacacgaataagtcttttaccaagatcgcttcgggacgaagcgggctacacgaactaccgcacaaaatagactttaaagccgtttttacactagttcttcaccaccccgtctaaagggggggggggggataaggttacaaattgccctcctccatccctccgccgccactggggccgggcgcgagatacgcctacgcgcgctcgccgcggatgcggcgggcgagctggatgtctttgggcatgatggtgacgcgcttggcgtggatggcgcagaggttggtgtcctcnaacaggccgacgaggtaggcctcggcggcttcctggagggccaggacggcgtggctctggaaccgcagatccgtcttgaagtcctgagcgatctcacggaccaggcgctggaagggcaacttccggatcagcagctccgtgctcttctggtacttgcggatctcgcgcagagccaccgtcccgggcctgtacctgtggggcttcttcacgccgccggtcgtcggcgcagacttcctcgccgccttgg

SEQ ID NO: 6994 - DNA, 406 bp, Zea mays
  unsure (1)..(406): unsure at all n locations; Clone ID: LIB3061-069-Q1-N6-H1
tcgctgcacgcgtcgtaagctggtccttagacggccgcctgtggggggggtttggataaaaaaaagcttgttaagtcaatgtcggaaaaaaatatcattgcatgacatcccgtgtctaagtataatcagagttttaaacagatgactgatgagactgatattgcacaanccagaaccaaggggggggggcacctagctgtatagatcgtaattgttaggcggaggaccagccgaagcaaacggatcggatgcagtagtaccagttgtcgtcgactggtatgagaaggggaacttggtgccgaacccacgggactgttggaacgtatgggcgaacgcctggtacttgcggatataagaattaatgacactgtgccgagcattcttgatagactgctgtaagtgagct

SEQ ID NO: 6995 - DNA, 491 bp, Zea mays
  unsure (1)..(491): unsure at all n locations; Clone ID: LIB3061-069-Q1-N6-H10
tcaatcaatatattnattattttctagaaacactttcnntatnagggcaccattntcnantacatctcatatntaatctaaaaaaaacaccttcaactatnnnttnctnncaanacatttttgggggggggggggggggttntatngcancaattgttgttgctgctgcaggaggggagcgaccaatgggttagccactgccaatggattaagtaactgttgtcgctgttgtaggtacgcagcagagtttgacacagccagttggttgaatggaagcaactgttgtaagtaggcagcagggtttgccacagctagctgagtcagagctggtacaatttgttgcagcaactgttgttgttggtacgtaggtgcattgcccaccgcgagcgggctatatgaaagtagtttggggtagacggcagggttcaccattgggtagttgactgagcactggcattaactgttgcagctgttggtgttgctggtttgca

SEQ ID NO: 6996 - DNA, 602 bp, Zea mays
  unsure (1)..(602): unsure at all n locations; Clone ID: LIB3061-069-Q1-N6-H11
cacgcgtactatagcttgntcctctannacgccgggcgggtggttgggggtttcatccaaaaaactttattattgaattacaactaataagcaatctaaaaagggcaccaccaatgatgtgttgttggtaggaggccgctgggtctgtcaaagcaagttggacaaagggcaacaattgttttagggggggggggggggcggggttacccccaaactgctggtagaaaggcagcaactgttgctgtgtcaagaaggaagcacggtttgctgcagctagctggctaaatggtagtagtatttgctgctgcaaataagcagcggggttcagtgcggccaattggttaaatggaagaagttgttgttgctgagagtaggcagtagctagctggctaaatggtaatagttgttgctgcaaataagcagcagggttcagtgtagacagttggttgaatggaagaaattgttgttgctgagagtagggagaaaggtttgccagagctacttggttgatcagaggtagcacgagttgctgcagctgttgtgccctgatggtttttaccaatgactgcaccaaagataggggtggcgattgttgaaacaac

SEQ ID NO: 6997 - DNA, 564 bp, Zea mays
  Clone ID: LIB3061-069-Q1-N6-H12
gggggtgtggggtttttcatccaaaaaatttattattgaattacaactaataagcaatctaaaagaggcaccaccaatgatgtgttgttggtaggaggctgctgggtttgtcaaagcaagttggacaaagggcaacaattgttgtagttggggaagcttggggggttagccgcaaactgctggtagaaaggcagcaactgttgctgtgtcaagaaggaagcacggcttgctgcagctagctggctaaatggtagtaatatttgctgctgcaaataagcagcgaggttcagtgtagacagttggttgaatggaagaaattgttgttgctgagagtagggagaaaggtttgccaaagctacttggttgatcacaggtagcacgagttgctgcagctgctgtgccctgatggtttgtaccaatgactgcaccaaagatagggctggcgattgttgaaacaacaagggtgataaaggtatgttgcttgctgcgattgcttgttggagcctatagggctgaagagctgggttttcacatactgaagctatcattgatggaaggtatggg

SEQ ID NO: 6998 - DNA, 551 bp, Zea mays
  Clone ID: LIB3061-069-Q1-N6-H3
aaaaagtactttcttatttctgggaagccacaaacatcagacaaaaaatttattattgaactataactcataagaaactaaaagaggcaccaccaatgatgggttgttggtagaacgctgctgggtttgtcaaagcaagttggttgaatggcagcaattgttgcagttgtaagagggtgccagcgttaggcgcagcgtgctggtagaacggcaacaactgtggttgtatcaagaaggtagcagggctcacaccagctagctggctgaatggtagtagttgttgctgctgtaaataagcaggagagttcaatgctgccagttggttgaatggaagaaattgctgggggtaggcagcaggtagctggctgaatggtagttgttgttgttgcaaataagaagcagagttcaatgcagctagttggttgaatggaagaaactgctgttgctgagagtaggcagcaaggtttgctagcacaagttgttgtagttgttgtgccctgatgttttgtgccaataaatgcaccaaaggtaactgatgtaatagggctgaa

SEQ ID NO: 6999 - DNA, 509 bp, Zea mays
  Clone ID: LIB3061-069-Q1-N6-H4
gttgggttttttttttttttttttttttttttttttttttttttttatcgaggaaaatctcaatcaatattattgatttatttttagggaaacacatgttggtttgggggccccattgtcgagtacatcttatatgtaatttaaaaaatggggcgcggggacgatgggttgctgcaagggagggttcatcaaagagaactggttgtatggcagcaattgttgttgctggtgcaggaaggtagcgaccaatgggttagccactgccaatgggttaagtaactgttgtcgctgttgtaggtacccagcaaagtttgacacagccagttggttgaatggaagcaactgttgtaagtaggcaaaagggtttgccacagctagctgagtcagagctggtacaatttgttgcaacaactgttgttgtaggtacctaggggcattgcccaccggaagcgggctatatgaaagtagttttaggtagacgggggggttcaccatggctagttgactga

SEQ ID NO: 7000 - DNA, 305 bp, Zea mays
  unsure (1)..(305): unsure at all n locations; Clone ID: LIB3061-069-Q1-N6-H5
gctgggtgttgtttttttttattttttttttttttttttttttttttttttttttttttttttttttttttttttttttttttttttttttttttttttttttttttttttttttttttttttttttttttttttttttttttttttttggggggggggggggtttttttttttttttttttttttttttttttaaaaagtnaaaaaaggttttttttgttttgggggggggttttagtagggaaaaaaattttttttatgagattttctctagaaagattataaaagggggcccccccaatagg

SEQ ID NO: 7001 - DNA, 494 bp, Zea mays
  Clone ID: LIB3061-069-Q1-N6-H8
gtggggggggtgttttttttttttttttttttttttttttttttttttttttttttttttttttttttttttttttttttttgggggggcaaactgaagcaccaccaaaccaaaactgggatacaccccccccccacaaaaaaataaaccgtggggggggggagcgggaaaacaagcccctttattataaaccttgagaataaacccttttttcacaaacctcaagtaaaccggcggtgcatttttcttctccatggcggccccaaaaggggctttcactttgcacccaaaattccccaaatcaattggccaggccatgcattactgccaaaaaacaacctaattttgggcttgaaccaaaattctctaacaacaacccctgtgggtgtaaaaaaaaactctttgtttggcggaaaaaccaaaaaccccaaaacataagatttgcccaccactgtaaaaccatccatttcttttaaataaacccgacacctgct

SEQ ID NO: 7002 - DNA, 541 bp, Zea mays
  Clone ID: LIB3061-069-Q1-N6-H9
ggtgttgggggttttttttattttttttttttttttttttttctttctttttttttttttttttttttttatttttttttttttttttttttttttttttttttttttagaaaggcctttcttatttttggggccccccaaacattatcgggggggggggtttttgaactttaacccataagccatctaaaagggggccccccccatggtggggtggggggggaacactggtgggtttgtcaaaacaaggtggttgaatggccccaattgttgccgttgtaaaagggggcccccgttaggcatagcgtgccggtagaacggcaacaactgttgttgtgtcaaaaaggcagcagggctcacatcaactagctggctgaatgggagtagttgttgctgctgtaaataagccgcaaagttcaatgctgctagttggttgaatggaaaaaattgctgggggggggcagcaactaactggctgaatgggaattgttgttgcaaataagccgcaaagttcaatgcccccacttggttgaatggaaaa

SEQ ID NO: 7003 - DNA, 502 bp, Zea mays
  Clone ID: LIB3061-070-Q1-K6-A10
gcacaacaactacaacaacttgtgctggcgggagttgctgcctactctcagcaacagcagtttcttccattcaaccaactagctgcattgaactctgcttcttatttgcaacaacaacaactaccattcagccagctatctgctgcctacccccagcaatttcttccattcaaccaactgacagcattgaactctcctgcttatttacagcagcaacaactactaccattcagccagctagctggtgtgagccctgctaccttcttgacacaaccacagttgttgccgttctaccagcacgctgcgcctaacgctggcaccctcttacaactgcaacaattgctgccattcaaccaacttgctttgacaaacccagcagcattctaccaacaacccatcattggtggtgccctcttttagatttcttatgagttatagttcaataataaagttttttgtctgatgtttgtggcttcccagaaataagaaagtacatttctag

SEQ ID NO: 7004 - DNA, 446 bp, Zea mays
  unsure (1)..(446): unsure at all n locations; Clone ID: LIB3061-070-Q1-K6-A12
tattatnttttttttnttccttnattatttttttatttttttttatnttatattattannttnnttatttttttttttttttttanaaaccccccccccccccctctttttttggggcggggnnnnnnnnnnaannnnnaantattttttttatcaaattaaataataacatcttatttnntttttttttttaccttttcttttttattttactttttttttcttttttttttttttttttttatcttattttatcttttcttttttatcttattctttttttttttttatttttcttttttttttttttttttttttttaataacttatttttttttttttttttttttttttttttttatttttatttttatttcaattttttttttttaatttatttttctatttcctttttttcactttatttttaccttatttattttttt

SEQ ID NO: 7005 - DNA, 553 bp, Zea mays
  Clone ID: LIB3061-070-Q1-K6-A2
tgtaccaacatggcagccaaatattttgcctccttatgctccttggtctttctgcaagtgctgctacggcgaccattttcccgcaatgctcgcaagctcctatagcttcccttcttcccccgtacctctcaccagcggtgtcttcggtatgtgaaaacccaattcttcaaccctacaggatccaacaggcaatcacagctggcatcttacctttatcacccttgttcctccaacaatcatcagccctattacatcagttacctttggtgcatttattggcacaaaacatcagggcacaacaactacaacaacttgtgctagcaaaccttgctgcctactctcagcaacagcagtttcttccattcaaccaactagctgcattgaactctgcttcttatttgcaacaacaacaactaccattcagccagctacctgctgcctacccccagcaatttcttccattcaaccaactggcagcattgaactctcctgcttatttacagcagcaacaactactaccattcagccagctagctggtgtgagccctgctac

SEQ ID NO: 7006 - DNA, 416 bp, Zea mays
  unsure (1)..(416): unsure at all n locations; Clone ID: LIB3061-070-Q1-K6-A3
ttnntncnaccantttcttttttgttgttgggggggnnannntnncanntttntttttttcatttttcattttttttaaattttttttcatcttctttttttnnttttttttctttcttttcttttttttttttatatttttaattattttatnttttccatttatttttttttttttattttttatttttttttntttttnttttttttttttttactttttatttttttatatttttttttttcttctttttnttcttttttatttttatatttttttttnntttatttatcttctttttatttttttttttttttttttttttttttttttttttattttttttttttttttttttcttcctttcttttttttttttctttttttttttttttttttttatatattttttttt

SEQ ID NO: 7007 - DNA, 580 bp, Zea mays
  unsure (1)..(580): unsure at all n locations; Clone ID: LIB3061-070-Q1-K6-A4
tccgtagagacaatagcacatanaagcacatagtgtaccaacaatggcagccaaaaattttgcctccttatgctccttggtctttctgcaagtgctgctacggcgaccattttcccgcaatgctcgcaagctcctatagcttcccttcttcccccgtacctctcaccagcggtgtcttcggtatgtgaaaacccaattcttcaaccctacaggatccaacaggcaatcacagctggcatcttacctttatcacccttgttcctccaacaatcatcagccctattacatcagttacctttggtgcatttattggcacaaaacatcagggcacaacaactacaacaacttgtgctagcaaaccttgctgcctactctcagcaacagcagtttcttccattcaaccaactagctgcattgaactctgcttcttatttgcaacaacaacaactaccattcagccagctacctgctgcctacccccagcaatttcttccattcaaccaactggcagcattgaactctcctgcttatttacagcagcaacaactactaccattcagccagctagctggtgtgagcc

SEQ ID NO: 7008 - DNA, 564 bp, Zea mays
  unsure (1)..(564): unsure at all n locations; Clone ID: LIB3061-070-Q1-K6-A6
natgnaaacaacagcacatagaagggggggcgagtagcaaaaatagacaacaatggcggccaagaaattttccatccttatgctccttgctctttctgcatgtgttgctaacgcgaccatttttcctcaatactcacaagctcctatagctgcccttcttcccccataccttccatcaatgaccgctttagtatgtgaaaacccagcccttcaaccctacaggatccagcaagcaatcgcaacaagcaacttacctttatcacacctgttctttcaacaatcgccagccctatctttggtgcagtcattggtacaaaccatcagggcagaacagttgcagcaactcgtgctaccagtgatcagccaagtagctctggcaaacctttccccctactctcagcaacaacaatttcttccattcaaccaactgtctatactgaaccctgctgcttatttgcagcaacaacaactactaccattcagccagctagctactgcctactctcagcagcaacaatttcttccatttaaccaattggccgcactgaacccctctgcttattt

SEQ ID NO: 7009 - DNA, 580 bp, Zea mays
  unsure (1)..(580): unsure at all n locations; Clone ID: LIB3061-070-Q1-K6-A7
tnacaacatagnaagacacatagtgtaccaacaatggcagccaaaaattttgcctccttatgctccttggtatttctgcaagtgctgctacggcgaccattttcccgcaatgctcacaagctcctatagcttcccttcttcccccgtacctctcaccagcggtgtcttcggtatgtgaaaacccaattcttcaaccctacaggatccaacaggcaatcgcagctggcatcttacctttatcacccttgttcctccaacaatcatcagccctattacagcagttacctttggtgcatttattggcacaaaacatcagggcacaacaactacaacaacttgtgctagcaaaccttgctgcctactctcagcaacagcagtttcttccattcaaccaactagctgcattgaactctgcttcttatttgcaacaacaacaactaccattcagccagctacctgttgcctacccccaacaatttcttccattcaaccaactggcagcattgaactctcctgcttatttacagcagcaacaactactaccattcagccagctagctggtgtgagccctgctacctt

SEQ ID NO: 7010 - DNA, 573 bp, Zea mays
  unsure (1)..(573): unsure at all n locations; Clone ID: LIB3061-070-Q1-K6-A8
taaaattaattaaaagtagtttatgggggggagggtgtgtncgataaatatgtatgccattgtgtgatatggcataagttagaattaaggcgagtatgtattgtattatgaaactaattagagatatgcatgatgcttgtaagtggattgtacgcagagtactttggtaagggtatttctcaagtataaatgatttggttattgtatatgaattgagtgatcaagttaataatgtaaaaacaacgtttagtacttatagcgctttgccgacaagatttattggtggttgagtgaatttctaatgtatggtgacatgaatgccttgttgtattatgtggttttagttctactaaagataaagtgttgagtgttctaaatgttaaaagcatgataagtgtagaagttaaataagatctaagttagagttcttgctgtttggactgcatgtccaattttattacgtggctagttaagtaaagtaaaccgtgttttctgtagaaatgttatatataaaacttgtagataatctttttatcttgcttgtgtaaaaatttcatgaccataggttcagta

SEQ ID NO: 7011 - DNA, 570 bp, Zea mays
  unsure (1)..(570): unsure at all n locations; Clone ID: LIB3061-070-Q1-K6-A9
tgattgaaaccatagcaacatanaagcacagtagtgtaccaacaatggcagccaaaatttttgcctccttatgctccttggtctttctgcaagtgctgctacggcgaccattttcccgcaatgctcgcaagctcctatagcttcccttcttcccccgtacctctcaccagcggtgtcttcggtatgtgaaaacccaattcttcaaccctacaggatccaacaggcaatcacagctggcatcttacctttatcacccttgttcctccaacaatcatcagccctattacatcagttacctttggtgcatttattggcacaaaacatcagggcacaacaactacaacaacttgtgctagcaaaccttgctgcctactctcagcaacagcagtttcttccattcaaccaactagctgcattgaactctgcttcttatttgcaacaacaacaactaccattcagccagctacctgctgcctacccccagcaatttcttccattcaaccaactggcagcattgaactctcctgcttatttacagcagcaacaactactaccattcagccagctagt

SEQ ID NO: 7012 - DNA, 522 bp, Zea mays
  unsure (1)..(522): unsure at all n locations; Clone ID: LIB3061-070-Q1-K6-B1
agggtgttgctcgttgccctcgctctcctggctctcgctgcgagcgccacctccacgcatacaagcggcggctgcggctgccagccaccgccgccggttcatctaccgccgccggtgcatctgccacctccggttcacctggcgacctccggtgcatctcccaccgccggtccacctgccgccgccggtccacctgccaccgccggtccatgtgccgccgccggttcatctgccgccgccaccatgccactaccctactcaaccgccccggcctcagcctcatccccagccacacccatgcccgtgccaacagccgcatccaagcccgtgccagctgcagggaacctgcggcgttggcagcaccccgatcctgggccagtgcgtcgagtttctgaggcatcagtgcagcccgacggcgacgccctactgctcgcctcagtgccagtcgttgcggcagcagtgttgccagcagctcaagcaggtggagccgnagcaccggtaccaggcgatcttcggcttggt

SEQ ID NO: 7013 - DNA, 576 bp, Zea mays
  unsure (1)..(576): unsure at all n locations; Clone ID: LIB3061-070-Q1-K6-B11
tagcacatanaagcacatagggggggggggggcagccaaaaattttgcctccttatgctccttggtctttctgcaagtgctgctacggcgaccattttcccgcaatgctcgcaagctcctatagcttcccttcttcccccgtacctctcaccagcggtgtcttcggtatgggaggggccaattcttcaaccctacaggatccaacaggcaatcgcagctggcatcttacctttatcacccttgttcctccaacaatcatcagccctattacaacagttacctttggtgcatttattggcacaaaacatcagggcacaacaactacaacaacttgtgctagcaaaccttgctgcctactctcagcaacagcagtttcttccattcaaccaactaggttcattgaactctgcttcttatttgcaacaacaacaactaccattcagccagctacctgctgcctacccccagcaatttcttccattcaaccaactagcagcattgaactctcctgcttatttacagcagcaacaactactaccattcagccagctagctggtgtgagccctgctaccttc

SEQ ID NO: 7014 - DNA, 587 bp, Zea mays
  unsure (1)..(587): unsure at all n locations; Clone ID: LIB3061-070-Q1-K6-B12
gcacaaccaccaccaccgcctggcggggctgcaggtcgcctccttccatggcgcccaggaacgctctccccgccgccagcgccgtggccaacggcatggtgatggagccgaggttccgcggcgtccggaagcgcccgtggggcaggttcgcggcggagatccgggacccgggcgttagatcgggcgtgtggctcngcaccttcnacaccgcctaggccgcggggcgcgcctacgacgccgccgcgctccacttccgcgggcccaaggccaagaccaacttccccgtcgcgttcgccgcgcttccgccgccgccgccgcccaagaagccggccgccgtgaccgtgagccccagcagcagcagcaccgtggagtcctcctcctcctcctcctcccgggactcgcccgccacgccgcccagggccgcgtctccgtcccagcaggccccgtcgctcgacctcagcctaggcggcacaccggccatggtggccgcccagccgttcctcttcctggacccgaggctcgcggtgaccgtggccgtgccggcgcccgtgccctaccggccgaccgcggtcgccgccggtgccaac

SEQ ID NO: 7015 - DNA, 579 bp, Zea mays
  unsure (1)..(579): unsure at all n locations; Clone ID: LIB3061-070-Q1-K6-B2
ttgtattccatanaaaggctatggggttgattaatgctaatcctataatccatgagnaaaaaagaaggagcatccgacaggcaccagagaccacagatgaaatgcggcagagtccatagaccagctggaaatatttgatcacattagagatataaaggatccagagcacccatactcactggaacagctgaatgtggtgactgaagactcaattgaactcaatgatgaaagcaatcatgtcagggttattttcaccccaacagtggagcactgcagtatggcaactattattggcctttgcatacgggtgaaacttgtacggagtctccctccttattacaaggtggacataagggttgcccctggatcacacgcaactgaagctgctgtgaataagcaactgaatgacaaagaacgtgttgcggctgcattggaaaacccaaacctactggacatggttgaagagtgcttatcaccaacattcgattgaggtctcagttgttgcacatctgggagccatggtgtttcatgttcagaagccacacaagcttattgccataggaattcactcctgaatat

SEQ ID NO: 7016 - DNA, 589 bp, Zea mays
  unsure (1)..(589): unsure at all n locations; Clone ID: LIB3061-070-Q1-K6-B4
cgaaaaaaaattacaaggcaacgnaaaaatatcacttactggaacactacgttctgcaaaacggtgttctagaagagcaccagctagggagcagaataatgaacatactcagagtgagcagcttcatggttctgcaagtgagcagcaagctagagagcaacttcatggttctgtaagtaaacagcaaactgaagttcttcgctccaatgtcagcagtggcgatgcctcaaaatgtcattttggccctatagttactcagaagctgaaggaacattttgaaaaagatccatatccttgccgtgcaacaaaagagggtctggcacaagagctaggactgacatttaatcagatcagtaagtggttctctgccacccatcattattcaagagatgctgttgccaagaaccaaaaatacccaggagaaaatactactgagaataatagtagcacaatctttgatggtatacaagtaatagaacccaattttggtttgatagataaaccagatgcagatacaaatgacatgatttctgaaaagttgatggtacaaattaatcttaacgaaggcattgaagaggatatcccaccg

SEQ ID NO: 7017 - DNA, 576 bp, Zea mays
  unsure (1)..(576): unsure at all n locations; Clone ID: LIB3061-070-Q1-K6-B5
ngcattcctaccagcctgnaccacctagcctggtngaccctgccgcctacttgcaacagcagttgcttgcatcaaacccacttgctctggcaaacgtagttgcaaaccagccacaacaacagctgcaacagtttctgccagcgctcagtcaactagccatggtgaaccctgccgcctacctacaacagcaacaactgctttcatctagcccgctcgctgtggccaatgcacctacatacctgcaacaacaattgttgcaacagattgtaccagctctgactcagctagttgtggcaaaccctgctgcctacttgcaacagctgcttccattcaaccaactgactatgtcgaactctgctgcgtacctacaacagcgacaacagttacttaatccactagcagtggctaacccattggtcgctgccttcctacagcagcaacaattgctgccatacaaccagttctctttgataaaccctgtcttgtcgaggcagcaacccatcgttggaggtgccatcttttagattacatatgagatgtactcgataatggtgccctcattccggcatgtgtttc

SEQ ID NO: 7018 - DNA, 588 bp, Zea mays
  Clone ID: LIB3061-070-Q1-K6-B6
gttggcttctcctccccctccggttcgggttcgggttcgtgaggttctccggggttcggtttcgtgggtgagcggatcgagatggcggcgtcggatgttgagtaccgctgcttcgtcggcggcctcgcctgggccacggacgaccactccctccacaacgccttcagcacctacggcgaggtcctcgagtccaagatcatcctcgatcgggagacgcagaggtcccgcggcttcggcttcgtcaccttctccacggaggaggcgatgcggaacgccatcgagggcatgaacggcaaggagctggacggccgcaacatcaccgtcaacgaggcccagtcccgcggcggccgtggaggcggcggcggcggcgggtacggtggtggccgtggaggcggcggctacggcggtggcgggcgccgtgatggcggcggcggctacggcggtggcggcggctacggtggtggcggcggcggctacggtggtggtggcggcggctacggcggtggcaaccgtggcggcggctacggcaactccgacgggaactggaggaactgagcggtggggcccgcgcggccaagttatcctgtt

SEQ ID NO: 7019 - DNA, 573 bp, Zea mays
  unsure (1)..(573): unsure at all n locations; Clone ID: LIB3061-070-Q1-K6-B7
ggcatccgcagnaggtttgttccgtccaggcaaccaaaagcgttgccccgccgcgcagaggaagaagagagcagaggaggatggctcgtacgaagcagaccgcccgcaagtccacgggaggcaaggccccccgcaagcagctcgccaccaaggcggcgaggaagtcggcgccgacgaccggcggcgtgaagaagccccacaggtacaggcccggaaccgtggcgctgcgcgagatccgcaagtaccagaagagcacggagctgctgatccgcaagctgcccttccagcgcctggtgcgcgagatcgcgcaggacttcaagacagacctccggttccagagccacgccgtgctggcgctccaggaggccgccgaggcctacctcgtcggcctcttcgaggacaccaacctctgcgccatccacgccaagcgcgtcaccatcatgcccaaggacatccagctcgcccgccgcatccgtggcgagcgcgcgtagccatcatctccgaggatctgatgaatgtctagttaccaaacaaataggccgtattagcgtcgttgttctgtattcgttattt

SEQ ID NO: 7020 - DNA, 581 bp, Zea mays
  unsure (1)..(581): unsure at all n locations; Clone ID: LIB3061-070-Q1-K6-B8
ngatggcaccaaaacatcagggcacaacaactacaacaactcgtgctagcaaaccttgctgcctactctcagcaacagcagttacctttggtgcatttgttggcacaaaacatcagggcacaacaactacaacaactcgtgctagcaaaccttgctgcctactctcagcaacaacagtttctgccattcaaccaactagctgcattgaactctgctgcttatttgcagcaacaacaactactaccattcagccagctagctgctgcctacccccggcaatttcttccattcaaccaactggcagcattgaactctcatgcttatgtacaacaacaacaactactaccattcagccagctagctgctgtgagccctgctgccttcttgacacagcaacatttgttgccgttctacctgcacactgcgcctaacgttggcaccctcttacaactgcaacaattgctgccattcgaccaacttgctttgacaaacccagcagtgttctaccaacaacccatcattggtggtgccctcttttagattgcttatgagttatagttcaataataaagttttttttgc

SEQ ID NO: 7021 - DNA, 550 bp, Zea mays
  unsure (1)..(550): unsure at all n locations; Clone ID: LIB3061-070-Q1-K6-C1
gngtaccaaagcaacatanaagtggnatccagtagcaacaacagnacaacaatggcgaccaagatttttccctccttatgctccttgctctttctgcatgtgttgctaacgcgacaattttccctcaatgctcacaagctcctatagcttcccttcttcccccataccttccatcaatgatagcttcagtatgtgaaaaacccagctcttcagccctataggctccaacaagcaatcgcagcaagcaacatacctttatcacccttgttgtttcaacaatcgccagccctatctttggtgcagtcattggtacaaaccatcagggcacagcagctgcagcaactcgtgctacctgtgatcaaccaagtagctctggcaaacctttctccctactctcagcaacaacaatttcttccattcaaccaactgtctacactgaaccctgctgcttatttgcagcaacaactattaccattcagccagctagctactgcctactctcagcaacaacaacttcttccatttaaccaattggccgcactgaaccccg

SEQ ID NO: 7022 - DNA, 571 bp, Zea mays
  unsure (1)..(571): unsure at all n locations; Clone ID: LIB3061-070-Q1-K6-C11
ctgggtcttcagcccaatagctttatgtagtgggggacgcagnagaacccgatcgacaccatgagggtgttgctcgttgccctcgctctcctggctctcgctgcgagcgccacctccacgcatacaagcggcggctgcggctgccagccaccgccgccggttcatctaccgccgccggggcgatctgccacctccggttcacctgccacctccggtgcatctcccaccgccggtccacctgccgccgccggtccacctgccaccgccggtccatgtgccgccgccggttcatctgccgccgccaccatgccactaccctactcaaccgccccggcctcagcctcatccccagccacacccatgcccgtgccaacagccgcatccaagcccgtgccagctgcagggaacctgcggcgttggcagcaccccgatcctgggccagtgcgtcgagtttctgaggcatcagtgcagcccgacggcgacgccctactgctcgcctcagtgccagtcgttgcggcagcagtgttgccagcagctcaggcaggtggagccgcagcaccggtaccaggcg

SEQ ID NO: 7023 - DNA, 585 bp, Zea mays
  unsure (1)..(585): unsure at all n locations; Clone ID: LIB3061-070-Q1-K6-C12
gntagattgagcttttgttttgggtgggagacgggggcttgatgtaggttttttgagaccctgggttaacaaactgttttgccagtagtgttggttcctcgatgccttgcaataagatctctcgaagctcatttccttttgctgacagtttgttgttttttacatcgatccgtggggggaggggcttctaattttgcatggtttactggtctgctaataaaatgcaattcaatcttgaagaattggttaaaaagtggatgccattgaatatcattcaatttcttccaaaggatttggaatgttgagttgagagtatcatgtggcagtttgatgttacagattttcttcagtgtggtacaggaaaataaaaaagtttgttaaaacgcgatttgtaatgaactcatttgttagtcttataagtcgacaaacgaactgaattagttttgataacagtagcatatagttgtcattatttattagtaaaccgagttttctttttaggaggctgtccatggtatgtgttttaacttctattctcttgtttcctgtgcagctcgaaggagaagcccactcttggaggcacgc

SEQ ID NO: 7024 - DNA, 197 bp, Zea mays
  Clone ID: LIB3061-070-Q1-K6-C2
tagcagcgtcacttatgagcagccagcctggaagatgtcttggttttattactctgtaaactgatttgctccagcgccatgtggtggttacatttgaaccaggctcaacgcatactgtagacaatgagataacgtaggatgaatgctgtatttgacatactttgcagcttgtttatgtgatgcacgttcttgcggac

SEQ ID NO: 7025 - DNA, 579 bp, Zea mays
  unsure (1)..(579): unsure at all n locations; Clone ID: LIB3061-070-Q1-K6-C3
gngccttcctgnagnaaatcttgctggctgggggcttcagcaaggggcagccccacttcgccgagnacatcttcaagggatcgacgcccggttcctgagcgaagccctgggcgtcagcatgcacgtcgccgagaagctgcagagccggcgtgaccagcgaggcgagatcgtccgcgtggagccggagcacggctttcaccagctgaatccgtcgccgtcgtcgtcgtcgttttcgttcccatcgtcacaagtccagtaccaaacgtgccagcgcgacgtcgacaggcacaacgtctgcgccatggaggtgaggcacagcgtcgaacggctggaccaggccgacgtctacagccctggggctgggaggatcacacgcctcaccagccacaagttccccgtcctcaacctcgtacagatgagcgcggtgcgggtagacctgtaccaggacgccatcatgtcgccgttctggaacttcaacgcccacagcgccatgtacggcatcaggggcagtgcaagggtccaggtcgccagcgacaacgggaccacggtgttcgacgacgtgctccgtgcggggcagct

SEQ ID NO: 7026 - DNA, 546 bp, Zea mays
  unsure (1)..(546): unsure at all n locations; Clone ID: LIB3061-070-Q1-K6-C4
naatacctagcaacatcttacaccaagggggccaanattttgccctccttgccctccttgctctttcagcaagcgctgctacctcgacttttattccacaatgctcacaacaatacctctctccggtgacagccgcgggatttcaatacccaactatacaatcctacatggtacaagaggccatccaagcaagcatcttacggtcattagcattaaccctccaacaaccatatgctctattgcaacagccatccttagtgcatctgtatctccaaagaatcgcggcacaacaactacaacaacagttgctaccaacaatcaatcaagtagttgcagcgaaccttgctgcttacctccagcaacaacagtttcttccattcaatcaactagctggggtgaaccctgctatctacttgcaggcacaacagctactaccatttaaccaacttgtcgggagcccttatgccttcttactgcaacaacagcttctgccattccatctgcaagctgtggcaaacattgttgctttcttgagacaacaacatt

SEQ ID NO: 7027 - DNA, 580 bp, Zea mays
  unsure (1)..(580): unsure at all n locations; Clone ID: LIB3061-070-Q1-K6-C5
ccctgctgcttatttgcagcaacaactattaccattcagccagctagctactgcctactctcagcaacaacaacttcttccatttaaccaattggccgcactgaaccccgctgcttatttgcagcagcaaatactactaccatttagccagctagctgcagcaaaccgtgcttccttcttgacacagcaacagttgctgcctttctaccagcagtttgcggctaaccccgcaaccctcttacaactacaacaattgttgccctttgtccaacttgctttgacagaccgagcggcctcctaccaacaacacatcattggtggtgccctcttttagattgcttattagttgtaattcaataataaagttttttggatgatgtatgtggccaaccagaaataagaagttacatttccagattttaaaaaaaaaaaaaaaaaaaaaaaaaaaaaaaaaaaaaaaaaaaaaaaaaaaaaaaaaaaaaaaaaaaaaaaaaaaaaaaaaaaaaaaaaaaaaaaaaaaaatttttaaaaaaaaaaaaangggggggccccttttaaaggaccccaattttcccccccc

SEQ ID NO: 7028 - DNA, 583 bp, Zea mays
  unsure (1)..(583): unsure at all n locations; Clone ID: LIB3061-070-Q1-K6-C6
attgaaacaactagcaacatagnaagcacaatagtgtaccaacaatggcagctaaaaattttgcctccttatgctccttggtctttctgcaagtgctgctacggcgaccattttcccacaatgctcacaagctcctatagcttcccttcttcccccgtacctctcaccaacggtgtcttcggtatgtgaaaacccaattcttcaaccctacaggatccaacaggcaatcgcagctggcatcttacctttatcacccttgttcctccaacaatcatcagccctattacagcagttacctttggtgcatttattggcacaaaacatcagggcacaacaactacaacaacttgtgctagcaaaccttgctgcctactctcagcaacagcagtttcttccattcaaccaactagctgcattgaactctgcttcttatttgcaacaacaacaactaccattcagccagctatctgctgcctacccccagcaatttcttccattcaaccaactgacagcattgaactctcctgcttatttacagcagcaacaactactaccattcagccagctagctggtgtgagccct

SEQ ID NO: 7029 - DNA, 559 bp, Zea mays
  unsure (1)..(559): unsure at all n locations; Clone ID: LIB3061-070-Q1-K6-C7
caaaacacacagcgaacgcactacacgacctacaccatggctaccaanatttagccctccttgcgcttcttgcccttttagtgagcgcaacaaatgcgttcattattccacagtgctcacttgctcctagtgccattattccacagttcctcccaccagttacttcaatgggcttcgaacatccagccgtgcaagcctacaggctacaactagcgcttgcggcgagcgccttacaacaaccaattgcccaattgcaacaacaatccttggcacatctaaccctacaaaccattgcaacgcaacaacaacaacaacaacagtttctgccatcactgagccacctagccgtggtgaaccctgtcacctacttgcaacagcagctgcttgcatccaacccacttgctctggcgaacgtagctgcataccagcaacaacaacagctgcaacagtttatgccagtgctcagtcaactagccatggtgaaccctgccgtctacctacaactactttcatctagcccgctcgcggtgggcaatgcacctacgtacctacaacaaca

SEQ ID NO: 7030 - DNA, 573 bp, Zea mays
  unsure (1)..(573): unsure at all n locations; Clone ID: LIB3061-070-Q1-K6-C8
ctcaaaatanattataggggctcactttttcagccctgctcatattatgcccttgcttgaaatgttcggccggggnaagacatcaccacaagctatccttgatctcatcaccattgggaagataataaagaaagtccctattgtggtcggcaactgcacaggatttgcagtcaaccgtgacattttttccttacacacagggttctcatcttctagttagtcttggtattgatgttttcagaattgatcgagtaataagcacctttggcatgccaatgggaccttttcaactccaagatgtggctgggtatggagttgccttggcagtaaaggatatctacgctgatgcctttggagaaagaaatttggactctgaccttgtggatttgatggtaaaggatggacgacaaggaaaggtgaacggcaaaggttactacatttatgagaagggtgggaagccaaagccagatcctagtgttaagcatgttatcgaggagtaccgaaagcacgcaaacacaatgcctggtggaaagcctgttactttaacggatcaagatattttggagatgattt

SEQ ID NO: 7031 - DNA, 584 bp, Zea mays
  Clone ID: LIB3061-070-Q1-K6-C9
caccgcaaaatggcacatagtacaggcttggtacaggctatcctatttgaagttgtggacagggataacatcgggggatctgcctatggcggacagaggtccatatgttgtaccccagatcttgctaaactagagggctgcaagcaaggggaagtaatcaggaggccatcctctgatgagccagattggcccttcgtgctagacacacacttcagtgctaatcacctttcagtgaagttagaagatgagccagtgcgcattacaaagacaggcatgtacaacttgttcttcatatcctgtgatccaaaactgagaggccttactatgagtggcaagactatctggaagaatcctggtgggtatctaccgggacgaatggcgcctttgatgaaattttatgttctcatgtcgctggcgtatctgttggtaatgattgtttggtttagccagtacgtaaggttctggagggatatattgccaatacagaattggatcactctaatcattgcacttggtctgtttgagatgacactatggtactttgagtacttgaacttcaacagcagtggtgtgaggccagttgg

SEQ ID NO: 7032 - DNA, 565 bp, Zea mays
  unsure (1)..(565): unsure at all n locations; Clone ID: LIB3061-070-Q1-K6-D1
caaaaaagtataaaataggaaaggggagggggggtcacagctccacgcctccactgctatccctctcttcctctctgctttccccttccaatggaatcctgtagcttccgtgccgcaaccgcgccttctccctttccctccgctccttcttcatcttcatccccgcgcgccccatgcccgatactccgatttcccaggccaagaaaagggaggcagattggggtgcggaggagggcgtccggatttgatgccttcgcgtctttcgccggcaaggtcttcgtggatgaggcgattggagcggaatatggggagggcttcgaaacatttcgaatggatggaccactcaaggttgatgtggattatctgaatgaaaaattgcaagagtgcttccttcaaaggataaggcatgctatgaagccggatgaggcgtttggtctaattttttcgtgggacaatgttattgctgatacagactcnctaaagttgaatgcttggagacaacttgctttggaggaaggtaaggatatcccaagtggtgctcatgtccggaagagcattattcatg

SEQ ID NO: 7033 - DNA, 575 bp, Zea mays
  unsure (1)..(575): unsure at all n locations; Clone ID: LIB3061-070-Q1-K6-D10
tatcaccattgntattgctctgtgggaagtttggggaccaccaagtactactgcacggtcattgatgcccctggacaccgtgacttcatcaagaacatgatcactggtacctcccaggctgactgtgctgtccttatcattgactccaccactggtggttttgaggctggtatctccaaggatggccagacccgtgaacatgctctccttgcgttcacccttggagtgaagcagatgatttgctgctgcaacaagatggatgcaaccactcccaaatactccaaggcacgttatgaagagattgtgaaggaagtctcatcctacctcaagaaagttgggtacaaccctgataagattgcctttgttcccatttctggttttgagggcgacaacatgattgagaggtccaccaaccttgactggtacaaaggcccaaccctgcttgaggctcttgaccagatcaccgagcccaagaggccttcagacaagcccctgcgtctgcccctccaggatgtgtacaagattggtggtattggaactgtaccggttggtcgtgtggagactggtgtcatcaa

SEQ ID NO: 7034 - DNA, 66 bp, Zea mays
  unsure (1)..(66): unsure at all n locations; Clone ID: LIB3061-070-Q1-K6-D11
aaaaaaaaaaaaaaanaaaaaaannaaaaaaaaaaaaaaaaaaaaaaaaaaaaggggaaggggggg

SEQ ID NO: 7035 - DNA, 598 bp, Zea mays
  unsure (1)..(598): unsure at all n locations; Clone ID: LIB3061-070-Q1-K6-D12
gcgttcggttctagnacgcgggcggccgccctggggggggggttttttttagtcatagaatcacttatgtcatagaactaattctcacgaagaatcagaataagatagaacttaccaaaccgacccttacatacactgatgctgacacatacaaacagacacacgcactatactgagagacacaggggggggggcacacacatacgaccataatatataggaggcatacacactaaaacgaacacatgacatacaggaaattaaactaagtttaaattgcttattttccacgagacgaaacacgagcacggaaaatggcaagacaagagagcgacaccaccaaacatgcatgcatgggtatgctagttcacatgacactgcacgagggcccgccgccctgcctgggttggtggtggtggcggccatgctgctgctgctgcgcgcgctggcagtcggcgtcggcgtcgtcctcggtgccgatggaacagccaggctcgcactggtcgccaccagcgtcggcgtaggcggtagcatcggcttcatcatcagcgtacgcggcggcggcggcgcggtgcagcatcagcacgtacgccagctg

SEQ ID NO: 7036 - DNA, 588 bp, Zea mays
  unsure (1)..(588): unsure at all n locations; Clone ID: LIB3061-070-Q1-K6-D2
cntacaacatagtaagcacaatagtgtaccacagatggcagccaaaaattttgcctccttatgctccttggtctttctgcaagtgctgctacggcgaccattttcccgcaatgctcgcaagctcctatagcttcccttcttcccccgtacctctcaccagcggtgtcttcggtatgtgaaaacccaattcttcaaccctacaggatccaacaggcaatcgcagctggcatcttacctttatcacccttgttcctccaacaatcatcagccctattacaacagttacctttggtgcatttattggcacaaaacatcagggcacaacaactacaacaacttgtgctagcaaaccttgctgcctactctcagcaacagcagtttcttccattcaaccaactaggttcattgaactctgcttcttatttgcaacaacaacaactaccattcagccagctacctgctgcctacccccagcaatttcttccattcaaccaactagcagcattgaactctcctgcttatttacagcagcaacaactactaccattcagccagctagctggtgtgagccctgctaccttcttgaca

SEQ ID NO: 7037 - DNA, 578 bp, Zea mays
  unsure (1)..(578): unsure at all n locations; Clone ID: LIB3061-070-Q1-K6-D3
caactagcaacatagnaaagcacatagtgtaccaacaatggcagccaaaaattttgcctccttatgctccttggtctttctgcaagtgctgctacggcgaccattttcccacaatgctcacaagctcctatagcttcccttcttcccccgtacctctcaccagcggtgtcttcggtatgtggaaaacccaattcttcaaccctataggatccaacaggcaatcgcagctggcatcttacctttatcacccttgttcctccaacaatcatcagccctattacagcagttacctttggtgcatttattggcacaaaacatcagggcacaacaactacaacaacttgtgctagcaaaccttgctgcctactctcagcaacaacagtttcttccattcaaccaactagctgcattgaactctgcttcttatttgcaacaacaattgctgccattcaaccaacttgctttgacaaacccaacagcattctaccaacaacccatcattggtggtgccctcttttagatttcttatgagttatagttcaataataaagttttttgtctgatgtttgtggcttccc

SEQ ID NO: 7038 - DNA, 507 bp, Zea mays
  unsure (1)..(507): unsure at all n locations; Clone ID: LIB3061-070-Q1-K6-D4
aaaaattttgccttcttatgctccttggtctttctgcaatgctgctacggagaccattttcccacaatgctaacaagctcctatagctatccttatttctccatacctctcaccagcagtgtctttggtggggggggaggcaattcttcaaccctataggatccaacaggcaatcgtagatggaatattacctttatcaccattgttactccaacaataattagccctattacagcagttacctttggtgcatttattggcacaaaacataagggtacaacaactacaacaacttgtgctagcaaaccttgttgactactattagcaacaacagtttattccattcaaccaantaaatgcatttaactatttttattatttgcaacaacaattgttgacattaaaccaaattgatttgacaaacccaatagtattataccaacaacccatcattgatggtgcccttttttagattttttatgaattatagttcaataataaaatttt

SEQ ID NO: 7039 - DNA, 191 bp, Zea mays
  unsure (1)..(191): unsure at all n locations; Clone ID: LIB3061-070-Q1-K6-D7
ggtccggnaacccgggtaaaccaacaccgaacaaaaaaaaaaaggggggggggggaacaaagaaaaacaaggggaccaaaagcttgggatggagaggaaaaaagagtgcaggaatgtatagtaaaaacgacaattgagaataaaagtacaaaagttccgagaaagacctaggtataagaaaaacctaaaca

SEQ ID NO: 7040 - DNA, 589 bp, Zea mays
  unsure (1)..(589): unsure at all n locations; Clone ID: LIB3061-070-Q1-K6-D8
gcccaacagcacatanaagtgngatccagtagcaacaatagagcaacaatggcgaccaagatctttccctccttatgctccttgctctttctgcatgtgttgctaacgcgacaattttccctcaatgctcacaagctcctatagcttcccttcttcccccataccttccatcaatgatagcttcnagtatgtgaaaacccagctcttcaaccctataggctccaacaagcaatcgcagcaagcaacatacctttatcacccttgtttcaacaatcgccagccctatctttggtgcagtcattggtacaaaccatcaaggcacagcagctgcagcaactcgtgctacctgtgatcaaccaagtagctctggcaaacctttctccctactatcagcaacaacaatttcttccattcaaccaactatctacactgaaccctgctgcttatttgcagcaacaactattaccattcagccagctagctactgcctactctcatcaacaacaacttcttccatttaaccaattggccgcactgaacctcgctgcttatttgcagcagcaaatattactaccatttagccagctag

SEQ ID NO: 7041 - DNA, 592 bp, Zea mays
  unsure (1)..(592): unsure at all n locations; Clone ID: LIB3061-070-Q1-K6-D9
gnaaacacaccaagcgaacacattagcaacaacctaacaacaatggctaccaagnaattatccctccttgcgcttcttgcgctttttgcgagcgcaacaaatgcgttcattattccacaatgctcacttgctccaagttccattattacacagttcctcccaccagttacttcaatgggcttcgaacacccagctgtgcaagcctataggctacaacaagcaattgcggcgagcgtcttacaacaaccaatttcccagttgcaacaacaatccttggcacatctaacaatacaaaccatcgcaacgcaacagcaacaacaattcctaccagcactgagccacctagccatggtgaaccctgccgcctacttgcaacagcagttgcttgcatcaaacccacttgctctggcaaacgtagttgcaaaccagccacaacaacagctgcaacagtttctgccagcgctcagtcaactagccatggtgaaccctgccgcctacctacaacagcaacaactgctttcatctagcccgctcgctgtggccaatgcacctacatacctgcaacaacaattgttgcaacagattgtaccag

SEQ ID NO: 7042 - DNA, 591 bp, Zea mays
  Clone ID: LIB3061-070-Q1-K6-E1
tcgcaatagtgtaccaacaatggcagccagaaaattttgcctccttatgctccttggtctttctgcaagtgctgctacggcgaccattttcccgcaatgctcgcaagctcctatagcttcccttcttcccccgtacctctcaccagcggtgtcttcggtatgtgaaaacccaattcttcaaccctacaggatccaacaggcaatcgcagctggcatcttacctttatcacccttgttcctccaacaatcatcagccctattacaacagttacctttggtgcatttattggcacaaaacatcagggcacaacaactacaacaacttgtgctagcaaaccttgctgcctactctcagcaacagcagtttcttccattcaaccaactaggttcattgaactctgcttcttatttgcaacaacaacaactaccattcagccagctacctgctgcctacccccagcaatttcttccattcaaccaactagcagcattgaactctcctgcttatttacagcagcaacaactactaccattcagccagctagctggtgtgagccctgctaccttcttgacacaaccacagttgttgcc

SEQ ID NO: 7043 - DNA, 493 bp, Zea mays
  unsure (1)..(493): unsure at all n locations; Clone ID: LIB3061-070-Q1-K6-E10
nacgtctcgggctctcatctctaatcttcgggttcgcgtcgcagtgtcttccgcccgggctaccaccatgccngaacagatccacgagatcaaggacttcctgctgactgcgcggcggaaggacgcacggtcggtgcggatcaagcgggccaaggacgccgtcaagttcaaggtgcgctgctccaggtacctctacaccctctgcgtccacgacgccgacaaggccaacaagctcaagcagtcgctcccgccaggtctgactgtccaggagatttaaggtatcaagccacaaactgtgctttttttgcggtgtcagggacgtttgctccagtgttactttagtttgtaggtgggctccattgctgtgtttgaatgaattatgaagtttgagtttgggatgcgaatgatgtgtcgaacctatgagcctgtgttgtaatggttaccccagaccgcaaaggatggcaatctatcataagttaaactgatttccgtg

SEQ ID NO: 7044 - DNA, 558 bp, Zea mays
  unsure (1)..(558): unsure at all n locations; Clone ID: LIB3061-070-Q1-K6-E11
ggaaccaatacacatanaagcacgagggggggccaacaatggcagccaaaatttttgcctccttatgctccttggtctttctgcaagtgctgctacggcgaccattttcccacaatgctcacaagctcctatagcttcccttcttcccccgtacctctcaccagcggtgggtggggggggggaaaacccaattcttcaaccctataggatccaacaggcaatcgcagctggcatcttacctttatcacccttgttcctccaacaatcatcagccctattacagcagttacctttggtgcatttattggcacaaaacatcagggcacaacaactacaacaacttgtgctagcaaaccttgctgcctactctcagcaacaacagtttcttccattcaaccaactagctgcattgaactctgcttcttatttgcaacaacaacaactaccattcagccagctatctgctgcctacccccagcaatttcttccattcaaccaactgacagctttgaactctcctgcttatttacagcagcaacaactactaccattcagcca

SEQ ID NO: 7045 - DNA, 576 bp, Zea mays
  unsure (1)..(576): unsure at all n locations; Clone ID: LIB3061-070-Q1-K6-E12
agcgtccggcacatanaagcacaatatgtacgagggggggggccaaaaattttgcctccttatgctccttggtctttctgcaagtgctgctacggcgaccattttcccgcaatgctcgcaagctcctatagcttcccttcttcccccgtacctctcaccagcggtgtcttcggtatgggagggggggggtcttcaaccctacaggatccaacaggcaatcacagctggcatcttacctttatcacccttgttcctccaacaatcatcagccctattacatcagttacctttggtgcatttattggcacaaaacatcagggcacaacaactacaacaacttgtgctagcaaaccttgctgcctactctcagcaacagcagtttcttccattcaaccaactagctgcattgaactctgcttcttatttgcaacaacaacaactaccattcagccagctacctgctgcctacccccagcaatttcttccattcaaccaacttgctttgacaaacccaacagcattctaccaacaacccatcattggtggtgccctcttttagatttcttatgagttata

SEQ ID NO: 7046 - DNA, 577 bp, Zea mays
  unsure (1)..(577): unsure at all n locations; Clone ID: LIB3061-070-Q1-K6-E3
ggtcccaccattccgtgcaatcattttgaaacgctttaacagtgcgcattgttaccttgnncaaaacacatctnacgaagggaaaatgaaaccctgatggccattggaactgcttatgttcaaggggaggatgttgctgctagaggacgggtgcttctgttctctttcagtaaaagtgaaaattctcaaaatctggttaccgaagtctactcaaaagagagcaaaggtgctgtatctgctgttgccgctcttcaaggtcatctactgatagcttctggtcctaagatcacactgaataaatggactggctctgaattgactgccgttgcattctatgatgcaccattgcatgttgtgagcctgaacattgtgaaaaactttgttttatttggtgatattcacaaaagcatatattttcttagttggaaggaacaaggttctcaattgagtctgctggcaaaagattttggttcacttgattgttttgcaactgagttcttaattgatggaagcaccttgagccttgtagtttcagattctgacaagaacgtgcagattttctattatgcccccaaaa

SEQ ID NO: 7047 - DNA, 560 bp, Zea mays
  unsure (1)..(560): unsure at all n locations; Clone ID: LIB3061-070-Q1-K6-E5
gcattcagnaaacacaccaagcgaacgcactagcaacgacctaacaacaatggctaccaagnaattagccctccttgcgcttcttgccctttttgtgagcgcaacaaatgcgttcattattccacaatgctcacttgctcctagtgccattattccacagttcctcccaccagttacttcaatgggcttcgaacacctagctgtgcaagccaacatgcaacaacaagcgcttgcggcgagcgtcttacaacaaccaattgcccaattgcaacaacaatccttgccacatctaacaatacaagccatcacaacgcaacagcaacaacagttcctaccagcactgagccacctagccatggtgaaccctgccgcctacttgcaagagcagctgcttgcatccaacccacttgctctggcgaacgtagttgcaaaccagcaacaacaacagctacaacagtttctgccaacgctcagtcaactagccatggtgaaccctgccgcctacgtacaacaacaacaactgctttcatctagcccgctcgctgtgggcaatgcaccta

SEQ ID NO: 7048 - DNA, 575 bp, Zea mays
  unsure (1)..(575): unsure at all n locations; Clone ID: LIB3061-070-Q1-K6-E6
gncccttccaccaccttgnaagtgtctactgtcctgncggcgctgcactgatctatcatcatcaggcggaggcgatgcgatgatgatgcagaactttgtacatgcgttggtggatggtggtgtaacatagtggctgccaacaagtcatgctcatgcaaaccgatgaatctatctctgtatcatcgatctcggttggtatgtacatccgactgcagacgtggggtgtatactatataggctggcgctaataaatgctaatgtaaaccgaatattctatgtttgcatgatgaatgccaattatttgttaaatcagactgcaaacaacaatctttttatattgctggtgctaataaataggagtataatcgtcatatacgaacggttgcgtgtggaatgccaatcatgtgtgtaatctgttggcaaataacaaacctctgttcctcccaaaaaaaggggggccttttaaaaaaaccaaattttacttccccttgcttgaaaattaaaaactttttttataggggacccaaaataaaattaattggcccgggttttaaaagggggggccttttaaaaac

SEQ ID NO: 7049 - DNA, 560 bp, Zea mays
  unsure (1)..(560): unsure at all n locations; Clone ID: LIB3061-070-Q1-K6-E8
nagctcctatagcttcccttcttcccccggcctctcacacggtgtcttcggtatggtgaaaacccaattcttcaaccctacaggatccaacaggcaatcgcagctggcatcttacctttatcacccttgttcctccaacaatcatcagccctattacagcagttacctttggtgcatttattggcacaaaacatcagggcacaacaactacaacaacttgtgctagcaaaccttgctgcctactctcagcaacagcagtttcttccattcaaccaactagctgcattgaactctgcttcttatttgcaacaacaacaactaccattcagccagctatctgctgcctacccccagcaatttcttccattcaaccaactgacagcattgaactctcctgcttatttacagcagcaacaactactaccattcagccagctagctggtgtgagccctgctaccttcttgacacaaccacagttgttgccgttctaccagcacgctgcgcctaacgctggcaccctcttacaactgcaacaattgctgccattcaaccaacttgc

SEQ ID NO: 7050 - DNA, 566 bp, Zea mays
  unsure (1)..(566): unsure at all n locations; Clone ID: LIB3061-070-Q1-K6-E9
aattgtcaccctacagnaccaacggcaatcgcaacagcatcttaccattatcacccttgttcctccaacaaccgtcagccctattacagcagttacctttggtccatttggtggcacaaaacatcagggcacaacaactacaacaacttgtgctagcaaaccttgctgcatactctcagcaacatcagtttcttccattcaaccaactggctgcattgaactctgctgcttatttgcaacaacaattaccattcagccagctagttgctgcctacccccagcaatttcttccattcaaccaactagcagcattgaactctgctgcttatttacagcagcaacaactactaccattcagccagctagctgatgtgagccctgctgccttcttgacacaacaacagttgttgccgttctacctgcacgctatgcctaacgctggcaccctcttacaactgcaacaattgctgccattcaaccaacttgctttgacaaactcaacagtgttctaccaacaacccatcattggtggtgccctcttttagattgcttatgagttatagttc

SEQ ID NO: 7051 - DNA, 205 bp, Zea mays
  unsure (1)..(205): unsure at all n locations; Clone ID: LIB3061-070-Q1-K6-F1
gttccagcttttcctcagcgatnncttctccagnncaggtggnnagtcaatgnnnagcaatcaggnaaagnaaagtagaagnnctgcgccgcctaagnaattgaagctatttaggnaattagnnaagtcacttaagggtactcaggagcgaggcgcgcgtaatcatnnnctcagcgagcttagaaaatnnagctgcagnnagttg

SEQ ID NO: 7052 - DNA, 583 bp, Zea mays
  Clone ID: LIB3061-070-Q1-K6-F10
acagtaccatcaatcatcattcatcttagtagtataggcaccaaatcaaatctgcaacatcaattatctaactccaaaaccatgaagctggtgcttgtggttcttgctttcattgctttagtatcaagtgtttcttgtacacagacaggcggctgcagctgtggtcaacaacaaagccatgagcagcaacatcatccacaacaacatcatccacaaaaacaacaacatcaaccaccaccacaacatcaccagcagcagcaacaccaacaacaacaagttcacatgcaaccacaaaaacatcagcaacaacaagaagttcatgttcaacaacaacaacaacaaccgcagcaccaacaacaacaacaacaacaacagcaccaacaacaacatcaatgtgaaggccaacaacaacatcaccaacaatcacaaggccatgtgcaacaacacgaacagagccatgagcaacaccaaggacagagccatgagcaacaacatcaacaacaattccagggtcatgacaagcagcaacaaccacaacagcctcagcaatatcagcagggccaggaaaaatcacaacagcaac

SEQ ID NO: 7053 - DNA, 582 bp, Zea mays
  unsure (1)..(582): unsure at all n locations; Clone ID: LIB3061-070-Q1-K6-F11
nccaacaagcaacatagnaagtgggggggggggggggcaatagnacaacaatggcgaccaagatttttccctccttatgctccttgctctttctacatgtgttgctaacgcgacaattttccctcaatgctcacaagctcctatagcttcccttcttcccccataccttccatcaatggggggtggaatatgtgaaaacccagctcttcaaccatataggcttcaacaagcaatcgcagcaagcaacatacctttatcgcccttgttgtttcaacaatcgccagccctatctttggtgcagtcattggtacaaaccatcagggcacaacagctgcagcaactcgtgctacctctgatcaaccaagtagctctggcaaacctttctccctactctcagcaacaacaatttcttccattcaaccaactgtctacactgaaccctgctgcttatttgcagcaacaactattaccatttagccagctagctactgcctactctcagcaacaacaacttcttccatttaaccaattggccgcactgaaccccgctgcttatttgcagcagcaaatactactaccatt

SEQ ID NO: 7054 - DNA, 598 bp, Zea mays
  unsure (1)..(598): unsure at all n locations; Clone ID: LIB3061-070-Q1-K6-F12
agcgtccggctggggagaggaaacgcgacaggggcgagcgagttcatgaccattaccggcgccagtgagnaggttgcccttcnaggcactgaaagctagtgattggcacttggaaggagcttttgacttcttctatagccaacctcaggtttctgtggtcaatactcggcattcttgaagatattttgagggggagtaaagaacctgatgctgatatgataatggtggaaggaatatctcaattttgcaatgatctgcaggttgatcctcaggatattgtcatgcttgtcatatcatggcacatgaaagccgccacaatgtgtgaatttactcgtcaggaattcattggtggactgcagtcaattggggtagattcaatcgagaagtttcgtggaaaattaccatcattacgagctgagctaaaagatgacaataaattccgtgatatatacaactttgcattcacttgggcaagggaaaagggtcaaaagtctctctcactggagacttctattggaatgtggcagttgctatttgctgaaaggaactggcctcttctggatcattggtgtcagtttttacaggtcagacacaataa

SEQ ID NO: 7055 - DNA, 579 bp, Zea mays
  unsure (1)..(579): unsure at all n locations; Clone ID: LIB3061-070-Q1-K6-F2
ncactagcaacatagnaagcacaatagtgtaccaacaatggcagccaaaatttttgcctccttatgctccttggtatttctgcaagtgctgctacggcgaccattttcccgcaatgctcacaagctcctatagcttcccttcttcccccgtacctctcaccagcggtgtcttcggtatgtggaaaacccaattcttcaaccctacaggatccaacaggcaatcgcagctggcatcttacctttatcacccttgttcctccaacaatcatcagccctattacagcagttacctttggtgcatttattggcacaaaacatcagggcacaacaactacaacaacttgtgctagcaaaccttgctgcctactctcagcaacagcagtttcttccattcaaccaactagctgcattgaactctgcttcttatttgcaacaacaacaactaccattcagccagctacctgttgcctacccccaacaatttcttccattcaaccaactggcagcattgaactctcctgcttatttacagcagcaacaactactaccattcagccagctagctggtgtgagccctgc

SEQ ID NO: 7056 - DNA, 573 bp, Zea mays
  unsure (1)..(573): unsure at all n locations; Clone ID: LIB3061-070-Q1-K6-F3
tgcaaaggtgngagtggagtcaagcaaaccctgcaagtcctgtacccaaacagttgaatcctcacttccacttgtcaagatacccacaccagaatcaagcaaagagaacagcggtgttatgtggatatcctcacctgatcggcttgaagatcctcgaaggccatttcagtactctaacagttctggctctccctgtgtttcagaatcaggatctgacatttatggcaaaagagaggtcatacagaagctaagacagcacctcaagaaacgtgatgagatgatcatggagatgcaaactcagattgctgatcttaagaactctcttaacattcaggtgacacagtccagcaatctgcagtctcaattggatgctgccaatcgtgatctgtttgaatctgaacgagagattcagcatctaaggaagattattgcagatcattgtgtcacagaagcactctctcatgataaacctttgcaagctgcgcattggcagccagatgccgcaaatgggcattctaatggctatggtgatggttgtgttgatgatgctgacctgcattgtattagcatcga

SEQ ID NO: 7057 - DNA, 594 bp, Zea mays
  Clone ID: LIB3061-070-Q1-K6-F4
cggctgcggctgccagccaccgccgccggttcatctaccgccgccggtgcatctgccacctccggttcacctgccacctccggtgcatctcccaccgccggtccacctgccgccgccggtccacctgccaccgccggtccatgtgccgccgccggttcatctgccgccgccaccatgccactaccctactcaaccgccccggcctcagcctcatccccagccacacccatgcccgtgccaacagccgcatccaagcccgtgccagctgcagggaacctgcggcgttggcagcaccccgatcctgggccagtgcgtcgagttcctgaggcatcagtgcagcccgacggcgacgccctactgctcgcctcagtgccagtcgttgcggcagcagtgttgccagcagctcaggcaggtggagccgcagcaccggtaccaggcgatcttcggcttggtcctccagtccatcctgcagcagcagccgcaaagcggccaggtcgcggggctgttggcggcgcagatagcgcagcaactgacggcgatgtgcggcctgcagcagccgactccatgcccctacgctgctgccggcggtgtccc

SEQ ID NO: 7058 - DNA, 583 bp, Zea mays
  unsure (1)..(583): unsure at all n locations; Clone ID: LIB3061-070-Q1-K6-F5
gntctgaaaccctccccacctccggcggcggcggcggcgctggcgaccgggtgtcttctccggcgagtctcccccctagtaacaagaaaattggatgtacctgttgatgaccctgtggagaacctcactggaagtcctagtacccttggcaatgaggaagaagccactacttatgctaatgtgcaagatcagtccaaggaagaaccagaaaagctttacgaggaacccaaagacccaatgcaagacgagttgggtaaccaagggcatgtgagcatgaacaatgaagatgtgggaggccagaacaaagtggaccaagctacccccacagagcacggcgaggaagctggggtgaagcagcatgatgctacagttcctgatgacaagaaatggcctgggtggcctggagagagtgtgttccgtatactggttcctaccacaaaggtgggtgccgtcattgggcgcaaaggggatttcatcaagaaaatgtgtgaggaatcaagagcccgcatcaaggttcttgagggaccaccagctgtgccagaaagagctgtaatgatttcagcaaaggatgaaccagacacag

SEQ ID NO: 7059 - DNA, 434 bp, Zea mays
  unsure (1)..(434): unsure at all n locations; Clone ID: LIB3061-070-Q1-K6-F6
atcaccaatggctgncattgactctgctgcttatttgcaacaacaattaccattcagccagctagttgctgcctacccccagcaatttcttccattcaaccaactagcagcattgaactctgctgcttatttacagcagcaacaactactaccattcagccagctagctgatgtgagccctgctgccttcttgacacaacaacagttgttgccgttctacctgcacgctatgcctaacgctggcaccctcttacaactgcaacaattgctgccattcaaccaacttgctttgacaaacccaacagtgttctaccaacaacccatcattggtggtgccctcttttagattgcttatgagttatagttcaataatgaagttttttggatgatgtttgtggcgtcccagaaataagaaagtacatttctagattctt

SEQ ID NO: 7060 - DNA, 574 bp, Zea mays
  unsure (1)..(574): unsure at all n locations; Clone ID: LIB3061-070-Q1-K6-F7
caggggggacgggnggccacaagtccggaccgcccgtatctaatccgctcgagcgcagcggctcgttcctcgcgggggcgcacggttggcatttcgagtgctgagacatcggcttcattgaatcctaaagccggttgagccatggctggctcccttgctgcctcagccttcttccctggcccaggggcgtctccagcagcatccgcgaagaacttggctggtgaagtaccggatagtttgagcgtccgtggtattgtcgcaaagcctaatgccaattctgggaacatgcaagtgaaggctcaagcacaaacccttcccaaggttaatggcaccaaggttaacctcaagaatgcaagctcagacacagaggaggcgataccctacactgctcccaagacattctacaaccaactgccagattggagcatgcttcttgcggctgtcactaccatcttcctggcagcagagaagcagtggacactgcttgactggaagccgaagaaacccgacatgcttgttgatacatttggttttggtgggatcatccaggatgggatggtgtttaggcaaaact

SEQ ID NO: 7061 - DNA, 591 bp, Zea mays
  Clone ID: LIB3061-070-Q1-K6-F9
atattgagaccactagcaacatagaagcacaatagtgtaccaacaatggcagccaaaaattttgcttccttatgctccttggtctttctgcaagtgttgctaccgcaaccattttcccacaatgctcacaagctcctatagcttcccttcttcccccatacctctcaccagcggtgtcttcaatgtgtgaaaacccaattgttcaaccctacaggatccaacaggcaatcgcaacaggcatcttaccattatcacccttgttcctccaacaaccgtcagccctattacagcagttacctttggtccatttggtggcacaaaacatcagggcacaacaactacaacaacttgtgctagcaaaccttgctgcatactctcagcaacatcagtttcttccattcaaccaactggctgcattgaactctgctgcttatttgcaacaacaattaccattcagccagctagttgctgcctacccccagcaatttcttccattcaaccaactagcagcattgaactctgctgcttatttacagcagcaacaactactaccattcagccagctagctgatgtgagccctgctgccttct

SEQ ID NO: 7062 - DNA, 105 bp, Zea mays
  unsure (1)..(105): unsure at all n locations; Clone ID: LIB3061-070-Q1-K6-G1
gcgttcgttttaaaatacatatgagnagtactgggatggggggccctcatagcggcatgtgttntccttaaaaataatcaatatattgattgagaatttatctcg

SEQ ID NO: 7063 - DNA, 583 bp, Zea mays
  unsure (1)..(583): unsure at all n locations; Clone ID: LIB3061-070-Q1-K6-G10
tgtatctgcaaanaagccaaantttccttcccttcttgcagaggaacagaaggcattctgcccgttgttgatatgtttttagtggccatcggttcaaactaacaattcctaaggagacttgcagtattgccttctcattatctggtgttcggtgtcctggtaaaggcgagccatactcagatgaagctattgctttgatgaggagaaggatactacagcgtgatgtggagatagaggttgaagcagttgacagaacaggaacattcataggttcgttgtgggagtccaagaccaacatgggctctgtacttctggaagctgggctggcgaagctgagttcttttggcttggataggatgtcagatgctcatgtcctaacaagagctgaacagtttgcgaagcaacaaaagattaagatatgggagaactatgtcgagggtgagaatgcttcaaatggatccgcacctgaatcgaaacaaaaggaaatcctcaaggttgtcgccacggaagttcttggtggtgggaagttttatgttcagacagtgggtgaccagagggtggcttcaattcaacagcagcttgc

SEQ ID NO: 7064 - DNA, 588 bp, Zea mays
  unsure (1)..(588): unsure at all n locations; Clone ID: LIB3061-070-Q1-K6-G11
caagnatcctcatagnaccgttgggtcagttctgacaggatcaagaaagaccagagtctngaccacaactaaaaagcttttgccatatatcatttcttctttcagtcctgataaatcagtggctgaatctgtggaagagctaaagaaatgtaccgaagtggtgatgctgcagtggcagaatgggccattgaagctttagcaggaattgagaaaggcgctccattttctctttgtttaacacagaagcatttctctcaagttgcatcagcatatgggactagtgaacactatttatctaagctggctggtgttatgaaattggaatatcgcattgccttgaggtcgtcgattagaaacgattttgttgaaggtgtgcgtgctgttttagttgacaaggaccagaatccgaagtggaatccagccactctggaagaagtaaacatggccgaggtggaatcagttttcgagccattaggggccgaggctgagttgagtgtgtgaaatatggcctgccacactcagttttcttatttgtgctgcaataataatgttacaaaacagaaatgcgatgcccacagaaacaataaa

SEQ ID NO: 7065 - DNA, 575 bp, Zea mays
  unsure (1)..(575): unsure at all n locations; Clone ID: LIB3061-070-Q1-K6-G12
ggnaagcactagtgatggtctttggggggggagtgttggacgggaaagtagcagttctatgatcaactggagtgtccagaacaaggatcagagcttctttcaccaacttgaaggtgtacctcttggattacattcaaataaagtaaccacactgtttaattatgcaagattactgggggagtgggtgattctgtcagagcaagcatcttttaccgttttataattttcaagtaccctgactacatagatgcctatctgaggttagcggctattgcaaaacaaagaaacaatgttcaactgagcattgaactgataggtgatgctttaaagatagacgagaagaacccaaatgcactgtctatgcttgggagtcttgaactccagagcgatgaagcctggcttaccgcaaaggagcatttccgtaatgcaaaagaggccaccaagggagatacctactctttgcttcaattggggaactggaattactttgctgccaatcgtcctgagaaaaaagccccgaagattgaggctactcatagggagaaagccatggaactctatcagactcaagtact

SEQ ID NO: 7066 - DNA, 362 bp, Zea mays
  unsure (1)..(362): unsure at all n locations; Clone ID: LIB3061-070-Q1-K6-G2
aaaaaaaaaaaaaaaaaaaaaaaaaaaaaaaaaaaaannnaaaaaaaaaaaaaaaanaaaaaaaaaaaaaaaaaaaaaaaanaaaaaaaaaaaaaaaaaaaaaaaaaaaanaaaaaaanannnaaaaaaaaaaaaaaaaaaaaaaaaaaaaaaaaaaaaaaaaaaaaaaaaaaaaaaaaaaanaaaaaaaaaaaaaaaaaaaaaaaaaaaaaaaaaaaaaaaaaaaaaaanaanaaaaaaanaaaaaaaaaaaaaaaaaaaaaaaaaaaaaaaaaaaaaaaannanaaaaaaaaanaaaaaaaaaaaaaaaaaaaaaaaaaaanaaaaaaaaaanaaaaaaaaaaanaaaaaaaaaaaaaaa

SEQ ID NO: 7067 - DNA, 575 bp, Zea mays
  unsure (1)..(575): unsure at all n locations; Clone ID: LIB3061-070-Q1-K6-G3
agcgtccgcanaatgnanatggcatcctccgcagtgggtctctcgttttgatgtctggccatacctggnanacatacactgaggatgtttccagtgaaataatgaaagaaagcaggccaagcctgaccttatcattggcaactacagcgatggcaacctagtcgccactctgctcgcacacaagttgggagtcactcagtgtaccatcgctcatgccttggagaaaaccaaataccccaactcggacatctacttggacaagttcgacagccagtaccacttctcttgccagttcacagctgaccttattgccatgaaccacactgatttcatcatcaccagcacattccaagaaatcgcgggaagcaaggacaccgtggggcagtacgagtcccacatcgcgttcactcttcctgggctctaccgtgtcgtccatggcatcgatgttttcgatcccaagttcaacattgtctcccctggagcagacatgagtgtttactacccgtatacggaaaccgacaagagactcactgccttccatcctgaaatcgaggagctcatcaacagcgacgtcg

SEQ ID NO: 7068 - DNA, 579 bp, Zea mays
  unsure (1)..(579): unsure at all n locations; Clone ID: LIB3061-070-Q1-K6-G4
gcaacatanaagtggnaatccatagcaacaatagnacaacaatggcgaccaanatctttccctccttatgctccttgctctttctgcatgtgttgctaacgcgacaattttccctcaatgctcacaagctcctatagcttcccttcttcccccataccttccatcaatgatagcttcaggtatgtgaaaacccagctcttcaaccctataggctccaacaagcaatcgcagcaagcaacatacctttatcacccttgtttcaacaatcgccagccctatctttggtgcagtcattggtacaaaccatcaaggcacagcagctgcagcaactcgtgctacctgtgatcaaccaagtagctctggcaaacctttctccctactatcagcaacaacaatttcttccattcaaccaactatctacactgaaccctgctgcttatttgcagcaacaactattaccattcagccagctagctactgcctactctcatcaacaacaacttcttccatttaaccaattggccgcactgaacctcgctgcttatttgcagcagcaaatattactaccatttagccagc

SEQ ID NO: 7069 - DNA, 593 bp, Zea mays
  unsure (1)..(593): unsure at all n locations; Clone ID: LIB3061-070-Q1-K6-G5
ccttgggccgggccggccggtccgcctcacggcgagnaccgaccggctcgacccttctgccggcgatgcgctcctggccttaactggccgggtcgtgcctccggcgccgttacttttgaagaaattagagtgctcaaagcaacccatcgttggtggtgccatcttttagattacatatgagatgtactcgataatggtgccctcatagcggcatgtgtttcctaaaaataatcaatatattgattgagatttatctcgaaaaaaaaaaaaaaaaaaaaaaaaaaaaaaaaaaaaaaaaaaaaaaaaaaaaaaaaaaaaaaaaaaaaaaaaaaaaaaaaaaaaaaaaaaaaaaaaaaaaaaaaaaaaaaaaaaaaaaaaaaaaaaaaaaagaagtttttaaaaaaaaaaaaaaaagaaaaaaaaaaaaaaaaaaggggggggcccttttaaaaaaaaaaaaattttacttccgcgggggggggaaataatttttttttttggggggacaaaaaaaaaaaaaaggggggcgcgttttaaaaaccgggggggggggaaaaaaccggggggcaccccaaaaaaaaggggggggggaa

SEQ ID NO: 7070 - DNA, 554 bp, Zea mays
  Clone ID: LIB3061-070-Q1-K6-G6
ccctactcaaccgccccggcctcagcctgatgcccagccacacccatgcccgtgccaacagccgcatccaagcccgtgccagctgcagggaacctgcggcgttggcagcaccccgatcctgggccagtgcgtcgagttcctgaggcatcagtgcagcccgacggcgacgccctactgctcgcctcagtgccagtcgttgcggcagcagtgttgccagcagctcaggcaggtggagccgcagcaccggtaccaggcgatcttcggcttggtcctccagtccatcctgcagcagcagccgcaaagcggccaggtcgcggggctgttggcggcgcagatagcgcagcaactgacggcgatgtgcggcctgcagcagccgactccatgcccctacgctgctgccggcggtgtcccccactgaagaaactatgtgctgtagtatagccgctggctagctagctagttgagtcatttagcggcgatgattgagtaataatgtgtcacgcatcaccatgggtggcagtgtcagtgtgagcaatgacctgaatgaacaattg

SEQ ID NO: 7071 - DNA, 591 bp, Zea mays
  unsure (1)..(591): unsure at all n locations; Clone ID: LIB3061-070-Q1-K6-G7
agcgtccgcgttgctcgcctcgggtcaaaccctgaggcggggggttgatttatccgctgcagccatgagtaagttgcagtctgagtctgtcaaggatgccatctcccagattgttggggatgccaaggnanaagaataggaagttcactgagactgtggaacttcagattggntctgaagaattatgatccacagaaggacaagcgtttcagtggctctgttaagttgccccatatccctcgtcccaagatgaaggtgtgcatgcttggtgatgcccagcatgttgaggaggccgagaagatgggacttgactacatggatgttgaggctctcaagaaaatgaacaagaacaagaagcttgttaagaggcttgccaagaagtaccatgctttcttggcatcagaggccatcatcaagcagattccccgtctccttggtcctggtctcaacaaggcaggcaagttcccgaccctggttactcaccaggaatccctcgagtccaaggtgaacgagactaaggcaaccgtcaagttccagctcaagaaggtcctttgcatgggtgtcgccgtcggcaacttggcgatggaggag

SEQ ID NO: 7072 - DNA, 587 bp, Zea mays
  Clone ID: LIB3061-070-Q1-K6-G8
ccaaaaacccggcccttaacgcgccgggggcgtggcccttggctcgccggaaaataacgctacagccgtaatcacgtaaattccttttcatggagggtgtgggcgcgcggctagggcgcacttcggcgcgctacgggccggcgacgacgttcacgggccatgtcaggaagtggggcggggggggggtaccagtggtcgccgccgccgccgccgccgccgccaacgccaacaccagcgccaacggtggcacgacgtcctccacggggatgggatctggcggaggatcccgcgggaataatcttctcctgtttaagtggaccccggtgaacggggctaacgggggaggaggggatggggagcagcagcagcaggctgagacggccacgagacgccggcggtatgtgccggtttctttaatggaagagcaaaggcaagaatctaccaaatctgatgatgagaacaaggctaatgatggagatccatcttcgaatgaaactgagccatcaaatggaaagactgatatcaatgatacacctatggatgaatctcaggcaacagatgaggatggtcgagattctggtaaaaac

SEQ ID NO: 7073 - DNA, 567 bp, Zea mays
  unsure (1)..(567): unsure at all n locations; Clone ID: LIB3061-070-Q1-K6-G9
gtgctccagttccttttaccattcctcccacattcttcatgggcttcngacacccagctgtgcaagcctataggctacaacaagcaattgcggcgagcgtcttacaacaaccaatttcccagttgcaacaacaatccttggcacatctaacaatacaaaccatcgcaacgcaacagcaacaacaattcctaccagcactgagccacctagccatggtaaaccctgccgcctacttgcaacagcagttgcttgcatcaaacccacttgctctggcaaacgtagttgcaaaccagccacaacaacagctgcaacagtttctgccagcgctcagtcaactagccatggtgaaccctgccgcctacctacaacagcaacaactgctttcatctagcccgctcgctgtggccaatgcacctacatacctgcaacaacaattgttgcaacagattgtaccagctctgactcagctagttgtggcaaaccctgctgcctacttgcaacagctgcttccattcaaccaactgactatgtcgaactctgctgcgtacctacaacagcgacaacagt

SEQ ID NO: 7074 - DNA, 487 bp, Zea mays
  unsure (1)..(487): unsure at all n locations; Clone ID: LIB3061-070-Q1-K6-H1
gggnanaaggtttgccagaactactatcagcaacaacaatttcttccattcaaccaactatctacactgaaccctgctgcttatttgcagcaacaactattaccattcagccagctagctactgcctactctcatcaacaacaacttcttccatttaaccaattggccgcactgaacctcgctgcttatttgcagcagcaaatattactaccatttagccagctagctgcagcaagccgtgcttccttcttgacacagcaacagttgctgcctttctaccagcagtttgcggctaaccccgcaaccctcttacaactacaacaattgttgccctttgtccaacttgctttgacaaacccagcagcctcctaccaacaacacatcattggtggtgccctcttttagattgcttattagttgtaattcaataataaagttttttggatgatgtatgtggccaaccagaaataagaagttacatttccag

SEQ ID NO: 7075 - DNA, 587 bp, Zea mays
  unsure (1)..(587): unsure at all n locations; Clone ID: LIB3061-070-Q1-K6-H10
tnttttccttgctgtgcctggtatggcgccgatggcccatgacgtgctgngatctgagtccattgcctccgtgaagctgcgcatccagcggttcaagggctttgtggcgacgaagcagcggcttgtgctggatgggcatgaactggcaagaaataactgcccagtcaaggattatgggcggggtgagggaaatgttcttcatcttgttattcgactgtctgatctccgtgtgatcaatattgagactgcanactggaaagaagtttcagtttcaggtggatcagagccgcaatgttaagtttcttaagaacaagcttgcagcagagggtgatgaggatattggtaatcttcaggatcacaagcttgaatatgatggcgaggagcttgaggaccaccagctgatagctgatattagcaagagggatgatgctgtaattcatttgttcatcctcaaaccagcaaaagtactgacacagcaagttgatagagatactttggttacagttctcaatccacaggagaaaggcaacctgcaaaatgaacctcgctcaatgaactccacaaaatcagttgaggttaggcctgct

SEQ ID NO: 7076 - DNA, 563 bp, Zea mays
  Clone ID: LIB3061-070-Q1-K6-H11
agccatatgtccacatgggggggggggttttgcctccttatgctccttggtctttctgcaagtgctgctacggcgaccattttcccacaatgctcacaagctcctatagcttcccttcttcccccgtacctctcaccaacggtgtcttcggtatgtgaaaacccggtctgcaacgcgtacagatccaacaggcaatcgcagctggcatcttacctttatcacccttgttcctccaacaatcatcagccctattacagcagttacctttggtgcatttattggcacaaaacatcagggcacaacaactacaacaacttgtgctagcaaaccttgctgcctactctcagcaacagcagtttcttccattcaaccaactagctgcattgaactctgcttcttatttgcaacaacaacaactaccattcagccagctatctgctgcctacccccagcaatttcttccattcaaccaactgacagcattgaactctcctgcttatttacagcagcaacaactactaccattcagccagctagctggtgtgagccctgctaccttcttg

SEQ ID NO: 7077 - DNA, 587 bp, Zea mays
  unsure (1)..(587): unsure at all n locations; Clone ID: LIB3061-070-Q1-K6-H12
tcaacaatggctgcattgnactctgctgctttttggggggggggggccattcagtcagctagctgctgcctacccccagcaatttcttccattcaaccaactggcagcattgaactctgctgcttatttacaacagcaacagctaccaccattcagccagctagctgatgtgagccctgttgcctgtgttggcacaggaacanttgttgccgttctacctgcacgctgcgcctaacgctggcaccctcttacaactgcaacaattgctgccattcaaccaacttgctttgacaaacccaacagcgttctaccaacaacccatcattggtggtgccctcttttagattgcttatgagttatacttcaataatgaagttttttggatgatgtttgtggcttcccagaaataagaaagtacatttctagaaaaaaaaaaaaaaaaaaaaaaaaaaaaaaaaaaaaaaaaaaaaaaaaaaaaaaaaaaaaaaaaaaaaanatttnaaaaaaaaaaaaaaaaaaaaaaaaaaaaaaaaaaaaaaaaaaaaaannggggggggcccttttaaagaaaaccaaatttacctccc

SEQ ID NO: 7078 - DNA, 568 bp, Zea mays
  unsure (1)..(568): unsure at all n locations; Clone ID: LIB3061-070-Q1-K6-H2
gcacatanaagcacaatatgtaccaacatggcagccaaaaattttgcttccttatgctccttggtctttctgcaagtgctgctaccgcaaccattttcccacaatgctcacaagctcctatagcttcctttcttcccccatacctctcaccagcggtgtcttcagtatgtggaaaacccaattcttcaaccctacaggatccaacaggcaatcgcagcaggcatcttacctttatcacccttgttcctccaacaaccgtcagccctattacagcagttacctttggtgcatttgttggcacaaaacatcaaggcacaacaactacaacaacttgtgctaggaaaccttgctgcctactctcagcaacagcagtttcttccattcaaccaactggctgcattgaactctgctgcttatttgcaacaacaactaccattcagtcagctagctgctgcctacccccagcaatttcttccattcaaccaactggcagcattgaactctgctgcttatttacaacagcaacagctaccaccattcagccagctagctgatgtgagccctgttg

SEQ ID NO: 7079 - DNA, 564 bp, Zea mays
  unsure (1)..(564): unsure at all n locations; Clone ID: LIB3061-070-Q1-K6-H3
cactagcacatanaagcacatagtgtaccacatggcagccaaaaattttgcttccttatgctccttggtctttctgcaagtgctgctaccgcaaccattttcccacaatgctcacaagctcctatagcttcctttcttcccccatacctctcaccagcggtgtcttcagtatgtggaaaacccaattcttcaaccctacaggatccaacaggcaatcgcagcaggcatcttacctttatcacccttgttcctccaacaaccgtcagccctattacagcagttacctttggtgcatttgttggcacaaacatcaaggcacaacaactacaacaacttgtgctaggaaaccttgctgcctactctcagcaacagcagtttcttccattcaaccaactggctgcattgaactctgctgcttatttgcaacaacaactaccattcagtcagctagctgctgcctacccccagcaatttcttccattcaaccaactggcagcattgaactctgctgcttatttacaacagcaacagctaccaccattcagccagctagctgatgtgagc

SEQ ID NO: 7080 - DNA, 590 bp, Zea mays
  unsure (1)..(590): unsure at all n locations; Clone ID: LIB3061-070-Q1-K6-H4
agcgtccgtngcaacatnacatagtgaatacactagcgggagcgttacaccaaggcagccaagattttgccatccttgccctccttgctctttcagcaagcgttgctaccgcgactattattccacaatgctcacaacaatacctctctccggtgacagccgcgagatttgaatacccaactatacaatcctacaggctacaagaggccatcgcagcaagcatcttacggtcgttagcattgaccgtccaacaaccatatgccctattgcaacaaccatccttaatgaatctatatctccaaagaatcgcagcacaacaactacaacaacagttgcttccaacaatcaatcaagtagttgcagcgaaccttgctgcttacctccagcaacaacaatttcttccattcaatcaactagctggggtgaaccctgctgcttacttgcaggcacaacagctactaccattcaaccaacttgtcaggagccctgctgccttcttactgcagcaacagttgcttccattccatctacaagttgtggcaaacattgctgctttcttgcaacaacaacaacaattgctgccattttac

SEQ ID NO: 7081 - DNA, 574 bp, Zea mays
  unsure (1)..(574): unsure at all n locations; Clone ID: LIB3061-070-Q1-K6-H5
tngcaacatagnaagcacaatagggggcgggggaggggcagccaaaaattttgcttccttatgctccttggtctttctgcaagtgctgctaccgcaaccattttcccacaatgctcacaagctcctatagcttcctttcttcccccatacctctcaccagcggtgtcttcagtgtgggagagagacccaattcttcaaccctacaggatccaacaggcaatcgcagcaggcatcttacctttatcacccttgttcctccaacaaccgtcagccctattacagcagttacctttggtgcatttgttggcacaaaacatcaaggcacaacaactacaacaacttgtgctaggaaaccttgctgcctactctcagcaacagcagtttcttccattcaaccaactggctgcattgaactctgctgcttatttgcaacaacaactaccattcagtcagctagctgctgcctacccccagcaatttcttccattcaaccaactggcagcattgaactctgctgcttatttacaacagcaacagctaccaccattcagccagctagctgatgtgagccctg

SEQ ID NO: 7082 - DNA, 589 bp, Zea mays
  unsure (1)..(589): unsure at all n locations; Clone ID: LIB3061-070-Q1-K6-H7
tttcggncatcacgacgttgctgctcggtggcgaagcngggcgtgacaccatcgacctctttgtcgagcggtacaaggaccaagggatcaccgtggttgctggtgttgaagctagagggttcatttttggtcctcctatcgctttagccattggcgcaaaatttgtgccttntgagaagccgggaggggggccaggcgaggtgatctccgaagagtattctttggaatatggaactgacaagatagaaatgcatgtcggagctgtacaggccaacgaccgggctcttgtagtcgatgatcttattgctaccggtggaacactatgtgcagctgtcaaacttattgaacgtgttggagcaaaggttgttgagtgtgcttgtgtcattgaattgccagaactgaagggccgagacaagcttggggacaggccagtttttgtccttgtggaagcagacgcctgagcggaacttgggacttctcagagagtttggcgccgtcgatgctccctctctggagacaacacagtttcccatgttaccatgttggctattttctggctgacgcgtaataaagttttattccaaattgt

SEQ ID NO: 7083 - DNA, 113 bp, Zea mays
  unsure (1)..(113): unsure at all n locations; Clone ID: LIB3061-070-Q1-K6-H8
naaaatctaaaanaggcaccagcggggatggggtatagttcaataataaagttttttgtctgatgtttgtggcttcccagaataagaaagtcatttctagattcttatgtgct

SEQ ID NO: 7084 - DNA, 569 bp, Zea mays
  unsure (1)..(569): unsure at all n locations; Clone ID: LIB3061-070-Q1-K6-H9
tttgctgtgacagtttttgcagtggggggggggaagnaatttgcacatggacttgggtgctgagttcgagcttgatagcatcaagaaatgtcaaaggagtatgcagaagcaaaggaactggcccttgcagaggcaagccaaactgtcgaagttgacgatgctaagcacctggtggggggggagaggctgttgggcgacaagatagatgaagtcgtcaaagaatgggatgtccagaaggaggggttctacgagaggacaggattatcctcatcccctggcgaccagctcatggccatcgacaacgatgaatcaggagctcaatgtcacgaggatggatcccgttgcgatcagctcatggcggtcgacaatgatgaattgggagtacaggatcacgaggacctcgacgacgacgacggctttgccgagttagaactgctgctagagtgaagaacatatacaagtctgtaaactcttactaccggcgtataaccgtgtaatcagaacaccgagagatgtactggcttgtttggtttgtggctaaatgtgccacactttgcctaaggttagtc

SEQ ID NO: 7085 - DNA, 524 bp, Zea mays
  unsure (1)..(524): unsure at all n locations; Clone ID: LIB3061-070-Q1-N6-A10
gtgttttttttttctaaaaatgtactttcttatttctgggaagccacaaacatcagacaaaaaactttattattgaactataactcataagaaactaaaagaggcaccaccaatgatgggttgttggtagaatgctgctgggtttgtcaaagcagggtggttgaatggcagcaattgttgcagttgtaagagggtgccagcgttaggcgcagcgtgctggtagaacggcaacaactgtggttgtgtcaagaaggtagcagggctcacaccagctagctggctgaatggtagtagttgttgctgctgtaaataagcaggagagttcaatgctgtcagttggttgaatggaagaaattgctgggggtaggcagcagatagctggctgaatggtagttgttgttgttgcaaataaaaagcagagttcaatgcagctagttnggttgaatggaaaaaactgctgttgctgagagtaggcagcaaggtttgctaacacaagttgttgtagttgttgtgcccgacccctg

SEQ ID NO: 7086 - DNA, 499 bp, Zea mays
  Clone ID: LIB3061-070-Q1-N6-A2
ctagaaatgtactttcttatttctgggaagccacaaacatcagacaaaaaactttattattgaactataactcataagaaatctaaaagagggcaccaccaatgatgggttgttggtagaacgctgctgggtttgtcaaagcaagttggttgaatggcagcaattgttgcagttgtaagagggtgccagcgttaggcgcagcgtgctggtagaacggcaacaactgtggttgtatcaagaaggtagcagggctcacaccagctagctggctgaatggtagtagttgttgctgctgtaaataagcaggagagttcaatgctgccagttggttgaatggaagaaattgctgggggtaggcagcaggtagctggctgaatggtagttgttgttgttgcaaataagaagcagagttcaatgccagctagtgtggttgaatgggaagaaactgctggttgcttgagagttaggcagccaagggttttgcttagccacaagttgg

SEQ ID NO: 7087 - DNA, 549 bp, Zea mays
  Clone ID: LIB3061-070-Q1-N6-A4
agaaatgtactttcttatttctgggaagccacaaacatcagacaaaaaactttattattgaactataactcataagaaatctaaaagagggcaccaccaatgatgggttgttggtagaacgctgctgggtttgtcaaagcaagttggttgaatggcagcaattgttgcagttgtaagagggtgccagcgttaggcgcagcgtgctggtagaacggcaacaactgtggttgtatcaagaaggtagcagggctcacaccagctagctggctgaatggtagtagttgttgctgctgtaaataagcaggagagttcaatgctgccagttggttgaatggaagaaattgctgggggtaggcagcaggtagctggctgaatggtagttgttgttgttgcaaataagaagcagagttcaatgcagctagttggttgaatggaagaaactgctgttgctgagagtaggcagcaaggtttgctagcacaagttgttggtagttgttgtgccctgatgttttgtgccaataaatgcaccaaaagtaactgatgtaatag

SEQ ID NO: 7088 - DNA, 538 bp, Zea mays
  Clone ID: LIB3061-070-Q1-N6-A6
cagccaaaaaacttcattattgaattacaactaataagcaatctaaaagaggcaccgccaatgatgtgttgttggtagaaggctgctgggtttgtcaaagcaagttggacaaagggcagcaactgttgcagttgtaagagggttgcggggttagccacaaactgctggtagaacggaagcacttgttgttgtgtcaagaaggaagcggggcttgttgtagctagctggccaaatggtagtagtatttgctgctggaaataagcagaggggttcagtgcggccaattggttaaatggaaaaaattgttgctgctgaaagtaggcagtagctagctggctgaatggtagtagttgttgttgctgcaaataagcagcagggttcagtataaacagttggttgaatggaagaaattgttgttgctgagagtagggggaaaggtttgccagagctacttggctgatcactggtagcacgagttgctgcaactgttctgccctgatggtttgtaccaatgactgcaccaaagaagggctggcga

SEQ ID NO: 7089 - DNA, 532 bp, Zea mays
  Clone ID: LIB3061-070-Q1-N6-A7
ctagaaagtactttcttatttctgggaagccacaaacatcagacaaaaactttattattgaactataactcataagaaatctaaaagagggcaccaccaatgatgggttgttggtagaacactgctaggtttgtcaaagcaagttggttgaatggcagcaattgttgcagttgtaagagggtgccagcgttaggcgcagcgtgctggtagaacggcaacaactgtggttgtgtcaagaaggtagcagggctcacaccagctagctggctgaatggtagtagttgttgctgctgtaaataagcaggagagttcaatgctgccagttggttgaatggaagaaattgttgggggtaggcaacaggtagctggctgaatggtagttgttgttgttgcaaataagaagcagagttcaatgcagctagttggttgaatggaagaaactgctgttgctgagagtaggcagcaaggtttgctagcacaagttgttgtagttgttgtgccctgatgttttgtgccaataaatgcaccaaag

SEQ ID NO: 7090 - DNA, 569 bp, Zea mays
  Clone ID: LIB3061-070-Q1-N6-A8
ggtgtgttttttttttttcattctaaattaccattatatatctcataaataaacattgtgaaatagctcatgcataagcgtactctatatccaaactaaaatactaattgacaaatttggtaatcaactgtttgcgctatcgttgtgcctaactgaaatatatatgaaatcaagtctcgacactggtgtggccattccatcttttcctaggaagccatgctagatttagttatatgaagcaccctcaaccctgcatgatccactaatgtctatcacctcattcatgaagaagtcgagcaaccgttctcggacatgcacaaaaacatgtagacagcagcacaacgattaattgttttattcataactcacaaaatatgcatccaaaaatagtaaactaggactttctggaaagcttagaaagtcctctataactcttatattatcatcacaacatgattcaacagtttgaatggtcaaacagtgctaaactttaattctgtccagatttggacagaattcggctcttcacttcaaaaatccataactggagtttcataaatccaaatcag

SEQ ID NO: 7091 - DNA, 523 bp, Zea mays
  Clone ID: LIB3061-070-Q1-N6-A9
aaaaagtactttcttatttctgggaagccacaaacatcagacaaaaaactttattattgaactataactcataagaaatctaaaagagggcaccaccaatgatgggttgttggtagaacgctgctgggtttgtcaaagcaagttggttgaatggcagcaattgttgcagttgtaagagggtgccagcgttaggcgcagcgtgctggtagaacggcaacaactggggttgtatcaagaaggtagcagggctcacaccagctagctggctgaatggtagtagttgttgctgctgtaaataagcaggagagttcaatgctgccagttggttgaatggaaaaaattgctgggggtaggcagcaggtagctggctgaatggtagttgttgttgttgcaaataaaaagcagagttcaatgcagctagttggttgaatggaaaaaactgctgttgctgagagtaggcaacaaggtttgctagcacaagttgttgtagttgttgtgccctgatgttttgtgcccataaatg

SEQ ID NO: 7092 - DNA, 478 bp, Zea mays
  Clone ID: LIB3061-070-Q1-N6-B1
ggaacaatacttttttcttttcatttcaattgttcattcaggtcattgctcacactgacactgccacccatggtgatgcgtgacacattattactcaatcatcgccgctaaatgactcaactagctagctagccagcgggtatactacagcacatagtttcttcagtgggggacaccgccggcagcagcgtaggggcatggagtcggctgctgcaggccgcacatcgccgtcagttgctgcgctatctgcgccgccaacagccccgcgacctggccgctttgcggctgctgctgcaggatggactggaggaccaagccgaagatcgcctggtaccggtgctgagggtccacctgcctgagctgatggcaacactgttgccgcaacgactggcactgaggcgagcagtaaggcgtttccgtagggctgcactgatgcctcagaaactcaacgcactggcccaagatcggggtgctggca

SEQ ID NO: 7093 - DNA, 520 bp, Zea mays
  unsure (1)..(520): unsure at all n locations; Clone ID: LIB3061-070-Q1-N6-B11
gtgtgggttgggtgttttttttttttttaaaaactagaaatgtactttcttatttctgggaagccacaaacatcagataaaaaactttattattgaactataactcataagaaattaaaagaggcaccaccaatgatgggttgttggtagaacactggtggggttgtcaaagcaagttggttgaatggcagcaattgttgcagttgtaagagggtgccagcgttaggcgcaacgtgctggtagaacggcaacaactgtggttgtgtcaagaaggtagcagggctcacaccagctagctggctgaatggtagtagttgttgctgctgtaaataagcaggagagttcaatgctgctagttggttgaatggaagaaattgctgggggtaggcagcaggtagctggctgaatggtagttgttgttgttgcaaataagaagcagagttcaatgaacctagttggttgaatggaagaaactgctgttgctgagagtaggcancaaggtttgctaccacaaagttgt

SEQ ID NO: 7094 - DNA, 467 bp, Zea mays
  Clone ID: LIB3061-070-Q1-N6-B12
gctataagcacaagacagtcgatctctatttaattagcgggtaatatgttacatattacaacgaactacaaaacgattcgttctttttttttggaacatgggggaatagctattaggggccgatgcaaaaaggggtatgtacacctggctagcagtaacccatcgggggaaattgaacgatcaagtacccaacctcatactaatacagcttttttctaatcatttacccgaccttttggagccgtcttgtcttgtgtcaccgggcgggccacctaccccaccttggccgggggggggatgttgagggcgaaccccaccccgaccgctggggaggggtccaccacggatgacgaccacccggggtcgctctgctccttttcacgggagggtgccccgtcacccttgttggcaccggcggggaccgcggtcggcccgtaggggacgggcgcccgcacggccaccgtcac

SEQ ID NO: 7095 - DNA, 545 bp, Zea mays
  Clone ID: LIB3061-070-Q1-N6-B2
gggaaaaacaggaggcaatcaagccaaataattagcatgatcagttgagctgagaagataaaacatttcctgcctatagagacataaacaactcgtgcttgaggattctaggattcgcctaccaagttcagttgactgggggtacacagccacaaaatggcgtggcactggaaacgctctgaaagctactacacaagatctgattacaggtccctttgcccagggaggtcacaagcaccaacaaatgtccaaaaagataacaattgtattaactcaaagggacggaggacaaaaaaaaaaaaatcatgcacatgaaacaccatggccctcagatataatattcaggagtgaattcctatggcaataagcttgtgtggcttctgaacatgaaacaccatggctcccagatgtgcaacaactgagacctcaatcgaatgttggtgataagcactcttcaaccatgtccagtaggtttgggttttccaatgcagccgcaacacgttctttgtcattcagttgcttattcacagcaacttcagttgcgt

SEQ ID NO: 7096 - DNA, 456 bp, Zea mays
  Clone ID: LIB3061-070-Q1-N6-B4
gcacaaattcacagcgcattgaatacttcaggttcaagagggttcacataagaaatccttgacaaaccaagcaagtctgtaaaaggaagataagcagctgatacaacaagggttttgcttgatggcaactaaggtcgcccactcattcagccatcaagactggatatattgtcttgtcttgaagactggatatattgccttcacctgaacttttgccgccgtctcagctcccgctgtatagccttttttctagcctcgtccgaaaattctacattctctgcaaaccgagcttgggggcttatgacactccctgaagcaccaccaggtccgtatcccggtggaaaggcttccaagtccatactccttgagccaccagttctctggattcctgcaagcattctctgctggcaggtcgaaatccaccaagtggtattgccctgacttttcccgggcccg

SEQ ID NO: 7097 - DNA, 521 bp, Zea mays
  Clone ID: LIB3061-070-Q1-N6-B5
cagaatatattgagataaatctcaatcaatatattgattatttctaggaaacacatgccggaatgagggcaccattatcgagtacatctcatatgtaatctaaaagatggcacctccaacgatgggttgctgcctcgacaagacagggtttatcaaagagaactggttgtatggcagcaattgttgctgctgtaggaaggcagcgaccaatgggttagccactgctagtggattaagtaactgttgtcgctgttgtaggtacgcagcaaagttcgacatagtcagttggttgaatggaagcagctgttgcaagtaggcagcagggtttgccacaactagctgaatcagagctggtacaatctgttgcaacaattgttgttgcaggtatgtaggtgcattggccacagcgagcgggctagatgaaagcagttgttgctgttgtaggtaggcggcagggttcaccatggcctagttgactgagcgctggcagaaactgttgcaactgttgttgtggctggttt

SEQ ID NO: 7098 - DNA, 393 bp, Zea mays
  Clone ID: LIB3061-070-Q1-N6-B6
ccttaggattaaacttaaaaaaaaacccgggggggggaaaaacacccattgatccccaatccatgctggttgaagcaagggtctgctggagcccaggataaaaaaaaaactaaaaactgaaaaaaagggacctttaaaaaaaaacaaaaatgggcaacaacaaacacgagacgaacgaaaataaacactttggactaggggaaaaaaaacgggagcaaaaaagaaaaattgggcgggcgggccccaacggtaaattcctccaattcccgggggagttgccgaaaccccccccacggttgccacccccgtaaccccccccaccaccaccgtaaccgccgccgccaccaccgtaaccccccccacccccgaaaccgcccccgccataacggggcc

SEQ ID NO: 7099 - DNA, 506 bp, Zea mays
  Clone ID: LIB3061-070-Q1-N6-B7
aagaaaagctgtttttccctgcaaccgaatccaaaataacgaatacagaacaacgacgctaatacggcctatttgtttgggaactagacattcatcaaatcctggggggaggaggggtacccgcgctcgccacggatgcggcgggcaagctggatgtccttgggcatgatggggacccgcttggcgtggatggcgcaaaggttggtgtcctcaaaaaggccgacgaggtaggccttgggggcctcctggagcgccaacacggggtggttttggaaccggaggtttgtcttgaagtcctgggcgatctcgcgcaccaggcgctggaagggcagtttgcggatcaaaagctccgtgctcttttgggacttgcggatctcgggcagcgccacggttccgggcctgtacctggggggtttttttacgccggcggtcgttggggccgacttccttgccgccttggggggaaactgtttgcggggggccttgcctcccgggaattgggggcg

SEQ ID NO: 7100 - DNA, 539 bp, Zea mays
  Clone ID: LIB3061-070-Q1-N6-B8
atcagcaaaaaaaactttattattgaactataactcataagcaatctaaaagagggcaccaccaatgatgggttgttggtagaacactgctgggtttgtcaaagcaagttggtcgaatggcagcaattgttgcagttgtaagagggtgccaacgttaggcgcagtgtgcaggtagaacggcaacaaatgttgctgtgtcaagaaggcagcagggctcacagcagctagctggctgaatggtagtagttgttgttgttgtacataagcatgagagttcaatgctgccagttggttgaatggaaaaaattgccgggggtaggcagcagctagctggctgaatggtagtagttgttgttgctgcaaataagcagcagagttcaatgcagctagttggttgaatggcaaaaactgttgttgctgagagtaggcagcaaggtttgctagcaccagttgttgtagttgttgtgccctgatgttttgtgcccacaaatgcaccaaaggtactggtgttgctgagagtaggcaacaaggtttgctag

SEQ ID NO: 7101 - DNA, 272 bp, Zea mays
  Clone ID: LIB3061-070-Q1-N6-C1
ggtgtacaattttacatggaaacacggaaacggaacaaacttggggagggggggccacaaacaacggacgaaaaaaaaattattgaaaaaaactaataggcgaactaaaagagggcaccacccaagagggggggccggaaagaagccgcccggggaaggggggcacgtcggacaaaggggaaaaatggacgaaggggaaaaaaggttgagggggtaaaagggaggggggggaagaaaggcacgaaaggggggggggggaagaagggagcaag

SEQ ID NO: 7102 - DNA, 549 bp, Zea mays
  Clone ID: LIB3061-070-Q1-N6-C11
ggaacaatacttttttcttttcatttcaattgttcattcaggtcattgctcacactgacactgccacccatggtgatgcgtgacacattattactcaatcatcgccgctaaatgactcaactagctagctagccagcggctatactacagcacatagtttcttcagtgggggacaccgccggcagcagcgtaggggcatggagtcggctgctgcaggccgcacatcgccgtcagttgctgcgctatctgcgccgccaacagccccgcgacctggccgctttgcggctgctgctgcaggatggactggaggaccaagccgaagatcgcctggtaccggtgctgcggctccacctgcctgagctgctggcaacactgctgccgcaacgactggcactgaggcgagcagtagggcgtcgccgtcgggctgcactgatgcctcagaaactcgacgcactggcccaggatcggggtgctgccaacgccgcaggttccctgcagctggcacgggcttggatgcggctgttggcacgggcatgggtgtggctgggg

SEQ ID NO: 7103 - DNA, 499 bp, Zea mays
  Clone ID: LIB3061-070-Q1-N6-C12
cgacacaaagttttaacagcaacatattatagcactctgcagccgggatccatgtggctaaacatcataacataaagttctcggcagtaagaggcagcagcaataattcctccacaaacttctaacttcagaaatataaaggaacacttaggccagcattcggccgttctccaaatcaaaaacttattcttcctcctcagcctcctcgagccatttgacaaacggctccagagctttcacgaaagattgcctgcccttctggtttgaacctttacggaaccaaagcaggacagtatcttcagctaggacatcttggtcatacagtgttcttatgatttcaggaaacagcttcatcagcttagcatcctcatagcactgtgtctgtactttgtatataagttccagttcgagtctgccactcgtgcaaaaagcattcaaaagctcagcccatgctttcacctgccgaagtgctgcattagaattctgttgctggttcttc

SEQ ID NO: 7104 - DNA, 198 bp, Zea mays
  Clone ID: LIB3061-070-Q1-N6-C2
gggccgcaagaacgggcatcaaaaaaacaagctggaaaggttggcaaaaacaggattcatcctacgttatctcattggctacaggatgcgtggggcccggttcaaatggaaccaccacatggggctggggcaaatcagtttacagaggaataaaaccaagacaatcttcagggtggctgctaaaaaaggacgctgtta

SEQ ID NO: 7105 - DNA, 518 bp, Zea mays
  Clone ID: LIB3061-070-Q1-N6-C3
gaaagactaatcaacacgcagtttaaccatgagcaagctttgtttaattattacagtctacgagtacttattcaggcagatcactctgaggttgtgcctactgttgggcgctgccagcttgaccttgttggtagctgccactgccagcaggagtaagcacagccagctcatgcttcctaccgttcttgagctctgcagcttcctccatggagatggcatacgagctggcgatgacggcggccggcaagtcgctcaggacggagttcttcccggcgacgtggctgaccatggtgtcagggttcgtctcgaaggcgatgtactggaagccttctccctgcgccttggtggcgacgaggtagccctggggtacgatgagcagctgccccgcacggagcacgtcgtcgaacaccgtggtcccgttgtcgctggcgacctggacccttgcactgcccctgatgccgtacatggcgctgtgggcgttgaagttccagaaaggcgacatgatggcgtcctggtac

SEQ ID NO: 7106 - DNA, 530 bp, Zea mays
  unsure (1)..(530): unsure at all n locations; Clone ID: LIB3061-070-Q1-N6-C4
aaaatatagatctctaatacttanttactgagaggtcgcacatatcagcatgagaactttattattacagtataaatcataaaaaatctagaagatggcaccaccaatggtgggcggttgcaataaggtggtaggattcgtcaaagcatgttggctaaatggtagcaattgttgttgttgtaagaaggcaacaatgtttgccacattctgtgggtagaatggtagcaattgttgctgttgcaagaaggcattaatgtttcccacaacttgtgggtaaaatggcaacaaatgttgttgtctcaagaaagcaacaatgtttgccacagcttgcagatggaatggcagaagctgttgttgcagtaagaaggcataagggctcccgacaagttggttaaatggtagtagctgttgtgcctgcaagtagatagcagggttcaccccagctagttgattgaatggaagaaactgttgttgctggaggtaagcagcaaggttcgctgcaactacttgattgattgttggtagcaact

SEQ ID NO: 7107 - DNA, 524 bp, Zea mays
  Clone ID: LIB3061-070-Q1-N6-C5
tttttttttttttattttttttttttttttttttttttttttttttttttttttttttttttttttttttttttttttttttttttttttttttttttttttttttttttttttttttaaaaaaggggagagggaattttttttttgggggggggcccaaaaaaaaaaaaaaaaatttttttttggaaacacaaaaaaaagaaaataaaaagaggggcccccccaaagggggtgtgggggggggggggcccttcgtttttaaaaaaaagggggaaaagggggaaaaattttgtgtatttaaaagggggggggggggtaccccaaaaccgtgtggaaaaagggaaaaacttgtgtttgtaaaaaaaaaaaaaaggggtttgggaaatatcggggaaaaaagggaaaaaaatttggggggaaaaaaaaaaaaggggggtaaggggcgccaattggttaaaaaaaaaaaaatgttgtttggtagaggagggcaaacccagcgggggagagagaaaaaaaggggggcg

SEQ ID NO: 7108 - DNA, 528 bp, Zea mays
  Clone ID: LIB3061-070-Q1-N6-C6
agaaagtactttcttatttctgggaagccacaaacatcagacaaaaaactttattattgaactataactcataagaaatctaaaagaggcaccaccaatgatgggttgttggtagaatgctgctgggtttgtcaaagcaagttggttgaatggcagcaattgttgcagttgtaagagggtgccagcgttaggcgcagcgtgctagtagaacggcaacaactgtggttgtgtcaagaaggtagcagggctcacaccagctagctggctgaatggtagtagttgttgctgctgtaaataagcaggagagttcaatgctgtcagttggttgaatggaagaaattgctgggggtaggcagcagatagctggctgaatggtagttgttgttgttgcaaataagaagcagagttcaatgcagctagttggttgaatggaagaaactgctgttgctgagagtaggcagcaaggtttgctagcacaagttgttgtagttgttgtgccctgatgttttgtgccaataaatgcaccaa

SEQ ID NO: 7109 - DNA, 487 bp, Zea mays
  Clone ID: LIB3061-070-Q1-N6-C7
cgagataaatctcaatcaatatattgattatttctaggaaacacatgtcggtatgagggcaccattgtcgagtacatctcatatgtaatctaaaagatggcacctccaacgatgggttgctgcaaggcagggttcatcaaagagaactggttgtatggcagcaattgttgttgctgctgcaggaaggtagcgaccaatgggttagccactgccaatggattaagtaactgttgtcgctgttgtaggtacccagcagagtttgacacagccagttggttgaatggaagcaactgttgtaagtaggcagcagggtttgccacagctagctgagtcagagctggtacaatttgttgcagcaactgttgttgtaggtacctaggtgcattgcccaccgcgagcgggctagatgaaagtagttgtaggtagacggcagggttcaccatggctagttgactgagcactggcataaactgttgcagcttgtgtt

SEQ ID NO: 7110 - DNA, 513 bp, Zea mays
  Clone ID: LIB3061-070-Q1-N6-C8
gacatacagagtgatcaggtgcaattaatccatgccactttgtccccagaaactttgccagttacagtcaaaggcaccaaaactgttacaatccctttatttttcatcatttcttctgggcctcatgtttgggttcacgggggggttttgatcaacgaaacagccgtcaatggctcatcccgcaagtattttgcattattctgctcaatgctggacagcacctcacatgcgtgacctcgccgaaccttgctgcgaagctcctggtgcgctcaatggtacaccacttttagctcgctgttccaaatatgatgatggtttgaaaaaggggccataaatttcagcccacttgcttagcttaaaatgtatgtaaggggctccaacagtgtcagcccaaaaaacaagaccacccctgtatttaggaaaacccattccaagaacagaagcaatttcaagatcagaagctcgaattacaaacattttatccataaccctgcatgcctcattcacaactgg

SEQ ID NO: 7111 - DNA, 496 bp, Zea mays
  Clone ID: LIB3061-070-Q1-N6-C9
agagtaaataatagtgaatttatatatttaaaaaaacatgacttttgatagtttaattgcagcacggttgtatgtaaagcttaattgcacgttagtttttgcctttggattagaattcctaatccttttcttttaaatagagttcgcatgtttacaataccaagcacttctacagcaaccacatgtaacttgaaaaagaagtattcttgcaatattgctgctccaaaatatcgattgtttctgggacctaggggacatcaggaacaagaaatggctattcccgcttgtcctcctcagcctcatcttctaagccgaaagcactgctgacaccagcatttctgtccttgtcaatttttaccatccctacttcaccatctcctttcgtcagagattgagattcctcatcgtcatcgtcagcagcttcaccagaatatgcatatctttgcgagctttgggaaggtgcccacagataacaaatcacaagaagcaacacaaa

SEQ ID NO: 7112 - DNA, 496 bp, Zea mays
  Clone ID: LIB3061-070-Q1-N6-D1
agctaggatatcgaccatgaaatatgaataaatttgaataatatcagcttacatcagcaacaacattgttgcagcagtcttcctcatgggaccttgatggaactaccggattgcattcacaagggggtacacaggggatcacctaacatcagcactatcttatatacaacgccaccgccataatgccgaaggttgttggctactcaagaacaacaggcagacaccaaataaaagtgtatttatcaaaaaatggggtttactgtcagcctccttttgggaggggacttctcgattatctggttttgcaagtccatgaaactgattcccttgtttgcaaacaggcttctgagggtgatcactgagagctcgctgtactttgcaatggcaaggtttggctgtaccaactcatacgctgggataagcaccaaatcaatgcgactgccatcaatggacagatgggggggggttgtgacgccccttggggcatcctcgaaca

SEQ ID NO: 7113 - DNA, 504 bp, Zea mays
  Clone ID: LIB3061-070-Q1-N6-D10
aggtcttagagcattcttgtattgcaaaaggtgaaatagcaagatggtaccaaataaatagataaaagtgcacatgctaacagatctcaacagttcacacgataacagcaacgatcacaaacaaaacttgtgatgatgaaaactaggtattgctaaagcaggcgcaggatcgcatcatttcttcttggcagccgccttggtcaccttggcgccggtcgggtccttcttctccacactcttgataactccaacagcaaccgtctgtctcatgtcacggacagcaaacctaccaaggggaggatacgctgagaatgtctccaccaccatgggcttggtcggtatcatcttcaccataccagcatcaccgttcttcaggaactttggctccttctcaagctccttgccagaccgcctgtcgatcttggtaatgagctcaacaaacttgacagcaatgtgggaggtgtggcagtccagcactggggcatagccgttgccaatctgccc

SEQ ID NO: 7114 - DNA, 570 bp, Zea mays
  Clone ID: LIB3061-070-Q1-N6-D12
gctgcgctgggcaccgtcgcgtgggcggccaccgcgctcgcgctcggcctcgcgtgcaaggagatgcgggccgccgccgccgcggcgcgcgggtggcagatgcgcacgctggaggcggtcaccgcggtgctggccgtcacgcagctggcgtacgtgctgatgctgcaccgcgccgccgccgccgcgtacgctgatgatgaagccgatgctaccgcctacgccgacgctggtggcgaccagtgcgagcctggctgttccatcggcaccgaggacgacgccgacgccgactgccagcgcgcgcagcagcagcagcatggccgccaccaccaccaacccaggcagggcggcgggccctcgtgcagtgtcatgtgaactagcatacccatgcatgcatgtttggtggtgtcgctctcttgtcttgccattttccgtgctcgtgtttcgtctcgtggaaaataagcaatttaaacttagtttaatttcctgtatgtcatgtgttcgttttagtgtgtatgcctcctatatattatggtcgtatgtgtgtgtcgacatgcttgtgtctctcagtat

SEQ ID NO: 7115 - DNA, 450 bp, Zea mays
  unsure (1)..(450): unsure at all n locations; Clone ID: LIB3061-070-Q1-N6-D2
aaaaatgtactttcttatttctgggaagccacaaacatcagataaaaaactttattattgaactataactcataagaaatctaaaagagggcaccaccaatgatgggttgttggtagaacactgctgggtttgtcaaagcaagttggttgaatgggagcaattgttgcagttgtaaaagggtgccagcgttaggcgcaacgtgctggtagaacggcaacaactgtggttgtgtcaagaaggtaacagggctcacaccaactaactggctgaatgggagtaattgttgctgctgtaaataagcaggagagttcaatgctgctagttggttgaaaggaagaaattgctgggggtaggcaacaggtagctggctgaatggtagttgttgntgttgcaaattagaagcagagttcaatgaacctagttggttgaatggaaaaaactgctgttgc

SEQ ID NO: 7116 - DNA, 422 bp, Zea mays
  Clone ID: LIB3061-070-Q1-N6-D3
gggggggggggggctcttttttggggggggggcccccccgccggacaaaaagctttttttgggggcccttcccccaggggaaatcaaagaggggggccccccccggggggggggggggggaaagggggggggggtttgaaaaaagggggggggggggggggccacttggggggggcaaaaaaaaggggggttcaatggcccttggggggggggggggaaaaacctggtgttgtggagggggggccaagggggtttccccccaaagggggggggggggggggcccctgggttttgggcccaaaaagccccccagggggcccgggggaaaagggggtaagattgggggggggaaagggggggaaaagggaaaaggccccccggggagggcgggggggccccctgggggggaaaaaagggggttc

SEQ ID NO: 7117 - DNA, 538 bp, Zea mays
  unsure (1)..(538): unsure at all n locations; Clone ID: LIB3061-070-Q1-N6-D6
agatctataatacttanttactgagaggtcgcacatatcagcatgagaactttattattacagtataaatcataaaaaatctagaagatggcaccaccaatggtgggcgattgcaataaggtggtaggattcgtcaaagcatgttggctaaatggcagcaattgttgttgttgtaagaaggcaacaatgtttgccacattatgtgggtagaatggcagcaattgttgctgttgcaagaaggcattaatgtttcccacaacctgtgggtaaaatggcaacaattgttgttgtcgcaagaaagaagcaatgttttccacagcttgcagatggaatggcagaagctgttgttgcagtaagaaggcatcagggctcccgacaagttggttaaatggtagtagttgttgtgcctgcaagtagacagcagggttcaccccagctagttgattgaatggaagaaattgttgttgctggagataagcagcaaggttcgctgcaactacttgattgattgttggtagcaactgttgttgtagttgtt

SEQ ID NO: 7118 - DNA, 547 bp, Zea mays
  Clone ID: LIB3061-070-Q1-N6-D8
agaatctggaaatgtaacttcttatttctggttggccacatacatcatccaaaaaatttattattgaattacaactaataagcaatctaaaagaggcaccaccaatgatgtgttgttggtaggaggctgctgggtttgtcaaagcaagttggacaaagggcaacaattgttgtagttgtaagagggttgcggggttagccgcaaactgctggtagaaaggcagcaactgttgctgtgtcaagaaggaagcacggcttgctgcagctagctggctaaatggtagtaatatttgctgctgcaaataagcagcgaggttcagtgcggccaattggttaaatggaagaagttgttgttgatgagagtaggcagtagctagctggctgaatggtaatagttgttgctgcaaataagcagcagggttcagtgtagatagttggttgaatggaagaaaatgttgttgctgatagtagggagaaaggtttgccagagctacttggttgatcacaggtagcacgagttgctgcagctgctgtgccttgatggtttg

SEQ ID NO: 7119 - DNA, 573 bp, Zea mays
  Clone ID: LIB3061-070-Q1-N6-D9
tcgcgatctagaactagtcctagatcgcgagcggtcgcccttttttttttttttttttttttgaaatatattgagataaatctcaatcaatatattgattatttctaggaaacacatgccggaatgagggcaccattatcgagtacatctcatatgtaatctaaaagatggcacctccaacgatgggttgctgcctcgacaagacagggtttatcaaagagaactggttgtatggcagcaattgttgctgctgtaggaaggcagcgaccaatgggttagccactgctagtggattaagtaactgttgtcgctgttgtaggtacgcagcagagttcgacatagtcagttggttgaatggaagcagctgttgcaagtaggcagcagggtttgccacaactagctgagtcagagctggtacaatctgttgcaacaattgttgttgcaggtatgtaggtgcattggccacagcgagcgggctagatgaaagcagttgttgctgttgtaggtaggcggcagggttcaccatggctagttgactgagcgctggcagaaactgttgcagctgttgttgtg

SEQ ID NO: 7120 - DNA, 496 bp, Zea mays
  Clone ID: LIB3061-070-Q1-N6-E1
cagataaaaaatttattattgaactataactcataagaaatctaaaagagggcaccaccaatgatgggttgttggtagaacactgctgggtttgtcaaagcaagttggttgaatggcagcaattgttgcagttgtaaaagggtgccagcgttaggcgcaacgtgctggtagaacggcaacaactgtggttgtgtcaaaaaggtagcagggctcacaccagctagctggctgaatggtagtagttgttgctgctgtaaataagcaggagagttcaatgctgctagttggttgaatggaaaaaattgctgggggtaggcagcaagtacctggctgaatggtagttgttgttgttgcaaataaaaagcagagttcaatgaacctagttggttgaatggaaaaaactgctgttgctgagagtaggcagcaaggtttgctaacacaagttgttgtagttgttgtgccctgaagttttgtgccaataaagcaccaaagtaac

SEQ ID NO: 7121 - DNA, 446 bp, Zea mays
  Clone ID: LIB3061-070-Q1-N6-E10
cacgggaaacagtttaacttatgatagattgccatcctttgcggtctggggtaaccattacaacacaggctcataggttcgacacataattcgcatcccaaactcaaacttgataattcattcaaacacagcaatggggcccacctacaaactaaagtaacactggggcaaacgtcccttacaccgaaaaaaaaacacagtttggggcttgataccttaaatctcctgaacaagcaaacctggcgggaacgactgcttgaacttgttggccttttcggcgtcttggcacccaaagggtgtagaggtacctggagcaccccaccttaaacttgacggggtccttggcccccttgatccgcaccgaccgtgcgttctttccccgcgcagtaagaagaaagtccttgttctcgtggatctgttctcgcatgggggggagccccgggcgg

SEQ ID NO: 7122 - DNA, 549 bp, Zea mays
  Clone ID: LIB3061-070-Q1-N6-E11
agaaatgtactttcttatttctgggaagccacaaacatcagacaaaaaactttattattgaactataactcataagaaatctaaaagaggcaccaccaatgatgggttgttggtagaatgctgttgggtttgtcaaagcaaggtggttgaatggcagcaattgttgcagttgtaagagggtgccagcgttaggcgcagcgtgctggtagaacggcaacaattgtggttgtgtcaagaaggtagcagggctcacaccagctagctggctgaatggtagtagttgttgctgctgtaaataagcaggagagttcaaagctgtcagttggttgaatggaagaaattgctgggggtaggcagcagatagctggctgaatggtagttgttgttgttgcaaataagaagcagagttcaatgcagctagttggttgaatggaaaaaactgttgttgctgaaagtaggcaccaaggtttgctagcacaagttgttgtagttgttgtgcccttgatgtttgtgccaataaatgcaccaaagtaactgctgtaatagggc

SEQ ID NO: 7123 - DNA, 76 bp, Zea mays
  Clone ID: LIB3061-070-Q1-N6-E12
gaatctagaaagtactttcttatttctgggaagccacaaacatcagacaaaaaactttattattgaactataactc

SEQ ID NO: 7124 - DNA, 551 bp, Zea mays
  Clone ID: LIB3061-070-Q1-N6-E5
atcgagataaatctcaatcaatatattgattatttctaggaaacacacgtcggtatgagggcaccattatcgagtacatctcatatgtaatctaaaagatggcacctccaacgatgggttgctgcctcgacaagacaggattcatcaaagagaactggttgtatggcagcaattgttgctgctgtaggaaggcggcgaccaatgggttagccactaccaatggattaagtaactgttgtcgctgttgtaggtacgcagcagagttcgacagagtcagttggttgaatggaagcagctgttgcaagtaggcaacagggtttgccacagctagttgagtcagagctggtacaatctgttgcaacaattgttgttgcaggtatgtaggtgcattgcccacagcgagcgggctagatgaaagcagttgttgttgttgtacgtaggcggcagggttcaccatggctagttgactgagcgttggcagaaactgttgtagctgttgttgttgctggtttgcaactacgttcgccaaagcaggtgggttggatgcaagc

SEQ ID NO: 7125 - DNA, 375 bp, Zea mays
  Clone ID: LIB3061-070-Q1-N6-E6
gggggggaaaaaagggtttttttttgccaaaaaaaaaaaaaaagatggggtttccacacccccccgggcgggatgagaaattttccccttttttttagcccccgctttttttatatagccctgttggggggttgggctaacaagcaccccgaatcggtgatacaaaaaaaaattcttcgggttggaaaaaaaaaaattggggggggccccttttttaaaccaccatccaccaaacgatggaaaaaaaaaccgaaaattaagaaaacgacaacggtttttgggtttgaaaaaaacaaacttggtggggacaattaatattttcaaaggtgggaaaaggtctggaaaaagggggtcaaacccaaaaaaccccccccg

SEQ ID NO: 7126 - DNA, 556 bp, Zea mays
  Clone ID: LIB3061-070-Q1-N6-E8
agaaatgtactttcttatttctgggaagccacaaacatcagacaaaaactttattattgaactataactcataagaaatctaaaagagggcaccaccaatgatgggttgttggtagaatgctgctgggtttgtcaaagcaagttggttgaatggcagcaattgttgcagttgtaagagggtgccagcgttaggcgcagcgtgctggtagaacggcaacaactgtggttgtgtcaagaaggtagcagggctcacaccagctagctggctgaatggtagtagttgttgctgctgtaaataagcaggagagttcaatgctgtcagttggttgaatggaagaaattgctgggggtaggcagcagatagctggctgaatggtagttgttgttgttgcaaataagaagcagagttcaatgcagctagttggttgaatggaagaaactgctgttgctgagagtaggcagcaaggtttgctagcacaagttgttgtagttgttgtgccctgatgttttgtgccaataaagcaccaaagggaactgctggaatagggctgatgat

SEQ ID NO: 7127 - DNA, 549 bp, Zea mays
  Clone ID: LIB3061-070-Q1-N6-E9
agaaatgtactttcttatttctgggacgccacaaacatcatccaaaaaacttcattattgaactataactcataagcaatctaaaagggggcaccaccaatgatgggttgttggtagaacactgttgagtttgtcaaagcaagttggttgaatggcagcaattgttgcagttgtaagagggtgccagcgttaggcatagcgtgcaggtagaacggcaacaactgttgttgtgtcaagaaggcagcagggctcacatcagctagctggctgaatggtagtagttgttgctgctgtaaataagcagcagagttcaatgctgctagttggttgaatggaagaaattgctgggggtaggcagcaactagctggctgaatggtaattgttgttgcaaataagcagcagagttcaatgcagccagttggttgaatggaagaaactgatgttgctgagagtatgcagcaaggtttgctagcacaagttgttgtagttgttgtgccctgatgttttgtgccaccaaatggaccaaaggtaactgctgtaatagggct

SEQ ID NO: 7128 - DNA, 247 bp, Zea mays
  Clone ID: LIB3061-070-Q1-N6-F1
tcgcgatctaagaaatagctgcagagttggacaagctgtcatcgcggcttgataacgtcgacaagatgatatcatctgccatggcctcagatccagaggtgaagtctcttctgagcagcacatctgctatctggatgccggccataacagcgtctgccaatgagaggcggaggattgttagcaccagcaccgaatgcacccaggacaacgcagataattccaaacaggtcctaggccatgatgccta

SEQ ID NO: 7129 - DNA, 343 bp, Zea mays
  Clone ID: LIB3061-070-Q1-N6-F10
ttttttttttttttttttttttctttttttttttattttttttttttttttttttttttttttttttatttttttttttttttttttttttttttaaatttttttttttttttttttttttttttttttttttttttttttttttgggggggggggggttttgttttttttttttttttagaggggggggggttttagaggaaaaaccgggtatgagggtaaaagggggggggaaaaaaatttttttaagaagaaaccacaaataggcgtggggggcgggagaatatttttgggggagaggggggggaaaagcccaaatgggggggggggtttgtggcgtggt

SEQ ID NO: 7130 - DNA, 434 bp, Zea mays
  Clone ID: LIB3061-070-Q1-N6-F11
gtggtttttttttttttttttttttttttttttttttttttttttttttttttttttggtttttttttttttttttttttttttatttttttttttttttttttttttttttttttttttccacccaaaaactttttttttgatttccaactaaagggggttttaaaagggggcccccccaatgttttttttttggaaggaggcccttggttttttaaaagaaagttggaaaaagggcaaaaatttttttattttaaaaagggttggggggttaccccaaaactgttgggaaaaagggaaaaactttttttttttaaaaaaagaaacccggtttgttggaccaagctggtaaaaggggaagagtttttgttggtgaaaaaaacaggggggtttaaggcggccaattggttaaataaaaaaatttttttttttta

SEQ ID NO: 7131 - DNA, 545 bp, Zea mays
  Clone ID: LIB3061-070-Q1-N6-F12
aagaaaaactgaacaaacatatagtagagtcccaaactccgttgcattttcgataagttacagttcacgatcgcaggctgacagccaccacttcccaggcaagttatgtttccccacgtttataagcaaattcaatgatatgccaacagtttggtgaatgaattgagcaggagtgccaatatcaggccctgggcgtcgagctgaccgagataaatcatgtttgtacagcccaaccattgtttggagatgcatctccccgttgttcatcttttacgctggacgagtccgttctcagtcagatattccacaaattcgtctatgaggtagggccaggcaccttcgtcgtcgtagttggataactgtggatcggtcgtcttcacaaattccagcagctgggaccatgtgtctctagatatggctttattgtgtctgacctgtaaaaactgacaccaatgatccagaagaggccagttcctttcagcaaatagcaactgccacattccaatagaagtctccagtgagagagacttttgacccttttccct

SEQ ID NO: 7132 - DNA, 552 bp, Zea mays
  Clone ID: LIB3061-070-Q1-N6-F2
ctaaaaagtactttcttatttctgggaagccacaaacatcagacaaaaactttattattgaactataactcataagaaatctaaaagaggcaccaccaatgatgggttgttggtagaacactgctaggtttgtcaaagcaagttggttgaatggcagcaattgttgcagttgtaagagggtgccagcgttaggcgcagcgtgctggtagaacggcaacaactgtggttgtgtcaagaaggtagcagggctcacaccagctagctggctgaatggtagtagttgttgctgctgtaaataagcaggagagttcaatgctgccagttggttgaatggaagaaattgttgggggtaggcaacaggtagctggctgaatggtagttgttgttgttgcaaataagaagcagagttcaatgcagctagttggttgaatggaagaaactgctgttgctgagagtaggcagcaaggtttgctagcacaagttgttgtaattgttgtgccctgatgttttgtgccaataaatgcaccaaaggtaactgctgtaatagggctg

SEQ ID NO: 7133 - DNA, 103 bp, Zea mays
  unsure (1)..(103): unsure at all n locations; Clone ID: LIB3061-070-Q1-N6-F3
ttttttttttttttttttttttttttcacaaaaaaggcaatgccatagtcttcaaatctcatagtagaatgtcatggcacctaacattccaagntcacttaac

SEQ ID NO: 7134 - DNA, 547 bp, Zea mays
  Clone ID: LIB3061-070-Q1-N6-F4
ggaacagatggagtactttttttcttttcatttcaattgttcattcaggtcattgctcacactgacactgccacccatggtgatgcgtgacacattattactcaatcatcgccgctaaatgactcaactagctagctagccagcggctatactacagcacatagtttcttcagtgggggacaccgccggcagcagcgtaggggcatggagtcggctgctgcaggccgcacatcgccgtcagttgctgcgctatctgcgccgccaacagccccgcgacctggccgctttgcggctgctgctgcaggatggactggaggaccaagccgaagatcgcctggtaccggtgctgcggctccacctgcctgagctgctggcaacactgctgccgcaacgactggcactgaggcgagcagtagggcgtcgccgtcgggctgcactgatgcctcaggaactcgacgcactggcccaggatcggggtgctgccaacgccgcaggttccctgcagctggcacgggcttggatgcggctgttggcacgggcatgggtg

SEQ ID NO: 7135 - DNA, 529 bp, Zea mays
  Clone ID: LIB3061-070-Q1-N6-F5
cttgaacattaaaataacatattacgataaattccgcaacaataaagcaaagagagtatatcgacactggcgtctgaaagcagcctagaacaccaaagttcacacgtcctaacaataacaatcttgagttctcaacagatgaatagactagcaaacaaaaccataacgataaccctccttccctaagtctgaggcaagctcttgctccggattagtatccatagctcgacgagtatggtgcagcaccataacttccaccgttgtgaggcgctggagctggagcacctggaggagacccataggatgctccaccgtaaggtgggtacgagccgtaacccgtgtccactggttgaccgtgtggacctggggctggtggtccctggggagaagcttcagccatgaaattcttgattagctgttgagcagtctgtacttgtgaagcacttcctgtaatctccactgtcatctcgccaggagcgccttcttgaatacttatagttgctccactatgcctgcggatgtagctgat

SEQ ID NO: 7136 - DNA, 436 bp, Zea mays
  Clone ID: LIB3061-070-Q1-N6-F6
aagaatctagaaagtactttcttatttctgggacgccacaaacatcatccaaaaaacttcattattgaactataactcataagcaatctaaaagagggcaccaccaatgatgggttgttggtagaacactgttgggtttgtcaaagcaagttggttgaatggcagcaattgttgcagttgtaagagggtgccagcgttaggcatagcgtgcaggtagaacggcaacaactgttgttgtgtcaagaaggcagcagggctcacatcagctagctggctgaatggtagtagttgttgctgctgtaaataagcagcagagttcaatgctgctagttggttgaatggaagaaattgctgggggtaggcagcaactagctggctgaatggtaattgttgttgcaaataagcagcagagttcaatgcagccagttggttgaat

SEQ ID NO: 7137 - DNA, 433 bp, Zea mays
  Clone ID: LIB3061-070-Q1-N6-F7
aaacgcaggagggctgcgactcgatcaaacaacaagacaaagaagagggtaagaatgtacagattaggctgttacaaaggggaaggaatgccttttacacaccccaaccaaccaaccaggtacacaacatcatcccctgcaaaaccatcagctccccctggatgtatccttgcccagcaacccacaacacacactgatccccaggcctttcgctccgaaacaaccttgggctggtccctcgatcctcaaaccggtgggcttttgtcttggccaaacccccagggggggggggggaaatgcggggctcccccatgtgcccgccatacttggggggaccaaccaaccatccaaaacacacttaactcatttgggcgttagtgcacccaaaaaaatgagagctgggctaaaaaggcgaacccttgaccctgccaaa

SEQ ID NO: 7138 - DNA, 95 bp, Zea mays
  Clone ID: LIB3061-070-Q1-N6-G1
cgagataaatctcaatcaatatattgattatttttaggaaacacatgccgttatgagggcaccattatcgagtacatctcatatgtaatctaaaa

SEQ ID NO: 7139 - DNA, 470 bp, Zea mays
  unsure (1)..(470): unsure at all n locations; Clone ID: LIB3061-070-Q1-N6-G10
tttttttttttttttttttttttttttttttttttttttttttttttttttttttttttttttttttttttttttttttttttttttttttttttttttttttttttttttttttttttttttttttttttttttaaaaaaaaagaaaggggggggggaaaaatattttttttaaaaaaaaaaaaaaaaaatttattagaaaaaaaaaagagaggagagagaaaaaaaattttttattggaaaaaaaaaaaaaaaaagttttttaaataataaaggttcaggaaaaaaaaaagagtataaaaaaaggtgcaaaaaaaaaaaaattcggttaaaaaaaatttttttaaaaacaaaaaaaaaaagaggctcttaagaggaatataaaaaatagaaaaaatattaatatttgggggagttataaaaaaaaaaagagttttcttttaaggaggggggtggttnttataattaag

SEQ ID NO: 7140 - DNA, 547 bp, Zea mays
  Clone ID: LIB3061-070-Q1-N6-G11
gctaggccttgcaaagagttttagtgccatatttcatataatatatactccgtacatctgtgcacgtcagttgtacacttgtctaaacacgccttgaaatctgctggccagataacggtttccgtacccgggtggtgttacactactcacatcaagctacatgcaagtgcccagggcaaacgcttctagagtatttggccatccacctggtaccatggctggaatattgcaggcaggaaagcaagcaacagaccttagattcccacgcgcccctttcgagaaaatggaaccactccagttagttcatgaagacacagcatttattgtttctgtgggcatcgcatttctgttttgtaacattattattgcagcacaaataagaaaactgagtgtggcaggccatatttcacacactcaactcagcctcggcccctaatggctcgagaactgattccacctcggccatggttacttcttccagagtggctggattccacttcggattctggtccttgtcaactaaaacagcacgcacaccttcaacaaa

SEQ ID NO: 7141 - DNA, 468 bp, Zea mays
  Clone ID: LIB3061-070-Q1-N6-G12
gggacggggttccatgttatattgcaaaaaccaccaaattaaaaaaccccctaatttaatgcgaaaaaaaaaaatggcaaaaagggataaaaaaaagccttgactataaactatttaaaaggaaattttgaaattccccaattaaaaaccatgctaacctaaaaaaaaaacccatgcctgttaaattttactggaaaaaaaaaaattcgggtttttttatttaataaaaacaaaaacccccgggctaaggtgggctggtgggtttttaaatgggtcaaaggtttaaaaatttaaacaaacccggtttttccgtttttttggaaattggggaagacccatgttatttttgggattaaaaatctcaagggcaccaaccccaaaaaggggaactggggctttcttttaattgtaaacgccattatacctccccagggctggaaaaaaaaaaaatggttttgggtaaacttt

SEQ ID NO: 7142 - DNA, 531 bp, Zea mays
  Clone ID: LIB3061-070-Q1-N6-G4
agaatctggaaatgtaacttcttatttctggttggccacatacatcatccaaaaaactttattattgaattacaactaataagcaatctaaaagaggcaccaccaatgatgtgttgttggtaggaggctgctgggtttgtcaaagcaagttggacaaagggcaacaattgttgtagttgtaagagggttgcggggttagccgcaaactgctggtagaaaggcagcaactgttgctgtgtcaagaaggaagcacggcttgctgcagctagctggctaaatggtagtaatatttgctgctgcaaataagcagcgaggttcagtgcggccaattggttaaatggaagaagttgttgttgatgagagtaggcagtagctagctggctgaatggtaatagttgttgctgcaaataagcagcagggttcagtgtagatagttggttgaatggaagaaatgttgttgctgatagtagggagaaaggtttgccagaactacttggttgatcacaggtagcacgagttgctgcagctgct

SEQ ID NO: 7143 - DNA, 271 bp, Zea mays
  Clone ID: LIB3061-070-Q1-N6-G5
gggggagggaaacgcgaagatttttttgttttttttaagaaaaaaacccccggggggggggcggctctagggggccctttttttttttgagaaaaaagggggccccccccccggggggggggtgggggccctttttttttttaaaaagcgggcggggggggggccccccccgtgcttagggggagaggcgtttctgcgggggggggggggggggcggcttttttcttggggggggggggaggcgggcgccccaacgggggggggagggggg

SEQ ID NO: 7144 - DNA, 365 bp, Zea mays
  Clone ID: LIB3061-070-Q1-N6-G6
aataaaaaagggaaattagggggatgggaaaaaaggaaccggcccccaagggggggggggggaaaaaattttttaaaaaatggggggaaaaaaaaaaaaaaaatttgttggccgggggttttaaaaaaaaaaaaatttttttaaggggggaaaaccccccccaaaaacaagggggaaagggatgggttttttaaggcccaaaaaccccgcagggggggggtttttttgggggcaaaaaaacccccaaaacggggcttttttgggtttttttttcagaagggcggggggaaacaaaccaaaaaaaccttggaaccgggggggggggcccaccccccgagggggggggaaaaaattggggccaaaaa

SEQ ID NO: 7145 - DNA, 426 bp, Zea mays
  Clone ID: LIB3061-070-Q1-N6-G7
ggcaaaaaaggtgcgggtttgacacccaaattatattgatcctttcaagcaatacttatagcgctgggatacttatagtagtaccaccattctgaaacatagtagcgccaggaccaaatataggatcgtccaaaaacatatccttaacaagagtttaattcaataaaaccttgctgccagaacctagcagactttacaaaaaagcatacttaaaacaccctgtatggcttccccatggggcttttgacgtacaggcatttcacattctgccagttttttttcaaaagggaaacaaggaagttgaccctcatctggatgttctgctggatctgcttttcctccatcgccaaattgccgacggcgacacccatgcaaaggacctttttgagctggaacttgacgggtgccttaatcttgttcaccttg

SEQ ID NO: 7146 - DNA, 513 bp, Zea mays
  Clone ID: LIB3061-070-Q1-N6-G8
ctctggaaaattaaattatttttgacaatgactttagacaattctccatgttcgagtaaaaaaggtttcttcagttcacactattgtatgtcctgtaatcgattttacttaaatgtttctacgatgagaacgtacccaagttacacacctcatgggctcatggcaaatagtaaaattaagacaaatgaaatttctgggttacattgtcatctcaaggtcaggggttacggatttcctcttggatctattctctgtctgcggattgtttgccgctacatgtttctctgatgtctcaacttcattatcaccatccgggtctttcaaacctaaattcaaatttaggtctgttccaccgccgtttttaccagaatctcgaccatcctcatctgttgcctgagattcatccataggggtatcattgatatcagtctttccatttgatggctcagtttcattcgaagatggatctccatcattagccttgttctcatcatcaaattggtagattcttgc

SEQ ID NO: 7147 - DNA, 377 bp, Zea mays
  unsure (1)..(377): unsure at all n locations; Clone ID: LIB3061-070-Q1-N6-G9
gaagggaaaaaaaaaatggggtattntgggggaacaaaaancggggggggggggccatgtgccggggccccccaaaggggnnggggggaaggggggcccctcccaagggggggggggggcccggaaagggggggggggggaaaaagggaaaaaggggggggggggaggaaaaaaggggtggggggggggggggaaggggcggggcaacaagggggtaacccccgggggggggggagggagccccccccgggggggggggggggcgcccccaaggaacgggaaaaaaaaaaaaaagggggtgggggggagggaggtttgtaatgggggggcggggggggggggggccacacccgggggggggacagaggggggggggg

SEQ ID NO: 7148 - DNA, 484 bp, Zea mays
  Clone ID: LIB3061-070-Q1-N6-H1
ctggaaatgtaacttcttatttctggttggccacatacatcatccaaaaactttattattgaattacaactaataagcaatctaaaagagggccccaccaatgatgtgttgttggtaggaggctgctgggtttgtcaaagcaagttggacaaagggcaacaattgttgtagttgtaagagggttgcggggttagccgcaaactgctggtaaaaaggcaacaactgttgctgtgtcaaaaaggaagcacggtttgctgcaactagctggctaaatggtagtaatatttgctgctgcaaataagcagcgaggttcagtgcggccaattggttaaatggaaaaagttgttgttgatgaaagtaggcagtagctagctggctgaatggtaatagttgttgctgcaaataaacagcagggttcagtgtaaatagttggttgaatggaaaaaattgttgttgctgatagtagctttggcaaacctttttc

SEQ ID NO: 7149 - DNA, 574 bp, Zea mays
  Clone ID: LIB3061-070-Q1-N6-H10
gtgtggggtttttaaccaaacaaatatattattcacaaaatgtgcataagcaaagtactcgagcaattacaaccaagtgaaatcatttgagaggatacaaacaaatgaaatcattagtcccttgacaccccttgtctacaatacttacaacaggggggggacagctggagcaactagataagttattctgaatttctaaactcattccttgtggaggtgacggtccatgatttcagataaagtttctaagaacatgttttcactggaccatggggagaacagcatcctctgcttcctgaatgatgacctcaatctcagagtccctattcacagtttccctgcatagtatgcgccctatgtcatagggcgtgaagccacgagatgcacctttcttcaaaagcattgtgctgatgcgcaggacacgagcacaccgtggaggcagctcccacccatggatcttgagaagcttgatgtcttcttcagcatcgagtgatttgatgtattcaatggtttcatcattgaatgggtcacgggcttggggccagtaaagccactcaaatgtacaatcttcaaa

SEQ ID NO: 7150 - DNA, 515 bp, Zea mays
  Clone ID: LIB3061-070-Q1-N6-H11
ggggggggggggggttttttttttttttttttttttttttttttttttttaaaaagtactttcttatttctggggaagccacaaacatcagacaaaaaactttattattgaactataactcataaaaaatctaaaaagggccccaccaatggggggggggggggggaatgcttctgggtttgtcaaaacaagttggttgaatggcagcaattgttgcagttgtaaaagggtgcccgcgttaggcccaacgtgctggtagaaccgcaacaactgtggttgtgtcaaaaaggtagcagggctcacaccaactagctggctgaatgggaatagttgttgctgctgtaaataagcaggagagttcaatgctgtcagttggttgaatggaagaaattgctgggggtaggcagcaaatagctggctgaatggtagttgttgttgttgcaaataaaaagcagagttcaatgcacctagttggttgaatggaaaaaactgcttttttctgaaagtaggcaaca

SEQ ID NO: 7151 - DNA, 540 bp, Zea mays
  Clone ID: LIB3061-070-Q1-N6-H2
aatctagaaagtactttcttatttctgggaagccacaaacatcatccaaaaacttcattattgaagtataactcataagcaatctaaaagaggcaccaccaatgatgggttgttggtagaacgctgttgggtttgtcaaagcaagttggttgaatggcagcaattgttgcagttgtaagagggtgccagcgttaggcgcagcgtgcaggtagaacggcaacaactgttgttgtgtcaagaaggcaacagggctcacatcagctagctggctgaatggtggtagctgttgctgttgtaaataagcagcagagttcaatgctgccagttggttgaatggaagaaattgctgggggtaggcagcagctagctgactgaatggtagttgttgttgcaaataagcagcagagttcaatgcagccagttggttgaatggaagaaactgctgttgctgagagtaggcagcaaggtttcctagcacaagttgttgtagttgttgtgccttgatgttttgtgccaacaaatgcaccaaaggtaactgct

SEQ ID NO: 7152 - DNA, 112 bp, Zea mays
  unsure (1)..(112): unsure at all n locations; Clone ID: LIB3061-070-Q1-N6-H3
acctctaactggtccttanacggccgcccttttttttttttttttttttttttttttttttctaaaaaagtactttcttatttctgggaagccacaaacatcatccaaaaac

SEQ ID NO: 7153 - DNA, 528 bp, Zea mays
  Clone ID: LIB3061-070-Q1-N6-H4
gtgtttttttttttgaacttaaaaatagatctctaatcttttattactggaaaagttgcacatatcagtatgagaactttattattacagtataaagcataaaaaaatctagaagatggcaccaccaatggtgggctgctgcaataagggggtgggattcgtcaaagcaagttggttaaatggcagcaattgttgttgttgtaagaaggcgacattgtttgccacatcctgtgggtagaatggtagcaactgttgctgttgcaagaaggcgttaatgtttcccacaacctgtgggtaaaatggcagcaattgttgttgttgttgcaagaaagcagcaatgtttgccacaacttgtagatggaatggaagcaactgttgctgcagtaagaaggcagcagggctcctgacaagttggttgaatggtagtagctgttgtgcctgcaagtaagcagcagggttcaccccagctagttgattgaatggaagaaattgttgttgctggaggtaagcagcaaggttcgctgcaac

SEQ ID NO: 7154 - DNA, 402 bp, Zea mays
  Clone ID: LIB3061-070-Q1-N6-H5
aaaaaaactaaaaatgtccttttttatttttgggaagccacaaacattatccaaaaaacttcatttttgaactataacccataagcaatctaaaaagagggcccccccaatgatgggttgttggtaaaacctttttgggtttgtcaaaacaagttggttgaatggcaacaattgttgcagttgtaaaagggtgccaccgttaggcccaacgtgcaggtaaaaccgcaacaactgttgttgtgtcaaaaaggcaacagggctcacataaactaactggctaaatgggggtaactgttgcttttttaaataaacagcaaaattcaatgctcccagttggttgaatgaaaaaaaatgctgggggtaggcaacacctacctaactgaaagggaattgttgttgcaa

SEQ ID NO: 7155 - DNA, 536 bp, Zea mays
  Clone ID: LIB3061-070-Q1-N6-H7
gtgggttttttttttccaatcaggatttatccttaattgatgtgaataattagaaccattttgacaaaacataagccacagtttacaaagatcagcaatcatgtctacattgacaaatcattcaggggatcacaatttggaataaaactttattgggggtgggccagaaaatagccaacatggtaacatgggaaactgtgttgtctccagagagggagcatcgacggcgccaaactctctgagaagtcccaagttccgctcaggcgtctgcttccacaaggacaaaaactggcctgtccccaagcttgtctcggcccttcagttctggcaattcaatgacacaagcacactcaacaacctttgctccaacacgttcaataagtttgacagctgcacatagtgttccaccggtagcaataagatcatcgactacaagagcccggtcgttggcctgtacagttccgacatgcatttctatcttggcagttccatattccaaagaatacttttggagatcacttcgcctgggaactttt

SEQ ID NO: 7156 - DNA, 132 bp, Zea mays
  Clone ID: LIB3061-070-Q1-N6-H8
gggggggtgttttttagcacataagaatctagaaatgtactttcttatttctgggaagccacaaacatcagacaaaaaactttattattgaactataacccatcattggtggtgccctcttttagatttctt

SEQ ID NO: 7157 - DNA, 587 bp, Zea mays
  unsure (1)..(587): unsure at all n locations; Clone ID: LIB3061-071-Q1-K6-A1
ggtcggcgaggagggcaggnagnaccgagnaccgaccgtgcgggggnctcgggnacgggnaacgggnacaggnnaccccaaaatctcagatccttcctgcccgcccgcccgtgcccgtcgacgcgtcgttcttgccggccgcgcctcacctccgccctctcctcctccaggggatcggatacgccacaggctgcgcgatggtgctgtgggtcttcggctacggctccctcatctggaaccccggcttcgacttcgacgacaaaatcctcggcttcatcaagggctacaagcgcacctttaatctcgcttgcattgaccacagaggcacaccggagcatccggcgaggacctgcacgcttgaaaccgacgacgaggccatatgctggggaattgcatattgtgtcaagggtggtccagaaaaagagctaaaagcaatgcagtacttggagagaagagagtgtgagtacgaccagaagatatccattgatttctacaaggaaggagatcccttgaaaccagctgtgacaggcgtcttagtgttcgtttccactccagatccaattggcaacaagtactatcttggccct

SEQ ID NO: 7158 - DNA, 577 bp, Zea mays
  unsure (1)..(577): unsure at all n locations; Clone ID: LIB3061-071-Q1-K6-A10
gcagncacctccgccacctccaccctgggaggggtccccacctggcgtcgcagggatcctccgtcttcgccgcactcgagcaggccccggaggaccccatcctcggagtgaccgttgcctacaacaaggatcccagccccgtgaaggtcaacctcggggtcggcgcctaccggaccgggggggggaagcccctagtgctgaacgtggtcaggcgcgccgagcaaatgttgatcaataatccgtcacgtgtcaaggagtacctaccaatcaccggtctggctgaattcaataagctgagcgctaagcttatctttggcgctgacagccctgctattcaggagaatagggttgctaccgtgcagtgcctatcgggtactggttctttaagagtcggaggtgaatttcttgcaaggcactatcacgagcgcactatctacatcccacaaccaacctggggaaatcacccaaaagtcttcaccctatctggcttgaacgttaggagctaccgctattatgatcctgcaacatgcagccttcacttcgaaggactcctggaagacctcggttctgctccttc

SEQ ID NO: 7159 - DNA, 571 bp, Zea mays
  unsure (1)..(571): unsure at all n locations; Clone ID: LIB3061-071-Q1-K6-A11
tctggntagaatgcttcatgaaaaagggggggggggattgggatgcacgtattaacattatacttggagctgcaaaggcttgtcttacttgcatcatgactgttcgcctcgaataatacatcgtgatattaagtcgagcaacatcttgcttgatggcagtttcnaggcccgtgggggggggtggggacttgcaaagcttttagaggatgaagaatcacatattactacaatagttgcaggaacatttggctatcttgcaccagagtatatgcaatttggcagagccaccgagaagactgatgtctacagttttggggttttggtactcgaaatactcagtggaaagcggcctactgatgcatccttcattgagaagggactaaacattgttggatggttaaattttcttgctagtgagaaccgggagagggaaattgtcgacctgaactgtgaaggagtgcagactgagaccttagatgccctgctctctcttgccaagcaatgtgttagctcctcgccagaggagaggccgacaatgcacagggtggtacagatgctggagtcggatgta

SEQ ID NO: 7160 - DNA, 429 bp, Zea mays
  unsure (1)..(429): unsure at all n locations; Clone ID: LIB3061-071-Q1-K6-A12
gcgcccgtgcccgtgtcgcccgncgccttggcggcgctgggggcggggggggcaacgccgtgctgccgctccgggtggtgctgctcggccgcgtccggttcgtgcacgaaccgttccaccgggggtggcgctcgctctacgcccgctgcgacctcctcctcggcgtccgcaagacgggatcggaacgggggcgcnggggtgtgcccctggcgccgcttcttggtgacccgagctgcaacgtcgacatgtgaagctaagagcagcgtattatatctagcaatctacgtgcatggtatatatgcgtgaatgttcgtctctgcgtatgtgatctgtgtatgcaaaggcaagattacatgtacgacgcgccagaaacaaataacgagtggtaatgtaatgcttcatagcagtggtatgcagactgccaagacc

SEQ ID NO: 7161 - DNA, 565 bp, Zea mays
  unsure (1)..(565): unsure at all n locations; Clone ID: LIB3061-071-Q1-K6-A2
cgcangaaaggcgtcttcgtactcgcctacctccgcggctcaaacctttcccccttctcccaattccctccgtcggccgccgctccatcccgtacgacgacaccatgagggagtgcatttcgatccacatcggccaggccggtatccaggtcggaaacgcgtgctgggagctgtactgccttgagcatggcattcaggctgacggtcagatgcccggtgacaagaccattgggggaggtgatgatgctttcaacaccttcttcagtgagactggtgctgggaagcacgtgccccgtgctgtttttgttgaccttgaacccactgtcatcgatgaggtgaggactggcacctaccgccagctcttccaccctgagcagctcatcagtgggaaggaggatgccgccaacaactttgcccgtggtcactacaccattggcaaggagattgttgacctgtgccttgatcgcatcaggaagcttgccgacaactgcactggtctccagggcttcctcgtcttcaacgctgttggtggaggaacgggctctggccttggttccctcctcct

SEQ ID NO: 7162 - DNA, 580 bp, Zea mays
  unsure (1)..(580): unsure at all n locations; Clone ID: LIB3061-071-Q1-K6-A3
gcccaatagcacatanaagcacatagtgtaccaacaatggcagccaaaaattttgcttccttatgctccttggtctttctgcaagtgttgctaccgcaaccattttcccacaatgctcacaagctcctatagcttcccttcttcccccatacctctcaccagcggtgtcttcaatgtgtgaaaacccaattgttcaaccctacaggatccaacaggcaatcgcaacaggcatcttaccattatcacccttgttcctccaacaaccgtcagccctattacagcagttacctttggtccatttggtggcacaaaacatcagggcacaacaactacaacaacttgtgctagcaaaccttgctgcatactctcagcaacatcagtttcttccattcaaccaactggctgcattgaactctgctgcttatttgcaacaacaattaccattcagccagctagttgctgcctacccccagcaatttcttccattcaaccaactagcagcattgaactctgctgcttatttacagcagcaacaactactaccattcagccagctagctgatgtgagccctgctgcctt

SEQ ID NO: 7163 - DNA, 584 bp, Zea mays
  unsure (1)..(584): unsure at all n locations; Clone ID: LIB3061-071-Q1-K6-A4
agcgtccgccaactacacatanaagcacatggtgtaccaacaatggcagccaaaaattttgcctccttatgctccttggtctttctgcaagtgctgctacggcgaccattttcccgcaatgctcgcaagctcctatagcttcccttcttcccccgtacctctcaccagcggtgtcttcggtatggtgaaaacccaattcttcaaccctacaggatccaacaggcaatcacagctggcatcttacctttatcacccttgttcctccaacaatcatcagccctattacatcagttacctttggtgcatttattggcacaaaacatcagggcacaacaactacaacaacttgtgctagcaaaccttgctgcctactctcagcaacagcagtttcttccattcaaccaactagctgcattgaactctgcttcttatttgcaacaacaacaactaccattcagccagctacctgctgcctacccccagcaatttcttccattcaaccaactggcagcattgaactctcctgcttatttacagcagcaacaactactaccattcagccagctagctggtgtgagccctgc

SEQ ID NO: 7164 - DNA, 555 bp, Zea mays
  unsure (1)..(555): unsure at all n locations; Clone ID: LIB3061-071-Q1-K6-A5
tgnacattcagnaaacacacctagcgaacgcactagcaacgacctaacaacaatggctaccaagatttatccctctttgcgcttcttgccctttttgtgagcgcaacaaatgcgttcattattccacaatgctcacttgctcctagtgccattattccacagttcctccctccagttacttcaatgggcttcgaacacccagctgtgcaagcctacaggctacaacaagcgcttgcggcgagcgtcttacaacaaccaattgcccaattacaacaacaatccttggcacatctaaccatacaaaccatcgcaacgcaacagcaacaacaatttctaccagcactgagccaactagctgtggtgaaccctgtcgcctacttgcaacagcagttgcttgcatccaacccacttgctctggcaaacatagttgcataccaacaacaacaacaattgcaacagtttctaccagcgctcagtcaactagccatggtgaaccctgccgcctacctacaacagcaacaactgatttcatctagccctctcgctgtggttaat

SEQ ID NO: 7165 - DNA, 581 bp, Zea mays
  unsure (1)..(581): unsure at all n locations; Clone ID: LIB3061-071-Q1-K6-A6
ggcggctgcggcggnacacgnagcgaaggaggaggacagcagcagcaggcggcgccngagagcggcatcccactcagtgcttgcaaccatggctaggggattgaagaagcacttgaagaggctcaatgcgcccaagcattggatgctcgacaagcttggcggagcttttgctcccaagccatcttctggacctcacaagtccagggagtgccttcctctgatcctcatcatcaggaacaggctcaagtatgctctgaactaccgtgaggtcatttctatcctgatgcaacgccatgtacttgttgatggcaaggtcaggactgacaagacctaccctgctgggttcatggatgtcatttccatccctaagacaatggagaactacaggctgctttatgacaccaagggccgcttccgtcttcacccaatcagggatgaggatgccaagttcaagctctgcaaggtgaggtccgttcagtttggccagaagggcatcccctacctgaacacctacgacggccgtaccatccgctaccccgacccgctcatcaaggccaacgacaccatcaagatcgatctgg

SEQ ID NO: 7166 - DNA, 583 bp, Zea mays
  Clone ID: LIB3061-071-Q1-K6-A7
agcgtccgcgcactacacgacctacaccatggctaccaggaattagccctccttgcgcttcttgcccttttagtgagcgcaacaaatgcgttcattattccacagtgctcacttgctcctagtgccattattccacagttcctcccaccagttacttcaatgggcttcgaacatccagccgtgcaagcctacaggctacaactagcgcttgcggcgagcgccttacaacaaccaattgcccaattgcaacaacaatccttggcacatctaaccctacaaaccattgcaacgcaacaacaacaacaacaacagtttctgccatcactgagccacctagccgtggtgaaccctgtcacctacttgcaacagcagctgcttgcatccaacccacttgctctggcgaacgtagctgcataccagcaacaacaacagctgcaacagtttatgccagtgctcagtcaactagccatggtgaaccctgccgtctacctacaactactttcatctagcccgctcgcggtgggcaatgcacctacgtacctacaacaacagttgctgcaacaaattgtaccagctctgactc

SEQ ID NO: 7167 - DNA, 582 bp, Zea mays
  unsure (1)..(582): unsure at all n locations; Clone ID: LIB3061-071-Q1-K6-A8
agcgtccggngaacancaagcaacatagnaagtgggaagcgatagcaacaatagagcaacaatggcgaccaagatttttccctccttatgctccttgctctttctacatgtgttgctaacgcgacaattttccctcaatgctcacaagctcctatagcttcccttcttcccccataccttccatcagggagggcttcnagtatgtgaaaacccagctcttcaaccatataggcttcaacaagcaatcgcagcaagcaacatacctttatcgcccttgttgtttcaacaatcaccagccctatctttggtgcagtcattggtacaaaccatcagggcacaacagctgcagcaactcgtgctacctgtgatcaaccaagtagctctggcaaacctttctccctactctcagcaacaacaatttcttccattcaaccaactgtctacactgaaccctgctgcttatttgcagcaacaactattaccatttagccagctagctactgcctactctcagcaacaacaacttcttccatttaaccaattggccgcactgaaccccgctgcttatttgcagcagcaaat

SEQ ID NO: 7168 - DNA, 566 bp, Zea mays
  unsure (1)..(566): unsure at all n locations; Clone ID: LIB3061-071-Q1-K6-B1
gcaactnanaagcacaatatgtaccaacatggcagctaaaatttttgcctccttatgctccttggtctttctgcaagtgctgctacggcgaccattttcccacaatgctcacaagctcctatagcttcccttcttcccccgtacctctcaccaacggtgtcttcggtatgtgaaaacccaattcttcaaccctacaggatccaacaggcaatcgcagctggcatcttacctttatcacccttgttcctccaacaatcatcagccctattacagcagttacctttggtgcatttattggcacaaaacatcagggcacaacaactacaacaacttgtgctagcaaaccttgctgcctactctcagcaacagcagtttcttccattcaaccaactagctgcattgaactctgcttcttatttgcaacaacaacaactaccattcagccagctatctgctgcctacccccagcaatttcttccattcaaccaactgacagcattgaactctcctgcttatttacagcagcaacaactactaccattcagccagctagctggtgtgagccc

SEQ ID NO: 7169 - DNA, 571 bp, Zea mays
  unsure (1)..(571): unsure at all n locations; Clone ID: LIB3061-071-Q1-K6-B10
agcgtccggtgnaattgtgcagtcaattcgtctgggggtaggtttcaaatcgccatcccatacaggnactgcagatactgagttggtacgtgagttgagccagcaatttcctgcagttatacctcttgccttgattctcaagaatttttggctgaccggagtttggaccacccctattcaggtggggtgagctcttactgtttggtgctgttaattgttcgttttctccagcatgagcatcatcttggtcgacctattaataaaaatctgggcagccttttgatggatttcttgtacttctttgggaacatatttgatccacgccatatgcgcatttctatccaaggaagtggaatttatttgaatcgagaaagagggcaaagcattgacccgattcacatagatgatccacattgccctgctaacaatgtgggcaggaattgtttccgcattcaccaatgtattaaggcatttgctgatgcgtttgctgttcttgagaatgagctactgcagttcagttcagaatgtagcatgcctgtatcttcattcaatatactaaagaaaataatcc

SEQ ID NO: 7170 - DNA, 504 bp, Zea mays
  unsure (1)..(504): unsure at all n locations; Clone ID: LIB3061-071-Q1-K6-B11
ananaaaccnnttttttttgtgggggggggggnnnnnannnnanannnnnnnaannnnttttttttataggggggtgtgaaaaannatttttttgtgtgtgtatatttcttttttttatttttttntttctntttttttttttttttttttttttttttttttttttttttttttttttttttttttttttttttttttttttctttttttttttttttttttatttttttttttttttttttttctatttttttttttttcctttttaattttttttttttctttttttcatttttttttttttttttattttttttttttttttttttttnttttttatttttcatatttttttatttttttccttttttcttttattttttttttttctttttttttttttttctttcttttntntttttatnttctttttctttcctttattttttttttttttttactacccctttttattttccccctcccccccccccccccccccc

SEQ ID NO: 7171 - DNA, 586 bp, Zea mays
  unsure (1)..(586): unsure at all n locations; Clone ID: LIB3061-071-Q1-K6-B12
nacaacatcaacaacaattccagggggggggagaangggcaacaaccacaacagcctcagcaatatcagcagggccaggaaaaacacaacagcaacaatgtcattgccaggagcagcaacagactacaaggtgcagctataactactatagcagtagctcaaatctaaaaaatgggggaatgcgggggcagcagtgcagccctttggtaatgccttttctccaatcacgtttgatacaaccaagtagctgccaggtattgcagcaacaatgttgtcatgatcttaggcagattgagccacaatacattcaccaagcaatctacaacatggttcaatccataatccaggaggagcaacaacaacaaccatgtgagttatgtggatctcaacaagctactcaaagtgcggtggcaatcttgacagcagcacaatacctaccatcaatgtgcggcttgtaccactcatactaccaaaataatccatgcagcagcaatgacattagtggtgtttgcaattgaagaattgtgtctacctagccgttatactcatataacggtgttaagcaataaagtaccatacattaaag

SEQ ID NO: 7172 - DNA, 569 bp, Zea mays
  unsure (1)..(569): unsure at all n locations; Clone ID: LIB3061-071-Q1-K6-B2
ncacatagnaaagcacaatagtgtaccaacatggcagccaaaatttttgcttccttatgctccttggtctttctgcaagtgttgctaccgcnaccattttcccacaatgctcacaagctcctatagcttcccttcttcccccatacctctcaccagcggtgtcttcaatgtgtgaaaccccaattgttcaaccctacaggatccaacaggcaatcgcaacaggcatcttaccattatcacccttgttcctccaacaaccgtcagccctattacagcagttacctttggtccatttggtggcacaaaacatcagggcacaacaactacaacaacttgtgctagcaaaccttgctgcatactctcagcaacatcagtttcttccattcaaccaactggctgcattgaactctgctgcttatttgcaacaacaattaccattcagccagctagttgctgcctacccccagcaatttcttccattcaaccaactagcagcattgaactctgctgcttatttacagcagcaacaactactaccattcagccagctagctgatgtgagccctgct

SEQ ID NO: 7173 - DNA, 583 bp, Zea mays
  unsure (1)..(583): unsure at all n locations; Clone ID: LIB3061-071-Q1-K6-B3
ggccaaaccctttcgcgcgnagcggccccctcctcttcttctctctcccaccaccgccctccccttgccatttttgccgcaggagccgccgccatccgatccggaagagggaggaggggggagggaggaggatctgtgtcccgattcgattggagctctcgtccccggcggtccaggatggtgcggggcaagacgcagatgaagcggatagagaacccggccagtcgccaggtcaccttctccaagcgccgcaacggcctgctcaagaaggcgttcgagctctccgtcctctgcgacgccgaggtcgcgctcgtcgtcttctccccgcgcggcaagctctacgaattcgccagcggaagtgcccagaaaacaattgaacgttatagaacgtacacaaaggataatgtcagcaacaagacagcacatcaggacattgagcaagtaaaagctgatgctgagggcctggcaaagaaactggaagcacttgaagcttacaaaagaaaacttttgggtgagaggttggaagaatgctcctttgaagaactgcacnagtttggaagtgaaactcgaaaagagccttcat

SEQ ID NO: 7174 - DNA, 565 bp, Zea mays
  unsure (1)..(565): unsure at all n locations; Clone ID: LIB3061-071-Q1-K6-B4
gttcctaccacactgaccacctacctggtngaacctgtcgcctacttgcaacagcagctgcttgcatccaacccacttgctctagcaaacgtagttgcaaaccagcaacaacaacaactgcaacagtttctgccagcgcttagtcaactagccatggtgaaccctgccgcctacctacaacagcaacaactgctttcatctagcccgctcgctgtggccaatgcacctacatacctgcaacaagaattgttgcaacagattgtaccagctctaactcagctagctgtggcaaaccctgttgcctacttgcaacagctgcttccattcaaccaactaactatgtcgaactctgttgcgtacctacaacagcgacaacagttacttaatccattggcagtggctaacccattggtcgctgccttcctacagcagcaacaattgctgccatacaaccggttctctttgatgaatcctgtcttgtcgaggcagcaacccatcgttggaggtgccatcttttagattacatatgagatgtactcgataatggtgccctcataccggcatg

SEQ ID NO: 7175 - DNA, 579 bp, Zea mays
  unsure (1)..(579): unsure at all n locations; Clone ID: LIB3061-071-Q1-K6-B6
gccagcaccgnattccggccctccgccggctggtctccgctccctcgcactcgcagctccggctgctattctgcagaagtcggtagattggttttcctcatgggtcgcaccatcaagaaggccaagaaggctcaatccaagaagtccaagaagaaaactgaatcgtcctcgtcgtccaaccctgcgattgcctctggtccggctaaggtctggcaaccgggtgtagatacactggaagatggggaggagctgcagtttgatcctcaggcttacaattatctccgaggttttggcattggctggtcttgcttgagttttgatgttgtgcgtgatcaacttggactcgtccgttcagagttccctcatacattctatggtgttgctggaacgcaggtcgtgttaatctttatgccttgaaaacctaagcattgacaaaagtagccattgttactatcaaatcttgaaatgcttttgatgtctatcacatagtgctcttttgttatctataaataaactataacttgtacaagaattaattttgtactgttgttcctgctaagatatttnnttgaattgaaa

SEQ ID NO: 7176 - DNA, 561 bp, Zea mays
  unsure (1)..(561): unsure at all n locations; Clone ID: LIB3061-071-Q1-K6-B7
attgctcctatgccatttccaattcctcccacagtcttcatgggcttcngacatccagccgtgcaagcctacaggctacaacaagcgcttgcggcgagcgtcttacaacaaccaattgcccaattacaacaacaatccttggcacatctaaccatacaaaccatcgcaacgcaacagcaacaacaatttctaccagcactgagccaactagctgtggtgaaccctgtcgcctacttgcaacagcagttgcttgcatccaacccacttgctctggcaaacatagttgcataccaacaacaacaacaattgcaacagtttctaccagcgctcagtcaactagccatggtgaaccctgccgcctacctacaacagcaacaactgatttcatctagccctctcgctgtggttaatgcacctacatacctgcaacaacagttgctgcaacagattgtaccagctctgactcagctagctgtggcaaaccctgctgcctacttgcaacagctgcttccattcaaccaactgactgtgtcgaactctgctgcgtacctacaacagcga

SEQ ID NO: 7177 - DNA, 141 bp, Zea mays
  Clone ID: LIB3061-071-Q1-K6-B8
tccgttgctttgcaactcaacgtgttctaccaacaacccatcattggtggtgccctcttttagattgcttatgagttatagttcaataatgaagttttttggatgatgtttgtggcgtcccagaataagaaagtcatttct

SEQ ID NO: 7178 - DNA, 585 bp, Zea mays
  Clone ID: LIB3061-071-Q1-K6-B9
agtatttgcactcatgcatcacaaacatccttctatcagtaccatcaatcatcattcatcttagtagtataggcaccaaatcaaatctgcaacatcaattatctaactccaaaaccatgaagctggtgcttgtggttcttgctttcattgctttagtatcaagtgtttcttgtacacagacaggcggctgcagctgtggtcaacaacaaagccatgagcagcaacatcatccacaacaacatcatccacaaaaacaacaacatcaaccaccaccacaacatcaccagcagcagcaacaccaacaacaacaagttcacatgcaaccacaaaaacatcagcaacaacaagaagttcatgttcaacaacaacaacaacaaccgcagcaccaacaacaacaacaacaacaacagcaccaacaacaacatcaatgtgaaggccaacaacaacatcaccaacaatcacaaggccatgtgcaacaacacgaacagagccatgagcaacaccaaggacagagccatgagcaacaacatcaacaacaattccagggtcatgacaagcagcaacaaccacaacagcctcagcaat

SEQ ID NO: 7179 - DNA, 562 bp, Zea mays
  unsure (1)..(562): unsure at all n locations; Clone ID: LIB3061-071-Q1-K6-C1
ngcacatgtattcttacctcanagcttgtcctgaactcttcatctcaaaccagtcctctaggaaaaatatgctgatgcaaaccgtgtatctgctatcattttgggcggaggcactggatctcagctctttcctctgacaagcacaagagctacgcctgctgtacctgttggaggatgttacaggcttattgatatccctatgagtaactgcttcaacagtggtataaataagatatttgtgatgagtcagttcaattctacttcgcttaaccgccatattcatcgtacataccttgaaggcgggatcaactttgctgatggatctgtacaggtattagcggctacacaaatgcctgaagagccagctggatggttccagggtacagcagactctatcagaaaatttatctgggtactcgaggattattacagtcacaaatccattgacaacattgtaatcttgagtggcgatcagctttatcggatgaattacatggaacttgtgcagaaacatgtcgaggacgatgctgatatcactatatcatgtgctcctgttgatgag

SEQ ID NO: 7180 - DNA, 282 bp, Zea mays
  unsure (1)..(282): unsure at all n locations; Clone ID: LIB3061-071-Q1-K6-C10
aaaaaannnaaaaaaaaaaaaaaanannaaaaaanaaaanaaananaaaaaaaaaaaaaaaaaaaaaaaaaaaaaaaaaaaaaaaaaaaaaaaaaaaaaaaaaaaaananaaanaaaaaaaaaaaaaanaaaaaaaaaanaaaaaaaaaaaaaanaaaaaanaaaaaaaanaannaaaaaaaaaaaaaaaaaaanaaaaaaaaaaanaaaaaaaaaanaaaaaaaaaaaaaaaaaaaaaaaaaaaaaaaaaaaaaaaaaaaaaaanaaaaaaaacccccccc

SEQ ID NO: 7181 - DNA, 586 bp, Zea mays
  unsure (1)..(586): unsure at all n locations; Clone ID: LIB3061-071-Q1-K6-C12
cactagcacatanaagcacatggggtcgcacgggtggcaccaaaaattttgcctccttatgctccttggtatttctgcaagtgctgctacggcgaccattttcccgcaatgctcacaagctcctatagcttcccttcttcccccgtacctctcaccagcggtgtcttcggggggggggggcccaattcttcaaccctacaggatccaacaggcaatcgcagctggcatcttacctttatcacccttgttcctccaacaatcatcagccctattacagcagttacctttggtgcatttattggcacaaaacatcagggcacaacaactacaacaacttgtgctagcaaaccttgctgcctactctcagcaacagcagtttcttccattcaaccaactagctgcattgaactctgcttcttatttgcaacaacaacaactaccattcagccagctacctgttgcctacccccaacaatttcttccattcaaccaactggcagcattgaactctcctgcttatttacagcagcaacaactactaccattcagccagctagctggtgtgagccctgctaccttcttgaca

SEQ ID NO: 7182 - DNA, 576 bp, Zea mays
  unsure (1)..(576): unsure at all n locations; Clone ID: LIB3061-071-Q1-K6-C2
ctgccgtcacctacattactcacgctccanatggagactcgcaccatgaagtgctgatcgttgcccttgctctcctggcgctcgctgcgagcgccgcctccagtacaagcggcggctgtggctgccagacaccaccgtttcatctaccgcctccgttctatatgccgcctccgttctatctgccgccgcagcagcagccgcagccatggcaataccccactcaaccaccgcagctaagcccgtgccagcagttcggatcctgcggcgtcggcagcgtcggcagcccgttcctgggccagtgcgtcgagttcctgaggcaccagtgcagcccggcggcgacgccctacggctcgccacagtgccaggcgctgcagcagcagtgctgccaccagatcaggcaggtggagccgctgcaccggtaccaggcgacatacggtgtggtcctgcagtccttcctgcagcagcagccgcagggcgagctcgcggcgctgatggcggcccaggtagcgcagcagctgacggcgatgtgcggcctgcagctgcagcagccaggtccctgcccttgcaacgcagctg

SEQ ID NO: 7183 - DNA, 596 bp, Zea mays
  unsure (1)..(596): unsure at all n locations; Clone ID: LIB3061-071-Q1-K6-C3
gtggatcgatgagacctgatgccanatgttngaactcgggtgttgcaaaataagaaatagctgttaagaaagtcaaaaccatcaagttcttgggactacatgaagagactcaaatacctaagggttgttcgagcccatttgatgtgatttgccagcgaatggaacagaggatggcctatggccacaatgagcaagacatggtactgctccaccacgaagtcgaggtggaatacccggacgggcanacccgccgaaaagcaccaagcgacgctactggagttcgggaaggttgaaaatggcaggtccaccactgccatggcgctgaccgtcggcattccagcagcaataggggccctgctattgctaaagaataaggtccagacgaaaggagtgatcaggcctctgcaaccggaaatctacgttccagcattggagatcttggagtcgtcgggcatcaagctggttgagaaagtggagacttgaaagttccctgatacacagataaagatagtatgatatagcagggcacatgtatcttttgtattaactccgttctggaatatatatttgtgaactaaaatgtgacaaataaaaag

SEQ ID NO: 7184 - DNA, 568 bp, Zea mays
  unsure (1)..(568): unsure at all n locations; Clone ID: LIB3061-071-Q1-K6-C4
gcaacatagnaagcacaatagtgtaccaacatggcagctaaaaattttgcctccttatgctccttggtctttctgcaagtgctgctacggcgaccattttcccacaatgctcacaagctcctatagcttcccttcttcccccgtacctctcaccaacggtgtcttcggntatgtgaaaacccaattcttcaaccctacaggatccaacaggcaatcgcagctggcatcttacctttatcacccttgttcctccaacaatcatcagccctattacagcagttacctttggtgcatttattggcacaaaacatcagggcacaacaactacaacaacttgtgctagcaaaccttgctgcctactctcagcaacagcagtttcttccattcaaccaactagctgcattgaactctgcttcttatttgcaacaacaacaactaccattcagccagctatctgctgcctacccccagcaatttcttccattcaaccaactgacagcattgaactctcctgcttatttacagcagcaacaactactaccattcagccagctagctggtgtgagcc

SEQ ID NO: 7185 - DNA, 578 bp, Zea mays
  unsure (1)..(578): unsure at all n locations; Clone ID: LIB3061-071-Q1-K6-C5
agcgacagctcgncaaanattgtgagaatgatccggcgctganaagagaggctaagatcgccgcagccgccgcggcggcggcggcgctgtgcttcgcggccctggtggccgtggccgtctgccaaggcgaggtcgagcggcagaggctcagggacctgcagtgctggcaggaggtccaggagagcccgctcgacgcgtgccgccaggtcctcgaccggcagctaaccggcggcggcgtcggcggcccgttccggtggggcaccgggctccggatgcggtgctgccagcagctccaggacgtgagccgcgagtgccgctgcgccgccatccggagcatggtcaggggctacgaggaggccatgccgcctctggagaaaggctggtggcatggngggcggcagcagcagccgccgccgcagggaggaggaggaggacaggggggctactactacccctgcagccgggcaggagagggataccaaacgcagatgtatccaccgtgtcgtcccggcaccaccgggccaaggatcggccgcgtgaggcttacgaaggcccgggagtacgccgcggggttgccg

SEQ ID NO: 7186 - DNA, 586 bp, Zea mays
  unsure (1)..(586): unsure at all n locations; Clone ID: LIB3061-071-Q1-K6-C6
agccaagactttggnagtgaggttattccaggtgcaaccagcattggaaagaggttcaggcttatctgtatgatggttactgggaagatatcggtaccattgcggcattttataatgcaaacttgggaataaccaagaagccaataccagatttcagcttctatgaccgttttgctccaatttatacacaacctcgacacctgccaccttcaaggttcttgatgctgatgtgacagacagtgttattggtgaaggatgtgttattaaaaactgcaagataaaccattctgtagttggactccgatcttgcatatctgaaggtgctatcatagaggacagtttactaatgggtgcggactactatgagacagaagctgataaaaaactccttgccgaaaaaggtggcattcctattggtattgggaaaaattcatgcatcaggagagcaatcattgacaagaatgctcgaattggagacaatgttaagatactcaatgctgacaatgttcaagaagctgcaatggagacanacgggtacttcatcaaaggtggaattgtcacagtgatcaaggatgctttactccct

SEQ ID NO: 7187 - DNA, 571 bp, Zea mays
  unsure (1)..(571): unsure at all n locations; Clone ID: LIB3061-071-Q1-K6-C7
cgccgcagcagcagccgcagccatggcaataccccactcaaccaccgcagctaagcccgtgccagcagttcggatcctgcggcgtcggcagcgtcggcagcccgttcctgggccagtgcgtcgagttcctgaggcaccagtgcagcccggcggcgacgccctacggctcgccacagtgccaggcgctgcagcagcagtgctgccaccagatcaggcaggtggagccgctgcaccggtaccaggcgacatacggtgtggtcctgcagtccttcctgcagcagcagccgcagggcgagctcgcggcgctgatggcggcccaggtagcgcagcagctgacggcgatgtgcggtctgcagctgcagcagccaggtccctgcccttgcaacgcagctgccggcggtgtctactactgaggaaactatgtactgtagtaataatgtaatggagccgctgactagctacctatagggctatagctagttcactcgtttagcggcgatgagtaacggagtgtcacccatcaccatgggtgngcagtgtgagcaatgacctgaatgaaccattgaaatgg

SEQ ID NO: 7188 - DNA, 561 bp, Zea mays
  unsure (1)..(561): unsure at all n locations; Clone ID: LIB3061-071-Q1-K6-D1
aanattccgtccgnagtctgactcatctgcgggcgctgccgccgccgccgccgccgctcgacgcccaccgcgcagccatggcggaacagaccgagaggcttttctcaagcagcctaaggtgttcctcagctcaaagaaatctggcaagggtaagaagccaggcaagggtggcaatcgattttggaagagcattggccttggtttcaagactcccagggaagcaattgaagggacctacattgacaagaaatgtccattcactggaaccgtttctatcagaggcagaattattgctggaacatgccacagtgctaaaatgaacagaaccatcattgttcgcaggaactacctccactttgttaagaaataccagaggtatgaaaagaggcactccaacattccagctcacatctccccatgcttccgtgtgaaggaaggcgaccatgtcatcattggccagtgcaggcccctatcaaaaactgtgaggttcaatgtcgttaaagtcattccagctggatctgctgctgctggcaagaaggctttcaccgcagcctgagttta

SEQ ID NO: 7189 - DNA, 565 bp, Zea mays
  unsure (1)..(565): unsure at all n locations; Clone ID: LIB3061-071-Q1-K6-D10
tccagnatagcctcagtagcagaagccatggtcaggacaaaattcactcagttttactgggtcaattgatgagtccaggcatggggataatgttagacatggggcaacttctagcatgtctcagtatagctcaaagcaaaatcacaaatcaaatgatccaggtcgtgatctttcaattgaggggttggagaaattctcattggttactaaatttgcacgagatactacatcaagcctttttcgagacaatagtggtgctcatgcttatggacgccaacaacatcaatacattttggataataaatcaactaataaacataaaaatcagtatgtaacaccagaaaaggcttcggcaccctcagcaacactcgagtcagatccattacctctcgtatggggaaaacaacgagatcacccgttaagtgtcgaagagtggacatctttcttagatcgtgaaggtaggattatggattcaaaggcactgaggaaaaaggttttctatgggggagttgatcatgctttgagaaaagagtctggaaattcttgttggggtatcatgaatatg

SEQ ID NO: 7190 - DNA, 563 bp, Zea mays
  unsure (1)..(563): unsure at all n locations; Clone ID: LIB3061-071-Q1-K6-D11
gnaacgcagnagccccagcctagcgccggcccgccgccgcatcagccatggcgctggccgctcgcctcgtctcgcgctcccgtcagctatattcggttcaagccactttggggaatggaggtgtcactcaagttcgctcctttgccaaggatgcagctccagctgaccgtcctcctgggaggggggatgatctcctgaagggcatattctttgaggtaaagaagaagtttgagacagctcttggtgttcttaaaaaggaaaagatcactattgatccagatgacccagcggcagtttctcgttatgcccaagtcatgaagactgtaagggaaaaggcggatcttctctctgattctcaaaggattaaatataccattgagaccttcaccaagggcatccctgatgcacggacttacttgaatactcttcaacagctcagaataaagagtggtcttatagatcatcttggaattgagcctttgatgatggaagctcttgagaagattgagaaggacattaagaaaccacttttgaggagcgacaagaagaacatggccaccctc

SEQ ID NO: 7191 - DNA, 586 bp, Zea mays
  unsure (1)..(586): unsure at all n locations; Clone ID: LIB3061-071-Q1-K6-D12
cacaagcaacatanaagtgngaaccgaggggcggcgatagnacaacaatggcgaccaagaactttccctccttatgctccttgctctttctgcatgtgttgctaacgcgacaattttccctcaatgctcacaagctcctatagcttcccttcttcccccataccttccatcaatgggggggggggggtgntgaaaacccagctcttcaaccctataggctccaacaagcaatcgcagcaagcaacatacctttatcacccttgtttcaacaatcgccagccctatctttggtgcagtcattggtacaaaccatcaaggcacagcagctgcagcaactcgtgctacctgtgatcaaccaagtagctctggcaaacctttctccctactatcagcaacaacaatttcttccattcaaccaactatctacactgaaccctgctgcttatttgcagcaacaactattaccattcagccagctagctactgcctactctcatcaacaacaacttcttccatttaaccaattggccgcactgaacctcgctgcttatttgcagcagcaaatattactaccatttagccagct

SEQ ID NO: 7192 - DNA, 558 bp, Zea mays
  Clone ID: LIB3061-071-Q1-K6-D2
gtgggttggcttctcctccccctccggttcgggttcgggttcgtgaggttctccggggttcggtttcgtgggtgagcggatcgagatggcggcgtcggatgttgagtaccgctgcttcgtcggcggcctcgcctgggccacggacgaccactccctccacaacgccttcagcacctacggcgaggtcctcgagtccaagatcatcctcgatcgggagacgcagaggtcccgcggcttcggcttcgtcaccttctccacggaggagccgatgcggaacgccatcgagggcatgaacggcaaggagctggacggccgcaacatcaccgtcaacgaggcccagtcccgcggcggccgtggaggcggcggcggcggcgggtacggtggtggccgtggaggcggcggctacggcggtggcgggcgccgtgatggcggcggcggctacggcggtggcggcggctacggtggtggcggcggcggctacggtggtggtggcggcggctacggcggtggcaaccgtggcggcggctacggcaactccgacgggaactggaggaactg

SEQ ID NO: 7193 - DNA, 557 bp, Zea mays
  unsure (1)..(557): unsure at all n locations; Clone ID: LIB3061-071-Q1-K6-D4
cccaaaccctaacccattacctcaacgccaccgccgccgccgcngagcagtccatggcgcccacctctccctcactcccggtggcaggccccgttccccgccgccgcctccagcgcgtccgcgccgccgcggtctccgacgagcccaaactcaacaagtacagcgcgcgcatcacggagcccaagtcgcagggcgcctcgcaggccgtgctctacggggttggcctcaccgacgccgacctccgcaagccgcaggtcggcgtctcttcggtgtggtacgaagggaacacctgcaacatgcacctgctccgcctcgccgaggccgtccgcgacggcgtccgtgaggccggcatggtcggcttccgattcaacaccgtcggtgtcagcgacgccatctccatgggcacccggggcatgtgctacagcctccagtcccgcgacctcatcgccgacagcatcgagaccgtcatgggcgcgcaacactacgacgccaacatctccatacctgggtgcgacaagaacatgccaggtacaataatggcaatgggacggcttaat

SEQ ID NO: 7194 - DNA, 563 bp, Zea mays
  unsure (1)..(563): unsure at all n locations; Clone ID: LIB3061-071-Q1-K6-D5
gcccaactagcaacatagnaagcacaatagtgtaccaacaatggcagccaaaatttttgcttccttatgctccttggtctttctgcaagtgctgctaccgcnaccattttcccacaatgctcacaagctcctatagcttcctttcttcccccatacctctcaccagcggtgtcttcaagtatgtgaaaacccaattcttcaaccctacaggatccaacaggcaatcgcagcaggcatcttacctttatcacccttgttcctccaacaaccgtcagccctattacagcagttacctttggtgcatttgttggcacaaaacatcaaggcacaacaactacaacaacttgtgctaggaaaccttgctgcctactctcagcaacagcagtttcttccattcaaccaactggctgcattgaactctgctgcttatttgcaacaacaactaccattcagtcagctagctgctgcctacccccagcaatttcttccattcaaccaactggcagcattgaactctgctgcttatttacaacagcaacagctaccaccattcagccagctag

SEQ ID NO: 7195 - DNA, 204 bp, Zea mays
  Clone ID: LIB3061-071-Q1-K6-D7
gggggggggaagtacaagaaccaagagaagagggaggcaaggaaccaagcaacacaggaccaacagagagaagcggggaggagaggccaggagaaaacgcgagcgaggagagagaagaaaaagaagagcataaaaaaccacaaagggagaagggggagggaacaagaaaaacagagggacagaagggagaaacaggtagcagaa

SEQ ID NO: 7196 - DNA, 547 bp, Zea mays
  unsure (1)..(547): unsure at all n locations; Clone ID: LIB3061-071-Q1-K6-D8
canagtgggctggcttctcctccccctcttatcaagtcctcctcgggttagggttccttagggttttgtggaggggcgatggcggcggctgatgtggagtaccgttgcttcgtcggcggacttgcctgggccaccagcaacgagtcgctggagaatgccttcgcctcctacggcgagatcctcgactccaaggtcatcaccgaccgggagacggggaggtcccgcggcttcggcttcgttaccttctcctccgagaactccatgctcgacgctatcgagaacatgaacggcaaggagctcgacggccgtaacatcaccgttaaccaggcccagtcccgtggcggcggcggcggcggcggcggcggtggctacggcggcggtcgcggcggcggcggctatggtggcgggcgccgtgacggcggttatggcggcggtggcggctacggcggtcggcgcgagggtggtggcggcggctacggaggcggtggcggctacggcggtcggcgcgagggtggtggtggcggctacggcggcggcggcggcggct

SEQ ID NO: 7197 - DNA, 372 bp, Zea mays
  unsure (1)..(372): unsure at all n locations; Clone ID: LIB3061-071-Q1-K6-D9
gcganaaatccaggncatgggntgcttgcgctcgcaagtgatcacagagtatgcccagcaaaccggaggaggcagtttcagctcgagctatggttgctgggaaagctgcgtaggcgcttgttaattgcttatattgtatctattattattattataagtatttatgtgtcgagtaaaatagaaaaaaaaacagtgtgtctgctgtatactccatccttttgctattgggtcaatgttggcttgataaatatggtcgtgtacagtacagtgtatgcgtcagtccggttagtatcatgtatgctttgcctctatttacagaacttggttttataactttttttcgtcaccttttatatctaaatattttttaat

SEQ ID NO: 7198 - DNA, 578 bp, Zea mays
  unsure (1)..(578): unsure at all n locations; Clone ID: LIB3061-071-Q1-K6-E1
agcgtccgncactatacaatcctacatggtacaaggagccatccaagcaagcatcttacggtcattagcattaaccctccaacaaccatatgctctattgcaacagccatccttagtgcatctgtatctccaaagaatcgcggcacaacaactacaacaacagttgctaccaacaatcaatcaagtagttgcagcgaaccttgctgcttacctccagcaacaacagtttcttccattcaatcaactagctggggtgaaccctgctatctacttgcaggcacaacagctactaccatttaaccaacttgtcgggagcccttatgccttcttactgcaacaacagcttctgccattccatctgcaagctgtggcaaacattgttgctttcttgagacaacaacatttgttgccattttacccacaagttgtgggaaacattaatgccttcttgcaacagcaacaattgctaccattctacccacagaatgtggcaaacattgttgccttcttacaacaacaacaattgctaccatttagccaacatgctttgacgaatcctaccaccttattgcaaccgc

SEQ ID NO: 7199 - DNA, 574 bp, Zea mays
  unsure (1)..(574): unsure at all n locations; Clone ID: LIB3061-071-Q1-K6-E10
agcgtccgtatgagacaatagcacatagaagcacgagtagtgtaccaacatggcagccaaaaattttgcttccttatgctccttggtctttctgcaagtgctgctaccgcnaccattttcccacaatgctcacaagctcctatagcttcctttcttcccccatacctctcaccagcggtgtgttgagtatgtgaaaacccaattcttcaaccctacaggatccaacaggcaatcgcagcaggcatcttacctttatcacccttgttcctccaacaaccgtcagccctattacagcagttacctttggtgcatttgttggcacaaaacatcaaggcacaacaactacaacaacttgtgctaggaaaccttgctgcctactctcagcaacagcagtttcttccattcaaccaactggctgcattgaactctgctgcttatttgcaacaacaactaccattcagtcagctagctgctgcctacccccagcaatttcttccattcaaccaactggcagcattgaactctgctgcttatttacaacagcaacagctaccaccattcagccagctagctg

SEQ ID NO: 7200 - DNA, 590 bp, Zea mays
  unsure (1)..(590): unsure at all n locations; Clone ID: LIB3061-071-Q1-K6-E11
ctccggcgtccgcccttctctcgcgcgcgccgnccgccggcggggggggccaggnagtcgtgggaagtcttcttcggcgacgagcacccaccaggtcatatctctgcaatgggtgactacacaatccagattagcaccaagctcattgaccagcttgctcgtgatgacgagaagtaaaacgaagccggagggggggcctaagaagaagcccaccgtccagccacatgaagagcccctggaattcccgagagaaccaaagacgacaagccttgctactgctcctgggtggcctctgcagcctccccctatgtttctgccagtgaccccttctcccccgccacccccggccacaatgccggaggtggaagccattcgttccgtcctgaaagaaagcgaggcgcttctcaagaagctggagaaccaggaaactggggcacgccaagagctcagcaagagagcaaaggagctgcacgacaaggagttcaagctaccataccagaaacccatgccctgcacccaggagagggcaggctgccttgagtgttacaagaccaatgcaaaggacccgctcaagtgtgctgaagcagtca

SEQ ID NO: 7201 - DNA, 557 bp, Zea mays
  Clone ID: LIB3061-071-Q1-K6-E12
gagcccttcaagcctcctttcctcgtccttccatgtcgaagtccatcggaaatggagtgcaattccttaaccgacacctgtcgtccaagttgttccaggacaaggagagtttgtaccccttgctgaacttcctcaggggggggggggcaaggcacgacgatgatgttgaatgacagaatccaaagccttcgtggtctccaatcatccctgagaaaggcagaggagtatctactgagtgttcctcaagacactccctactcggagttcaaccataggttccaagagcttggcttggagaagggttggggtgacactgcgaagcgtgtactcgacacactccacttgcttctcgaccttctggaggcccctgatcctgccaacttggagaagttccttggaactataccaatgatgttcaacgttgttatcctgtctcctcatggctacttcgcccagtccaatgtgcttggataccctgacactggcggtcaggttgtgtacattctggatcaggtccgtgctttggagaatgagatgcttctgaggattaagcagca

SEQ ID NO: 7202 - DNA, 569 bp, Zea mays
  Clone ID: LIB3061-071-Q1-K6-E2
gccgccgcctcttccgtctctctcatctccgtcctcctgcaatctcacccctccctctaaacccgcaggccgcagtagcgccgctacggtttgctcaggattcgaaccccaccttctgattgctccgaatccgaggcggcggttgcgcagaagtttgcggcatggcggggtacccggaggacaaccagcacgcgttgaacgggtacgacgatgaggaggtcgacgaggaggggcaccccgggcggcggggaggtcgggatggggcgtctgggtacggcgatgctggcggagaggatgtgaggggggcgggcggcgactcatcggggaagatttttgtcggaggcgttgcttgggagacaactgaagaatcattctccaagcattttgagaagtatggggcaataactgattctgtaattatgaagaacaagccctaaacaggggcattggagcatagttgggttgaacacgtcaccactggaacaactgtgtaattgcagctgctgagcctttgcttgctgtacaagctacacatgaaacctgtgttgtattctttagttcggtatgca

SEQ ID NO: 7203 - DNA, 165 bp, Zea mays
  unsure (1)..(165): unsure at all n locations; Clone ID: LIB3061-071-Q1-K6-E3
caccacctacgtatgggttgctgctgntaggaagcagcgaccaatgggttagccagcggtagtggattaagtaactgttgtcgctgttgtgggtacgcagcagagttcgacacagtcagttggttgaatggaagtagttgttgcaagtatgcttgtgggtttgtc

SEQ ID NO: 7204 - DNA, 365 bp, Zea mays
  Clone ID: LIB3061-071-Q1-K6-E4
ttgatgctacattggtgctttcatgcaagaggtagataccgcacagcattgaggccacgaatgctcacaagctcctatagctcacctcatgcccccaaacctctcaccaaccgtgcagttggatgcgtgcaaaccccaattgatcaaccctacaggatccaacaggcaatcacaacaggcatctcaccattatcacccttggtcctccaacaaccgtgcagcccaatgacagcagttacctttgctccatttggtggcacaaaacatcagggcacaacaactacaacaacttgggctagcaaaccttgctgaatactctgagcaacatcagtccattccattcaaccaaatggcatgcttggaac

SEQ ID NO: 7205 - DNA, 573 bp, Zea mays
  unsure (1)..(573): unsure at all n locations; Clone ID: LIB3061-071-Q1-K6-E5
ngaaccgtatcgtctcgcctgttcagtttccttctcctcttcccgcagcccggtttgccgaccaggttccaccgttccagagtagccaagcgaatcccgtgtctggttcgcgcgatggcggaggagcagtccaacccccagcaccagcaagcggaggagagggaggttatggtggagcagcagcagccgaggagggccccgaagctgaggtacctggacttcgtccaggtggcggctgcccaggccgcggtgtgcctcgctgggctctacggcctcgccaaggaccacgccggcccgctccgccccagcgttgacgccgtcgagtctgccgtcaagggcgtcgttagccccgtctacgaccgcttcggcggcctgccgctcgacgtcctcgccttcgtcgaccgcaaggtggacgacacggtgcacgaggtggacaagcacctcccgggcgcgctgaaggcggcgtcggcgcatgtctacgcggtggttcggggcgtgccggaggtggcgcgcgagctggcggccgaggcgcagcggtcgggcgtgaggggcgcagcccgtgcggcgctcgcg

SEQ ID NO: 7206 - DNA, 601 bp, Zea mays
  unsure (1)..(601): unsure at all n locations; Clone ID: LIB3061-071-Q1-K6-E6
tccgggnaggagnagcaggggnatggagggggggggaagcatcgcaattccgaacccccacctcgccgctcccaccaccgcggccgggttgcgtccgtttcgattgcccaggatgagcaccgagtccggggagctgctcgggatcgaccccgtcgagctccggttcccattcgaattaaataagcagatctcctgcacgctgcagctgacgaacaagacagacaagcaggtcgcgttcaaggtgaagacgacaagcccgaaaaatactgcgttcgcccaaacaacggcatggtggcgccccggtccaaggctgacgttgttgttacgatgcaagcgcagcgggacgtgccaccggacatgcaatgcaaggacaagttccttgtgcagagcgccactgtcgccaaggaggtcgtgccaaaggaggtcactggagacatgtttaccaaagattcaggcaatgtagtggaagaagtgaagttgaaggtagtttatgtagcaccatcgtcctctcaaagcgaaagatttgaggatggtaatctcggcagtttgagttatcaagaggaaacaaaggaacctaaagaatcagaaaaaataatcactg

SEQ ID NO: 7207 - DNA, 619 bp, Zea mays
  unsure (1)..(619): unsure at all n locations; Clone ID: LIB3061-071-Q1-K6-E7
ggtcgcctgcagtaccggtccgnattccgggttccaatgaanacagnactgtttgattcaaagtccaggacgtgatctcaatgtagtttcacccagnanagcttctgaggctgaagaaaatttgtggacgtaaccaagccagaattcagcacagatgaagaacaaagtccaaaggctgatgcagaagagaagatttatgacgagaagataaaggacatagagggaactaagaatttaactgatgaagcagcaataaaaactgaagcaccaggagcagcccagaagacacgtaaaaaatatagcctattgtctggcgtgggatcgaaggtaaaacaccaactcgcaaaagtgaagaaagccattgtaggcaaacctgggcacacaaaaccagtatctccgacggcataaaactccagtcaccttagaacatgtacattattgtattgtttgtagtcttgtgagccatttatttcggtggtagtgtttgcgatgggctaggagaaggtcctcttcacaaccatagcattggaattctatgatgttgcacatgaaacacccccccccccctcgagaagtatgttgaagatgtttgtaaatatgtctagtgtgtaaattcaag

SEQ ID NO: 7208 - DNA, 209 bp, Zea mays
  Clone ID: LIB3061-071-Q1-K6-E8
ccggcgaagattgcaccaagaaaatccatgggggggggggggggcaggggcaattaataggcgtcaatcgtcatagcagcagccaccgaccgcctcatcctagcaagccgccgacactgctctatcatgctcgacggctgccagacaccagccgcctggcacctactgcatagccagagatgggctcatcccgcgggaggggggggggg

SEQ ID NO: 7209 - DNA, 596 bp, Zea mays
  unsure (1)..(596): unsure at all n locations; Clone ID: LIB3061-071-Q1-K6-E9
cccagcgtccggngtcccccctctccttccccttcccacgctctcgctgcagaggaaaggcgaagatggcgatgaccgtcgaagtgcttgctgcactcgcgttcatgttttccacgagtattctactgcagatactggcatgcgctttgtacaacaactggtggcccatgttagcagctctcatgtacgtccttgtaccaatgccatgcctgttttttggtggtggatccacacacttcttgaccagcagagaaggtggagggtggattaatgctgcaaaattcttgactggtgcgtcggccatgggaagccttgctattccagcaattctgaggcacgctggcttaatcgagaccggggccatgttcatcgagttcacgtccttcttcatccttgtatgcacagtgctgtgcttccatagggcgactctggatgaagactggtaaatgcgcatttcaccgtcaccctgaaccctagcggttcttggctgcttctgtccatgctaagaaaaattcctgttggaagctaacatggatctgtacaaagaagcgtatttcgagcgtagccgtagctgatgtcttatgtagacacttgtg

SEQ ID NO: 7210 - DNA, 575 bp, Zea mays
  unsure (1)..(575): unsure at all n locations; Clone ID: LIB3061-071-Q1-K6-F1
atttgagcttcanaacacaccaagcgagcgcactagcaacaacctaacaacaatggctaccaagnaattatccctccttgcgcttcttgcgctttttgcgagcgcaacaaatgcgtccattattccacaatgctcacttgctcctagttccattattccacagttcctcccaccagttacttcaatggccttcgaacacccagctgtgcaagcctataggctacaacaagcgattgcggcgagcgtcttacaacaaccaattgcccaattgcaacaacaatccttggcacatctaacaatacaaaccatcgcaacgcaacagcaacaacagttcctaccagcactgagccacctagccatggtgaaccctgtcgcctacttgcaacagcagctgcttgcatccaacccacttgctctagcaaacgtagttgcaaaccagcaacaacaacaactgcaacagtttctgccagcgcttagtcaactagccatggtgaaccctgccgcctacctacaacagcaacaactgctttcatctagcccgctcgctgtggccaatgcacctacatacctgcaac

SEQ ID NO: 7211 - DNA, 571 bp, Zea mays
  Clone ID: LIB3061-071-Q1-K6-F10
cctacgaacgcactacacgagcgggggcgtggcttccaaaaattatccctccttgcgcttcttgccctttttgtgagtgcaacaaatgcgttcattattccacaatgctcacttgctccgagtgccattattccacagttcctccctccagttacttcaatgggcttggagcggccgagctgtgcaagcctataggctacaacaagcgcttgcggcgagcgtcttagaacaaccaattgcccaattacaacaacaatccttggcacatctaaccatacaaaccatcgcaacgcagcagcaacaagcactgagccacctagccgtggtgaaccctatcgcctacttgcaacaacagctgcttgcatccaacccacttgctttggcaaacgtagctgcataccaacaacaacaacagttgcaacagtttctaccagcgctcagtcaactagccatggtgaaccctatcgcctacctacaacagcaacaacttctttcatctagcccgctcgctatgggcaatgcacctacatacctgcaacaacagttgttgcaacaacagttgctgcaacaa

SEQ ID NO: 7212 - DNA, 584 bp, Zea mays
  unsure (1)..(584): unsure at all n locations; Clone ID: LIB3061-071-Q1-K6-F11
ngacacatatcttcgcttctggggtgatgtgtgggagagagaaacactcgatcgatcgatcaanaagaccggccggcgaggctctagctccagaccgacaatgccgtacgcagccacaaggacgtcgccgcagcagcacagccgcgtggccagcaacgggagggccgtggcggcgtgcgcgggccacgcgggcgtgccggacgaggtggcgcggcaccacgagcacgcggtggccgcggggcagtgctgctctgtgatggtgcagtccatcgcggcgccggcggacgcggtgtggtcgctggtgcgccgcttcgaccagccgcaggggtacaagcgcttcatcaggagctgccacctggtggacggcgacggcgtcgaggtggggtccgtgcgggagctcctggtcgtgtccgggctgcccgccgagaacagccgcgagcggcttgagatccgggacgacgagcggcgggtgatcagcttccggatcctgggcggcgaccaccgcctcgccaactaccgctccgtgaccaccgtgcacgaggcggcctcagagggcgggccgctcaccatggtcgtcgagtcct

SEQ ID NO: 7213 - DNA, 200 bp, Zea mays
  unsure (1)..(200): unsure at all n locations; Clone ID: LIB3061-071-Q1-K6-F12
tcgccggcggcctcctaccaacaacacgtcattggtnnggccctttatccaattgctttgacagaccgagcggcctcctaccaacaacacatcattggtggtgccctcttttagattgcttattagttgtaattcaataataaagttttttggatgatgtatgtggccaaccagaagggttgatgggatgtccagatttt

SEQ ID NO: 7214 - DNA, 577 bp, Zea mays
  unsure (1)..(577): unsure at all n locations; Clone ID: LIB3061-071-Q1-K6-F2
ccaacagcacatanaagtggaatccatagcaacaatagagcaacaatggcgaccaagaactttccctccttatgctccttgctctttctgcatgtgttgctaacgcgacaattttccctcaatgctcacaagctcctatagcttcccttcttcccccataccttccatcaatgatagcttcagtatgtgaaaaacccagctcttcaaccctataggctccaacaagcaatcgcagcaagcaacatacctttatcacccttgtttcaacaatcgccagccctatctttggtgcagtcattggtacaaaccatcaaggcacagcagctgcagcaactcgtgctacctgtgatcaaccaagtagctctggcaaacctttctccctactatcagcaacaacaatttcttccattcaaccaactatctacactgaaccctgctgcttatttgcagcaacaactattaccattcagccagctagctactgcctactctcatcaacaacaacttcttccatttaaccaattggccgcactgaacctcgctgcttatttgcagcagcaaatattactaccattta

SEQ ID NO: 7215 - DNA, 578 bp, Zea mays
  unsure (1)..(578): unsure at all n locations; Clone ID: LIB3061-071-Q1-K6-F4
tgatgagaaccaatagcaacatagnaagcacaatagtgtaccaacaatggcagccaaaaattttgcttccttatgctccttggtctttctgcaagtgttgctaccgcaaccattttcccacaatgctcacaagctcctatagcttcccttcttcccccatacctctcaccagcggtgtcttcaatgtgtgaaaccccaattgttcaaccctacaggatccaacaggcaatcgcaacaggcatcttaccattatcacccttgttcctccaacaaccgtcagccctattacagcagttacctttggtccatttggtggcacaaaacatcagggcacaacaactacaacaacttgtgctagcaaaccttgctgcatactctcagcaacatcagtttcttccattcaaccaactggctgcattgaactctgctgcttatttgcaacaacaattaccattcagccagctagttgctgcctacccccagcaatttcttccattcaaccaactagcagcattgaactctgctgcttatttacagcagcaacaactactaccattcagccagctagctgatgtgag

SEQ ID NO: 7216 - DNA, 552 bp, Zea mays
  unsure (1)..(552): unsure at all n locations; Clone ID: LIB3061-071-Q1-K6-F5
gaagcaaccaatagcacaaaagaggggggggggggtaccaacaatggccgacaaacgtgctgctttcttcagctccttggtctttctggaagtgttgctaccgcaaccattataccacgaatgacaacaagactcctatagcttaccttcttccacaaaacctatcaccagcggagtggggggggggaaaaaaccccaattgaacaaccctacatgaaccaacaagcaatagcaacaggcatattaccattatcactcttggtcctacaacaaccggcaaacatacaacagcaaccacctgtgcaccatttggcgcaacaaaacatggcggcacaacaactacaacaacttgtactaacaaaccttgctgaatactctcaacaacatcagtttctatcataccaccaactggctgaaaagaactctgctgattattaacaacaacaattaccattcaaccaggtagttgctgactacccccagtaatttctatcaaacaaacaactagcagngaaacaactctgctgattaacaacagcaacaacaactact

SEQ ID NO: 7217 - DNA, 588 bp, Zea mays
  unsure (1)..(588): unsure at all n locations; Clone ID: LIB3061-071-Q1-K6-F7
ccccgcgtccgnacgcctccccctggggtccttccagctcgctctgtaatctgcatcagcctcgcccgccgccgtcgccgccattggggagggggaaagttcanaggggaagcccacaggccgccgcaacttctccacacccgaggagatcgctgctggtacttcaggtcggccacgcgacctggggagaagaaggaggaagaggaagatgaggaagaggtagaaagagaagagtctgaggaagaatctgaagaggattctgatgaaaagactaaacataaaggcactgagggtattattcagattgaaaatccaaacttggtgaaagccaagaatataaaggccaaggaagttgattttggcaagacaactgaactctcaaggcgtgaaagagaggagcttgagaaacaaaaagctcatgaacgttatatgaagcttcaggagcaaggaaaaacagaacaagcacgaaaagattggaacgtcttgctttaataagacaacaaagggctgatgcggcgaagaaacgcgaagaggagaaagctgccaaggagcagaggaagtccgaagcacggaagtaactgcaacagt

SEQ ID NO: 7218 - DNA, 583 bp, Zea mays
  unsure (1)..(583): unsure at all n locations; Clone ID: LIB3061-071-Q1-K6-F8
gcgttcgcttcanaacacacctagcgaacgcactagcaacgacctaacacatggcttccaanacttatccctccttgcgcttcttgccctttttgtgagtgcaacaaatgcgttcattattccacaatgctcacttgctccgagtgccattattccacagttcctccctccagttacttgagtgggcttcgaacacccagctgtgcaagcctataggctacaacaagcgcttgcggcgagcgtcttagaacaaccaattgcccaattacaacaacaatccttggcacatctaaccatacaaaccatcgcaacgcagcagcaacaagcactgagccacctagccgtggtgaaccttatcgcctacttgcaacaacagctgcttgcatccaacccacttgctttggcaaacgtagctgcataccaacaacaacaacagttgcaacagtttctaccagcgctcagtcaactagccatggtgaaccctatcgcctacctacaacagcaacaacttctttcatctagcccgctcgctatgggcaatgcacctacatacctgcaacaacagttgttgcaacaacagttg

SEQ ID NO: 7219 - DNA, 573 bp, Zea mays
  unsure (1)..(573): unsure at all n locations; Clone ID: LIB3061-071-Q1-K6-G1
gcagnaccccacanagaaagcgaatcgtcgccggnacaggaggaagagcgagcagcaagagtcgtggcaggcgtacgtcgatgaccacctgctgtgcgacatcgaaggccagcacctcagcgccgccgccatcgtcggccacgacggcagcgtctgggcacagtccgagaacttccccgagttaaagcctgaggaggttgctgggatgataaaggactttgatgaacctggaactcttgcaccaactggtctttttgttggaggtacgaagtacatggtgatccaaggtgaacctggagttgtcatccgaggaaagaagggcactggaggcattactatcaagaaaactggcatgtccttgattatcggtatctatgatgagccaatgactccagggcaatgcaatatggtggtggagaggctcggcgattacctgatcgaacagggcttctaagtttgtcataatgctattttggtcattgggcacttaagtttgcacctcatttggttctgtaatatgtgggcttgtgcatgtgcttggcgtattgcatgcagtgaataatttatcttcgc

SEQ ID NO: 7220 - DNA, 591 bp, Zea mays
  unsure (1)..(591): unsure at all n locations; Clone ID: LIB3061-071-Q1-K6-G10
agcgtccgttcacagcaacacaaaacatcagcgggagggggagttcatgttcaacaacaacaacaacaaccgcagcacccaccaccaacaacaacaacaacagcaccaacaacaacatcaatgtgaaggccaacaacaacatcaccaacaatcacaaggccatgtgcaacaacacgaacagagcggggggcagcaccaaggacagagccatgagcaacaacatcaacaacaattccagggtcatgacaagcagcaacaaccacaacagcctcagcaatnnatcagcagggcccaggaaaaatcacaacagcaacaatgtcattgccaggagcagcaacagactacaaggtgcagctataactactatagcagtagctcaaatctaaaaaattgtcatgaattcctaaggcagcagtgcagccctttggtaatgccttttctccaatcacgtttgatacaaccaagtagctgccaggtattgcagcaacaatgttgtcatgatcttaggcagattgagccacaatacattcaccaagcaatctacaacatggttcaatccataatccaggaggagcaacaacaacaaccatg

SEQ ID NO: 7221 - DNA, 567 bp, Zea mays
  Clone ID: LIB3061-071-Q1-K6-G11
ccaatatctgtgaaaattcatctgggaggcgatttagccccacaccatcaaagtggtcgtggtgctgattcgaagggctgtcattgcactgttccatctgttgattacgagaaccgataaagtccgtgctcttcgtgaggctttctaccgccagaaccttccaaatgtgaccgagggggtggccactgtcttggtattcctcatagttatctatttccaaggcttccgtgttgtgcttccagtgagatcaaagaatgctcgtggccagcaaggctcatatccaattaagctgttctacacttcaaacatgcccatcattcttcactctgcgctgattaccaacctctattttatatcccagcttctctacaggaagtacagtggaaacttccttgttaaccttcttgggaagtggaaggagtctgaatactctggccattctattcctgttggtggtcttgcttactatgtaactgccccatcaagtttggctgatgtccttgcaaatccattccatgcactgttttatgtggtcttcatgctgtcagcctgtgctctgttctcaaa

SEQ ID NO: 7222 - DNA, 568 bp, Zea mays
  unsure (1)..(568): unsure at all n locations; Clone ID: LIB3061-071-Q1-K6-G2
cgnagagttcggccgcatgctcgccgcncatcctccgcgacacggcgtcgacgacggcggcgtcgtcttcgactccggcgcgcgcaccgcgctcgccttcgtcaccctgcgcgccgacggggagcgcgagttcatgttctaccgcaaccccagcgctgacatgctcctcaccgccgacgagctcaacgtcgagctcatcaagagggctgcggtcttccactacggatcaataagcttgattgctgagccttgccggacagcacatctccgtgccatggagattgccaaagaggcaggtgcactgctctcttatgacccaaacctgagggaggcactatggccatcccgtgaggaggcccgcacccagatcttgagcatctgggaccaggcagacattgtcaaggtcagcgaagtcgagctcgagttcttgacaggcatcgactcggtggaggacgatgttgtcatgaagctgtggcggcctaccatgaagctgctcctagtgactcttggagatcaagggtgcaagtactatgccagggatttccatggcgctgtgccttccttcaag

SEQ ID NO: 7223 - DNA, 563 bp, Zea mays
  unsure (1)..(563): unsure at all n locations; Clone ID: LIB3061-071-Q1-K6-G4
tagcaacataggaagcacaatagtgtaccaacaatggcagccaaaaattttgcttccttatgctccttggtctttctgcaagtgctgctaccgcaaccattttcccacaatgctcacaagctcctatagcttcctttcttcccccatacctctcaccagcggtgtcttcagtatgntgaaaacccaattcttcaaccctacaggatccaacaggcaatcgcagcaggcatcttacctttatcacccttgttcctccaacaaccgtcagccctattacagcagttacctttggtgcatttgttggcacaaaacatcaaggcacaacaactacaacaacttgtgctaggaaaccttgctgcctactctcagcaacagcagtttcttccattcaaccaactggctgcattgaactctgctgcttatttgcaacaacaactaccattcagtcagctagctgctgcctacccccagcaatttcttccattcaaccaactggcagcattgaactctgctgcttatttacaacagcaacagctaccaccattcagccagctagctgatgt

SEQ ID NO: 7224 - DNA, 570 bp, Zea mays
  unsure (1)..(570): unsure at all n locations; Clone ID: LIB3061-071-Q1-K6-G5
gngaaccaactagcaacatagnaagcacaatagtgtaccaacaatggcagccaaaatttttgcttccttatgctccttggtctttctgcaagtgctgctaccgcaaccattttcccacaatgctcacaagctcctatagcttcctttcttcccccatacctctcaccagcggtgtcttcagtagtgtgaaaacccaattcttcaaccctacaggatccaacaggcaatcgcagcaggcatcttacctttatcacccttgttcctccaacaaccgtcagccctattacagcagttacctttggtgcatttgttggcacaaaacatcaaggcacaacaactacaacaacttgtgctaggaaaccttgctgcctactctcagcaacagcagtttcttccattcaaccaactggctgcattgaactctgctgcttatttgcaacaacaactaccattcagtcagctagctgctgcctacccccagcaatttcttccattcaaccaactggcagcattgaactctgctgcttatttacaacagcaacagctaccaccattcagccagctagctga

SEQ ID NO: 7225 - DNA, 569 bp, Zea mays
  unsure (1)..(569): unsure at all n locations; Clone ID: LIB3061-071-Q1-K6-G8
ntttagaccactagcaacatagaagcgcgagtagtgtaccaacaatggcagccaaaatttttgcctccttatgctccttggtatttctgcaagtgctgctacggcgaccattttcccgcaatgctcacaagctcctatagcttcccttcttcccccgtacctctcaccagcggtgtcttgggtatgtgaaaacccaattcttcaaccctacaggatccaacaggcaatcgcagctggcatcttacctttatcacccttgttcctccaacaatcatcagccctattacagcagttacctttggtgcatttattggcacaaaacatcagggcacaacaactacaacaacttgtgctagcaaaccttgctgcctactctcagcaacagcagtttcttccattcaaccaactagctgcattgaactctgcttcttatttgcaacaacaacaactaccattcagccagctacctgttgcctacccccaacaatttcttccattcaaccaactggcagcattgaactctcctgcttatttacagcagcaacaactactaccattcagccagctag

SEQ ID NO: 7226 - DNA, 594 bp, Zea mays
  unsure (1)..(594): unsure at all n locations; Clone ID: LIB3061-071-Q1-K6-G9
tgccaaaccttacatcaaccctactgctaagcgttccagnattacttcctccagactgtcaaagattcaatcaacaattcagcttcaaaagccaactcaagtgttcccagtgacaaaaagtcagaaatgaagataatgtgagcctgggcgatcagtcagatggggccgtcatgccatctcccacaaagaagctgcaaatatgcaaaggcccttcagatgcaccttcaattaggaaatcaactatcagaatcctgggtgttaagggagctgctctaccacccacagggaaatctcaagttgaaactcggaaatgctttgctaatgctacagcagaagtgatttctgctagtacaaacgagatcagtgagccagataatgcagctgccccattgcttgcacagcagttgccaccagacactgcaaagaactccactgtcatcatgcatacccatgaaacaagtaaagtcaatcagttggctgctacatggccaagggcgaactttcaaactgattacaacaagaagccttccaatgtacccataatggctaaccagcccagtgggttcgctggtgcgactgctcccttggtgacac

SEQ ID NO: 7227 - DNA, 577 bp, Zea mays
  unsure (1)..(577): unsure at all n locations; Clone ID: LIB3061-071-Q1-K6-H1
gtccgcccgcaccccacgccacgtcaccaccgtgtccggcgtcttccgtctctgtttgccgtngaggttctggaccccgcgagcgtcgtcgcctctgctccttggtgcttcgtcctcctcccacgtgtgtgcgcccgaaggacccaatctgaggggtcatcggctaccagcgctaggatcatgtgtgaccaatcgctgcttgcgatttgcgaaccgcgggatcaaggcgtgggagcaaagctttagctgccaaaggggcggaagcggaagagggcagcacattctatagtctctatccattttttggcaccataaactttgttatgaaagtggctggagccaatcgtatcaaaaaattatccaaagcaatctaaagccacctctcgagtgcagggatgtcaagggatttagacgcctttcattagttgtagcctctgctgcccagtctgctgccagtgttgtccaagtcggcacaaaagaaatccaatcaaaggcttgtttgggagcaatgatagaggaggagattgaagggtctgtctccagtgcgcactgagcagcaccacggcgcgggtgcggg

SEQ ID NO: 7228 - DNA, 566 bp, Zea mays
  unsure (1)..(566): unsure at all n locations; Clone ID: LIB3061-071-Q1-K6-H10
tgtcccccgnccactccgccgcccgggggaggggggcgccggccagctcctcatgcttccacccacgcgcgaccgccagcccgccgtcttctctcagcgtcggcaccaaggtcttcgtcgggctcagggcgcagaccaagctcggttcgtcggagtcgtcatgcccnnatgtcggggcgggggggcacactgcggtcaaccggagaatctctctcaggttgtccaaaaagaaggcgaccagagcccgcatctcgatgatgcctattggtactccacgtgtgccttaccgaacacctggtgaaggaacctggcaatggcttgacatatggaacgctctgtaccgtgagcggattatcttcattggggacaatatagatgaagaattcagcaaccaagtgttggcaagcatgctctatcttgacagcattgataattccaaaaagataatgctatacattaatggaccaggaggagatcttactccgtgtatggcactatatgataccatgctaagtctaaaaagtcctattggcactcactgcttgggctttgcattcaacctggca

SEQ ID NO: 7229 - DNA, 578 bp, Zea mays
  unsure (1)..(578): unsure at all n locations; Clone ID: LIB3061-071-Q1-K6-H12
gncacatagnaagcacaatagtgtaccacgaggggcagccaaaaattttgcttccttatgctccttggtctttctgcaagtgctgctaccgcaaccattttcccacaatgctcacaagctcctatagcttcctttcttcccccatacctctcaccagcggtgtcttcagtatgtgaaaacgggggtcttcaaccctacaggatccaacaggcaatcgcagcaggcatcttacctttatcacccttgttcctccaacaaccgtcagccctattacagcagttacctttggtgcatttgttggcacaaaacatcaaggcacaacaactacaacaacttgtgctaggaaaccttgctgcctactctcagcaacagcagtttcttccattcaaccaactggctgcattgaactctgctgcttatttgcaacaacaactaccattcagtcagctagctgctgcctacccccagcaatttcttccattcaaccaactggcagcattgaactctgctgcttatttacaacagcaacagctaccaccattcagccagctagctgatgtgagccctgttgccttctt

SEQ ID NO: 7230 - DNA, 594 bp, Zea mays
  unsure (1)..(594): unsure at all n locations; Clone ID: LIB3061-071-Q1-K6-H3
naaaaaaaaaaaaaaaaaaaaaaaaaaaaaggggggggaaaaaaaaaaaaaaaaaaaaaaaaaaaaaaaaaaaaaaaaaaagggcggccgttgggcggggctccttgattggctcccgctttcactgccgccgtcgcttgctatttttataggtttcctttaattgcaactccatgtgccagtcgtttgcaccgcgtgttgtgactgggtaaaaccctggggaaacccctgctttttcccctttttaaatccatctgccttttcataccccttttgctcctgctcgaagaggccccaacggggcccccctctcttaccacttgtcccaacttttaatggagaattggaaaggcgcccttgttacccggcctctttaaccgcgcttgtatgtcgggggttactgcgcaggttacccgctacatttcccatccccttgccgcccccttattgccctttctttcctttttttttcctccctttctcgggctttccccgggattttctaattagggtgttactttgggggtcccttttgggtgcttttcggggcttttaccccaaatacttctttaagattttgtttggggtatgggg

SEQ ID NO: 7231 - DNA, 584 bp, Zea mays
  Clone ID: LIB3061-071-Q1-K6-H4
ctgccacctccggttcacctgccacctccggtgcatctcccagcggcgggccacctgccgccgccggtccacctgccaccgccggtccatgtgccgccgccggttcatctgccgccgccaccatgccactaccctactcaaccgccccggcctcagcctcatccccagccacacccatgcccgtgccaacagccgcatccaagcccgtgccagctgcagggaacctgcggcgttggcagcaccccgatcctgggccagtgcgtcgagtttctgaggcatcagtgcagcccgacggcgacgccctactgctcgcctcagtgccagtcgttgcggcagcagtgttgccagcagctcaggcaggtggagccgcagcaccggtaccaggcgatcttcggcttggtcctccagtccatcctgcagcagcagccgcaaagcggccaggtcgcggggctgttggcggcgcagatagcgcagcaactgacggcgatgtgcggcctgcagcagccgactccatgcccctacgctgctgccggcggtgtcccccactgaagaaactatgtgctgtagtatagccgctggctagc

SEQ ID NO: 7232 - DNA, 581 bp, Zea mays
  unsure (1)..(581): unsure at all n locations; Clone ID: LIB3061-071-Q1-K6-H5
gcaagcaacatagnaagtagnaaccattagcaacaatagagcaacaatggcgaccaagnaattttccctccttatgctccttgctctttctacatgtgttgctaacgcgacaattttccctcaatgctcacaagctcctatagcttcccttcttcccccataccttccatcaattatagcttcgagtatgtgaaaacccagctcttcaaccatataggcttcaacaagcaatcgcagcaagcaacatacctttatcgcccttgttgtttcaacaatcaccagccctatctttggtgcagtcattggtacaaaccatcagggcacaacagctgcagcaactcgtgctacctgtgatcaaccaagtagctctggcaaacctttctccctactctcagcaacaacaatttcttccattcaaccaactgtctacactgaaccctgctgcttatttgcagcaacaactattaccatttagccagctagctactgcctactctcagcaacaacaacttcttccatttaaccaattggccgcactgaaccccgctgcttatttgcagcagcaaatactactgccattt

SEQ ID NO: 7233 - DNA, 552 bp, Zea mays
  unsure (1)..(552): unsure at all n locations; Clone ID: LIB3061-071-Q1-K6-H6
cccagcgtccggtggnaaacagtagcggaaatggggcaacatggcggccaanatttttccatccttatgctccttgctctttctgcatgtgttgctaacgcgaccatttttcctcaatactcacaagctcctatagctgcccttcttcccccataccttccatcaatgaccgctttagtgtgtggaaaacccagcccttcaaccctacaggatccagcaagcaatcgcaacaagcaacttacctttatcacacctgttctttcaacaatcgccagccctatctttggtgcagtcattggtacaaaccatcagggcagaacagttgcagcaactcgtgctaccagtgatcagccaagtagctctggcaaacctttccccctactctcagcaacaacaatttcttccattcaaccaactgtctatactgaaccctgctgcttatttgcaggaacaacaactactaccattcagccagctagctactgcctactctcagcagcaacaatttcttgccatttaaccaattgggccgcactgaacccctctgcttat

SEQ ID NO: 7234 - DNA, 572 bp, Zea mays
  unsure (1)..(572): unsure at all n locations; Clone ID: LIB3061-071-Q1-K6-H7
ctaacattctcgggtgtttctgcttggcccttctcatcactactacactccaaatgtgctttaaccagggcttctgtctactgtaccccaatcggggatttgccagtagaccaggaagtcattgaggaactcagtgctnactggaagtttgaatttatggaccttaatgtggatgagagctgaacatagcatgngaaatgcatttgccctaccttgctaaagtatttcaaggacataatgtgaaagtcgtccctatccttgttggtgcacttagctcccaaaacgaagccttgtatgggcagctgctctccaaatatgtggatgacccaaaaaacttcttttccgtgtcgtcagacttctgccattggggatccaggtttagctacacatactacgaaaagaagcacggtgccatccataaatctatcgaggccttggaccgtatgggcatggagatcatagagactggcgatcccgtagcgttcaaagaatacctgcaggagtacgagaacaccatatgcggacgccaccccatcagcgtcttccttcacaatgttgaaacattgctcgac

SEQ ID NO: 7235 - DNA, 595 bp, Zea mays
  Clone ID: LIB3061-071-Q1-K6-H8
cggctgcggctgccagccaccgccgccggttcatctaccgggggggggggatctgccacctccggttcacctgccacctccggtgcatctcccaccgccggtccacctgccgccgccggtccacctgccaccgccggtccatgtgccgccgccggttcatctgccgccgccaccatgccactaccctactgaggggggggggcctcagcctcatccccagccacacccatgcccgtgccaacagccgcatccaagcccgtgccagctgcagggaacctgcggcgttggcagcaccccgatcctgggccagtgcgtcgagttcctgaggcatcagtgcagcccgacggcgacgccctactgctcgcctcagtgccagtcgttgcggcagcagtgttgccagcagctcaggcaggtggagccgcagcaccggtaccaggcgatcttcggcttggtcctccagtccatcctgcagcagcagccgcaaagcggccaggtcgcggggctgttggcggcgcagatagcgcagcaactgacggcgatgtgcggcctgcagcagccgactccatgcccctacgctgctgccggcggtgtcccc

SEQ ID NO: 7236 - DNA, 581 bp, Zea mays
  unsure (1)..(581): unsure at all n locations; Clone ID: LIB3061-071-Q1-K6-H9
agcgtccgcntcctctctctaccctctccctctctctggggtgagctagctcttcttcctccttcctccgtttgngacagacgagagggtatgtagtggtgcaccacgagttggtgaagctgccagcatgatctggttatgatggtggtggtatatgtaagatggatgtaatctatactactaccgggccgtggcactctctctctctcccccgtccctgactgtcatatatggatcgacgaatccaagatgagaggggaagggagagagagagagggtaattaatgagcaccaggaccaggtcatgctgtagtttcatctgctggtggccgcacatcgaaaaccctagctagctcaccctcctgcaattcatatccatgctgcactcgccagagaccaccagtcaagctagcttatttccgccgttgacgacgttgattaattatccgtgataataatggccttgtcgatctagtttcctctctctttttttattattatgcctttgcttctctcttggttcggttgtgtatattgctgtctctgtcttcgtcatcactgtgtgcctacaatcctgctca

SEQ ID NO: 7237 - DNA, 548 bp, Zea mays
  Clone ID: LIB3061-071-Q1-N6-A1
caagttaatatcattattagtgccggcttttagcatttttttaactccagaagaacagcctcacgacaactgttgaaaagggaaaatcagtacatgatggccacaaacatgcaagagctggaagtagattccgagtagaggtccaacgtccaaggctctcgctatctcgagtccacaacggtgccttctggaagcgcggacaggtgcacaagaggggcatgtgatttcagggaagcattggcaccagtgatcttggtctcctttgttctgttgagcaccttcctcacctcgtttgcaagctctatgatcgaatcatcttcgtggctaatgctggctaatgccttctccattgagaacaggtaatccctattatagccagtagggccattggctgtagcaatttgccttgccatatcctgcaaaggagcagggccaagatagtacttgttgccaattggatcttggagtggaaacgaacactaagacgcctgtcacagctggtttcaagggatctccttccttgtagaaataatggatatcttctggtc

SEQ ID NO: 7238 - DNA, 487 bp, Zea mays
  Clone ID: LIB3061-071-Q1-N6-A10
gaagcaaaatttcatgtgcttattattataagttccgaacgcaccataatcagagtccttatgaatccaccagtacaaaactgccccacgaagagtaaaaaacatatttattcgggggcgagactacagtaggtcaaccagtaaataccactggctgagtacttagaacattgttgggggtgattcaggttttattcacgaaagctgggatactatcctcatttcagttgagtaactgcagcgtgtttggcatttgcaagatggggcacagtcctcatgctcaaaccggccatgctgatcctcccatcaaatgtcatataaatggggtattcctgcctcatgaatgcgacttgttcgctattcagcccagtgaaagtaaacatcccaatttgcttaatgatatgggtccaatcaccaggggtgtcctctgggatttcagcgccattaaatagttgtggcgctcagggtaatgatcctatcagccatg

SEQ ID NO: 7239 - DNA, 551 bp, Zea mays
  Clone ID: LIB3061-071-Q1-N6-A11
gtgtttttttttttttttactagtaagttctctcttattattaaatcagcatatagccaacttgtaccatgacagatacatacataggtgtacagacgcaaaaaaagtcacccgttgagccagccgattggagaccaaacaccggggggatgcgtttacacaatatacgcaaagaataaaggaatgcgcccccacggggaaactagcagcagcgtggcttgtccaggagactactctgaatcatagaagtcgctagggcacggtgtaattacatccgactccagcatctgtaccaccctgtgcattgtcggcctctcctctggcgaggagctaacacattgcttggcaagagagagcagggcatctaaggtctcagtctgcactccttcacagttcaggtcgacaatttccctctcccggttctcactagcaagaaaatttaaccatccaacaatgtttagtcccttctcaatgaaggatgcatcagtaggccgctttccactgagtatttcgagtaccaaaaccccaaaactgtagacatcagtcttctc

SEQ ID NO: 7240 - DNA, 112 bp, Zea mays
  Clone ID: LIB3061-071-Q1-N6-A12
gggcttggcagtctgcataccactggctatggaagcattacattaccactcgttatttgtttctggcgcgtcgtacatgtaatcttgcctttgcatacacagatcacatacg

SEQ ID NO: 7241 - DNA, 517 bp, Zea mays
  Clone ID: LIB3061-071-Q1-N6-A2
ccgccgactcgattttactgatgacaaaaaatgaacaaggtggtaaatgtaaagcatccccgagatgaagcaacaacgtaaacagccataattattctcaataacccggtagcaatgcaggggaattaacgactcttacaacatcaggtgttgtaaaccacacaatacttcataacagacacacataacacgatagcaggagcaactcacggcagatcacgggataagggcagcacactggcctgatgctgcgtcatcagcaaacttctctagtactcgtcaccctcgtcgccatcctcgccctcatcgaactcagcgccgacctcctcgtagtccttctcgagcgccgccaggtcctcacgggcctcaaagaactcaccttcctccataccctcaccgacgtaccagtgcacgaaggcacgcttggcgtacatgaggtcgaacttgtggtcgatgcgggagaacacctccacgacactggtggagttggagatcatgcacacggcacgctgcacct

SEQ ID NO: 7242 - DNA, 527 bp, Zea mays
  Clone ID: LIB3061-071-Q1-N6-A3
agaaatgtactttcttatttctgggacgccacaaacatcatccaaaaaacttcattattgaactataactcataagcaatctaaaagagggcaccaccaatgatgggttgttggtagaacactgttgagtttgtcaaagcaagttggttgaatggcagcaattgttgcagttgtaagagggtgccagcgttaggcatagcgtgcaggtagaacggcaacaactgttgttgtgtcaagaaggcagcagggctcacatcagctagctggctgaatggtagtagttgttgctgctgtaaataagcagcagagttcaatgctgctagttggttgaatggaaaaaattgctgggggtaggcagcaactagctggctgaatggtaattgttgttgcaaataagcagcagagttcaatgcagccagttggttgaatggaagaaactgatgttgctgagagtatgcagcaaggtttgctagcacaagttgttgtagttgttgtgccctgatgttttgtgccaccaaatggaccaa

SEQ ID NO: 7243 - DNA, 408 bp, Zea mays
  Clone ID: LIB3061-071-Q1-N6-A4
agagcaaaataactatcaaccacatttggagacttgaagcacataaaaatctaaaaatgtactttcttatttctgggaagccacaaacatcagacaaaaaactttattattgaactattactcataagaaatttaaaaggagggccccaccaatgatgggttgttggtaaaaccccgctgggtttgtcaaaacaagttggttgaatggcaacaattgttgcagttgtaaaagggggccagcgttaggcgcagcgtgctggtaaaacggcaacaactggggttgtataaaaaagggagcagggctcacaccaactagctggctgaatgggagaagttgttgctgctgtaaaaaaacaggaaaattcaatgctgccaattggttgaaaggaaaaaatgctgggggtaggc

SEQ ID NO: 7244 - DNA, 487 bp, Zea mays
  unsure (1)..(487): unsure at all n locations; Clone ID: LIB3061-071-Q1-N6-A5
cgagataaatctcaatcaatatattgattatttctaggaaacacatgccgttttgagggcaccattatcgagtacatctcatatgtaatctaaaaaaggcacctccaacgatgggttgctgccacaacaaggcagggttcatcaaaaaaaactggttgtatggcaacaattgttgctgctgtaggaaggcaacgaccaatgggttagccaccgctagtggattaagtaactgttgtcgctgttgtaggtacccaccaaagttcgacacaatcagttggttgaatggaagcagctgttgcaagtaggcagcagggtttgccacagctagctgagtcaaagctggtacaatctgttgcaacaactgttgttgcaggtatgtaggtgcattaaccacagcgagagggctagatgaaatcanttgttgctgttgtaggtaggcggcagggttaaccatggctagttgactgagcgctggtaaaaactgttg

SEQ ID NO: 7245 - DNA, 552 bp, Zea mays
  Clone ID: LIB3061-071-Q1-N6-A6
gtgtcgacaacacggttcaacaatatatagaaagtcgaattaaagcattacagctagctgcaaacgctgttcaagaaccaaaagcaacaaaacatgatgataaaacgtcttgggaaggtagctctatatccttgcagataaaaataaaactagacatagcaaaaagctccaagcagcacattcagagaacttatgccttggcagcagcctgggcagcaaagtcgcgcctcctctgctcctcgatgatgctgagcttgatacccttgcccttgggcaggctcacccacggcttgttgcccttgccaatggtgaacacgttgcccatgcgggtggcgaactggtggcccatggagtcctcgacgtggatggtatcgaagccgcccttgtgcttctccctgttcttgatcacacctacacgcccggtgttcctcccgccggtcaccatgaccacgttgccgacgtcaaacttgatgaagtccatgatcttgttggtctccagatcgatcttgatggtgtcgttggccttgatgagcgggtcggggtagcggatgg

SEQ ID NO: 7246 - DNA, 549 bp, Zea mays
  Clone ID: LIB3061-071-Q1-N6-A7
agataaatctcaatcaatatattgattatttctaggaaacacatgtcggtatgagggcaccattgtcgagtacatctcatatgtaatctaaaagaggcacctccaacgatgggttgctgcaaggcagggttcatcaaagagaactggttgtatggcagcaattgttgttgctgctgcaggaaggtagcgaccaatgggttagccactgccaatggattaagtaactgttgtcgctgttgtaggtacgcagcagagtttgacacagccagttggttgaatggaagcaactgttgtaagtaggcagcagggtttgccacagctagctgagtcagagctggtacaatttgttgcagcaactgttgttgtaggtacgtaggtgcattgcccaccgcgagcgggctagatgaaagtagttgtaggtagacggcagggttcaccatggctagttgactgagcactggcataaactgttgcagctgttgttgttgctggtatgcagctacgttcgccagaacaagtgggttggatgcaagcagctgctgttgcaag

SEQ ID NO: 7247 - DNA, 258 bp, Zea mays
  Clone ID: LIB3061-071-Q1-N6-A8
atagggggccaccattgggggggggggggttgtaggatgctgttttttttttataaaagttggagaaagggagaaaaaaattgttgtttttagaggggggggggggtagccgccaaaaaattgttgaaggaggcaaccgctgctgttagaaaaaaaaaagaagaccccccgcagctggttcgttgaaagggagaggtgtgttttgttgcaaaaaaaaaaagaggggggagaacagccaattgtttaaaaaagagaaga

SEQ ID NO: 7248 - DNA, 557 bp, Zea mays
  Clone ID: LIB3061-071-Q1-N6-B1
agaaagtactttcttatttctgggaagccacaaacatcagacaaaaaatttattattgaactataactcataagaaactaaaaggggcaccaccaatgatgggttgttggtagaatgctgctgggtttgtcaaagcaagttggttgaatggcagcaattgttgcagttgtaagagggtgccagcgttaggcgcagcgtgctggtagaacggcaacaactgtggttgtgtcaagaaggtagcagggctcacaccagctagctggctgaatggtagtagttgttgctgctgtaaataagcaggagagttcaatgctgtcagttggttgaatggaagaaattgctgggggtaggcagcagatagctggctgaatggtagttgttgttgttgcaaataagaagcagagttcaatgcagctagttggttgaatggaagaaactgctgttgctgagagtaggcagcaaggtttgctagcacaagttgttgtagttgttgtgccctgatgttttgtgccaataaatgccaccaaaagtaactgctgtaatagggctgaagattg

SEQ ID NO: 7249 - DNA, 568 bp, Zea mays
  unsure (1)..(568): unsure at all n locations; Clone ID: LIB3061-071-Q1-N6-B10
aatagtaataccatggatctaaataacccaaacaataatgttttagtgaaatagtgcagctttacaagagcaattgctcacatttcgcacgttngaaaaggcacaagacatgtcgctgaagagtgcagacaacagtatgacggtagagagcagtgcgattatcatcatcaatatcatcgccggtactttccggtttacgctgtccaagcaaacatttccgcaaacatttccgtcaaggatatctggctcgtagctcccaatcctcgccaggaagatctcagcgcgataatctgaaaggggtcagccatgatgtcaatagcacttccctttccctgatagctgatgccactactccgttctcttcacaaccatccttgttttcatcaggtgaccataagttcttgaccgcttaagtactaagaccatgcatctccatataagtacccctccacatgtatttcaaaatcttcatcaccccaaatgatcctaggaccttgaaaaatcggtacatgagcaaatctccagttgctgctcaaaatatgtgacttggctttggaacacagaatat

SEQ ID NO: 7250 - DNA, 100 bp, Zea mays
  unsure (1)..(100): unsure at all n locations; Clone ID: LIB3061-071-Q1-N6-B12
gtgttttttttttttttttttttttttttttttttttttttttttttttttttttttttttttttttttttttntnttttgttttttttttaaaaggggg

SEQ ID NO: 7251 - DNA, 557 bp, Zea mays
  Clone ID: LIB3061-071-Q1-N6-B2
aagaatctagaaatgtactttcttatttctgggacgccacaaacatcatccaaaaaacttcattattgaactataactcataagcaatctaaaagaggcaccaccaatgatgggttgttggtagaacactgttgggtttgtcaaagcaagttggttgaatggcagcaattgttgcagttgtaagagggtgccagcgttaggcatagcgtgcaggtagaacggcaacaactgttgttgtgtcaagaaggcagcagggctcacatcagctagctggctgaatggtagtagttgttgctgctgtaaataagcagcagagttcaatgctgctagttggttgaatggaagaaattgctgggggtaggcagcaactagctggctgaatggtaattgttgttgcaaataagcagcagagttcaatgcagccagttggttgaatggaagaaactgatgttgctgagagtatgcagcaaggtttgctagcacaagttgttgtagttgttgtgccctgatgttttgtgccaccaaatggaccaaaggtaactgctgtaatagggctg

SEQ ID NO: 7252 - DNA, 95 bp, Zea mays
  unsure (1)..(95): unsure at all n locations; Clone ID: LIB3061-071-Q1-N6-B3
ttttttttttttttttttttttttttttttttttttttttttttttttttttttttttttttttttttttnnttttttttnnttttttttttttt

SEQ ID NO: 7253 - DNA, 546 bp, Zea mays
  Clone ID: LIB3061-071-Q1-N6-B4
cgagaaaaatctcaaccaatatattgattatttctaggaaacacatgccggtatgagggcaccattatcgagtacatctcatatgtaatctaaaagaggcacctccaacgatgggttgctgcctcgacaagacaggattcatcaaagagaaccggttgtatggcagcaattgttgctgctgtaggaaggcagcgaccaatgggttagccactgccaatggattaagtaactgttgtcgctgttgtaggtacgcaacagagttcgacatagttagttggttgaatggaagcagctgttgcaagtaggcaacagggtttgccacagctagctgagttagagctggtacaatctgttgcaacaattcttgttgcaggtatgtaggtgcattggccacagcgagcgggctagatgaaagcagttgttgctgttgtaggtaggcggcagggttcaccatggctagttgactaaagcgctggcagaaactgttgcagttgttgttgttgctggtttgcaactaccgttggtagaaccaggtgggttggatgc

SEQ ID NO: 7254 - DNA, 142 bp, Zea mays
  Clone ID: LIB3061-071-Q1-N6-B6
caattcaaaaatatcttagcaggaacaacagtacaaaattaattcttgtacaagttatagtttatttatagataacaaaagagcactatgtgatagacatcaaaagcatttcaagatttgatagtaacaatggctacttttg

SEQ ID NO: 7255 - DNA, 246 bp, Zea mays
  Clone ID: LIB3061-071-Q1-N6-B7
gggggaggtggggagaagaggaaaaaaaaaagaaaaaaaagggggttttaagagaaaaaaaagagcggtgagggggaccaaatatgagagagattagaggggagaaaaaaaaagggggcccccaaagaggggggggggcaaaaaaaggggggggaggagaaaaaaaaagagggggaggggaaaaaaagtttgttgtgggagaaggaggaaaaaagagggggggagccccggggggggaaaaagaaa

SEQ ID NO: 7256 - DNA, 143 bp, Zea mays
  Clone ID: LIB3061-071-Q1-N6-B8
agaaatgtactttcttatttctgggacgccacaaacatcatccaaaaaacttcattattgaactataactcataagcaatctaaaagagggcaccaccaatgatgggttgttggtagaacactgttgagtttgtcaaagcaag

SEQ ID NO: 7257 - DNA, 90 bp, Zea mays
  unsure (1)..(90): unsure at all n locations; Clone ID: LIB3061-071-Q1-N6-B9
ttttttttttttattttttttttttttattttttttttattttttttttttttttggttttttttttttttnttnttttttttttttttt

SEQ ID NO: 7258 - DNA, 493 bp, Zea mays
  unsure (1)..(493): unsure at all n locations; Clone ID: LIB3061-071-Q1-N6-C1
agtaatatataggatgacagatatagttgatccaaagcaggtaatggaaatacaaaggttcataaaaaggtttgctgcaacttctagggcagcttataacagtacatactagcagcacaaatggtcaaggaacagcatgccagacaacgcatcttgcgcccgaacgctcgacttcctgtcaagcggctcttaccataccaaggttacacgatccatcgatgcaataccattgtaggttcttgttttgtagacgcaaacgcagccgatctatatgacagacccatcgttgatggttgcattcttcaagatcaccacgattccagaccttatgtagtacccttcttccgggtgatcagcctcttggatgcccttactgtttgtgatcaccacgttcttcccaatcctagcattcatgtcaatgatacagntccttatctttgtgttccttcctattccaactgggaccttcccagctaacagtagctttgaagct

SEQ ID NO: 7259 - DNA, 555 bp, Zea mays
  Clone ID: LIB3061-071-Q1-N6-C12
ctaaaaatgtactttcttatttctgggaagccacaaacatcagacaaaaaactttattattgaactataactcataagaaactaaaagaggcaccaccaatgatgggttgttggtagaacactgctaggtttgtcaaagcaagttggttgaatggcagcaattgttgcagttgtaagagggtgccagcgttaggcgcagcgtgctggtagaacggcaacaactgtggttgtgtcaagaaggtagcagggctcacaccagctagctggctgaatggtagtagttgttgctgctgtaaataagcaggagagttcaatgctgccagttggttgaatggaagaaattgttgggggtaggcaacaggtagctggctgaatggtagttgttgttgttgcaaataagaagcagagttcaatgcagctagttggttgaatggaagaaactgctgttgctgagagtaggcagcaaggtttgctagcacaagttgttgtagttgttgtgccctgatgttttgtgccaataaatgcaccaaaggtaactgctgtaatagggctgat

SEQ ID NO: 7260 - DNA, 377 bp, Zea mays
  Clone ID: LIB3061-071-Q1-N6-C2
cccaaaaaaactttttccctaaaaaaaaatcccctcccataaaaaggggcaatcgggggaatggccaaaccggccccccaggggggggggggaaaccacgtaaccaaagggcggaaaaggagaaaacaagcgggctggggagctaggcaggggccccattacattatacccacaggccaaagttccccaaaaagaaaacacccccggaagttggtttaaaagggaagggaccgggttggtgaaattgaaggcccaaaaaccccgaaagggggggggcaaccggggccgcaaaaagggccgggagctccccctggggttgttgctaaaaaaaggaactgaaaaaccacaccgaatggccccgggaaccggggaagggg

SEQ ID NO: 7261 - DNA, 551 bp, Zea mays
  Clone ID: LIB3061-071-Q1-N6-C3
gccgtctcttacaatatactccacccgttctttttatttgtcacattttagttcacaaatatatattccagaacggagttaatacaaaagatacatgtgccctgctatatcatactatctttatctgtgtatcagggaactttcaagtctccactttctcaaccagcttgatgcccgacgactccaagatctccaatgctggaacgtagatttccggttgcagaggcctgatcactcctttcgtctggaccttattctttagcaatagcagggcccctattgctgctggaatgccgacggtcagcgccatggcagtggtggacctgccattttcaaccttcccgaactccagtagcgtcgcttggtgcttttcggcgggttgcccgtccgggtattccacctcgacttcgtggtggagcagtaccatgtcttgctcattgtggccataggccatcctctgttccattcgctggcaaatcacatcaaatgggctcgaacaacccttaggtatttgagtctcttcatgtagtcccaagaacttgatggttttc

SEQ ID NO: 7262 - DNA, 436 bp, Zea mays
  Clone ID: LIB3061-071-Q1-N6-C4
ctagaaatgtactttcttatttctgggaagccacaaacatcagacaaaaaactttattattgaactataactcataagaaatttaaaagagggcaccaccaatgatgggttgggggtagaatgctgctgggtttgtcaaagcaagttggttgaatggcagcaattgttgcagttgtaagagggtgccagcgttaggcgcagcgtgctggtagaacggcaacaactgtggttgtgtcaaaaaggtagcagggctcacaccagctagctggctgaatggtagtagttgttgctgctgtaaataagcaggagagttcaatgctgtcagttggttgaatggaaaaaattgctgggggtaggcaacagatagctggctgaatggtagttgttgttgttgcaaataagaagcagagttcaatgcaactagttggttgaatgg

SEQ ID NO: 7263 - DNA, 551 bp, Zea mays
  Clone ID: LIB3061-071-Q1-N6-C5
attcctcatagttattatcattattgtaacgaacacgcgagaatattgcgagcccacgtcagagctacgtcattctggatttgcacgcgcacagtacacatgctgcgccttgcacgtcgcgccgactcactcttttttttttaaccctggtagctagtactggtcgccgccggagaagatgctgcactcctggggctccgacagccggcacatcatcggcaaccccgcggcgtactcccgggccttcgtaagcctcacgcggccgatccttggcccggtggtgccgggacgacacggtggatacatctgcgtttggtatccctctcctgcccggctgcaggggtagtagtagcccccctgtcctcctcctcctccctgcggcggcggctgctgctgccgcccccatggccaccagcctttctccagaggcggcatggcctcctcgtagcccctgaccatgctccggatggcggcgcagcggcactcgcggctcacgtcctggagctgctggcagcaccgcatccggagcccggtgccccaccggaccgggc

SEQ ID NO: 7264 - DNA, 534 bp, Zea mays
  Clone ID: LIB3061-071-Q1-N6-C6
gagcatggtctccatggcttcgctcaaagcagcacagtatggtaattaaactgatcaatttacagcatgatgtatccccaaatccaggcccccaatgtcgattcaacatgtaactaacatttgctgctacaacattctaccctacaacattgaaggacacaaaagagcaaaaagaaagaaaaaatgccttggatgacacttttattgctccgatgatctccaacagactgatctgcagatcacgcatgtaaccaggtgctgatcattgtcgaatgtcgagacacacagctgcatgtcgcacgttcacttcatataactgttccactagggagtaaagcatccttgatcactgtgacaattccacctttgatgaagtacccgtctgtctccattgcagcttcttgaacattgtcagcattgagtatcttaacattgtctccaattcgagcattcttgtcaatgattgctctcctgatgcatgaatttttcccaataccaataggaatgccacctttttcggcaaggagtttttta

SEQ ID NO: 7265 - DNA, 479 bp, Zea mays
  Clone ID: LIB3061-071-Q1-N6-C7
ccctatatattattcctttccatttcaatggttcattcaggtcattgctcacactgccacccatggtgatgggtgacactccgttactcatcgccgctaaacgagtgaactagctatagccctataggtagctagtcagcggctccattacattattactacagtacatagtttcctcagtagtagacaccgccggcagctgcgttgcaagggcagggacctggctgctgcagctgcagaccgcacatcgccgtcagctgctgcgctacctgggccgccatcagcgccgcgagctcgccctgcggctgctgctgcaggaaggactgcaggaccacaccgtatgtcgcctggtaccggtgcagcggctccacctgcctgatctggtggcagcactgctgctgcagcgcctggcactgtggcgagccgtagggcgtcgccgccgggctgcactggtgcctcaagaactcgacgcactggcc

SEQ ID NO: 7266 - DNA, 559 bp, Zea mays
  Clone ID: LIB3061-071-Q1-N6-D1
aaacagtaacatgttcagatgattggacttcattaagatgggaacaatctccaaaccatattcgaaaggcacaagcctagaaggcagtttttttaacaaaaaaagacatcactctataaactactcatcgaacatagttttaaactcaggctgcggtgaaagccttcttgccagcagcagcagatccagctggaatgactttaacgacattgaacctcacagtttttgataggggcctgcactggccaatgatgacatggtcgccttccttcacacggaagcatggggagatgtgagctggaatgttggagtgcctcttttcatacctctggtatttcttaacaaagtggaggtagttcctgcgaacaatgatggttctgttcattttagcactgtggcatgttccagcaataattctgcctctgatagaaacggttccagtgaatggacatttcttgtcaatgtaggtcccttcaattgcttccctgggagtcttgaaaccaaagccaatgctctttcaaaatcgattgccacccttgcctggcttcttacccttgcc

SEQ ID NO: 7267 - DNA, 523 bp, Zea mays
  Clone ID: LIB3061-071-Q1-N6-D10
acagaatagtgaaagtatcaattacaggtttatcaaggtagtatatacacacaactctaggttttcatgattcttccaaacttacaacggatcacatttatgacgacgacgaaagcactactggataaaaacttgcgatgcttctatgcaattattttctagggtgaccgatatctcacaagacctcgtcttcttgcacgtacatgccaccatcggtctcgacgggcattgaaggtggggttccaggtggaatgcaggaagccccattttctcctgcaatagtacacaatgcctccgcgtcctggatagcccggtcaagattgatctgaccactgagctcattgatgaacttaaggagggtatcgaagtccatctgctccccaattatccgctgacgatattttttcaagattgctacgcacaagtacaagtggaaatgttctgacaaataatgggaccacagaacttcctataaaagcatgatctggtcgaaactgaactcccttttgaattgtataagaac

SEQ ID NO: 7268 - DNA, 556 bp, Zea mays
  Clone ID: LIB3061-071-Q1-N6-D11
ctctccaaactgagtaccaaaataaaggttaaataccaggtatcaccattttcctgaatgccttgtatcgagttcatatgctataacacagggacatcccattgttgctgcagccataagagtccagagcaacagaaaggcaagaggaaatccaactcatacccaaccgtgcagtttcttttattacaaaaagggaaggagcagcattcataggtgtggagcaccgatcaacttgaaaccaaaaccagaggtgcgttgggcctcaaagattatcgtcgatcaggcctacaggaagtttctgatgtccaatttcctgacatcaggcatctcctcatcttgaaactcctccctcttgagttgagtctccattgcttcaacgcattccttcttaagttcagtcagctcacttttggcaatttccaattcaagctcttcctcgatcttgggaagatcctccttccgaaagccaagctttttgttaatcttgtcaaactctgccaagaggtggccatgttcttcttgtcgctcctcaaaaatggtttcttaatgtccttct

SEQ ID NO: 7269 - DNA, 540 bp, Zea mays
  Clone ID: LIB3061-071-Q1-N6-D12
cacattagaaatctgggaatgtaacttcttatttctggttggccacatacatcatccaaaaaatttattattgaattacaactaataagcaatctaaaagaggcaccaccaatgatgtgttgttggtaggaggctgctgggtttgtcaaagcaagttggacaaagggcaacaattgttgtagttgtaagagggttgcggggttagccgcaaactgctggtagaaaggcagcaactgttgctgtgtcaagaaggaagcacggcttgctgcagctagctggctaaatggtagtaatatttgctgctgcaaataagcagcgaggttcagtgcggccaattggttaaatggaagaagttgttgttgatgagagtaggcagtagctagctggctgaatggtaatagttgttgctgcaaataagcagcagggttcagtgtagatagttggttgaatggaagaaattgttgttgctgatagtagggagaaaggtttgccagagctacttggttgatcacaggtagcacgagttgctgcagctgctgt

SEQ ID NO: 7270 - DNA, 553 bp, Zea mays
  unsure (1)..(553): unsure at all n locations; Clone ID: LIB3061-071-Q1-N6-D2
gcagcaccaagaagcaccatttttttccttaggatttaacttagaataaagcctgacgggggtaacagcacccatcgatccgcagtccatgctggttgatgcatgggtctgctggagccgaggatgaacacagcactaacaactgacacagagcgaccttcaatcaaaaacacagatgggcaacaacaaacacgagacgaacgaagataaacactctggactagggtaaacaacacggtagcgaacaggataacttggccgcgcgggccccaccgctcagttcctccagttcccgtcggagttgccgtagccgccgccacggttgccaccgccgtagccgccgccaccaccaccgtagccgccgccgccaccaccgtagccgccgccaccgccgtagccgccgccgccatcacggggcccgccaccgccgtagccgccgcctccacggccaccaccgtacccgccgccggcgccgnctccacgggcgccgcgggactgggcctcgttgacggtgatgttgcggccgtccagctccttgccggtcatgccctcg

SEQ ID NO: 7271 - DNA, 516 bp, Zea mays
  Clone ID: LIB3061-071-Q1-N6-D4
gagagactgaaaaggatgtgattgctcacaagcttaaacagacatattacgctcgattattcagcagcttctgtagcattgctaagctaatagaaaccggcattttattattatacctgccatacgcaaaccgcactatcatgaatcactctaacaggatggttgttcctggcaaacagcctttgattgaaaacacatcatgtgcacaacctaacagaatgtaacacagcctactcatcagtgacgcatcctctggacgctggagccacaagcttgatgtacttccaaagagctccactggtcgacttgtatggcggtggggtccatttcctccgcctttcttcgagctgctgttcggtaaggtcaacatcgattaccctcttacttacatcgatggtgattatatcaccactctgggcaaggccaattggaccaccttcctgtgcttcaaggcatatgtgaccgacaacaaatccatgtgaccctccagaaaatctaccatctgtcagcaaggcg

SEQ ID NO: 7272 - DNA, 553 bp, Zea mays
  Clone ID: LIB3061-071-Q1-N6-D5
ctaaaaatgtactttcttatttctgggaagccacaaacatcatccaaaaaacttcattattgaagtataactcataagcaatctaaaagaggcaccaccaatgatgggttgttggtagaacgctgttgggtttgtcaaagcaagttggttgaatggcagcaattgttgcagttgtaagagggtgccagcgttaggcgcagcgtgcaggtagaacggcaacaactgttgttgtgtcaagaaggcaacagggctcacatcagctagctggctgaatggtggtagctgttgctgttgtaaataagcagcagagttcaatgctgccagttggttgaatggaagaaattgctgggggtaggcagcagctagctgactgaatggtagttgttgttgcaaataagcagcagagttcaatgcagccagttggttgaatggaagaaactgctgttgctgagagtaggcagcaaggtttcctagcacaagttgttgtagttgttgtgccttgatgttttgtgccaacaaatgcaccaaaggtaactgctgtaatagggctgac

SEQ ID NO: 7273 - DNA, 555 bp, Zea mays
  Clone ID: LIB3061-071-Q1-N6-D8
gcgaacaaaaaccttgctcattcttctctcgtctcgtttcatagcgggagcaaccaaagcgaacaaaaggggtaccaacacctaatccaaaggtagaacggacactaacacggtgacagaagcgaacggtaacacgatactatagatagataagataactcggccgaagccaggatggggccacacatcagtccctccagccgccgccgccgccgccgtagccgccaccaccaccctcgcgccgaccgccgtagccgccaccgcctccgtagccgccgccaccaccctcgcgccgaccgccgtagccgccaccgccgccataaccgccgtcacggcgcccgccaccatagccgccgccgccgcgaccgccgccgtagccaccgccgccgccgccgccgccgccgccacgggactgggcctggttaacggtgatgttacggccgtcgagctccttgccgttcatgttctcgatagcgtcgagcatggagttctcggaggagaaagtaacgaagccgaagccgcgggacctccccgtctcccggtcggtgatgacct

SEQ ID NO: 7274 - DNA, 539 bp, Zea mays
  unsure (1)..(539): unsure at all n locations; Clone ID: LIB3061-071-Q1-N6-E1
aaaatatagatctctaatacttanttactgagaggtcgcacatatcagcatgagaactttattattacagtataaatcataaaaaatctagaagatggcaccaccaatggtgggcggttgcaataaggtggtaggattcgtcaaagcatgttggctaaatggtagcaattgttgttgttgtaagaaggcaacaatgtttgccacattctgtgggtagaatggtagcaattgttgctgttgcaagaaggcattaatgtttcccacaacttgtgggtaaaatggcaacaaatgttgttgtctcaagaaagcaacaatgtttgccacagcttgcagatggaatggcagaagctgttgttgcagtaagaaggcataagggctcccgacaagttggttaaatggtagtagctgttgtgcctgcaagtagatagcagggttcaccccagctagttgattgaatggaagaaactgttgttgctggaagtaagcagcaaggttcgctgcaactacttgattgattgttggtagcaactgttgttgta

SEQ ID NO: 7275 - DNA, 551 bp, Zea mays
  Clone ID: LIB3061-071-Q1-N6-E10
agaaatgtactttcttatttctgggaagccacaaacatcatccaaaaaacttcattattgaagtataactcataagcaatctaaaagagggcaccaccaatgatgggttgttggtagaacgctgttgggtttgtcaaagcagagtgggttgaatggcagcaattgttgcagttgtaagagggtgccagcgttaggcgcagcgtgcaggtagaacggcaacaactgttgttgtgtcaagaaggcaacagggctcacatcagctagctggctgaatggtggtagctgttgctgttgtaaataagcagcagagttcaatgctgccagttggttgaatggaagaaattgctgggggtaggcagcagctagctgactgaatggtagttgttgttgcaaataagcagcagagttcaatgcagccagttggttgaatggaagaaactgctgttgctgagagtaggcagcaaggtttcctagcacaagttgttgtagttgttgtgccttgatgttttgtgccaacaaatgcaccaaaagtaactgctgtaatagggctg

SEQ ID NO: 7276 - DNA, 441 bp, Zea mays
  Clone ID: LIB3061-071-Q1-N6-E11
accaatccaacacaagatcaatttttttttcagacaaaaacctttgcaccagcaacttggtttaccaattttaacaaacatatgcaatatcgctaagctcaaggggggctgcctcaggtagcccagtgcaggggcattagaaatctacagggggtcccatgaaaatccttggttatttgaattgcctcaaaagattaaaaacagagtccacgtatcagcttgccccaactcacaaagcttcacgggctacatactaatcagcttttgcgggagtacttttgatggccatgagagcacatgcctcaaatcttttgactggttcagcacacttgagcgggtcctttgcattggtcttgtaacactcaagggagcctgccctttcctgggtgcagggcatgggtttctggtatggtagcttgaactccttgtggggcagctcct

SEQ ID NO: 7277 - DNA, 112 bp, Zea mays
  unsure (1)..(112): unsure at all n locations; Clone ID: LIB3061-071-Q1-N6-E12
ttttttttttttttttttttggacaggtgaacgagcaggcattnntttattcgaagcaataaggtgcnnagccaattcccaccatactaggnaaccaggccagcgctngccc

SEQ ID NO: 7278 - DNA, 544 bp, Zea mays
  Clone ID: LIB3061-071-Q1-N6-E2
accgggccaaatactgtccctaccataaaatgcttgtttctcagggttctaaactctgcataccgaactaaagaatacaacacaggtttcatgtgtagcttgtacagcaagcaaaggctcagcagctgcaattacacagttgttccagtggtgacgtgttcaacccaactatgctccaatgcccctgtttagggcttgttcttcataattacagaatcagttattgccccatacttctcaaaatgcttggagaatgattcttcagttgtctcccaagcaacgcctccgacaaaaatcttccccgatgagtcgccgcccgcccccctcacatcctttccgccagcatcgccgtacccagacgccccatcccgacctccccgccgcccggggtgcccctcctcgtcgacctcctcatcgtcgtacccgttcaacgcgtgctggttgtcctccgggtaccccgccatgccgcaaacttctgcgcaaccgccgcctcggattcggagcaatcagaaggtggggttcgaatcctgagcaaaccgtagcg

SEQ ID NO: 7279 - DNA, 294 bp, Zea mays
  unsure (1)..(294): unsure at all n locations; Clone ID: LIB3061-071-Q1-N6-E3
gggggaaaaaaaaaaaaaaaaaatggggttttttaaagaaaaaaaaagcggggggggggggcccaatttggggaaaaataaaatgggaaaaaaaaagagggggccccccaaaggggggggggggccaaaaaagggggggggaaaaaaaaaaaaaagggggggggggaaaaaaatgggggggggggggaaaggaaaaaaaaaaaaggggggtttttttnaaaaaggnnanncccaaggggggggaccccgggggggggaaaaaaaaagggggggcggggggggggcgcccggggg

SEQ ID NO: 7280 - DNA, 334 bp, Zea mays
  Clone ID: LIB3061-071-Q1-N6-E5
gggcccccggattcacccctccttattttcaggtcagtcgggggggggacccaaatccaaagtcccccccgggaaaaacaagtttgggggggcgggcaaaaaaaaaaaaaatattggccctttgccaggggttgggccttggggccccacaaaaacaccttggcaaacccttcgggggggatgggggggaggaacttggccccccggtagccgggctccccgggggggggaacccccctgttgatcttgggggcccaaggcccgggggggggcacaacaatttccgggacgggggggaacaccggggggcccttaaaggggccccagggggaaa

SEQ ID NO: 7281 - DNA, 445 bp, Zea mays
  Clone ID: LIB3061-071-Q1-N6-E6
acaaaaggggccaaattcctttgttaaaaaaacaagggggggggccaaaagaaggcccccagggcaaaaacaattttgtttagttaagaaagaggcccaacagggaaaatatttacacccccccttttttttagggggaaccctaaccgttttcccaaaatagcacccccccgttctaaaactaagggaaaacccccctccccccggggggggtttccccttaaaaaaacaaatttttgggaaaccttgggggcaaataaaaaaacaaaatttttctccccccaaagttaaaaaaaaaaaaaaaaggggccaagggttttttttttagaatcttaagggccctttgttccccttggaaaaccaaaacggggggaaaaaccaccccaaaaattttcttttggaagggacaaaggggcaaaaaaaaacaccttaaaatgaacttttt

SEQ ID NO: 7282 - DNA, 332 bp, Zea mays
  unsure (1)..(332): unsure at all n locations; Clone ID: LIB3061-071-Q1-N6-E7
gaaaacaaaaaaggggggggcattaaaagaaaaaaaaaaaaaaaggaacaaaaacagggcgtgggtttcaccaaaaaagtggggggaaaactgaaattaaacaaataaaaaattaaaaaaaattttaaaaaaaactcgggggggggggggngggggttaattggaaaaaaaaaaaaaaacccagcggttggggggaaaaagagatttttttaagcccaaaaaaaaacactcccagaaaaaaaaatgggtaaaaagaaaaaaaaaaaaaaaaagggggaaagtttaggagggggggggagtattagccgcggaaaaaaaggtgtttgggggcc

SEQ ID NO: 7283 - DNA, 547 bp, Zea mays
  Clone ID: LIB3061-071-Q1-N6-E9
cggtcatcaagatcctattattccattcataataggttaaccccaaagcctgcgatagaattaggagccaagtagggcgtgccctgaccatggtttacacggatgattccttccttcaccatagaacatgtgacgacaaagtcaaagtgaaggtaataacatctgcattgccacatgaccacataatcttcacaagtgtctacataagacatcagctacggctacgctcgaaatacgcttctttgtacagatccatgttagcttccaacaggaatttttcttagcatggacagaagcagccaagaaccgctagggttcagggtgacggtgaaatgcgcatttaccagtcttcatccagagtcgccctatggaagcacagcactgtgcatagcaaggatgaagaaggacgtgaactcgatgaacatggccccggtctcgattaagccagcgtgcctcagaattgctggaatagcaaggcttcccatggccgacgcaccagtcaagaattttgcagcattaatccaccctccaccttctctgctggtca

SEQ ID NO: 7284 - DNA, 315 bp, Zea mays
  Clone ID: LIB3061-071-Q1-N6-F1
ggggggaaaagccccccccaattttgggtttttttgggggaaccccgggggggggggggggccccttttgggggcccctttattgggaaaaaaaaagagggggcccccccccggggggggggggcccccccaggggggggttttttaaaaagacccgggggggggggaaaaatttgttggttggagggggggggccccccaggggggccccccccgcccgggggaaaaaaaaggggggggggggggggggggccccccaaaggggccccaatattttgtgggggggagggaaacccgttgggagggaaggaaagg

SEQ ID NO: 7285 - DNA, 576 bp, Zea mays
  Clone ID: LIB3061-071-Q1-N6-F10
gtttgtttttttaaatctcaatcaatatattgattatttttaggaaacacatgccgctatgagggcaccattatcgagtacatctcatatgtaatctaaaagaggcaccaccaacgatgggttgctgccacgacaaggcagggttcatcaaagagaactggttgtatggcagcaattgttgctgctgtaggaaggcagcgaccaatgggttagccaccgctagtggattaagtaactgttgtcgctgttgtaggtacgcagcagagttcgacacagtcagttggttgaatggaagtagttgttgcaagtaggcagcagggtttgccacagctagctgagtaagagctggtacaatttgttgcagcaactgttgttgcaacaactgttgttgcaggtatgtaggtgcattgcccatagcgagcgggctagatgaaagaagttgttgctgttgtaggtaggcgatagggttcaccatggctagttgactgagcgctggtagaaactgttgcaactgttgttgttgttggtatgcagctacgtttgccaaaacagtgggttggatgcaagcagctgttg

SEQ ID NO: 7286 - DNA, 564 bp, Zea mays
  Clone ID: LIB3061-071-Q1-N6-F11
atctatacacaaacttacacatatatattagaactatactactttactggtcttaatattattggtggtgtatcatacaatactttattgtcgtttttagagtttaagaaagggaagacgaacaacctcaacctttaaaaagttcacagtacctattcttcttattggtgaaacgatagaataccaacggcgaaagaaaacatcataaatggcagatgaagcctccgaagaaaccggcagcccccactgcgagggtgtccagccggccgggcccggcggcgatcagctgtggttgtggtcgttgtgcggcgctgccggtgccgccatcgcctgctgcctgataaccgtgtcctcgagggattggaggttgcaccgaacgatggtgtccacgaagatgcgcgtctcctccacggtgttccccggcggcacgtccaccacataggactcgacgaccatggtgagcggcccgccctctgaggccgcctcgtgcacggtggtcacggagcggtagttggcgaggcggtggtcgccgcccaggatccggaagctgatcacccgccgctc

SEQ ID NO: 7287 - DNA, 446 bp, Zea mays
  Clone ID: LIB3061-071-Q1-N6-F2
aaaaccgggaaagggaacctcttatttcgggggggcccccccccccacccaaaaaactttttttttgaattccccccaaaaacccatctaaaagagagggccccccccaagatgggttgttgggaggaggcccctgggtttgtcaaaacaagggggccaaagggcaacaattgttgtaattgaaaaaggggggcggggttacccccaaaccgcgggaaaaaaggccccaaccgttgctgggtcaaaaaagaaaccccggttgctgcaactagctggctaaaagggaaaaaaatttgccgcggcaaaaaacccgcgagggtcaaggcgccccattggttaaaaggaaaaaattgttgttgataaaagaaggcaaaacccacccggccgaaagggaatagggggggcggcaaaaaaaccacagggttcaagggaaaaaggggggtgaa

SEQ ID NO: 7288 - DNA, 557 bp, Zea mays
  Clone ID: LIB3061-071-Q1-N6-F4
aatctagaaagtactttcttatttctgggacgccacaaacatcatccaaaaaacttcattattgaactataactcataagcaatctaaaagagggcaccaccaatgatgggttgttggtagaacactgttgggtttgtcaaagcaagttggttgaatggcagcaattgttgcagttgtaagagggtgccagcgttaggcatagcgtgcaggtagaacggcaacaactgttgttgtgtcaagaaggcagcagggctcacatcagctagctggctgaatggtagtagttgttgctgctgtaaataagcagcagagttcaatgctgctagttggttgaatggaagaaattgctgggggtaggcagcaactagctggctgaatggtaattgttgttgcaaataagcagcagagttcaatgcagccagttggttgaatggaagaaactgatgttgctgagagtatgcagcaaggtttgctagcacaagttgttgtagttgttgtgccctgatgttttgtgccaccaaatggaccaaaggtaactgctgtaatagggctgacg

SEQ ID NO: 7289 - DNA, 405 bp, Zea mays
  Clone ID: LIB3061-071-Q1-N6-F7
cttgcaggcggatctttactacttttcagttttggcaagctcaagtttacgggagaaaccacgaccacgagaactggggtcaactgtcaaggcatatttttaggggaatacaaaatagaggccgggtctataaaaagggagctggggcattaaaaacaaatatccaatcgacgcagatcgggccttcgtcacttcggggactcttgggccatgactggggcagttacttccgggcttgggacttcctttggtccttgggagctttctccttttcgcgttttttcgccggataaaccctttgttggttttttaaagcaagacgttccaaattttttcgggctgggtctgtttttccttggtcctgaggcttaatataacggtcaagagctttttgtttctaaagct

SEQ ID NO: 7290 - DNA, 563 bp, Zea mays
  Clone ID: LIB3061-071-Q1-N6-F8
atcgagataaatctcaatcaatatattgattatttttaggaaacacatgccgctatgagggcaccattatcgagtacatctcatatgtaatctaaaagatggcaccaccaacgatgggttgctgccacgacaaggcagggttcatcaaagagaactggttgtatggcagcaattgttgctgctgtaggaaggcagcgaccaatgggttagccaccgctagtggattaagtaactgttgtcgctgttgtaggtacgcagcagagttcgacacagtcagttggttgaatggaagtagttgttgcaagtaggcagcagggtttgccacagctagctgagtaagagctggtacaatttgttgcagcaactgttgttgcaacaactgttgttgcaggtatgtaggtgcattgcccatagcgagcgggctagatgaaagaagttgttgctgttgtaggtaggcgatagggttcaccatggctagttgactgagcgctggtagaaactgttgcaactgttgttgttgttggtatgcagctacgtttgccaaagcaaagtgggttggatgc

SEQ ID NO: 7291 - DNA, 532 bp, Zea mays
  Clone ID: LIB3061-071-Q1-N6-G1
cagaaaaatgcactcttttccataaagcagcagagtgcacaagtaccattaccaggggaaatgtacattactcagtgaaacagcagctgagttcgagatatgaggagatggcaagcataaaccccaattcaaatccgttcccaacattgtcaccaacccaacgcgaagataaattattcactgcatgcaatacgccaagcacatgcacaagcccacatattacagaaccaaatgaggtgcaaacttaagtgcccaatgaccaaaatagcattatgacaaacttagaagccctgttcgatcaggtaatcgccgagcctttccaccaccatattgcattgccctggagtcattggctcatcatagataccgataatcaaggacatgccagttttcttgatagtaatgcctccagtgcccttctttcctcggatgacaactccaggttcaccttggatcaccatgtacttcgtacctccaacaaaaaaaccagttggtgcaaagattccaggttcatcaaagtcctttatcatcc

SEQ ID NO: 7292 - DNA, 453 bp, Zea mays
  unsure (1)..(453): unsure at all n locations; Clone ID: LIB3061-071-Q1-N6-G10
gtgggttttttttttttttttttttttttttttttttttttttttttttttttttttttttttttatttttaagttaagatttttttattttgaataaaggaaagtgagtataaaagaatagaaaaaataaaaaaaaaaaaaaaaaaaggaggggggggggggggggnagagtagggaaaaaaaaaggagaagggggagaagagggaaaaaaaaggagggagagaggaaagggaaagaagagaaaaaggaggaagagaaaaagaaaggaaagagagaganggaaggaggggaggtagaggagggtaagagggaaagagaaggaagaggaaggagaaggggggggaggaggagagaaggagaagagaggagagaagggggagaagaagaaaaaacaaaaagggggggggggggggaggcagtaaagaagaggagaaaaaaaagaaaaagaagaa

SEQ ID NO: 7293 - DNA, 424 bp, Zea mays
  Clone ID: LIB3061-071-Q1-N6-G11
ggggaaagaaaacatgttcagttcgaagtacctgaaattgataacaaaatatccggggggcaaattgcaaactctttttgggcagaggcccatacccccaccctaacctgaaacacacccccattctgctacatgattggggccccaagaaggcaacctaaacaaaactttttaagttacaacggggtaagccctacagggacttacaaaaaaattcagctttacccaagttaagggtccccagctccctatcaaaaaccaaagaaaccaagctcaggcgccctttccttttaaaagggttcaaagtattggtttatgattggcacagggggcaatataccagttcctgaaccaatcccccccataaaatcacccaggacgggcaatgcgccaatgcttacccccccaaatgccgcaacggggg

SEQ ID NO: 7294 - DNA, 550 bp, Zea mays
  Clone ID: LIB3061-071-Q1-N6-G2
gctacaattatggattgatgattattcgatcgtatcaaatgcaccctgacataattaaaaaaggctctgcttattgcaagtagagtttataaaacaaaacacccttttcacaagggggaaactagggcaaacaaaaagggctggtaagatggggcagccgcttcttcttctgttccatatcagaatccaatacaattcgaagaagtagaagctggtgaaaaccatggcgtacaggacgatgatgatctaagccttctctattagctgcaagacctccgcttcggtgggcagcgacgggatcgcccccttcttcgtggtggtgatcgctccgcacgcgttagcgaatttaatcgactccacaagcttcttctcatcttgtagcgaggatggatctttaacgatcctttggagcagagcaccaacgaacgcgtcacctgcgccagttgtatcaacttgttgtactttgaaggaaggcacagcgccatggaaatccctggcatagtacttgcacccttgatctccaagagtcactaggagcagcttcatggta

SEQ ID NO: 7295 - DNA, 330 bp, Zea mays
  Clone ID: LIB3061-071-Q1-N6-G4
atatataaatttttataaattttgattatattaggaattgattgtagagagaagagagataggaagtagggagggagggggggggaggggagggaggagagaggggggaaaaaggaggggggggagaaggggagagggggggagggagggggggagagaggggggggaaaggaggggagaggaggagaagagaaagaaggagagaaggggaggaagaagagaggagagaggagaggaggaaagagaggggggtggaggggggggagggaaagaaggaagaaaagagggggaggaggagaaagggagggagagagaggaggagggagagag

SEQ ID NO: 7296 - DNA, 550 bp, Zea mays
  Clone ID: LIB3061-071-Q1-N6-G5
agaaatgtactttcttatttctgggaagccacaaacatcatccaaaaaacttcattattgaactataactcataagcaatctaaaagagggcaccgccaatgatgggttgttggtagaacgttgttgggtttgtcaaagcaagttggttgaatggcagcaattgttgcagttgtaagagggtgccagcgttaggcgcagcgtgcaggtagaacggcaacaactgttgttgtgtcaagaaggcaacagggctcacatcagctagctggctgaatggtggtagctgttgctgttgtaaataagcagcagagttcaatgctgccagttggttgaatggaagaaattgctgggggtaggcagcagctagctgactgaatggtagttgttgttgcaaataagcagcagagttcaatgcagccagttggttgaatggaagaaactgctgttgctgagagtaggcagcaaggtttcctagcacaagttgttgtagttgttgtgccttgatgttttgtgccaacaaatgcaccaaaggtaactgctgtaatagggctg

SEQ ID NO: 7297 - DNA, 539 bp, Zea mays
  Clone ID: LIB3061-071-Q1-N6-G6
ggaaaataacttcttatttctaggaggccacatacatcagccaaaaaacttcattattgaattacaactaataagcaatctaaaagaggcaccgccaatgatgtgttgttggtagaaggctgctgggtttgtcaaagcaagttggacaaagggcagcaactgttgcagttgtaagagggttgcggggttagccacaaactgctggtagaacggaagcacttgttgttgtgtcaagaaggaagcggggcttgttgtagctagctggccaaatggtagtagtatttgctgctggaaataagcagaggggttcagtgcggccaattggttaaatggaagaaattgttgctgctgagagtaggcagtagctagctggctgaatggtagtagttgttgttgctgcaaataagcagcagggttcagtatagacagttggttgaatggaagaaattgttgttgctgagagtagggggaaaggtttgccagagctacttggctgatcactggtagcacgagttgctgcaactgttctgccctgatgg

SEQ ID NO: 7298 - DNA, 540 bp, Zea mays
  Clone ID: LIB3061-071-Q1-N6-G8
cagacaaaaaatttattattgaactataactcataagaaatctaaaagagggcaccaccaatgatgggttgttggtagaacactgctaggtttgtcaaagcaagttggttgaatggcagcaattgttgcagttgtaagagggtgccagcgttaggcgcagcgtgctggtagaacggcaacaactgtggttgtgtcaagaaggtagcagggctcacaccagctagctggctgaatggtagtagttgttgctgctgtaaataagcaggagagttcaatgctgccagttggttgaatggaagaaattgttgggggtaggcaacaggtagctggctgaatggtagttgttgttgttgcaaataagaagcagagttcaatgcagctagttggttgaatggaagaaactgctgttgctgagagtaggcagcaaggtttgctagcacaagttgttgtagttgttgtgccctgatgttttgtgccaataaatgcaccaaaggtaactgctgtaatagggctgatgattgttggaggaacaagggtgat

SEQ ID NO: 7299 - DNA, 510 bp, Zea mays
  Clone ID: LIB3061-071-Q1-N6-G9
attcaaaatggcagcgtcaatagactgcagattttacctatgaccacgacagggagaaaataaataaacatatttttcagacatgtgacatgtcccataattcagctccctattgaactccaatggtagcctacttacaccatctaaaggcccacagaaatggagcacttcaaactcttgacctgcaccgttataccatcggaaacttgtatcaatggagatgatactgcaccctttttatacgcaatataagaggaaactttatcctatacctggggtatctggttagcaatcagtgcgctgcaccggactccaggcaggcaaggcactcaacaggctcagcgagcccgtaaacagattcaatgcacctgctgtggaacacatggtggcatgccaaaactgcaatgactggtggagcattggcatcacggccagcatccccttgtgtccggaaagcaacatcaagcttgcagagctggcaccttgttcccagcggcttgaccggtggcg

SEQ ID NO: 7300 - DNA, 557 bp, Zea mays
  unsure (1)..(557): unsure at all n locations; Clone ID: LIB3061-071-Q1-N6-H1
acaaaaagctgaattgtttttatatctgatctttcacgacgtgttctcttccttgaaatgaaacaacacttctacaatatttttgtctgtatagattacagctacaacagtccaaacatttagctttaatccgaagcgaacaactccctcctattcatttgaattcaaatttgaatggaaggaaatttaatccccttcaatccaccctaaccgaacatggcctaaagatttttcagatgtatgtgtctccacatcacaactcaagggatcagagtcaattcgactggccataagctagctacgatatacaacattccagaagtcttgctgaaccgtggcacaccatggaggtcaaggaaaaaagaatatatggctacctggatgtgtatgttttacagtgaaattctcatctgggaagatgcctccatatatagactcactccctttgccgtcacctctaactatgtcaccgccctgaatcatgaagccaggnataatacgatggaatggtgttcccttatagtgaaaaggtgtgccattggaccccacaccttttt

SEQ ID NO: 7301 - DNA, 576 bp, Zea mays
  Clone ID: LIB3061-071-Q1-N6-H10
gggggtggtttttttgctcatcaacaatcccagcaaatatattataatagtagtgctgacagttagcaaaagcacagctgacacaacaaaacacctacgccggcgtagagcctggaacagtgcatcgctcgctctcccataataagcgcatgcggggggcaaaaaattctgatacaacaggatttcgatcgtctattattagccaagtcccagattccgcatgtccctcctttgagcagtggagccctctttcttgatcctagacggcctgacaatacggtcgatgatcccgtactcgagagccccttcggcgtcgaagcgcttcaccctagacaggtcctcatggatcttctcgacagaatggcctgtgtgccccgcgagcttgccatagagatagttcttgatgcggataagctcgtttgcttcgttttctatatcgtcagcctgtcctcgagctgctccggcaggtgattggagtgaaatccggataaaggcataccagtgcgtgaacccttttcaccggctgcagagatgaatcctgccaggttgaatgcaaagccccaacagtgagtgcca

SEQ ID NO: 7302 - DNA, 514 bp, Zea mays
  Clone ID: LIB3061-071-Q1-N6-H4
ggaacaatacttttttcttttcatttcaattgttcattcaggtcattgctcacactgacactgccacccatggtgatgcgtgacacattattactcaatcatcgccgctaaatgactcaactagctagctagccagcgggtatactacagcacatagtttcttcagtgggggacaccgccggcagcagcgtaggggcatggagtcggctgctgcaggccgcacatcgccgtcagttgctgcgctatctgcgccgccaacagccccgcgacctggccgctttgcggctgctgctgcaggatggactggaggaccaagccgaagatcgcctggtaccggtgctgcggctccacctgcctgagctgctggcaacactgctgccgcaacgactggcactgaggcgagcagtagggcgtcgccgtcgggctgcactgatgcctcagaaactcgacgcactgggcccaggatcggggtgctgccaacgccgcaagttccctgcagctggcacgggcttgg

SEQ ID NO: 7303 - DNA, 543 bp, Zea mays
  Clone ID: LIB3061-071-Q1-N6-H5
cacattagaatctggaaatgtaacttcttatttctggttggccacatacatcatccaaaaaatttattattgaattacaactaataatcaatctaaaagagggcaccaccaatgatgtgttgttggtaggaggctgctgggtttgtcaaagcaagttggacaaagggcaacaattgttgtagttgtaagagggttgcggggttagccgcaaactgcttgtagaaaggcagcaactgttgctgtgtcaagaaggaagcacgacttgctgcagctagctcgctaaatggcagtagtatttgctgctgcaaataagcagcggggttcagtgcggccaattggttaaatggaagaagttgttgttgctgagagtaggcagtagctagctggctaaatggtaatagttgttgctgcaaataagcagcagggttcagtgtagacagttggttgaatggaagaaattgttgttgctgagagtagggagaaaggtttgccagagctacttggttgatcacaggtagcacgagttgctgcaactgttgtgcc

SEQ ID NO: 7304 - DNA, 488 bp, Zea mays
  Clone ID: LIB3061-071-Q1-N6-H7
agtacagatccccagcagtctgcatatttatttattttactgaagaagaaaagttttaccaaatcacatgttctttttcttatgggaaaccagtcacacattccgcaccaaggtttggcggcttatatatagtatatgaaacagagctgtagctcgctcagtcttgtttatcttcttccccggatgcaccagcaaccttcgctgctgcggatgcatagctcacgctgctatccctcatgttcttgcactggctggactgctcgtagcggacaaagcctatcttaatttttttcgagcaatgtttcaacatgtgaaggaagacgctgatggggtggcgtccgcatatggtgttctcgtactcctgcaggtattctttgaacgctacgggatcgccagtctctatgatctccatgcccatacgggccaagggctcgatagatttatggatggcaccgtgcttcttttcgtagtatgtgtagctaaacctg

SEQ ID NO: 7305 - DNA, 570 bp, Zea mays
  Clone ID: LIB3061-071-Q1-N6-H8
gtgttgttttttttaatttggaacagatggagtactttttttcttttcatttcaattgttcattcaggtcattgctcacactgacactgccacccatggtgatgcgtgacacattattactcaatcatcgccgctaaatgactcaactagctagctagccagcggctatactacagcacatagtttcttcagtgggggacaccgccggcagcagcgtaggggcatggagtcggctgctgcaggccgcacatcgccgtcagttgctgcgctatctgcgccgccaacagccccgcgacctggccgctttgcggctgctgctgcaggatggactggaggaccaagccgaagatcgcctggtaccggtgctgcggctccacctgcctgagctgctggcaacactgctgccgcaacgactggcactgaggcgagcagtagggcgtcgccgtcgggctgcactgatgcctcaggaactcgacgcactggcccaggatcggggtgctgccaacgccgcaggttccctgcagctggcacgggcttggatgcggctgttggcacgggcatgggtgtggc

SEQ ID NO: 7306 - DNA, 567 bp, Zea mays
  Clone ID: LIB3061-072-Q1-K6-A1
catcaggtcgctgctatcatagatgctcgctcgagcaataccggtaaatcacagcctttcgacccgcatcatggcacactatctgggtccgagaacgttaagcgcttatctttcaccaagggcagacctcataagaggtgctgcgaggtaggtgcggcaagaaacaaggatgggggcatccttgctcgggattggtcatggttagctccagcatgatgtttgttgcagccccctgcctaacactgtgcctgcgatccgtcaccaccaccttatttctatccagcgctcttgaacatatcccaccgaagattaacaagggtgaccgcagcaaattatcacaccctgtggcaactcgaacaataagggtgtaaaaggtgggctcattacgagtctgccctgctcgccaagctgggtatccgacccttctggtactgtctacaagccaccactgtttaccaggatgggtccttgctaacccctgcagtgctttacctttatgcagatgacctgattgaacaatgttccactggtgcatccatggctgctcttcctcattactggcagatc

SEQ ID NO: 7307 - DNA, 555 bp, Zea mays
  unsure (1)..(555): unsure at all n locations; Clone ID: LIB3061-072-Q1-K6-A10
cacaatcccgtcacacactcaggggcgggaacacatcagctgccacctccttccttccttcctgcataggttgctacacgntatatattctgaagaagagatcgagatgaccagcgtgtgngaagaccaaggttctgcctggcctcaacaagatctttgacaaggatggcaagaaggggtgggctgcaggcttcttgaagtccttcaacaaggaggagattgacaaggagattgaggacaagaagacagagctggagcccaaggtcgtggaggcctacgaagcatctcctcctgaggtcaaggctctgttcaaggataagaagccagtcaaggtcagcaagaagaactcggctgcagtcaccaagttcctcgatgagctggctaagattgacttccctggagccaaggtggtgagcgaggcggtggccaagtccggcacctcgcccctgcttccggcgatcaccttcatcttggacaaggtcgcaccgtttatccccaaggaggagcccaaggcggagccggcggcggaggccacctcccgggaagtcgccgtgg

SEQ ID NO: 7308 - DNA, 571 bp, Zea mays
  unsure (1)..(571): unsure at all n locations; Clone ID: LIB3061-072-Q1-K6-A11
agcgtccgggacttcanaacacccagcggggggggggggacgacctaacaacaatggctaccaagaattagccctccttgcgcttcttgccctttttgtgagcgcaacaaatgcgttcattattccacaatgctcacttgctcctagtgccattattccacagttcctcccaccagggggttgatgggcttncnaacacctagctgtgcaagccaacatgcaacaacaagcgcttgcggcgagcgtcttacaacaaccaattgcccaattgcaacaacaatccttgccacatctaacaatacaagccatcacaacgcaacagcaacaacagttcctaccagcactgagccacctagccatggtgaaccctgccgcctacttgcaagagcagctgcttgcatccaacccacttgctctggcgaacgtagttgcaaaccagcaacaacaacagctacaacagtttctgccaacgctcagtcaactagccatggtgaaccctgccgcctacgtacaacaacaacaactgctttcatctagcccgctcgatgtgggcaatgcacctacatacctg

SEQ ID NO: 7309 - DNA, 585 bp, Zea mays
  unsure (1)..(585): unsure at all n locations; Clone ID: LIB3061-072-Q1-K6-A12
gctcgncaaanattgtgagaatgatccggcgctganaagagaggctaagatcgccgcagccgccgcggcggcggcggcgctgtgcttcgcggccctggtggccgtggccgtctgccaaggcgaggtcgagcggcagaggctcagggacctgcagtgctggcaggaggtccaggagagcgcgctcgacgcgtgccgccaggtcctcgaccggcagctaaccggcggcggcgtcggcggcccgttccggtggggcaccgggctccggatgcggtgctgccagcagctccaggacgtgagccgcgagtgccgctgcgccgccatccggagcatggtcaggggctacgaggaggccatgccgcctctggagaaaggctggtggccatgggggcggcagcagcagccgccgccgcagggaggaggaggaggacaggggggctactactacccctgcagccgggcaggagagggataccaaacgcagatgtatccaccgtgtcgtcccggcaccaccgggccaaggatcggccgcgtgaggcttacgaaggcccgggagtactccgcggggttgccgatgatgtgccggct

SEQ ID NO: 7310 - DNA, 564 bp, Zea mays
  unsure (1)..(564): unsure at all n locations; Clone ID: LIB3061-072-Q1-K6-A2
gntccaacagcaatcgcagcaggcatcttacctttatcacccttgttcctccaacaaccgtcagccctattacagcagttacctttggtgcatttgttggcacaaaacatcaaggcacaacaactacaacaacttgtgctaggaaaccttgctgcctactctcagcaacagcagtttcttccattcaaccaactggctgcattgaactctgctgcttatttgcaacaacaactaccattcagtcagctagctgctgcctacccccagcaatttcttccattcaaccaactggcagcattgaactctgctgcttatttacaacagcaacagctaccaccattcagccagctagctgatgtgagccctgttgccttcttgacacaacaacagttgttgccgttctacctgcacgctgcgcctaacgctggcaccctcttacaactgcaacaattgctgccattcaaccaacttgctttgacaaacccaacagcgttctaccaacaacccatcattggtggtgccctcttttagattgcttatgagttatacttcaataatgaagtt

SEQ ID NO: 7311 - DNA, 598 bp, Zea mays
  unsure (1)..(598): unsure at all n locations; Clone ID: LIB3061-072-Q1-K6-A4
cccgggtcgcccagcgtccgtnagcaacatanaagcacaatagtgtaccaacatggcagccaaaaattttgcctccttatgctccttggtctttctgcaagtgctgctacggcgaccattttcccacaatgctcacaagctcctatagcttcccttcttcccccgtacctctcaccagcggtgtcttcggtatgtggaaaacccaattcttcaaccctataggatccaacaggcaatcgcagctggcatcttacctttatcacccttgttcctccaacaatcatcagccctattacagcagttacctttggtgcatttattggcacaaaacatcagggcacaacaactacaacaacttgtgctagcaaaccttgctgcctactctcagcaacaacagtttcttccattcaaccaactagctgcattgaactctgcttcttatttgcaacaacaacaactaccattcagccagctatctgctgcctacccccagcaatttcttccattcaaccaactgacagctttgaactctcctgcttatttacagcagcaacaactactaccattcagccagctagctggtgtgagccctgctacc

SEQ ID NO: 7312 - DNA, 573 bp, Zea mays
  unsure (1)..(573): unsure at all n locations; Clone ID: LIB3061-072-Q1-K6-A5
agcgtccggtgcagccagtgtcgcatagtaccggttcttcccagttgtatctaaagaaagngctcccaagttgaacccgctngaacagcacaaaatccttctgatctagctgccacttgcgttcctgcataccaagaagttggtggtgctagtgcctcgcaaagtgccattgaggcccagaaagctactgctgcggcatctcagctcactcgcagtggttcatcaagggcaatnggaaaatgcacaggacggcggggagaggaagtaacgagatagagttcgtttttttttatcgtctatgctacatcttatggatgcatatgatcctgcctgacgattctcaggtctcagctctccgtggctccgtgtgcaaatctctgccacgggcgtgttttaacgcctgattggatggttgcccgctggcgcgcccggccagcctcgtacggccacttcggacgcatctgcatcttcggaggtacccgcagatgtagatgaatggccgtaaaatggtttggtctgcgtctctttacatataggcaaccaaatgaaactcagataaagttaactcatgtg

SEQ ID NO: 7313 - DNA, 585 bp, Zea mays
  unsure (1)..(585): unsure at all n locations; Clone ID: LIB3061-072-Q1-K6-A6
tccggngaacancaagcaacatagnaagtaggaaccattagcaacaatagagcaacaatggcgaccaagaattttccctccttatgctccttgctctttctacatgtgttgctaacgcgacaattttccctcaatgctcacaagctcctatagcttcccttcttcccccataccttccatcaattatagcttcagtatgntgaaaacccagctcttcaaccatataggcttcaacaagcaatcgcagcaagcaacatacctttatcgcccttgttgtttcaacaatcaccagccctatctttggtgcagtcattggtacaaaccatcagggcacaacagctgcagcaactcgtgctacctgtgatcaaccaagtagctctggcaaacctttctccctactctcagcaacaacaatttcttccattcaaccaactgtctacactgaaccctgctgcttatttgcagcaacaactattaccatttagccagctagctactgcctactctcagcaacaacaacttcttccatttaaccaattggccgcactgaaccccgctgcttatttgcagcagcaaatactactg

SEQ ID NO: 7314 - DNA, 579 bp, Zea mays
  unsure (1)..(579): unsure at all n locations; Clone ID: LIB3061-072-Q1-K6-A7
tcactagcaacatagnaagcacaatagtgtaccaacaatggcagccaaaaattttgcctccttatgctccttggtctttctgcaagtgctgctacggcgaccattttcccgcaatgctcgcaagctcctatagcttcccttcttcccccgtacctctcaccagcgtgtcttcggtatgtgaaaacccaattcttcaaccctacaggatccaacaggcaatcacagctggcatcttacctttatcacccttgttcctccaacaatcatcagccctattacatcagttacctttggtgcatttattggcacaaaacatcagggcacaacaactacaacaacttgtgctagcaaaccttgctgcctactctcagcaacagcagtttcttccattcaaccaactagctgcattgaactctgcttcttatttgcaacaacaacaactaccattcagccagctacctgctgcctacccccagcaatttcttccattcaaccaactggcagcattgaactctcctgcttatttacagcagcaacaactactaccattcagccagctagctggtgtgagccctgcta

SEQ ID NO: 7315 - DNA, 568 bp, Zea mays
  Clone ID: LIB3061-072-Q1-K6-A8
agcgtccggcgagcgcaacaaagcgttcattttccacgaggctcattgctccaattccttttacacagttcctcccacagtcttcatgggcttcgaacacccagctgtgcaagcctataggctacaacaagcaattgcggcgagcgtcttacaacaaccaatttcccagttgcaacagcagtgcttggcacatctaacaatacaaaccatcgcaacgcaacagcaacaacaattcctaccagcactgagccatcctagccatggtgaaccctgccgcctacttgcaacagcagttgcttgcatcaaacccacttgctctggcaaacgtagttatcaaaccagccacaacaacagctgcaacagtttctgccagcgctcagtcaactagccatggtgaaccctgccgcctacctacaacagcaacaactgctttcatctagcccgctcgctgtggccaatgcacctacatacctgcaacaacaattgttgcaacagattgtaccagctctgactcagctagttgtggcaaaccctgctgcctacttgcaacagctgcttccattcaacc

SEQ ID NO: 7316 - DNA, 590 bp, Zea mays
  unsure (1)..(590): unsure at all n locations; Clone ID: LIB3061-072-Q1-K6-B1
ngatgnaaaccaacaagcaacataggaagtgggaatacagtagcaaaaatanagcaacaatggcggccaagnaattttccatccttatgctccttgctctttctgcatgtgttgctaacgcgaccatttttcctcaatactcacaagctcctatagctgcccttcttcccccataccttccatcaatgaccgctttagtatgtgaaaacccagcccttcaaccctacaggatccagcaagcaatcgcaacaagcaacttacctttatcacacctgttctttcaacaatcgccagccctatctttggtgcagtcattggtacaaaccatcagggcagaacagttgcagcaactcgtgctaccagtgatcagccaagtagctctggcaaacctttccccctactctcagcaacaacaatttcttccattcaaccaactgtctatactgaaccctgctgcttatttgcagcaacaacaactactaccattcagccagctagctactgcctactctcagcagcaacaatttcttccatttaaccaattggccgcactgaacccctctgcttatttccagcagcaaatactacta

SEQ ID NO: 7317 - DNA, 556 bp, Zea mays
  unsure (1)..(556): unsure at all n locations; Clone ID: LIB3061-072-Q1-K6-B10
ccgcttcctcgnactcgccanagggggggggggattagtgatgagcagtcaaatgcggcttgaaatcaacacttctcaggaggctgatcagttgtcaacgccgtccacatttgcacaagctgctaaactcaagcgcctggctgctgccaaggagaaggaactggcaaaaatgcgggggcatgaccttaaagggaagcaatccttatacgacaaatacacaaaatttttgtcggttactaaggtcataatttatgctgtgctcgttctgtgcttttggagtactcctgtaactgcagttccacaacatcttctacagcccttcggaaaaatgttttcctggagatgtgttgatactgccaccggcaatgttgtggttggaatactcccgtggctgtttttgacctctcgggtcagcaagatgctgtgccagaaactgggcttcgtgcttgtgcgtccgtagcgcctttccatgagaaagtcagcaagttgctgcacctaaacaagactgctaactttggtcttcttctatatctttttataatcaactgtttcactt

SEQ ID NO: 7318 - DNA, 565 bp, Zea mays
  unsure (1)..(565): unsure at all n locations; Clone ID: LIB3061-072-Q1-K6-B2
ctgacaacananaagcacaatatgtaccaacatggcagccaaaaattttgcttccttnagctccttggtctttctgcagtgctgcntaccgcaaccattttcccacaatgctcacaagctcctatagcttcctttcttcccccatacctctcaccagcggtgtcttcagtatgtgaaaacccaatcttcaaccctacaggatccaacaggcaatcgcagcaggcatcttacctttatcacccttgttcctccaacaaccgtcagccctattacagcagttacctttggtgcatttgttggcacaaaacatcaaggcacaacaactacaacaacttgtgctaggaaaccttgctgcctactctcagcaacagcagtttcttccattcaaccaactggctgcattgaactctgctgcttatttgcaacaacaactaccattcagtcagctagctgctgcctacccccagcaatttcttccattcaaccaactggcagcattgaactctgctgcttatttacaacagcaacagctaccaccattcagccagctagctgatgtgagccc

SEQ ID NO: 7319 - DNA, 391 bp, Zea mays
  unsure (1)..(391): unsure at all n locations; Clone ID: LIB3061-072-Q1-K6-B3
gcagtgctgtacggacattcccacagctaagctctatgtcccttttcccgtccttcacacgtgtttggttgtgaaacccaatcttaacctcggaccacagcaacgcactggctcttacttatacctgtctccacaacatacctatacagcagtccttgggctttatggcacaaacataggccacactacaacactggctagcaaactgtgcctctctcacacacagttttccttcaaccaatanctgatgaacttcttttattgcacacacactaccatcaccacttctgctgcctaccccacatttttccttcaaccatgacacatgaactctcctgttattacagacaacaactactaccatcaccactactggtgtgagccctgctac

SEQ ID NO: 7320 - DNA, 587 bp, Zea mays
  unsure (1)..(587): unsure at all n locations; Clone ID: LIB3061-072-Q1-K6-B4
tccgcaccaaccgcaattgcaccaagnaaaccatcggggggccgtcngacaggggaattaatggcgtcgtcgtctagcagcagccaccgccgcctcatcctcgcagccgccgtcctgctctccgtgctcgcggctgccagcgccagcgccgggacctcctgcgtgccggggtgggccatcccgcacaacccgctcccgagctgccgctggtacgtgaccagccggacctgcggcatcgggccgcgcctcccgtggccggagctgaagaggagatgctgccgggagctggcggacatcccggcgtactgccggtgcacggcgctgagcatcctcatggacggcgcgatcccgccgggcccggacgcgcagctggagggccgcctagaggacctgccgggctgcccgcgggaggtgcagaggggattcgccgccaccctcgtcacggaggccgagtgcaacctggccaccatcagcggcgtcgccgaatgcccctggattctcggcggcggaacgatgccctccaagtaactgcgaagagcatagtgcatgaggaatgagcttgtagctagctcatatgtctgaataat

SEQ ID NO: 7321 - DNA, 568 bp, Zea mays
  unsure (1)..(568): unsure at all n locations; Clone ID: LIB3061-072-Q1-K6-B5
cagnccattagctttatctactccagggggcgggaggacccgatcgacaccatgagggtgttgctcgttgccctcgctctcctggctctcgctgcgagcgccacctccacgcatacaagcggcggctgcggctgccagccaccgccgccggttcatctaccgccgccggtgcatctgccagctgcggttcacctgccacctccggtgcatctcccaccgccggtccacctgccgccgccggtccacctgccaccgccggtccatgtgccgccgccggttcatctgccgccgccaccatgccactaccctactcaaccgccccggcctcagcctcatccccagccacacccatgcccgtgccaacagccgcatccaagcccgtgccagctgcagggaacctgcggcgttggcagcaccccgatcctgggccagtgcgtcgagtttctgaggcatcagtgcagcccgacggcgacgccctactgctcgcctcagtgccagtcgttgcggcagcagtgttgccagcagctcaggcaggtggagccgcagcaccggtaccaggcgatcttcg

SEQ ID NO: 7322 - DNA, 465 bp, Zea mays
  unsure (1)..(465): unsure at all n locations; Clone ID: LIB3061-072-Q1-K6-B6
gggggctccctcacactcgcagctccggctgctattctccatacatcggtagattggttttcctcatgggtcgcaccatcaacaagccaattaagctcaatccaataatccaataataaaactgaatcctcctcttctttggggggggggggggcctctggtcctgctaaggtctgacaaccttttgtacatacactatnaaatggggaggagctgcattttgatcctcacgcttacaattatctcctaggttttcncattccctggtcttgcttgattttttatnttatccgtgatcaacttgcactcgtcacttcacatttccctcatacattctatgctcttactgaaactcatttctccttaatctttattccttaaaaacctaatcattcacaaaattagccattgatactatcacaaccctgaaatgctttttcatgtccttcacatagtgcctctttt

SEQ ID NO: 7323 - DNA, 531 bp, Zea mays
  unsure (1)..(531): unsure at all n locations; Clone ID: LIB3061-072-Q1-K6-B7
gtttggctctggnaattacactcagggcaaggtgacaattatcgccaagcctggagtgaagttggagattccagatggagacgtactttgaaaacaagggaggcgccaaacaaggctccaatggtgtgtgcgcgcgcgcctgttgtatgccaaaaccattctcctcaatcgcaaaagtttagaacctttcaacctcacacggctatatggttatcaatatcgaaactccgaagatctgaagggctggctcctaacctgtaaaccaagttgcacaaaacaagttatagaccacattggaaactcgagcaggatttgttaacttcaagatgccgcaagattgtcgtataggtgagtgctgtagaaaagttgcactgagatatcaacagaacacatagaaaactagagaaagattcgtaagcttcctaagttgtagaagtcatcagagttatgaatgacgatgatgatcagttactacaaaaagggtgggatgatttaccttttgtttatcgtgcaatagtgaaatttgatgct

SEQ ID NO: 7324 - DNA, 578 bp, Zea mays
  unsure (1)..(578): unsure at all n locations; Clone ID: LIB3061-072-Q1-K6-B8
cttncttcagtaccatcaatcatcatgggatcgttatagtataggcaccaaatcaaatctgcaacatcaattatctaactccaaaaccatgaagctggtgcttgtggttcttgctttcattgctttagtatcaagtgtttcttgtacacagacaggcggctgcagctgtggtcaacagcagggccatgagcagcaacatcatccacaacaacatcatccacaaaaacaacaacatcaaccaccaccacaacatcaccagcagcagcaacaccaacaacaacaagttcacatgcaaccacaaaaacatcagcaacaacaagaagttcatgttcaacaacaacaacaacaaccgcagcaccaccaccaacaacaacaacaacagcaccaacaacaacatcaatgtgaaggccaacaacaacatcaccaacaatcacaaggccatgtgcaacaacacgaacagagccatgagcaacaccaaggacagagccatgagcaacaacatcaacaacaattccagggtcatgacaagcaggaacaaccacaacagcctcagcaatatcagcagggccagggaaaaa

SEQ ID NO: 7325 - DNA, 570 bp, Zea mays
  unsure (1)..(570): unsure at all n locations; Clone ID: LIB3061-072-Q1-K6-B9
cgccgtctgccttctgcgcctccagttggggctctgtcccttgcaagttcaatctcacctccaaccatgggtgaagnagaagtcccacatcaacattgtggttattggccatgtcgactctggcaagtcgaccaccacaggacaccttatctacaagcttggaggcattgacaagcgtgtgatcgagaggttcgagaaggaggctgctgaaatgaacaagcggtccttcaagtacgcgtgggtgctcgacaagctcaaggctgagcgtgagagaggtatcaccattgatatcgctctgtggaagtttgagaccaccaagtactactgcacggtcattgatgcccctggacaccgtgacttcatcaagaacatgatcactggtacctcccaggctgactgtgctgtccttatcattgactccaccactggtggttttgaggctggtatctccaaggatggccagacccgtgaacatgctctccttgcgttcacccttggagtgaagcagatgatttgctgctgcaacaagatggatgcaaccactcccaaatactccaaggcacgttatga

SEQ ID NO: 7326 - DNA, 569 bp, Zea mays
  unsure (1)..(569): unsure at all n locations; Clone ID: LIB3061-072-Q1-K6-C1
natttngacattcagnaacacacctgagcgaacgcactagcaacgacctaacaacaatggctaccaagnaattatccctctttgcgcttcttgccctttttgtgagcgcaacaaatgcgttcattattccacaatgctcacttgctcctagtgccattattccacagttcctccctccagttacttcaatgggcttcgaacacccagctgtgcaagcctacaggctacaacaagcgcttgcggcgagcgtcttacaacaaccaattgcccaattacaacaacaatccttggcacatctaaccatacaaaccatcgcaacgcaacagcaacaacaatttctaccagcactgagccaactagctgtggtgaaccctgtcgcctacttgcaacagcagttgcttgcatccaacccacttgctctggcaaacatagttgcataccaacaacaacaacaattgcaacagtttctaccagcgctcagtcaactagccatggtgaaccctgccgcctacctacaacagcaacaactgatttcatctagccctctcgctgtggttaatgcacctaca

SEQ ID NO: 7327 - DNA, 567 bp, Zea mays
  unsure (1)..(567): unsure at all n locations; Clone ID: LIB3061-072-Q1-K6-C10
gtagaaccatagcaacataggacacgatggcgaccaanaattttccctccttatgctccttgctctttctacatgtgttgctaacgcgacaattttccctcaatgctcacaagctcctatagcttcccttcttcccccataccttccatcaattatagcttcagtatgtgaaaacccagctcttcaaccatataggcttcaacaagcaatcgcagcaagcaacatacctttatcgcccttgttgtttcaacaatcaccagccctatctttggtgcagtcattggtacaaaccatcagggcacaacagctgcagcaactcgtgctacctgtgatcaaccaagtagctctggcaaacctttctccctactctcagcaacaacaatttcttccattcaaccaactgtctacactgaaccctgctgcttatttgcagcaacaactattaccatttagccagctagctactgcctactctcagcaacaacaacttcttccatttaaccaattggccgcactgaaccccgctgcttatttgcagcagcaaatactactgccatttagcgagct

SEQ ID NO: 7328 - DNA, 572 bp, Zea mays
  unsure (1)..(572): unsure at all n locations; Clone ID: LIB3061-072-Q1-K6-C11
ccagcagcacatanaagtnagatgcgggggggcaatagagcaacaatggcgaccaagatttttccctccttatgctccttgctctttctacatgtgttgctaacgcgacaattttccctcaatgctcacaagctcctatagcttcccttcttcccccataccttccatcaattatggggggagtatgntgaaaacccagctcttcaaccatataggcttcaacaagcaatcgcagcaagcaacatacctttatcgcccttgttgtttcaacaatcaccagccctatctttggtgcagtcattggtacaaaccatcagggcacaacagctgcagcaactcgtgctacctgtgatcaaccaagtagctctggcaaacctttctccctactctcagcaacaacaatttcttccattcaaccaactgtctacactgaaccctgctgcttatttgcagcaacaactattaccatttagccagctagctactgcctactctcagcaacaacaacttcttccatttaaccaattggccgcactgaaccccgctgcttatttgcagcagcaaatactact

SEQ ID NO: 7329 - DNA, 600 bp, Zea mays
  unsure (1)..(600): unsure at all n locations; Clone ID: LIB3061-072-Q1-K6-C12
cccagcattggccttggcccgctcctccgtcttctcgcgtgggggggggggggcggccgtctccgctgtcacctccctgccagttatcgacatgtctcgcagccgcgacgaggtccgccgcgctatcctcgacgccggcatggagttcggcttcttcctggtggtggagcacggcatcccanaggaggtgaggctggaaggctgnnagtgtgcgaggagttcttccagctgccggcggcgagcaaggcgtacatgtactcggaggacagtcagagacccaaccggatcttctccggcacaacctacgacacgggcggcgacaagtactggcgggactgcctccgcctcgcctgcccctcgtccttcccggtcggcagcggcacaagggacgactggccgcacacgccccagcggctgaggggtgtcgtggagcgtttcaccgctctgacgagagggctgggggtggagctgctgcggctgctgtccgaggccatggggatccggcccgactacttcgagggcgacatcagcgccggcgacgtggtcctcaacgtcaaccactaccctccgtgccccagcccggagaagacgctcggcctg

SEQ ID NO: 7330 - DNA, 575 bp, Zea mays
  unsure (1)..(575): unsure at all n locations; Clone ID: LIB3061-072-Q1-K6-C2
agcgtccgatagcttactatccanacgcagaagacccngacgacaccatgagggtgttgctcgttgccctcgctctcctggctctcgctgcgagcgccacctccacgcatacaagcggcggctgcggctgccagccaccgccgccggttcatctaccgccgccggtgcatctgccacctccggttcacctgccacctccggtgcatctcccaccgccggtccacctgccgccgccggtccacctgccaccgccggtccatgtgccgccgccggttcatctgccgccgccaccatgccactaccctactcaaccgccccggcctcagcctcatccccagccacacccatgcccgtgccaacagccgcatccaagcccgtgccagctgcagggaacctgcggcgttggcagcaccccgatcctgggccagtgcgtcgagtttctgaggcatcagtgcagcccgacggcgacgccctactgctcgcctcagtgccagtcgttgcggcagcagtgttgccagcagctcaggcaggtggagccgcagcaccggtaccaggcgatcttcggcttggtcctc

SEQ ID NO: 7331 - DNA, 366 bp, Zea mays
  unsure (1)..(366): unsure at all n locations; Clone ID: LIB3061-072-Q1-K6-C4
ctcggtccattcattatatgtcgtnanagcttagggaaatcccacgnagaatctacgttgtatagacagctgtgcgaaggctctccgatgagctaggtgcctgcaagacagaccagatcgcgaggactgaatcatcgagtgacgacctctcgagcgtcgatggcgaagcgttccctctatctgggttctgatcatattgctttccctgtgttgttttgggaacaggggatgaggaacatgctcgttcctgatgcaattctagattaggatcatgaatatagtgtacaaagccagcggcggcggcggtgcaaattagccaccgggttgaatataaataatatatatatatgatatgttgcatcttct

SEQ ID NO: 7332 - DNA, 582 bp, Zea mays
  unsure (1)..(582): unsure at all n locations; Clone ID: LIB3061-072-Q1-K6-C6
caccaagcgaacgcactagcaacaacctaacaacaatggctaccaagnaattatccctccttgcgcttcttgcgctttttgcgagcgcaacaaatgcgtccattattccacaatgctcacttgctcctagttccattattccacagttcctcccaccagttacttcaatggccttcgaacacccagctgtgcaagcctataggctacaacaagcgattgcggcgagcgtcttacaacaaccaattgcccaattgcaacaacaatccttggcacatctaacaatacaaaccatcgcaacgcaacagcaacaacagttcctaccagcactgagccacctagccatggtgaaccctgtcgcctacttgcaacagcagctgcttgcatccaacccacttgctctagcaaacgtagttgcaaaccagcaacaacaacaactgcaacagtttctgccagcgcttagtcaactagccatggtgaaccctgccgcctacctacaacagcaacaactgctttcatctagcccgctcgctgtggccaatgcacctacatacctgcaacaanaattgttgcaacagattgtac

SEQ ID NO: 7333 - DNA, 500 bp, Zea mays
  Clone ID: LIB3061-072-Q1-K6-C7
caatacaacacttgtgctagcaaaccttgctgcctactctcagcaacagcagtttcttccattcaaccaactagctgcattgaactctgcttcttatttgcaacaacaacaactaccattcagccagctacctgctgcctacccccagcaatttcttccattcaaccaactggcagcattgaactctcctgcttatttacagcagcaacaactactaccattcagccagctagctggtgtgagccctgctaccttcttgatacaaccacagttgttgccgttctaccagcacgctgcgcctaacgctggcaccctcttacaactgcaacaattgctgccattcaaccaacttgctttgacaaacccagcagcgttctaccaacaacccatcattggtggtgccctcttttagatttcttatgagttatagttcaataataaagttttttgtctgatgtttgtggcttcccagaaataagaaagtacatttctagattctt

SEQ ID NO: 7334 - DNA, 570 bp, Zea mays
  Clone ID: LIB3061-072-Q1-K6-C8
tccgtaaaaaaaaaaaaaaaaaaaaaaaaaaggggggggggggaaaaaaaaaaaaaaaaaaaaaaaaaaaaaaaaaaaaaaaaaaaataaaaaaaaaaaaaataaaaaaaaaaaaaaataaaaaaaaaataaaatattatataaaagaaacctaaaattaaaattaactagacctattttttacatctttttggggtggggggggtttgtttttccccaatttattcgctttgttggactttcttttttcccccgttgtcttaaaaaccatgggcccctccccaatcccctttcccaaaaatatcccttttttaatggcttttgggactctccttatagcccccctttaacccctttgtttttggtggttacccccattttgaccttttcttttcccattttcttagcccccgttcctttgggttttttccttttttttctcccctattcccccgtttttccgggttattttttaaattggggctccctttttgggttccgttttaacgctttacggtacttttccccctaaaattttttttagggttttggtttttttaggggcccttt

SEQ ID NO: 7335 - DNA, 582 bp, Zea mays
  unsure (1)..(582): unsure at all n locations; Clone ID: LIB3061-072-Q1-K6-C9
gttggccactacaaanaacatcatgttgggtgttcaatcagagctagatgcattccacgtgacagtttggatgaacacattgttatccacatggatggtgtaaatattttggcagtcaattatggctctgttgatgggtgccaataccctaggcctatgaaattgccatcaaaatggacattcagctcttacactatcctaaagactgctgaacaggcaccaagaaccccatcgtttgcagatcagttaatagaagctgacaatggtcttggcgaagtaatgaaaccacctgagaaatctttctgggctaaatattggatgtacatcattccgcttggtcttattgtcatgaatgctgttacggcagctgccaacataccagaggaagctgcagggcagggccaacctggagcacaacgggcacctgctgctgttgctgggaggaggagatgatggctgccttccataccgtagttaactatcttcacattgttttctgttttttttggggtattgtatcaatcttaccttgactgcatcatctatggcactgcatgatgatgccatcttttgcttgtgttg

SEQ ID NO: 7336 - DNA, 597 bp, Zea mays
  unsure (1)..(597): unsure at all n locations; Clone ID: LIB3061-072-Q1-K6-D1
cactagcacatacaagcacaatatgtaccaacatggcagccaaaaattttgcttccttatgctccttggtctttctgcaagtgctgctaccgcaaccattttcccacaatgctcacaagctcctatagcttcctttcttcccccatacctctcaccagcggtgtcttcnagtatgtgaaaacccaattcttcaaccctacaggatccaacaggcaatcgcagcaggcatcttacctttatcacccttgttcctccaacaaccgtcagccctattacagcagttacctttggtgcatttgttggcacaaaacatcaaggcacaacaactacaacaacttgtgctaggaaaccttgctgcctactctcagcaacagcagtttcttccattcaaccaactggctgcattgaactctgctgcttatttgcaacaacaactaccattcagtcagctagctgctgcctacccccagcaatttcttccattcaaccaactggcagcattgaactctgctgcttatttacaacagcaacagctaccaccattcagccagctagctgatgtgagccctgttgccttcttgacacaacaacagttgt

SEQ ID NO: 7337 - DNA, 585 bp, Zea mays
  unsure (1)..(585): unsure at all n locations; Clone ID: LIB3061-072-Q1-K6-D10
agcgtccgtcacacctnagcgaacgcactagcagcgggctgacgacaatggctaccaagnaattatccctctttgcgcttcttgccctttttgtgagcgcaacaaatgcgttcattattccacaatgctcacttgctcctagtgccattattccacagttcctccctccagttacttcaatgggctgcgagcgcccagctgtgcaagcctacaggctacaacaagcgcttgcggcgagcgtcttacaacaaccaattgcccaattacaacaacaatccttggcacatctaaccatacaaaccatcgcaacgcaacagcaacaacaatttctaccagcactgagccaactagctgtggtgaaccctgtcgcctacttgcaacagcagttgcttgcatccaacccacttgctctggcaaacatagttgcataccaacaacaacaacaattgcaacagtttctaccagcgctcagtcaactagccatggtgaaccctgccgcctacctacaacagcaacaactgatttcatctagccctctcgctgtggttaatgcacctacatacctgcaacaacagttgctgcaac

SEQ ID NO: 7338 - DNA, 576 bp, Zea mays
  unsure (1)..(576): unsure at all n locations; Clone ID: LIB3061-072-Q1-K6-D11
agcgtccggnaagcacaatatgtaccaacatggcggccaaaaattttgcctccttatgctccttggtctttctgcaagtgctgctacggcgaccattttcccgcaatgctcgcaagctcctatagcttcccttcttcccccgtacctctcaccagcggtgtcttcggtattgtgaaaacccaaggcggggaccctacaggatccaacaggcaatcacagctggcatcttacctttatcacccttgttcctccaacaatcatcagccctattacatcagttacctttggtgcatttattggcacaaaacatcagggcacaacaactacaacaacttgtgctagcaaaccttgctgcctactctcagcaacagcagtttcttccattcaaccaactagctgcattgaactctgcttcttatttgcaacaacaacaactaccattcagccagctacctgctgcctacccccagcaatttcttccattcaaccaactggcagcattgaactctcctgcttatttacagcagcaacaactactaccattcagccagctagctggtgtgagccctgctacct

SEQ ID NO: 7339 - DNA, 581 bp, Zea mays
  unsure (1)..(581): unsure at all n locations; Clone ID: LIB3061-072-Q1-K6-D12
gnccaactacacatanaagcacatagtgtaccaacaatggcagccaaaatttttgcttccttatgctccttggtctttctgcaagtgttgctaccgcaaccattttcccacaatgctcacaagctcctatagcttcccttcttcccccatacctctcaccagcggtgtcttcgatgggggaaaccccaattgttcaaccctacaggatccaacaggcaatcgcaacaggcatcttaccattatcacccttgttcctccaacaaccgtcagccctattacagcagttacctttggtccatttggtggcacaaaacatcagggcacaacaactacaacaacttgtgctagcaaaccttgctgcatactctcagcaacatcagtttcttccattcaaccaactggctgcattgaactctgctgcttatttgcaacaacaattaccattcagccagctagttgctgcctacccccagcaatttcttccattcaaccaactagcagcattgaactctgctgcttatttacagcagcaacaactactaccattcagccagctagctgatgtgagccctgctgccttc

SEQ ID NO: 7340 - DNA, 562 bp, Zea mays
  unsure (1)..(562): unsure at all n locations; Clone ID: LIB3061-072-Q1-K6-D4
cggccgcgtgggnagatgatgggggtgtggaatccccttggnattgtgggtgttataacggcatttaatttcccttgtgctgtgcttggttggaatgcttgcattgctttggtctgtggaaattgtgtcgtctggaaggtgctccaacaactccactgatcactattgcaatgacaaaaatagtggctagtgtattggagaagaacaacttgccaggcgcaatttttacatctttttgtgggggcactgaaattggtcaagcaattgcccttgacattaggatacctttggtttcattcactggaagtacaagggctggtctaatggttcagcaacaagttagtgcaagatttggtaaatgccttcttgaacttagcggaaacaatgccatcattgttatggatgatgtagatatccagctagctgtgcgatctgtcttgttcgctgctgttggtacagcaggacaacgctgcaccacatgtcgtaggctgattcttcatgagaacatatatcaaaccttccttgatcagcttgttgaggtatacaaacaagtccgaattgg

SEQ ID NO: 7341 - DNA, 477 bp, Zea mays
  unsure (1)..(477): unsure at all n locations; Clone ID: LIB3061-072-Q1-K6-D5
naccgctgccggnatcctcaaggggaaaagtgcaccgcataccccagccgtgaactgaacgtgttgctcggtggcgggacctggctggagcctgacccgatccaccgctgcttcaccgatggcaaccttgtgaccggcgcagcctggccaggccacccagagttcgtgtcccagctcatggcgttgctcggcgtcaaggtttccttctgaagtccaaactgaaagggcaaggcagaaagagctctggctcaacctggggaggggcgtgatagcatagctttggatttccagatagaagagaacagactcaaaacgacaccttatagcgatcgctgcacttaatccttgttccatgcgcagcaagcctcaggcttattacccttgtttgtcagcgttgtgtaaaaactgtaacccggatgctgtttcttcttcttcttcttggttccttcttttttctgagtcgtcctttgtggattc

SEQ ID NO: 7342 - DNA, 581 bp, Zea mays
  unsure (1)..(581): unsure at all n locations; Clone ID: LIB3061-072-Q1-K6-D6
gnccaactagcaacatagnaagcacaatagtgtaccaacaatggcagccaaaatttttgcctccttatgctccttggtctttctgcaagtgctgctacggcgaccattttcccacaatgctcacaagctcctatagcttcccttcttcccccgtacctctcaccagcggtgtcttcggtatgtgaaaacccaattcttcaaccctataggatccaacaggcaatcgcagctggcatcttacctttatcacccttgttcctccaacaatcatcagccctattacagcagttacctttggtgcatttattggcacaaaacatcagggcacaacaactacaacaacttgtgctagcaaaccttgctgcctactctcagcaacaacagtttcttccattcaaccaactagctgcattgaactctgcttcttatttgcaacaacaacaactaccattcagccagctatctgctgcctacccccagcaatttcttccattcaaccaactgacagctttgaactctcctgcttatttacagcagcaacaactactaccattcagccagctagctggtgtgagccctgc

SEQ ID NO: 7343 - DNA, 601 bp, Zea mays
  unsure (1)..(601): unsure at all n locations; Clone ID: LIB3061-072-Q1-K6-D7
caagaaaaccgtnatcttctcgtggcgcgtctcgnccgcgtggaaaaaatgacaggcctggtcngagagtacggcaagaacgcgcgcctgagggagctggcgaacctcgtgatcgttgccggtgaccacggcaaggagtccaaggacagggaggagcaggcggagttcaagaagatgtacagcctcatcgacgagtacaagttgaagggccatatccggtggatctcggcgcagatgaaccgcgtccgcaacggggagctgtaccgctacatttgcgatacgaagggcgcattcgtgcagcctgcgttctacgaagcgttcggcctgactgtgatcgagtccatgacgtgcggtctgccaacgatcgcgacctgccatggtggccctgctgagatcatcgtggacggggtatctggcctgcacattgacccttaccacagcgacaaggccgcggatatcctggtcaacttctttgacaaatgcaaggcagatccgagctactgggacaagatctcacagggcggcctgcagagaatctatgagaagtacacctggaagctctactccgagaggctgatgaccctgaccggcgtgtacgggt

SEQ ID NO: 7344 - DNA, 567 bp, Zea mays
  unsure (1)..(567): unsure at all n locations; Clone ID: LIB3061-072-Q1-K6-D8
gcgcttgtgctgatcgcgagtacacgtgtggngacctgatcgggagtacgtgccgcttatcccgtgcttgaaactgacctcccgngagggcacgctggcggctgtcttggcgcggttcctgttcatcccggccttctacttcacggccaaatacggcgaccaggggtacatgatcttcctaacctccttcctggggctcaccaacgggtacctcaccgtgtgtgtgctaatggaggcgcccaaggggtacaagggccccgagcagaacgctctgggcaacgtgctcgtcgtctgcctcctcggcggcctcttctccggcgtcgtgctcgactggctctggctcattggcaagggctggtgagtacggtcttctgcgcgtgggtctttgagggggatcgattagattttagatctctgtttcgacctcttgtttttgcttaaaaaaacagaaaacttctgtctttaggtagctagtcagagaacacggatactgtaatctgtctaagtttgaaattttctttcgggtgcaatcactcccttttgtttccgacttttggatgttgtata

SEQ ID NO: 7345 - DNA, 589 bp, Zea mays
  unsure (1)..(589): unsure at all n locations; Clone ID: LIB3061-072-Q1-K6-D9
agcgtccgggccggcgccacgccactccagtgagccgggggcgnganaggtcacggtgggcnagatgacacgccgcacgcctctccgccccgctccgctccagattgcgcgcacccacccatggcgctcgccgcttcccaccacggcttcctgcccttcgcccccgctgccacgcctaccccgtcacgggggcacctgcgcttccgcgccgcgcgccctctgccccgccccgcccggagaatttgttgccaatctatcaactcagctaatgtgttgggagcttcttcaacgacatctgatgaggcagtcccagtcccagttgtccagatagatcaggactcagaccgtgatgcgaccattgtgcagctaagttttggagatcgtttgggggcgctacttgacacgatgaaagcactcaaggaccttggccttgatgtcacaaaaggaagtgtgacaactgactcagctgtcacacaaacaaagttccacatcatgcgatttgggcgcaaggttgaggaccctgacatgttagaaaggattcggctaaccatcatcaacaaccttctccagtaccatcctgaatcaagtg

SEQ ID NO: 7346 - DNA, 465 bp, Zea mays
  Clone ID: LIB3061-072-Q1-K6-E1
aaaaaaaaaaaaaaaaaaaaaaaaagggggggggggaaaaaaaaaaaaaaaaaaaaaaaaaggggggggcgggtctataataaaaggatcgctggcttacgtaacgcgtgcatgcctatttcctagttttttttttgagggctgccttaaatttatttgggggggcccgttgtttttccaccgtcgctgggggggggaggggctgtcgtttacctagaattaattggcttggcaacccatcttttttttccgccggctggcattccttgtggagccggcccgtgatcgatcgtttctacccaccggttggccattcctgtttggacggttgggcaccctccttgtgaggggttcattcccgcccgggtggtgtgtggttgtttaccgcgcgaggttggttggttttattaggcccgcgtcctctaccgcctcgttttctttggcctttcctgtcccttttttttt

SEQ ID NO: 7347 - DNA, 573 bp, Zea mays
  unsure (1)..(573): unsure at all n locations; Clone ID: LIB3061-072-Q1-K6-E10
cacatanaatgccatatgtccagcgagtggcagccaaaaattttgcttccttatgctccttggtctttctgcaagtgttgctaccgcaaccattttcccacaatgctcacaagctcctatagcttcccttcttcccccatacctctcaccagcggtgtcttcaatgtgtgaaacggggggggttcaaccctacaggatccaacaggcaatcgcaacaggcatcttaccattatcacccttgttcctccaacaaccgtcagccctattacagcagttacctttggtccatttggtggcacaaaacatcagggcacaacaactacaacaacttgtgctagcaaaccttgctgcatactctcagcaacatcagtttcttccattcaaccaactggctgcattgaactctgctgcttatttgcaacaacaattaccattcagccagctagttgctgcctacccccagcaatttcttccattcaaccaactagcagcattgaactctgctgcttatttacagcagcaacaactactaccattcagccagctagctgatgtgagccctgctgccttctt

SEQ ID NO: 7348 - DNA, 607 bp, Zea mays
  unsure (1)..(607): unsure at all n locations; Clone ID: LIB3061-072-Q1-K6-E12
cgggtcgcccagcgtccggcaacatagnaagcacaatagtgtgcggacagggcgggcaaaaattttgcttccttatgctccttggtctttctgcaagtgctgctaccgcaaccattttcccacaatgctcacaagctcctatagcttcctttcttcccccatacctctcaccagcggtgtcttcagtatggggggaccgaangggtcaaccctacaggatccaacaggcaatcgcagcaggcatcttacctttatcacccttgttcctccaacaaccgtcagccctattacagcagttacctttggtgcatttgttggcacaaaacatcaaggcacaacaactacaacaacttgtgctaggaaaccttgctgcctactctcagcaacagcagtttcttccattcaaccaactggctgcattgaactctgctgcttatttgcaacaacaactaccattcagtcagctagctgctgcctacccccagcaatttcttccattcaaccaactggcagcattgaactctgctgcttatttacaacagcaacagctaccaccattcagccagctagctgatgtgagccctgttgccttcttgacacaacaaca

SEQ ID NO: 7349 - DNA, 585 bp, Zea mays
  unsure (1)..(585): unsure at all n locations; Clone ID: LIB3061-072-Q1-K6-E3
cacaagctcctnatacttcccttcttcccccatacctctcaccagcggtgtcttcaatgtgntgaaaacccaattgttcaaccctacaggatccaacaggcaatcgcaacaggcatcttaccattatcacccttgttcctccaacaaccgtcagccctattacagcagttacctttggtccatttggtggcacaaaacatcagggcacaacaactacaacaacttgtgctagcaaaccttgctgcatactctcagcaacatcagtttcttccattcaaccaactggctgcattgaactctgctgcttatttgcaacaacaattaccattcagccagctagttgctgcctacccccagcaatttcttccattcaaccaactagcagcattgaactctgctgcttatttacagcagcaacaactactaccattcagccagctagctgatgtgagccctgctgccttcttgacacaacaacagttgttgccgttctacctgcacgctatgcctaacgctggcaccctcttacaactgcaacaattgctgccattcaaccaacttgctttgacaaactcaacagtgttt

SEQ ID NO: 7350 - DNA, 488 bp, Zea mays
  unsure (1)..(488): unsure at all n locations; Clone ID: LIB3061-072-Q1-K6-E4
ngactttctccctatctcagcaacaacaatttcttccattcaaccaactgtctacactgaaccctgctgcttatttgcagcaacaactattaccattcagccagctagctactgcctactctcagcaacaacaacttcttccatttaaccaattggccgcactgaaccccgctgcttatttgcagcagcaaatactactaccatttagccagctagctgcagcaaaccgtgcttccttcttgacacagcaacagttgctgcctttctaccagcagtttgcggctaaccccgcaaccctcttacaactacaacaattgttgccctttgtccaacttgctttgacagaccgagcggcctcctaccaacaacacatcattggtggtgccctcttttagattgcttattagttgtaattcaataataaagttttttggatgatgtatgtggccaaccagaaataagaagttacatttccagattttaatgtg

SEQ ID NO: 7351 - DNA, 572 bp, Zea mays
  unsure (1)..(572): unsure at all n locations; Clone ID: LIB3061-072-Q1-K6-E5
aaacctgnaactggtgcttgtggttcttgctttcattgctttagtatcaagtgtttcttgtacacagacaggcggctgcagctgtggtcaacaacaaagccatgagcagcaacatcatccacaacaacatcatccacaaaaacaacaacaacaaccgcagcaccaccaccaacaacaacaacaacagcaccaacaacaacatcaatgtgaaggccaacaacaacatcaccaacaatcacaaggccatgtgcaacaacacgaacagagccatgagcaacaccaaggacagagccatgagcaacaacatcaacaacaattccagggtcatgacaagcagcaacaaccacaacagcctcagcaatatcagcagggccaggaaaaatacaacagcaacaatgtcattgccaggagcagcaacagactacaaggtgcagctataactactatagcagtagctcaaatctaaaaaattgtcatgaattcctaaggcagcagtgcagccctttggtaatgccttttctccaatcacgtttgatacaaccaagtagctgccaggtattgcagcaacaatg

SEQ ID NO: 7352 - DNA, 579 bp, Zea mays
  unsure (1)..(579): unsure at all n locations; Clone ID: LIB3061-072-Q1-K6-E6
anaagaggatccagtacacaacagagcacatggcgaccaanatttttccctccttatgctccttgctctttctgcatgtgttgctaacgcgacaattttccctcaatgctcacaagctcctatagcttcccttcttcccccataccttccatcaatgatagcttcagtatgtgaaaacccagctcttcagccctataggctccaacaagcaatcgcaacaagcaacatacctttatcacccttgttgtttcaacaatcgccagccctatctttggtgcagtcattggtacaaaccatcagggcacagcagctgcagcaactcgtgctacctgtgatcaaccaagtagctctggcaaacctttctccctactctcagcaacaacaatttcttccattcaaccaactgtctacactgaaccctgctgcttatttgcagcaacaactattaccattcagccagctagctactgcctactctcagcaacaacaacttcttccatttaaccaattggccgcactgaaccccgctgcttatttgcagcagcaaatactactaccatttagccagctagctgcagc

SEQ ID NO: 7353 - DNA, 564 bp, Zea mays
  unsure (1)..(564): unsure at all n locations; Clone ID: LIB3061-072-Q1-K6-E7
tgtgcttttccgtgtattcggnagaggtggcttcttcaagnagtggtggagctcttccatgatatgcttaaaactggggtacagcctgatatggtgacctgcgaaatgtcatggctgcctgtggtcacggtggcctccatggggatgcaagagaagttcttgaatatatgaccagagaaggaatggtgcctactgcagatgcctacactggcctggttgaggcccttggccacgcagctatgtatgaggaagcctatgttgctttcaacatgatgactgaaatcggtagcttgccaactcttgagacctacaatgctcttgcatttgcatatgctaggggtgggctcttccaggaggctgaggccatcttttctcggatgagtaacaatgctggcattcagaaaagcaaagactcatttgacgccctcatcgaagcatattgccagggctcccgattggatgatgcagtgaaggcgtacatggagatgcgtaaatccaggtttaatccagatgagcggtcccttgagggagtacttaatgcctactgcatagcaggggtcatag

SEQ ID NO: 7354 - DNA, 370 bp, Zea mays
  Clone ID: LIB3061-072-Q1-K6-E8
agcgtccggttgctgcctacccccagcaatttcttccattcaaccaactagcagcattgaactctgctgcttatttacagcagcaacaactactaccattcagccagctagctgatgtgagccctgctgccttcttgacacaacaacagttgttgccgttctacctgcacgctatgcctaacgctggcaccctcttacaactgcaacaattgctgccattcaaccaacttgctttgacaaacccaacagtgttctaccaacaacccatcattggtggtgccctcttttagattgcttatgagttatagttcaataatgaagttttttggatgatgtttgtggcgtcccagaaataagaaagtacatttct

SEQ ID NO: 7355 - DNA, 551 bp, Zea mays
  Clone ID: LIB3061-072-Q1-K6-F1
aaaaaaaaaaaaaaaaaaaaaaaaaagggggggggggaaaaaaaaaaaaaaaaaaaaaaaaaaaaaaaaaaaaaaaaaaaaaaaaaaaaaaaaaaaaaaaaaaaaaaaaaaaaaaaaaaaaaaaaaaaaaaaaaaaaaaaaaaaaaaaagggggggctttttttaaagggtccaagtttttttcccggggggggggggggaaaacttttttttttggggcccctaaatttattttcggggccgggtttttacaactgttggattgggaaaaacttggggttccccaatttttttcctttggagaaaatcccctttttccccgggggggttattcgaaaagggccctccacgatccctttttccaaaattttccccccctttaggggcaatgggcccccccctttaggggcccttttagccggggggttttggggttttccccccgggtggccctttttttttggagggcctttaccccccgttttttcctttttttcccttttttttcccccaagttggggggttttcccccaaaattttttaaagggggg

SEQ ID NO: 7356 - DNA, 582 bp, Zea mays
  unsure (1)..(582): unsure at all n locations; Clone ID: LIB3061-072-Q1-K6-F10
ggtccggattccggtcgcccacgtcgcaaggcttggatttgttgctttctcacgtggagaactctcagctttactgaaatgatggcanaaatgatatctggaaaaccattgtatgttgcatttgcacagcgcaaagaagatagaaaagcgatgttgcaggcacagttttctcagatgcgccctgctgtaccaatgacacccactctagccccacgccttccaatgtactctccgatggctcctcagcaactcttctatggacaagcgccaccagctatgatgccccctcagccaggatttgctttccagcaacagcttgttccaggcatgaggcctgggggtccccatatgccaaattattatgttccggttgtccaacagggccaacagggtccacgcccaggtattaggcgtggagctggagcccagggccagcaacctgtgccaccatttcagcagcagattcttccgcgaggacggatgtaccgttacccaactggtcgcaacatgcctgaagctccagcgatgccaggggttgctggaggtatgattcaggcatatgatatgggaggcttccctgtg

SEQ ID NO: 7357 - DNA, 588 bp, Zea mays
  unsure (1)..(588): unsure at all n locations; Clone ID: LIB3061-072-Q1-K6-F11
agcgttccgcagaagttcatgttcaacaacaacaggggggggggggagcaccaccaccaacaacaacaacaacagcaccaacaacaacatcaatgtgaaggccaacaacaacatcaccaacaatcacaaggccatgtgcaacaacacgaacagagccatgagcaacaccaaggacagagccatgagcgggggggggagacaacaattccagggtcatgacaagcagcaacaaccacaacagcctcagcaatnnatcagcagggcccaggaaaaatcacaacagcaacaatgtcattgccaggagcagcaacagactacaaggtgcagctataactactatagcagtagctcaaatctaaaaaattgtcatgaattcctaaggcagcagtgcagccctttggtaatgccttttctccaatcacgtttgatacaaccaagtagctgccaggtattgcagcaacaatgttgtcatgatcttaggcagattgagccacaatacattcaccaagcaatctacaacatggttcaatccataatccaggaggagcaacaacaacaaccatgtgagttatgtggatctcaacaagc

SEQ ID NO: 7358 - DNA, 628 bp, Zea mays
  unsure (1)..(628): unsure at all n locations; Clone ID: LIB3061-072-Q1-K6-F12
cctccctttccagttacccttcaatggnnngcttcgnaacacnnccagctgtngnncaagccnntataggctacnannacaagcgcttnnngcggcgagcccgtcttnagnaacaacccaatnntgcccaattaccaaccaacaatncnncttagcacatnctnaactcatggcgagaacgcatggcgagactgcatgcagcaaccaanngcactgnagnnccacctnagnnccgtggtagaaaaccctnatnncgcctnnacttgnnncaacaaccanngctgcnnttgcatttccaacnnccactntnngctttgngnncaaacgtnagncnntgcatacccnnnacaacaanctaacagtnntgcaactnagtttcnnngccagcgnnctcagtcnnaactagccccatggtgaaaaccctatcgnncctacctacannacagcaacaacnnttctttcaatcnnnagcccgctcgcttatnngggccccatgcacctacnnatacctgcannacaacagttgnnttgcaacataccatgttgctgcaacaaaaattgtaccagcttttcttactcagnnctagctgnntggcaaacnncctgctgcnnctacttgnncaacaac

SEQ ID NO: 7359 - DNA, 454 bp, Zea mays
  unsure (1)..(454): unsure at all n locations; Clone ID: LIB3061-072-Q1-K6-F2
gnacatttcttccattcaacccaactgtctatactgaccctgctgcttatttgcagcaacaacaactactaccattcagccagctagctactgcctactctcagcagcaacaatttcttccatttaaccaattggccgcactgaacccctctgcttatttccagcagcaaatactactaccatttggccagctagctacaacaagccccgcttccttcttgacacaacaacaagtgcttccgttctaccagcagtttgtggctaaccccgcaaccctcttacaactgcaacagttgctgccctttgtccaacttgctttgacaaacccagcagccttctaccaacaacacatcattggcggtgccctcttttagattgcttattagttgtaattcaataatgaagttttttggctgatgtatgtggcctcctagaaataagaagttatatttcc

SEQ ID NO: 7360 - DNA, 578 bp, Zea mays
  Clone ID: LIB3061-072-Q1-K6-F3
cacaaccatctattgcttacttctgggccgcgtggctcttaccagccgtgtcttcagtgggtgaaacccctattgcatcaaccgtacggcatccaacaggcaatccggacaaggctgtcacccttatcacggttgttcctccaacaacccacactcctattacagcacatacctttggtggggggggggggcacataacatcaggccgacagccgctacgacaacttgggctcgcaaaccttgctgcatactgctcagcaacatgctttatcttgcattcaaccaattggctgcattgcactctgctggttatttgcaacaccaattcccattcagccagctagttggtgcctccccagcagcactttattccattcaaacacctaaccaacattgaactctgatgcttatttacagtcctgagccgctactcccattctacacaactacctgttgtgtagccccgctgccttctggacacaccaacacaggatgggcgctctacctccacgctatgcttaaccttggcaccgtcctaccacttccgacaatcgctgccatgcatacccacttgtttt

SEQ ID NO: 7361 - DNA, 539 bp, Zea mays
  Clone ID: LIB3061-072-Q1-K6-F4
caaagttgcacagtttctaccgcgctcatcaatagccatggtgaaccctatcgcctacctacaacagcaacaacttctttcatctagcccgctcgctatgggcaatgcacctacatacctgcaacaacagttgttgcaacaacagttgctgcaacaaattgtaccagctcttactcagctagctgtggcaaaccctgctgcctacttgcaacaactacttccattcaaccaactgactgtgtcgaactctgctgcgtacctacaacagcgacaacagttacttaatccactagcggtggctaacccattggtcgctgccttcctacagcagcaacaattgctgccatacaaccagttctctttgatgaaccctgccttgtcgtggcagcaacccatcgttggtggtgccatcttttagattacatatgagatgtactcgataatggtgccctcatagcggcatgtgtttcctaaaaataatcaatatattgattgagatttatctcgatatacaaaaaagaaaaaaaaaaaaaagaaaa

SEQ ID NO: 7362 - DNA, 569 bp, Zea mays
  unsure (1)..(569): unsure at all n locations; Clone ID: LIB3061-072-Q1-K6-F5
gnaccaactagcaacatagnaagcacaatagtgtaccaacaatggcagccaaaatttttgcctccttatgctccttggtctttctgcaagtgctgctacggcgaccattttcccacaatgctcacaagctcctatagcttcccttcttcccccgtacctctcaccagcggtgtcttcggtatgtgaaaacccaattcttcaaccctataggatccaacaggcaatcgcagctggcatcttacctttatcacccttgttcctccaacaatcatcagccctattacagcagttacctttggtgcatttattggcacaaaacatcagggcacaacaactacaacaacttgtgctagcaaaccttgctgcctactctcagcaacaacagtttcttccattcaaccaactagctgcattgaactctgcttcttatttgcaacaacaacaactaccattcagccagctatctgctgcctacccccagcaatttcttccattcaaccaactgacagctttgaactctcctgcttatttacagcagcaacaactactaccattcagccagctagctg

SEQ ID NO: 7363 - DNA, 577 bp, Zea mays
  Clone ID: LIB3061-072-Q1-K6-F6
catgccactacccttatcaaccgccccggcctcagcctcatccccagccacacccatgcccgtgccaacagccgcatccaagcccgtgccagctgcagggaacctgcggcgttggcagcaccccgatcctgggccagtgcgtcgagttcctgaggcatcagtgcagcccgacggcgacgccctactgctcgcctcagtgccagtcgttgcggcagcagtgttgccagcagctcaggcaggtggagccgcagcaccggtaccaggcgatcttcggcttggtcctccagtccatcctgcagcagcagccgcaaagcggccaggtcgcggggctgttggcggcgcagatagcgcagcaactgacggcgatgtgcggcctgcagcagccgactccatgcccctacgctgctgccggcggtgtcccccactgaagaactatgtgctgtagtatagccgctggctagctagctagttgagtcatttagcggcgatgattgagtaataatgtgtcacgcatcaccatgggtggcagtgtcagtgtgagcaatgacctgaatgaacaattgaaatgaaaagaaaa

SEQ ID NO: 7364 - DNA, 580 bp, Zea mays
  unsure (1)..(580): unsure at all n locations; Clone ID: LIB3061-072-Q1-K6-F7
gcttctgnatanaagnanactattggactgggtaaggtacaagaaccatgttcagtggactccatggagccatgcaacacagttccatctggagtttcctgggaggtgaggccagatgtagacgctagcgaggagaagaatgaaaaacaagagtcatgtagcaccacagtggacgaagcgcacgaacaagggaaaactgagggacagattgaaattcaggtagcatcatcgatggatatgataagtgatgaagcttttacagctgacaaccaggagcatggaattggagaatcaaatgttacttcagtggaacaagtgactgaagaagagaaaccagcatctgaggatgaagtaaaagagccaccattggtgaactccacggcactattgtatgatactacttcatcaggggattccagtggactgaaacaatacacagcttcgaccgatcagaatctctatgctgaatcaaatacagggtcgtctcctgcatccactgaggacattgacataagtactctggctgtggaaagtgaagtggcggctgagaatgatggcccaattaacagtcaggtgcatg

SEQ ID NO: 7365 - DNA, 427 bp, Zea mays
  Clone ID: LIB3061-072-Q1-K6-F8
acagcataaaatattgtatttgcctgctggtaatatgcaaaccaaatcatgccagtttaaaaggaggcactgcttcttggagacagcaaatctgattggagctactgctgcccaatgtgcaccatgcatgttgtaacagcacacataaatgagcctgtcgacagaaatgttgagccgtgcatagcagcagcataaaaatactctccattcttttttaatttttttatttgtcgttttttgaaacaataggcgacaaatattcaagaacggaggtagtattgtatcaatatgcaaaccaaatcatgccagtttaaaaggaggcactgcttcttggagacagcaaagtctgattttgagctaactgctgcccaatgtgcagccatgcatgtatgtaacagcacaacaataaattgagcctgtcgaacag

SEQ ID NO: 7366 - DNA, 574 bp, Zea mays
  unsure (1)..(574): unsure at all n locations; Clone ID: LIB3061-072-Q1-K6-F9
gtcagtgcagtttttctcctacaccactctggaggagctggacgaggagcttgcagaagagtttgacttggatcatccggacaggaggtggctctggccacaaactggagaggtcttctggcagggtctctatcagagggagcggatcatgcggcagcaggagaaggagcggcggaagcagcagagcagagagaagatccagagaatcaagaatagagctcggcaaaagacgctgggaaagtatataaagccaccgcctgatgatacaggtggctcgaacgatacaacatcagtagatttgtagcattttgaccatgatgattcttaccgtggggaatttggttcattatttgtaacggctgtccttggtcctcactgagaacccccggacggttgtgaatattttgtcagttttgtcgtgccctctggtgtctgggtgctttacaggcgattttgtaacatatctaggccattgagttgtgaagctgccatcttaggtgtaaatttgggtttccgtnnnnaaaaaaaaaaaaaaaaaaaaaaaaaaaaaaaaaaaaaaaaaaagggggcggcc

SEQ ID NO: 7367 - DNA, 413 bp, Zea mays
  unsure (1)..(413): unsure at all n locations; Clone ID: LIB3061-072-Q1-K6-G1
ggcacaacaactacaacaacttgtgctctgaagttttgttgcctactatgagcaacagcagtttgttgcattcaaccaactagctgcattgaactctgcttcttatttgcaacaacaacaactaccattcagccagctatctgctgcctacccccagcaatttcttccattcaaccaactgacagcattgaactctcctgcttatttacagcagcaacaactactaccattcagccagctagctggtgtgagccctgctaccttnttgacacaaccacagttgttgccgttctaccagcacgctgcgcctaacgctggcacccttttacaactgcaacaattgctgccattcaaccaacttgctttgacaaacccagcagnattctaccaacaacccatcattgggggtgccc

SEQ ID NO: 7368 - DNA, 559 bp, Zea mays
  unsure (1)..(559): unsure at all n locations; Clone ID: LIB3061-072-Q1-K6-G10
atttgagcttcanaacacactggggggggcgctacacgacctaacacatggcttccaagacttatccctccttgcgcttcttgccctttttgtgagtgcaacaaatgcgttcattattccacaatgctcacttgctccgagtgccattattccacagttcctccctgggggggctgcaatgggcttcgaacacccagctgtgcaagcctataggctacaacaagcgcttgcggcgagcgtcttagaacaaccaattgcccaattacaacaacaatccttggcacatctaaccatacaaaccatcgcaacgcagcagcaacaagcactgagccacctagccgtggtgaaccctatcgcctacttgcaacaacagctgcttgcatccaacccacttgctttggcaaacgtagctgcataccaacaacaacaacagttgcaacagtttctaccagcgctcagtcaactagccatggtgaaccctatcgcctacctacaacagcaacaacttctttcatctagcccgctcgctatgggcaatgcacctacatacctgcaacaa

SEQ ID NO: 7369 - DNA, 542 bp, Zea mays
  Clone ID: LIB3061-072-Q1-K6-G11
ggggggcgcggcatggcagccaaaatttttgcctccttatgctccttggtatttctgcaagtgctgctacggcgaccattttcccgcaatgctcacaagctcctatagcttcccttcttcccccgtacctctcaccagcggtgtgctgggggtagggtgagaaacccaattcttcaaccctacaggatccaacaggcaatcgcagctggcatcttacctttatcacccttgttcctccaacaatcatcagccctattacagcagttacctttggtgcatttattggcacaaaacatcagggcacaacaactacaacaacttgtgctagcaaaccttgctgcctactctcagcaacagcagtttcttccattcaaccaactagctgcattgaactctgcttcttatttgcaacaacaacaactaccattcagccagctacctgttgcctacccccaacaatttcttccattcaaccaactggcagcattgaactctcctgcttatttacagcagcaacaactactaccattcagccagctagc

SEQ ID NO: 7370 - DNA, 563 bp, Zea mays
  unsure (1)..(563): unsure at all n locations; Clone ID: LIB3061-072-Q1-K6-G12
gcaacatanaagcacaatatgtaccacagtgggagccaaaaattttgcttccttatgctccttggtctttctgcaagtgttgctaccgcnaccattttcccacaatgctcacaagctcctatagcttcccttcttcccccatacctctcaccagcggtgtcttcaatgtgtgaaaccgcaggtgttcaaccctacaggatccaacaggcaatcgcaacaggcatcttaccattatcacccttgttcctccaacaaccgtcagccctattacagcagttacctttggtccatttggtggcacaaaacatcagggcacaacaactacaacaacttgtgctaacaaaccttgctgcatactctcagcaacatcagtttcttccattcaaccaactggctgcattgaactctgctgcttatttgcaacaacaattaccattcagccagctagttgctgcctacccccagcaatttcttccattcaaccaactagcagcattgaactctgctgcttatttacagcagcaacaactactaccattcagccagctagctgatgtgagccc

SEQ ID NO: 7371 - DNA, 578 bp, Zea mays
  unsure (1)..(578): unsure at all n locations; Clone ID: LIB3061-072-Q1-K6-G2
naacgccagcccttactttggtgcagtcattggtacaaaccatcaagcacagcagctgcagcaactcgtgctacctgtgatcaaccaagtagctctggcaaacctttctccctactatcagcaacaacaatttcttccattcaaccaactatctacactgaaccctgctgcttatttgcagcaacaactattaccattcagccagctagctactgcctactctcatcaacaacaacttcttccatttaaccaattggccgcactgaacctcgctgcttatttgcagcagcaaatattactaccatttagccagctagctgcagcaagccgtgcttccttcttgacacagcaacagttgctgcctttctaccagcagtttgcggctaaccccgcaaccctcttacaactacaacaattgttgccctttgtccaacttgctttgacaaacccagcagcctcctaccaacaacacatcattggtggtgccctcttttagattgcttattagttgtaattcaataataaagttttttggatgatgtatgtggccaaccagaaataagaagttacatttccag

SEQ ID NO: 7372 - DNA, 568 bp, Zea mays
  unsure (1)..(568): unsure at all n locations; Clone ID: LIB3061-072-Q1-K6-G3
cgnagctctagctccagnatcgacatgccgttcgcagcctcaaggcgtcacagcagcagcacagccgtgtggccaccaacgggagggccgtggcggtgtgcgcgggtcacgcgggcgtgcccgacgaggtggcgcggcaccacgagcacgctgtggcagcggggcaatgctgcgccgccatggtgcagtccatcgcagcgccggtggacgcggtgtggtcgctggtgcgtcgcttcgaccagccgcagcggtacaagcgcttcatcaggagctgccacctcgtggacggcgacggcgccgaggtggggtccgtgcgggagctcctgctcgtgtccgggctgcccgccgagagcagccgcgagcggcttgagatccgggacgacgagcggcgggtgatcagcttccgggtcctgggcggcgaccaccgcctggccaactaccgctccgtgaccaccgtgcacgaggcggcgccgtcgcaggacgggcgcccgctcaccatggtcgtcgagtcctacgtggtggacgtgccgccggggaacaccgtcgaggagacgcgcatcttcgtggc

SEQ ID NO: 7373 - DNA, 538 bp, Zea mays
  Clone ID: LIB3061-072-Q1-K6-G4
gctgggtttattaagtgactgactattggtattgcatacctttagacatcatattcatttgtaatacagctgttcaaagttgcatttgtcttgaaagatatattttcagtttgaggtaggatattatatgtgcctaacttttcaatgcaaggcatgaaattctatgcttatcattcaaatggctcgttctgtacaattttagttaggtattggagttggtatcaggacgacctgacagtttacaatttgcaacaatgtatctatttctcaagattgctgatattgatgttgttacatttttcctgttttcgttatcattggtgtggttctacatttttgttagctatttagcatgatatttgacttttattggattggttgagggaatcccatagaggcaacattaaaatgaatctaggggatccgaggagtgaaataggatataaatttttttataggaaaatagtaccatctagtgttatccatgttttacatactaatttgtgataatgcatactacatctagtgttatccgctc

SEQ ID NO: 7374 - DNA, 565 bp, Zea mays
  unsure (1)..(565): unsure at all n locations; Clone ID: LIB3061-072-Q1-K6-G5
tagcaacatagnaaagcacaatagtgtaccaacatggcagccaaaaattttgcttccttatgctccttggtctttctgcaagtgttgctaccgcnaccattttcccacaatgctcacaagctcctatagcttcccttcttcccccatacctctcaccagcggtgtcttcaatgtgtgaaaccccaattgttcaaccctacaggatccaacaggcaatcgcaacaggcatcttaccattatcacccttgttcctccaacaaccgtcagccctattacagcagttacctttggtccatttggtggcacaaaacatcagggcacaacaactacaacaacttgtgctagcaaaccttgctgcatactctcagcaacatcagtttcttccattcaaccaactggctgcattgaactctgctgcttatttgcaacaacaattaccattcagccagctagttgctgcctacccccagcaatttcttccattcaaccaactagcagcattgaactctgctgcttatttacagcagcaacaactactaccattcagccagctagctgatgtgag

SEQ ID NO: 7375 - DNA, 565 bp, Zea mays
  Clone ID: LIB3061-072-Q1-K6-G6
atgagaacaatagcaacatagaagcacatagtgtaccaacaatggcagccaaaaattttgcttccttatgctccttggtctttctgcaagtgctgctaccgcaaccattttcccacaatgctcacaagctcctatagcttcctttcttcccccatacctctcaccagcggtgtcttcagtatgtgaaaacccaattcttcaaccctacaggatccaacaggcaatcgcagcaggcatcttacctttatcacccttgttcctccaacaaccgtcagccctattacagcagttacctttggtgcatttgttggcacaaaacatcaaggcacaacaactacaacaacttgtgctaggaaaccttgctgcctactctcagcaacagcagtttcttccattcaaccaactggctgcattgaactctgctgcttatttgcaacaacaactaccattcagtcagctagctgctgcctacccccagcaatttcttccattcaaccaactggcagcattgaactctgctgcttatttacaacagcaacagctaccaccattcagccagctagct

SEQ ID NO: 7376 - DNA, 565 bp, Zea mays
  unsure (1)..(565): unsure at all n locations; Clone ID: LIB3061-072-Q1-K6-G8
gcaaattgcaccaanaaaccatcgggggggcgtgggacaggggaattaatggcgtcgtcgtctagcagcagccaccgccgcctcatcctcgcagccgccgtcctgctctccgtgctcgcggctgccagcgccagcgccgggacctcctgcgtgccggggtgggccatcccgcacaaccgggtgccgagctgccgctggtacgtgaccagccggacctgcggcatcgggccgcgcctcccgtggccggagctgaagaggagatgctgccgggagctggcggacatcccggcgtactgccggtgcacggcgctgagcatcctcatggacggcgcgatcccgccgggcccggacgcgcagctggagggccgcctagaggacctgccgggctgcccgcgggaggtgcagaggggattcgccgccaccctcgtcacggaggccgagtgcaacctggccaccatcagcggcgtcgccgaatgcccctggattctcggcggcggaacgatgccctccaagtaactgcgaagagcatagtgcatgaggaatgagcttgtagctagctcatatg

SEQ ID NO: 7377 - DNA, 583 bp, Zea mays
  unsure (1)..(583): unsure at all n locations; Clone ID: LIB3061-072-Q1-K6-G9
cgtccgcnaggggccatgtgcaacaacacgnacaggagcgtggagcaacaccaagnacagagccatgagcaacaacatcaacaacaattccagggtcatgacaagcagcaaccaaccacaacagcctcagcaatatcagcaggggcccaggaaaaatcacaacagcaacaatgtcattgccaggagcagcaacagactacaaggtgcagctataactactatagcagtagctcaaatctaaaaaatgtcatgaattcctaaggcagcagtgcagccctttggtaatgccttttctccaatcacgtttgatacaaccaagtagctgccaggtattgcagcaacaatgttgtcatgatcttaggcagattgagccacaatacattcaccaagcaatctacaacatggttcaatccataatccaggaggagcaacaacaacaaccatgtgagttatgtggatctcaacaagctactcaaagtgcggtggcaatcttgacagcagcacaatacctaccatcaatgtgcggcttgtaccactcatactaccaaaataatccatgcagcagcaatgacattagtggtgt

SEQ ID NO: 7378 - DNA, 575 bp, Zea mays
  unsure (1)..(575): unsure at all n locations; Clone ID: LIB3061-072-Q1-K6-H1
cggnaaggctgctgctggtcggctgaagaagagctcgtgttctaaaagcagggctcccagggtgacaaaaccaactgggtgatgcacgagtacaggctcgaaggcagcggtaggctccctgctagtcctgcatccgcatccggctcagccaccaacatcgctgcggccatgatgaaagcttcagcttcggcttgcaaggatgagtgggtggtctgtcgtgtgttcaacaagaccaccgggatcaagaagacggctgcgccggcataccaggtggccatggccggtcctgagatggatcagaatcagaacaacattccggccatccccatccccatgccgctgcagctgccactgcccgtgcccatgcagatgcaatttcccatcctgccagattttgccatggacccggtggccccctactaccccaacccgaatgccggcgcggggatgatgccgcctatggcattggcaggtatgggtggcgccggcgggctccagatcaacggcgctctgttcggcaatccggtgcccgcgccgctgccgatgaacttctaccaccaccagatgggcatggg

SEQ ID NO: 7379 - DNA, 582 bp, Zea mays
  unsure (1)..(582): unsure at all n locations; Clone ID: LIB3061-072-Q1-K6-H10
agcgtccgccacagcacatanaagtggaggggggggggggcacagnacaacaatggcgaccaagatttttccctccttatgctccttgctctttctgcatgtgttgctaacgcgacaattttccctcaatgctcacaagctcctatagcttcccttcttcccccaaccttcctcaagggtggtgggagtatgtgaaaacccagctcttcagccctataggctccaacaagcaatcgcagcaagcaacatacctttatcacccttgttgtttcaacaatcgccagccctatctttggtgcagtcattggtacaaaccatcagggcacagcagctgcagcaactcgtgctacctgtgatcaaccaagtagctctggcaaacctttctccctactctcagcaacaacaatttcttccattcaaccaactgtctacactgaaccctgctgcttatttgcagcaacaactattaccattcagccagctagctactgcctactctcagcaacaacaattgttgccctttgtccaacttgctttgacagaccgagcggcctnctaccaacaacacatcattggtggtgc

SEQ ID NO: 7380 - DNA, 589 bp, Zea mays
  unsure (1)..(589): unsure at all n locations; Clone ID: LIB3061-072-Q1-K6-H11
agcgtccgcaaatctggncttttctttaacatggggggtgggtctgataatgccgacaaattgacccataatgtggccaaagaaagccaaagcgttaggctagataaggtagatgataagctgtggacatatgcaccaactactacttgactagaagctgaaatctaaggtaggcacaagacttaggggggcagatcattagacccgtgagtagtagcacgggggtttgcaaagccacgaagttaactacttagccaattaaatgatcacactttcctgagagtttacgaacagtgggtttgtctgttttttctttagttgtttggtctagtatttttgtttatgcttcacattagcttcactgttcatggcttcatgctgattgattatccaatttaggttttatgtatcctcacattagctgggttcgtctcatataaaaagaacttggttcttgaagatgcattcaatcaaaatatgctcggttcattccttctggcaaatatccttactggtctggttaatctctcagttaacacgctctctgcttcttccctcaccgccttcatgattctatgacctgacgtat

SEQ ID NO: 7381 - DNA, 588 bp, Zea mays
  unsure (1)..(588): unsure at all n locations; Clone ID: LIB3061-072-Q1-K6-H12
natgnanaccaactagcaacataggaaggcggggggggtaccaacaatggcagccaaaatttttgcctccttatgctccttggtctttctgcaagtgctgctacggcgaccattttcccgcaatgctcgcaagctcctatagcttcccttcttcccccgtacctctcaccagcgggggggggggggggtggaaaacccaattcttcaaccctacaggatccaacaggcaatcacagctggcatcttacctttatcacccttgttcctccaacaatcatcagccctattacatcagttacctttggtgcatttattggcacaaaacatcagggcacaacaactacaacaacttgtgctagcaaaccttgctgcctactctcagcaacagcagtttcttccattcaaccaactagctgcattgaactctgcttcttatttgcaacaacaacaactaccattcagccagctacctgctgcctacccccagcaatttcttccattcaaccaactggcagcattgaactctcctgcttatttacagcagcaacaactactaccattcagccagctagctggtgtgagccctgc

SEQ ID NO: 7382 - DNA, 535 bp, Zea mays
  unsure (1)..(535): unsure at all n locations; Clone ID: LIB3061-072-Q1-K6-H2
actttctgatttgggccaaggaaatgacctgtattcaaccaaccagnactgtgtaaagagcttgttgngaaataaagtagacaaggaaagtgagagggctgtcacgaaaaagagggaattgaatttgccagggaatacggttgtttgtttcttagaatgcagtgcgaaaacaaaagtaaacgtagaacagtgttttgaggaactggttctaaagatcttagacacgccaagcctcctggcggattcttcctcagcaggggtcagcaagaagaacatcttcaagcagaaggctccagaagctgacgccgccacaggcagctgctgttaacatggttttggtcctgtatattgctatatgtggtgaagacaattggcagcagctatataatgatgtatcaagttaaacttacctgacaatatgtagtcttgcctcccaaccgcagctaagtagcagaggcacgggtgggtggcatcaataccggcatgatacagtatcagacactgtcatctatataagaaaagccatacttcggtt

SEQ ID NO: 7383 - DNA, 590 bp, Zea mays
  unsure (1)..(590): unsure at all n locations; Clone ID: LIB3061-072-Q1-K6-H3
ccaacctgctggccagcaccctggccaacatcaacccggtcgcgcatgcggcgngagtgatccccaacctcacccggatggaccgcggcgaggcctggccgctgttcggccacttcaccggcgtggtcgccaacatggcgcaggcgctggatggggaacggctggcgctggccggggcgctgggattcacgctgccgaccctggcgcagcattactcgcgctcgtaccacgtgccgctgggcccgttggaggacatcgcgcgggccatcgacgcacgcggcgccggcccgctcggcccggcccggctggcgcatcgctacgtgctggaggacgtgccgttcggcctggtgttccaggaacggctggcgcgcctcttgggcatcgattgcccgctgctgtccgcctgcatcaccctgctggaggcggtctacgccgaatcgttccgcgaccgcaatgacctgctggccgcgctgctgcccgacggcatgtcggccgaggcgctggtggcggcctgcaggagcgcgtgcgcggcatcgtgaaagcgctcgatgatgtcgtcctggtgccacggcgtccggtacaccatcacg

SEQ ID NO: 7384 - DNA, 583 bp, Zea mays
  unsure (1)..(583): unsure at all n locations; Clone ID: LIB3061-072-Q1-K6-H4
attgaaaccaacagcaacatagnaaagtggaatccagtagcaacaatagagcaacaatggcgaccaagatactttccctccttatgctccttgctctttctgcatgtgttgctaacgcgacaattttccctcaatgctcacaagctcctatagcttcccttcttcccccataccttccatcaatgatagcttcagtatgtgaaaacccagctcttcaaccctataggctccaacaagcaatcgcagcaagcaacatacctttatcacccttgtttcaacaatcgccagccctatctttggtgcagtcattggtacaaaccatcaaggcacagcagctgcagcaactcgtgctacctgtgatcaaccaagtagctctggcaaacctttctccctactatcagcaacaacaatttcttccattcaaccaactatctacactgaaccctgctgcttatttgcagcaacaactattaccattcagccagctagctactgcctactctcatcaacaacaacttcttccatttaaccaattggccgcactgaacctcgctgcttatttgcagcagcaaatattactacc

SEQ ID NO: 7385 - DNA, 583 bp, Zea mays
  unsure (1)..(583): unsure at all n locations; Clone ID: LIB3061-072-Q1-K6-H5
agcgtccgcactagcacatanaagcacataggggccaacatggcagccaaaaattttgcctccttatgctccttggtctttctgcaagtgctgctacggcgaccattttcccgcaatgctcgcaagctcctatagcttcccttcttcccccgtacctctcaccagcggtgtcttcggtgtggggaaaacccaattcttcaaccctacaggatccaacaggcaatcgcagctggcatcttacctttatcacccttgttcctccaacaatcatcagccctattacaacagttacctttggtgcatttattggcacaaaacatcagggcacaacaactacaacaacttgtgctagcaaaccttgctgcctactctcagcaacagcagtttcttccattcaaccaactaggttcattgaactctgcttcttatttgcaacaacaacaactaccattcagccagctacctgctgcctacccccagcaatttcttccattcaaccaactagcagcattgaactctcctgcttatttacagcagcaacaactactaccattcagccagctagctggtgtgagccctgcta

SEQ ID NO: 7386 - DNA, 583 bp, Zea mays
  unsure (1)..(583): unsure at all n locations; Clone ID: LIB3061-072-Q1-K6-H6
tgnacattcagnaaacacaccaagcgagcgcactagcaacgacctaacaacaatggctaccaagatattagccctccttgcgcttcttgccctttttgtgagcgcaacaaatgcgttcattattccacaatgctcacttgctcctagtgccattattccacagttcctcccaccagttacttcaatgggcttcgaacacctagctgtgcaagccaacatgcaacaacaagcgcttgcggcgagcgtcttacaacaaccaattgcccaattgcaacaacaatccttgccacatctaacaatacaagccatcacaacgcaacagcaacaacagttcctaccagcactgagccacctagccatggtgaaccctgccgcctacttgcaagagcagctgcttgcatccaacccacttgctctggcgaacgtagttgcaaaccagcaacaacaacagctacaacagtttctgccaacgctcagtcaactagccatggtgaaccctgccgcctacgtacaacaacaacaactgctttcatctagcccgctcgctgtgggcaatgcacctacatacctgcaacaacaattg

SEQ ID NO: 7387 - DNA, 678 bp, Zea mays
  unsure (1)..(678): unsure at all n locations; Clone ID: LIB3061-072-Q1-K6-H7
aaaaaaaaaaaaaaaggggggagaaaaaaaaaaaanaaaaaaaaaanaaaaaagaaaaaaaaaaaaaaaaaaaaaaaaaaaagaaaaaaaaaaaaaaaaaanagaaaaaaaaaaaaaaaaaaaaaaaaaaaaaaaaaaaaaaaaaannaaaaaagggggaaaaggganagagggnaaaaaaanaaaaaaaaaaaaaaaaaaaaaaaaaaaaaaaaaaaaaaanaaaaaaaaaaaaaaaaaaaaaaaagaaaaaaaaaaaaaaaaaaaaaaaaaaaaaaaaaaaaaaaaaanaaaaaaaaaaaaaaaaaaaaaaaaaaaaaaaaaaaaaaaaaaaaaaanaaaaaaaaaaaaaaaaaagaaaaaaaaaaaaaaaaaaaaaaaaaaaaaaaaagaaaaaaaaaaaaaaaaagaaaaaaaaaaaaaaaaaaaaaagaaaaagagaaaagaaaaaaaagaaagaagaaaaaagaagaaaaaaaaaagagaaaagaagaaaaaaaaaaaaaaaaaaaaaaaaaaaaanggaagaaagaaaaaanaaagaaaaaaaaaaaaagaagaaagaaaanaaaaaaanaaagaaaagaaagagaggaaggaaaaaagaaaaagaaaaaaaaaagaaaaaaaaagaagaagacgggagaaaaaaaagcgcaccccccccccccccccccc

SEQ ID NO: 7388 - DNA, 587 bp, Zea mays
  unsure (1)..(587): unsure at all n locations; Clone ID: LIB3061-072-Q1-K6-H8
ntatcatcttatagtataggcaccagatgagatgctgcaacatcaattatctaactccaaaaccatgaagctggtgcttgtggttcttgctttcattgctttagtatcaagtgtttcttgtacacagacaggcggctgcagctgtggtcaacaacaaagccatgagcagcaacatcatgcggagggagcatcatccacaaaaacaacaacatcaaccaccaccacaacatcaccagcagcagcaacaccaacaacaacaagttcacatgcaaccacaaaaacatcagcaacaacaagaagttcatgttcaacaacaacaacaacaaccgcagcaccaacaacaacaacaacaacaacagcaccaacaacaacatcaatgtgaaggccaacaacaacatcaccaacaatcacaaggccatgtgcaacaacacgaacagagccatgagcaacaccaaggacagagccatgagcaacaacatcaacaacaattccagggtcatgacaagcagcaacaaccacaacagcctcagcaatatcagcagggccaggaaaaatcacaacagcaacaatgtcattgccaggagcag

SEQ ID NO: 7389 - DNA, 433 bp, Zea mays
  Clone ID: LIB3061-072-Q1-N6-A1
cgacacaacacgggctcttaataataaaggagatataattggcgcttacccacgatggtttgtcggctaaaaactgtaggaaacagcacttgtagatgataaaaaaagccaaaacttgcggaagtttgacaaaaacacccctttagtacttcgaagaggctgaaacccatttactggtgcggctcctattaaggctccggagtcttatcttcttccttgggagcaggtgcaaggccagagtccccaaaataaaccggggaggtaacagcaaatttgtttgggaccttgagaaactccttgatcttgccagcacgtgggtatgagtaggctgttttgacggcaaataaaagcacatttttgttcccattggtgaacatgtggggcacaactgcatgggttgggaacgagctccccggttaccgggaagaaacca

SEQ ID NO: 7390 - DNA, 482 bp, Zea mays
  Clone ID: LIB3061-072-Q1-N6-A10
aaaataacaagaaatatatatacacaaaagattgtcttcttaaatatgtccgtccatcatcaacaaacatacatatgaacataaataattacacattcttgtaatgaccacccccaaatcgaaaacaaagaaaaccccacacgacaaatgtacacgcggttcatcgagacgacgacggtacaaagaataacaaattaatgtccatgcatgccaagtgtttgtctgcttttacttaataacttttcactccgtgcggctacgcttaagtatcacggcaacttaatttaatttaccagcagcaagcaagcaagcaagcaagggagcgaggagggagagctttgcatgctcgatccgtcaacaggatcacttctcctcagcagcagctgctgcttctgctggcggcgccggctcttcggcagccgggttatcctcctcttccttcttctctttttccttcttatactttaccaccggcgcctccg

SEQ ID NO: 7391 - DNA, 523 bp, Zea mays
  Clone ID: LIB3061-072-Q1-N6-A11
atcgagataaatctcaatcaatatattgattatttctaggaaacacacgtcggtatgagggcaccattatcgagtacatctcatatgtaatctaaaaaaggcacctccaacgatgggttgctgcctcggcaaggacaggattcatcaaagagaactggttgtatggcagcaattgttgctgctgtaggaaggcggcgaccaatgggttagccactaccaatggattaagtaactgttgtcgctgttgtaggtacccagcaaagttcgacagagtcagttggttgaatggaagcagctgttgcaagtaggcaacagggtttgccacagctagttgagtcagagctggtacaatctgttgcaacaattgttgttgcaggtatgtaggtgcattgcccacagcgagcgggctaaatgaaaacagttgttgttgttgtacgtaggcggcagggttcaccatggctagttgactgagcgttggcaaaaactgttgtaactgttgttgttgctgggttgcaactacctt

SEQ ID NO: 7392 - DNA, 108 bp, Zea mays
  Clone ID: LIB3061-072-Q1-N6-A12
aaccctggtagctagtactggtcgccgccgggaaaaaatgctgcactcctggggctccgacagccggcacatcatcggcaaccccgcggcgtactcccgggccttcgt

SEQ ID NO: 7393 - DNA, 519 bp, Zea mays
  Clone ID: LIB3061-072-Q1-N6-A2
agaaagtactttcttatttctgggaagccacaaacatcatccaaaaaacttcattattgaagtataactcataagcaatctaaaaggggcaccaccaatgatgggttgttggtagaacgctgttgggtttgtcaaagcaagttggttgaatggcagcaattgttgcagttgtaagagggtgccagcgttaggcgcagcgtgcaggtagaacggcaacaactgttgttgtgtcaagaaggcaacagggctcacatcagctagctggctgaatggtggtagctgttgctgttgtaaataagcagcagagttcaatgctgccagttggttgaatggaagaaattgctgggggtaggcagcagctagctgactgaatggtagttgttgttgcaaataagcagcaaagttcaatgcagccagttggttgaatggaagaaactgctgttgctgagagtaggcaacaaggtttcctagcacaagttgttgtaattgttgtgccttgatgttttgtgccaacaaatg

SEQ ID NO: 7394 - DNA, 547 bp, Zea mays
  Clone ID: LIB3061-072-Q1-N6-A4
agaaatgtactttcttatttctgggaagccacaaacatcagacaaaaactttattattgaactataactcataagaaatctaaaagagggcaccaccaatgatgggttgttggtagaatgctgttgggtttgtcaaagcaagttggttgaatggcagcaattgttgcagttgtaagagggtgccagcgttaggcgcagcgtgctggtagaacggcaacaattgtggttgtgtcaagaaggtagcagggctcacaccagctagctggctgaatggtagtagttgttgctgctgtaaataagcaggagagttcaaagctgtcagttggttgaatggaagaaattgctgggggtaggcagcagatagctggctgaatggtagttgttgttgttgcaaataagaagcagagttcaatgcagctagttggttgaatggaagaaactgttgttgctgagagtaggcagcaaggtttgctagcacaagttgttgtagttgttgtgccctgatgttttgtgccaataaaagcaccaaaagtaactgctgtaatag

SEQ ID NO: 7395 - DNA, 375 bp, Zea mays
  Clone ID: LIB3061-072-Q1-N6-A5
agcctcagccacaaaatcatgattagcatttagcatttggaacaccttacagatgtatcggtcaatcttgacagctctataatctacaaatgcccttaggaaacactaactggaaaccaggatttacataccacccgaatttgttaaccggtcgattgggtacccccaccatctccacatgggttaactttatctgagtttcatttgggtgcctttttgtaaagagaccccgaccaaaccattttacgggcattcatttacatttgggggtacctcccaaaatgcaaatgccttccaaggggccctacaaagcttgccgggccccccaacgggcaaccatccaatcaggggttaaaacacgcccctggcaaaaat

SEQ ID NO: 7396 - DNA, 554 bp, Zea mays
  Clone ID: LIB3061-072-Q1-N6-A6
agaactggaaagtaacttcttatttctggttggccacatacactcatccaaaaaactttattattgaattacaactaataatcaatctaaaagaggcaccaccaatgatgtgttgttggtaggaggctgctgggtttgtcaaagcaagttggacaaagggcaacaattgttgtagttgtaagagggttgcggggttagccgcaaactgcttgtagaaaggcagcaactgttgctgtgtcaagaaggaagcacgacttgctgcagctagctcgctaaatggcagtagtatttgctgctgcaaataagcagcggggttcagtgcggccaattggttaaatggaagaagttgttgttgctgagagtaggcagtagctagctggctaaatggtaatagttgttgctgcaaataagcagcagggttcagtgtagacagttggttgaatggaagaaattgttgttgctgagagtagggagaaaggtttgccagagctacttggttgatcacaggtagcacgagttgctgcagctgttgtgccctgatggtttgtaccaat

SEQ ID NO: 7397 - DNA, 512 bp, Zea mays
  Clone ID: LIB3061-072-Q1-N6-A7
agaaagtactttcttatttctgggaagccacaaacatcagacaaaaaactttattattgaactataactcataagaaatctaaaagagggcaccaccaatgatgggttgttggtagaacgctgctggggttggcaaagcaagttggttgaatggcagcaattgttgcagttgtaagagggtgccagcgttaggcgcagcgtgctggtagaacggcaacaactgtggttgtatcaagaaggtagcagggctcacaccagctagctggctgaatggtagtagttgttgctgctgtaaataagcaggagagttcaatgctgccagttggttgaatggaagaaattgctgggggtaggcagcaggtagctggctgaatggtagttgttgttgttgcaaataagaagcagagttcaatgcagctagttggttgaatggaagaaactgctgttgctgagagtaggcagcaaggtttgctagcacaagttgttgtaattgttgcgccctgatgttttgt

SEQ ID NO: 7398 - DNA, 405 bp, Zea mays
  Clone ID: LIB3061-072-Q1-N6-A8
ggggaaaatctcaatcaatatattgattatttctaggaaacacatgccggaatgagggccccattttcgagtacatctcatatgtaatctaaaagatgggacctccaacgatgggttgctgcctcgacaagacagggtttatcaaaaagaactggttgtttggcaacaattgttgctgctgtaggaaggcagccaccaatgggttaaccactgctagggggttaaataactgttgtcggtgttgtaggtacccaacaaagttcgacataatcagttggttgaaaggaaacaactgttgcaagtaggcaacaaggtttgccacaactaggtgagtcagagctgggacaatttgttgcaacaattgttgttgcaggtatgtaggtgcattggccacaacgagcgggc

SEQ ID NO: 7399 - DNA, 544 bp, Zea mays
  Clone ID: LIB3061-072-Q1-N6-B1
ggaaatataacttcttatttctaggaggccacatacatcagccaaaaacttcattattgaattacaactaataagcaatctaaaagagggcaccgccaatgatgtgttgttggtagaaggctgctgggtttgtcaaagcaagttggacaaagggcagcaactgttgcagttgtaagagggttgcggggttagccacaaactgctggtagaacggaagcacttgttgttgtgtcaagaaggaagcggggcttgttgtagctagctggccaaatggtagtagtatttgctgctggaaataagcagaggggttcagtgcggccaattggttaaatggaagaaattgttgctgctgaaagtaggcagtagctagctggctgaatggtagtagttgttgttgctgcaaataaacagcagggttcagtatagacagttggttgaatggaaaaaattgttgttgctgaaagtagggggaaaaggtttgccagagctacttgggctgatcactggtagcacgagttgctgcaactgttctgcccctgaggtt

SEQ ID NO: 7400 - DNA, 562 bp, Zea mays
  Clone ID: LIB3061-072-Q1-N6-B10
ggtgtgtttttttttaagtgaaacagttgattataaaaagaatagaagaagaacaaagttagcagtcttgtttaggtgcagcaacttgctgactttctcatggaaaggcgctacggacgcacaagcacgaagcccagtttctggcacagcatgtggctgacccgagaggtcaaaaacagccacgggagtattccaaccacaacattgccggtggcagtatcaacacatctccaggaaaacatttttccgaagggctgtagaagatgttgtggaactgcagttacaggagtactccaaaagcacagaacgagcacagcataaattatgaccttagtaaccgacaaaaattttgtgtatttgtcgtataaggattgcttccctttaaggtcatgttcctgcatttttgccagttccttctccttggcagcagccaggcgcttgagtttagcagcttgtgcaaatgtggacggggttgacaactgatcagccttcttgaaaagttggttgatttcaagccgcactttgatctggtcatcactaagtgctccgctctttttggcga

SEQ ID NO: 7401 - DNA, 551 bp, Zea mays
  Clone ID: LIB3061-072-Q1-N6-B2
aagaatctaaaaatgtactttcttatttctgggaagccacaaacatcatccaaaaaacttcattattgaagtataactcataagcaatctaaaagaggcaccaccaatgatgggttgttggtagaacgctgttgggtttgtcaaagcaagttggttgaatggcagcaattgttgcagttgtaagagggtgccagcgttaggcgcagcgtgcaggtagaacggcaacaactgttgttgtgtcaagaaggcaacagggctcacatcagctagctggctgaatggtggtagctgttgctgttgtaaataagcagcagagttcaatgctgccagttggttgaatggaagaaattgctgggggtaggcagcagctagctgactgaatggtagttgttgttgcaaataagcagcagagttcaatgcagccagttggttgaatggaagaaactgctgttgctgagagtaggcagcaaggtttcctagcacaagttgttgtagttgttgtgccttgatgttttgtgccaacaaatgcaccaaaggtaactgctgtaata

SEQ ID NO: 7402 - DNA, 160 bp, Zea mays
  Clone ID: LIB3061-072-Q1-N6-B4
attatcaaattaaaaccccgaagaagagaggggccgcgtgaacgacgcaggaagggccagcgcggaaggagagggggaggggagcaaagaagagagacaaagcaagaggggggggggcgaagaaaaggccggggggagggacagggggggagagggagcg

SEQ ID NO: 7403 - DNA, 544 bp, Zea mays
  Clone ID: LIB3061-072-Q1-N6-B5
caattgttcattcaggtcattgctcacactgacactgccacccatggtgatgcgtgacacattattactcaatcatcgccgctaaatgactcaactagctagctagccagcggctatactacagcacatagtttcttcagtgggggacaccgccggcagcagcgtaggggcatggagtcggctgctgcaggccgcacatcgccgtcagttgctgcgctatctgcgccgccaacagccccgcgacctggccgctttgcggctgctgctgcaggatggactggaggaccaagccgaagatcgcctggtaccggtgctgcggctccacctgcctgagctgctggcaacactgctgccgcaacgactggcactgaggcgagcagtagggcgtcgccgtcgggctgcactgatgcctcagaaactcgacgcactggcccaggatcggggtgctgccaacgccgcaggttccctgcagctggcacgggcttggatgcggctgttggcacgggcatgggtgtggctggggatgaggctgaggccggggcgg

SEQ ID NO: 7404 - DNA, 516 bp, Zea mays
  Clone ID: LIB3061-072-Q1-N6-B7
agcatcaaatttcactattgcacgataaacaaaaggtaaatcatcccaccctttttgtagtaactgatcatcatcgtcattcataactctgatgacttctacaacttaggaagcttacgaatctttctctagttttctatgtgttctgttgatatctcagtgcaacttttctacagcactcacctatacgacaatcttgcggcatcttgaagttaacaaatcctgctcgagtttccaatgtggtctataacttgttttgtgcaacttggtttacaggttaggagccagcccttcagatcttcggagtttcgatattgataaccatatagccgtgtgaggttgaaaggttctaaaccttttgcgattgaggagaatggttttggcatacaacaggcgcgcgcgcacacaccattggagccttgtttggcgcctcccttgttctcaagtacgtctccatctggaatctccaacttcactccaggcttggcgataattgtcaccttgcccttggagtgt

SEQ ID NO: 7405 - DNA, 515 bp, Zea mays
  Clone ID: LIB3061-072-Q1-N6-B8
aatgtatggtactttattgcttaacaccgttataggagtataacggctaggtagacacaattcttcaattgcaaacaccactaatgtcattgctgctgcatggattattttggtagtatgagtggtacaagccgcacattgatggtaggtattgtgctgctgtcaagattgccaccgcactttgagtagcttgttgagatccacataactcacatggttgttgttgttgctcctcctggattatggattgaaccatgttgtagattgcttggtgaatgtattgtggctcaatctgcctaagatcatgacaacattgttgctgcaatacctggcagctacttggttgtatcaaacgtgattggagaaaaggcattaccaaagggctgcactgctgccttaggaattcatgacaattttttagatttgagctactgctatagtagttatagctgcacctttaagtctggtgctgctcctggcaataacataggtgctgttgggatttttcctggccc

SEQ ID NO: 7406 - DNA, 544 bp, Zea mays
  Clone ID: LIB3061-072-Q1-N6-B9
aacatatagctcttacagcattcttgtattgcagaaggtgaaatagcaagaaggtaccaaataaatagataaaagtgcacaggctaacagagctcaacagttcacacaataacagcaacgaccacaaacaaaacttggaatgatgaaaactaggtattgctaaagcaggcgcaggatcgcatcatttcttcttggcagcagccttggtcaccttggcgccggttgggtccttcttctccacactcttgataactccaacagcaaccgtctgcctcatgtcacggacagcaaacctaccaaggggaggatacgctgagaatgtctccaccaccatgggcttggtgggtatcatcttcaccataccagcatcaccgttcttcaggaactttggctccttctcaagctccttgccagagcgcctgtcgatcttggtaatgagctcagcaaacttgacagcgatgtgggaggtgtggcagtccagcacaggggcatagccgttgccaatctgcccagggtggttcatgatgatgacctgggaggtgaa

SEQ ID NO: 7407 - DNA, 541 bp, Zea mays
  Clone ID: LIB3061-072-Q1-N6-C1
atcgagataaatctcaatcaatatattgattatttctaggaaacacatgccgctatgagggcaccattatcgagtacatctcatatgtaatctaaaaaaggcacctccaacgatgggttgctgccacaacaaggcagggttcatcaaagagaactggttgtatggcagcaattgttgctgctgtaggaaggcagcgaccaatgggttagccaccgctagtggattaagtaactgttgtcgctgttgtaggtacgcagcagagttcgacacagtcagttggttgaatggaagcagctgttgcaagtaggcagcagggtttgccacagctagctgagtcagagctggtacaatctgttgcagcaactgttgttgcaggtatgtaggtgcattaaccacagcgagagggctagatgaaatcagttgttgctgttgtaggtaggcggcagggttcaccatggctagttgactgagcgctggtagaaactgttgcaattgttgttgttgttggtatgcaactatgtttgccagaacaggtgggttg

SEQ ID NO: 7408 - DNA, 452 bp, Zea mays
  Clone ID: LIB3061-072-Q1-N6-C10
agaatctggaaatgtaacttcttatttctgggtggccacatacatcatccaaaaaatttattattgaattacaactaataatcaatctaaaagagggccccaccaatggggggggggtggtaggaggctgctgggtttgtcaaagcaagttggacaaagggcaacaattgttgtagttgtaagaggggtgcggggttagccgcaaactggttgtaaaaaggcagcaactgttgctgtgtcaaaaaggaagcaccacttgctgcagctagctcgctaaatggcagtagtatttgctgctgcaaataaacagcggggttcagtgcggccaattggttaaatggaagaagttgttgttgctgagagtaggcagtaactagctggctaaatggtaatagttgttgctgcaaaaaagccgcagggttcagtgtagacaggtggttgaatgggaaaaa

SEQ ID NO: 7409 - DNA, 532 bp, Zea mays
  Clone ID: LIB3061-072-Q1-N6-C11
agggaaaataattatcgaacacccttggagaccaatatcacattagaatctggaaatgtaacttcttatttctggttggccacatacatcatccaaaaaactttattattgaattacaactaataatcaatctaaaaggagggcaccaccaatgatgtgttgttggtaggaggctgctgggtttgtcaaagcaagttggacaaagggcaacaattgttgtagttgtaagagggttgcggggttagccgcaaactgcttgtagaaaggcagcaactgttgctgtgtcaagaaggaagcacgacttgctgcagctagctcgctaaatggcagtagtatttgctgctgcaaataagcagcggggttcagtgcggccaattggttaaatggaagaagttgttgttgctgagagtaggcagtagctagctggctaaatggtaatagttgttgctgcaaataagcagcagggttcagtgtagacagttggttgaatggaagaaattgttgttgctgagagtagggagaaaagtttgcc

SEQ ID NO: 7410 - DNA, 555 bp, Zea mays
  Clone ID: LIB3061-072-Q1-N6-C12
cataaaggaatggcgtccatgctgcctccgattaataataatatttttaaaagttgtccgtcgtacgttttattgcttgacataaatatgctcgtcgtacgttttattaaaggaataaaatcttggaggacccctggtggccggacgatctctctggtaaataaatatgctcatatcttcttctggatattcttaagatctgtagtctggttgatggatgaccccagcttgacagtgttgtacatgcgcatgaagtcaccgaacctgatggtgcggtagcacggtggcttgtccccggcgaggaactcctttgacgggccgatgaggcagtctggggtgggcatgatgaatgtggccaccgccgtccgcgccagcgtcgagctggtcaccacgcggtgctcaacgctcttcagcaatccgttggtcaccacctcgagttgctggccgaagttgacgaccaaggcaccgggcatgggctcgacctttatccactctcccctgtaggcgacgtcgaggccatagacggagccttggaggaggagggtgatgaggttg

SEQ ID NO: 7411 - DNA, 544 bp, Zea mays; identical to SEQ ID NO: 7403
  Clone ID: LIB3061-072-Q1-N6-C2

SEQ ID NO: 7412 - DNA, 365 bp, Zea mays
  unsure (1)..(365): unsure at all n locations; Clone ID: LIB3061-072-Q1-N6-C4
agaagatgcaacatatcatatatatatattatttatattcaacccggtggctaatttgcaccgccgccgccgctggctttgtacactatattcatgatcctaatctagaattgcatcaggaacgagcatgttcctcatcccctgttcccaaaacaacacaggngaaagcaatatgatcagaacccagatagagggaacgcttcgccatcgacgctcgagaggtcgtcactcgatgattcagtcctcgcgatctggtctgtcttgcaggcacctagctcatcggagagcctttcgcacagctgtctatacaacgtagagtctccgtgggatttcctaagctctacgacatataatgatggaccgag

SEQ ID NO: 7413 - DNA, 556 bp, Zea mays
  Clone ID: LIB3061-072-Q1-N6-C6
gtgtttttttttttttttttttttttttttttttttttttttttttcttttttttttttttttttttttttttttttttctttttttttttttttttttttttttttttgggggaaaaacccaacccaacaaatggattattttagggaaaaaaaccccggctggggggcccccacccgggggccatccaaaaggaaaaaaaaaaaaggggccccccaacgaggggggggggcccccccaggacggggttaataaaaaaaaaccggggggggggaagaaattgttgcggggggaggaagggagccaccaagggggggcccccccccaagggaaaaaaaaacggggggccctggggggggcccccaacaaagtccgacaaaataagtgggtggaaggaaaaaaactgttgaaagaaggaaaaagggtgggccacaccaagctgggtaaaagcgggcacaaccggggggaaaaaacctgggggcaggaatgaaggggcatggcccaaaaaaagggggcaaaaaaaaacacaattttgctgttttaggaaggcggcagg

SEQ ID NO: 7414 - DNA, 506 bp, Zea mays
  Clone ID: LIB3061-072-Q1-N6-C7
aagaatctagaaatgtactttcttatttctgggaagccacaaacatcagacaaaaaactttattattgaactataactcataagaaatctaaaagagggcaccaccaatgatgggttgttggtagaacgctgctgggtttgtcaaagcaagttggttgaatggcagcaattgttgcagttgtaagagggtgccagcgttaggcgcagcgtgctggtagaacggcaacaactgtggttgtatcaagaaggtagcagggctcacaccagctagctggctgaatggtagtagttgttgctgctgtaaataagcaggagagttcaatgctgccagttggttgaatggaagaaattgctgggggtaggcagcaggtagctggctgaatggtagttgttgttgttgcaaataagaagcagagttcaatgcagctagttggttgaatggaagaaactgctgttgctgagagtaggcagcaaggtttgctagcacaagttgttgtagttgccgg

SEQ ID NO: 7415 - DNA, 350 bp, Zea mays
  Clone ID: LIB3061-072-Q1-N6-C8
ggggggggggggggggggggcctggggggttccggggggggagggggggcggggggcaagggggcgggacggggggggggggggctagagcgtaaaggccggggggcctaaggggggggctaaccgaagttaattggatagggggggcggggcggcttccgggcgggaaaccggggggcccgggggcgggaaagaaaaggccaaagggcggggggaggcggggggcgttttaagccgaagggggggtgcgcctctccgccggggagaaggggagaaggggagggggggggaccgcctggtcctgggagggggggaggaggcggtcaccgcggggtgggcccggcgggggg

SEQ ID NO: 7416 - DNA, 552 bp, Zea mays
  Clone ID: LIB3061-072-Q1-N6-C9
gaaattaataggtgtttttgctgcatcaagtatgaagtggtcactgcaaatgatgtgtgcacaggcttcaagcaaagtttcagtgtccaatggcatgctagtggccaaaattggctacagatgtataggaaccacattgtcttggataggctacgtgtttcaacacaagcaaaagatggcatcatcatgcagtgccatagatgatgcagtcaaggtaagattgatacaataccccaaaaaaaacagaaaacaatgtgaagatagttaactacggtatggaaggcagccatcatctcctcctcccagcaacagcagcaggtgcccgttgtgctccaggttggccctgccctgcagcttcctctggtatgttggcagctgccgtaacagcattcatgacaataagaccaagcggaatgatgtacatccaatatttagcccagaaagatttctcaggtggtttcattacttcgccaagaccattgtcagcttctattaactgatctgcaaacgatggggttcttggtgcctgttcagcagtctttaggatagtgt

SEQ ID NO: 7417 - DNA, 554 bp, Zea mays
  Clone ID: LIB3061-072-Q1-N6-D1
ctaaaaatgtactttcttatttctgggaagccacaaacatcatccaaaaaacttcattattgaactataactcataagcaatctaaaagaggcaccgccaatgatgggttgttggtagaacgttgttgggtttgtcaaagcaagttggttgaatggcagcaattgttgcagttgtaagagggtgccagcgttaggcgcagcgtgcaggtagaacggcaacaactgttgttgtgtcaagaaggcaacagggctcacatcagctagctggctgaatggtggtagctgttgctgttgtaaataagcagcagagttcaatgctgccagttggttgaatggaagaaattgctgggggtaggcagcagctagctgactgaatggtagttgttgttgcaaataagcagcagagttcaatgcagccagttggttgaatggaagaaactgctgttgctgagagtaggcagcaaggtttcctagcacaagttgttgtagttgttgtgccttgatgttttgtgccaacaaatgcaccaaaggtaactggtgtaatagggctgacg

SEQ ID NO: 7418 - DNA, 487 bp, Zea mays
  Clone ID: LIB3061-072-Q1-N6-D10
aaatctcaatcaatatattgattatttctaggaaacacatgccgctatgagggcaccattatcgagtacatctcatatgtaatctaaaagaggcacctccaacgatgggttgctgccacaacaaggcagggttcatcaaagagaactggttgtatggcagcaattgttgctgctgtaggaaggcagcgaccaatgggttagccaccgctagtggattaagtaactgttgtcgctgttgtaggtacgcagcagagttcgacacagtcagttggttgaatggaagcaactgttgcaagtaggcagcagggtttgccacagctagctgagtcagagctggtacaatctgttgcagcaactgttgttgcaggtatgtaggtgcattaaccacagcgagagggctagatgaaatcagttgttgctgttgtaggtaggcggcagggttcaccatggctagttgactgagcgctggtagaaactgatgcaattg

SEQ ID NO: 7419 - DNA, 567 bp, Zea mays
  Clone ID: LIB3061-072-Q1-N6-D11
aatctagaaatgtactttcttatttctgggaagccacaaacatcagacaaaaaactttattattgaactataactcataagaaatctaaaagaggcaccaccaatgatgggttgttggtagaacgctgctgggtttggcaaagcaagttggttgaatggcagcaattgttgcagttgtaagagggtgccagcgttaggcgcagcgtgctggtagaacggcaacaactgtggttgtatcaagaaggtagcagggctcacaccagctagctggctgaatggtagtagttgttgctgctgtaaataagcaggagagttcaatgctgccagttggttgaatggaagaaattgctgggggtaggcagcaggtagctggctgaatggtagttgttgttgttgcaaataagaagcagagttcaatgcagctagttggttgaatggaagaaactgctgttgctgagagtaggcagcaaggtttgctagcacaagttgttgtagttgttgtgccctgatgttttgtgccaataaatgcaccaaaggtaactgatgtaatagggctgaagattgttg

SEQ ID NO: 7420 - DNA, 537 bp, Zea mays
  Clone ID: LIB3061-072-Q1-N6-D4
agcaacaaacatcttattttatttatgtacaagatgctcctgcagtttaagtttcacaactgacgccaataaatgctgctcaagtctgctgagatctcaaatgcggttgcatcagttctttccatacggcatccacgtctgcagaaaacaccgagatccacgcgcaacatttctgcaggattaaccaaaattgattccctgggctagaggtagctcgctcccatagttgattgtacaagtcgccctcctcatgtattgcttccaggaatcactccctgcttctcgtccaccaccagttgctttttctccaccaaatgctccaccaatttcagcaccattagtaggtatgttcacattcactataccacaatcactaccatggggcccgagccacttaaaaataatatctggcctctttgtaaatatagaactgctcaatccttgaggaacagagttattgatttcaattgcttccttcaaggtctgaaattttataacataaaggacaggaccaaagagttcttctttcacaactgg

SEQ ID NO: 7421 - DNA, 501 bp, Zea mays
  Clone ID: LIB3061-072-Q1-N6-D7
gacaggggaacgagcaggcttttttattcgaagcaaaggggcagccaattcccaccatactaggaaccaggccagcgctgcccaaaaacgctcaaacaaggaaaaaaaacgggagaggaaccaaagttcttggaaaccaagtacacataactccaatacacgactaacaatgcgaattggggggaaacagatcgaaatgcaggcgatggttctccggcctgggcttcttcttcttcttttttccccgtactaatcgaaggacagcagaacctggcttgccaggctacggtacttcagggcgtaaaacatctcgatgtagcggggggtctcgcgcctttccaggttgctcacgtacttccaaaacccgtacaccccggtcagggtcatcagcctcttggagtaaaacttccaggggtacttctcatagattctctgcaggccgccctgtgagatcttgtcccagtagctcggatctgccttgcatttgtcaaaaaagttgac

SEQ ID NO: 7422 - DNA, 538 bp, Zea mays
  Clone ID: LIB3061-072-Q1-N6-D8
gctcaagctcacacctcaataatatttcattccaaaatactatacaacatccaaaagtcggaaacaaaagggagtgattgcacccgaaaaaaaattcaaacttagacagattacagtatccgggttctctgactagctacctaaagacagaagttttctgtttttttaagcaaaaacaagaggtcgaaacagagatctaaaatctaatcgatccccctcaaagacccacgcgcagaagaccgtactcaccagcccttgccaatgagccagagccagtcgagcacgacgccggagaaaaggccgccgaggaggcagacgacgagcacgttgcccaaagcgttctgctcggggcccttgtaccccttgggcgcctccattagcacacacacggtgaggtacccgttggtgagccccaggaaggaggttaggaagatcatgtacccctggtcgccgtatttggccgtgaagtaaaaggccgggatgaacaggaaccgcgccaagacagccgccagcgtgcccttccgggaggtcagtttca

SEQ ID NO: 7423 - DNA, 187 bp, Zea mays
  Clone ID: LIB3061-072-Q1-N6-E1
ttttttttttttttttttttttttttttttttttttttttttttttttttttttttttttttcggcgggggaccgaggggagccggcccgccccgcggccaccagccccccaagggggcgacaagggggggggccggaaaagggggggggaaaaaagggccccccgaaacaaaaagacgagcgcagc

SEQ ID NO: 7424 - DNA, 549 bp, Zea mays
  Clone ID: LIB3061-072-Q1-N6-E10
aagaactagaaatgtactttcttatttctgggacgccacaaacatcatccaaaaaacttcattattgaactataactcataagcaatctaaaagaggcaccaccaatgatgggttgttggtagaacactgttgggttggtcaaagcaagttggttgaatggcagcaattgttgcagttgtaagagggtgccagcgttaggcatagcgtgcaggtagaacggcaacaactgttgttgtgtcaagaaggcagcagggctcacatcagctagctggctgaatggtagtagttgttgctgctgtaaataagcagcagagttcaatgctgctagttggttgaatggaagaaattgctgggggtaggcagcaactagctggctgaatggtaattgttgttgcaaataagcagcagagttcaatgcagccagttggttgaatggaagaaactgatgttgctgagagtatgcagcaaggtttgctagcacaagttgttgtagttgttgggccctgatgttttgtgccaccaaaaggaccaaaggtaactgctgtaat

SEQ ID NO: 7425 - DNA, 333 bp, Zea mays
  Clone ID: LIB3061-072-Q1-N6-E4
aaaaaaaaaaagagggagaaggagccttttattgggggggggggccaaaaaaaaaaaaaaaaaattttttttgggaaaaacaaaaaaaaagagaaaaaagggggggcccccccaaaggggggggggggggggggggccccggggttggaaaagagagggggaaaaaggggaaaaattggggatataaaaaaagggggggggggggccccacaaaacggggagaaaaaggggaaaaaagggggatggaaaaaaaaaaaaaaaggggttgcgaaacaccggggggaaaaaggggaaaaatatggggggggaaaaaaaagaaggggggggaagggg

SEQ ID NO: 7426 - DNA, 317 bp, Zea mays
  Clone ID: LIB3061-072-Q1-N6-E5
agtgggaggggtaaaaagaaaagagtggaaaaagaaaaaaatttaaaagaaaaaaaaaaaaaaaggaaaaaaaagaaaaaaaaaaaaaagagggaaataagggaggaaaaaaaaaaagaagaggagggggggggagagaaaaaaaataaggggggggaagagcaaaaagggggggggaggggggaaaggcgtttggggggggggggggcggggagggggggagaaaggggaaaaaaatatgaaagggtgggagaaggccacccactttaaaggggggggggagaaaacaaaattggaaaaggggtagagaggagggc

SEQ ID NO: 7427 - DNA, 494 bp, Zea mays
  Clone ID: LIB3061-072-Q1-N6-E6
atcgaacacccttggggaccaatatcacattaaaatctggaaatgtaactttttatttttgggtggccacatacatcatccaaaaaactttttttttgaattacaactaataagcaatctaaaaggagggccccaccaatgatgtgttgttggtaggaggccgctcggtctgtcaaagcaagttggacaaagggcaacaattgttgtagttgtaaaagggttgcggggttagccccaaactgctggtaaaaaggcaacaactgttgctgtgtcaaaaaggaaacacggtttgctgcaactagctggctaaatggtagtagtatttgctgctgcaaataagcagcggggttcagtgcggccaattggttaaatggaaaaagttgttgttgctgaaagtaggcaatacctagctggctgaatggtaatagttgttgctgcaaataaacagcagggttcaatgtaaacagttggttgaatggaaaaaatgttgttgc

SEQ ID NO: 7428 - DNA, 547 bp, Zea mays
  Clone ID: LIB3061-072-Q1-N6-E7
aataaagaagagattattagtagcaagcaacagatggtcactcagctggtaataatacaaatcacactacaggcactatccccatcatcaggattcagatcgtatcaacagacttatcaggctatcatgttttacagagttgagcacttgagctggacgcacaaggatgccatacacagtcaacaacatccataagctcgttctccctacaacgagctaaaatcctgcctgaaatgcaactcaagttcagcattgactgtcaagccccagccaaataaattccaggcaagatgtgaatctgcagtatgtagcacccaccctggataactgagaccgagacggagatctgaatggacgaactccgaaaatacgcttggtatcctgcatctcgtctccccttgttcagaccaatggcatcacaactgtagatgcgaagggcagcagctcacagtgcgagaagctccgactccttttcctccgccaacggttcgtcaggcaaatggcgtgaaccattatccaattggtcctcgcttgtgtatatcttgga

SEQ ID NO: 7429 - DNA, 363 bp, Zea mays
  Clone ID: LIB3061-072-Q1-N6-E8
aaaaatggacttttttatttttgggacgccacaaacattatccaaaaaacttcatttttgaactttaactcataagcaatctaaaaggggcccccccaatgatgggttgttggtaaaacactgttgggtttgtcaaagcaaggtggttgaatggcagcaattgttgcagttgtaaaagggggccagcgttaggcatagcgtgcaggtagaacggcaacaactgttgttgtgtcaaaaaggcagcagggctcacatcaactagctggctgaatggtagtagttgttgctgctgtaaataagcagcaaaattcaatgctgctagttggttgaatggaaaaaattgctgggggtaggcagcaaccc

SEQ ID NO: 7430 - DNA, 329 bp, Zea mays
  Clone ID: LIB3061-072-Q1-N6-F1
gaagtggggggggcccgcggggaaaaggaggggagcgggcggggggcccaccgggggcgcgaatagaggggggggggggggggggcgaccggggaaaaaggggggggggcggggggggggacaaaggcccccaaaagggggggaaaaaaaaagggggaggaaaaaggggaaaaaaggcggagcggggaaaaaaagagaaacccaaaaaaaaaagaaaaaaaaaaaaagcgggaaaaaaaaagggaaaaacgggggggcccaaaggggggagaaaaaaaaaaaaagggggggggggagaaaggccgggtagaagggaaaaaaacgggggg

SEQ ID NO: 7431 - DNA, 447 bp, Zea mays
  Clone ID: LIB3061-072-Q1-N6-F10
ggttgttttttttttttttttttttttttttttttttttttttttttttttaggatgcaataagttccctcgttcattcaattgggtaagaaaacttccaactagggggaaaaaaagacagttattaaaaacaacgcaccccccccaccccacccccgaaaatagtgctcaaacttgcaaataagttttttgccttaacgggaggtcaccgtagggcgcaaataaaacctaacatccagtatggaaacaacattcacaagtccaaccattgtattgaaggaacaatactgtcttgtgccaaacaacctttggaaacacccccactgagttggaaactgaaaatagtttgttatggccttcaagttaagacataatgccttcggtcagtgataatgcggcaagctgactggtcgggaggtttgggttttgctggtgggccccattgcg

SEQ ID NO: 7432 - DNA, 453 bp, Zea mays
  unsure (1)..(453): unsure at all n locations; Clone ID: LIB3061-072-Q1-N6-F11
gtggtgtgggtgttttttttattttttttttttttttttttttttttttttttttttttttttttttttttttttttttttttttttttttttttttttttttttttttttttttttttttttttttttttttttttttttttttttttttttggggggggggtttttttttnaaaaaaaaaaaagggttttttttaaaaaaaaaaaaaaaaaaaaaaaaagaggggggggttttttgtcaaaaccccgcggggggggaaaaagggggggggagaaaaaatttttatgaaaaaaaaaaaaaaaaaaggggggggggggggggggttttttgggggggggggggggcccccccccccacaaagggggggggggggggggcggcaaaaaaacccccccccctttttgggggggggaaaaaaaaaaaaaaaaaaaaagagggggggggggggcccc

SEQ ID NO: 7433 - DNA, 446 bp, Zea mays
  Clone ID: LIB3061-072-Q1-N6-F2
gggggtgtttttttttttttttttttttttttttggttttttttttttttttttttttttttttttttttttttttttttttttttttttttttttttttttttttgggaaaataactttttttttttgggggggcccataccttagggggggggggggtttttgaattccaaccaaaaagccatttaaaaaaggggcccgccaatgatttttttttggaaaaaaggtgctgggtttttcaaaacaagttggacaaaggggacaaactggtgcatttttaaaagggttggggggttacccccaaactggtgggagaacggaaacactttttgttttgtcaaaaaagaaagggggcttgttgtaactagctggcccaaagggaggaatttttggtgggggaaaaaaagaagggggttcagggcggccaattggttaaaagggaaaaa

SEQ ID NO: 7434 - DNA, 257 bp, Zea mays
  Clone ID: LIB3061-072-Q1-N6-F4
ggggggaaaactccaaccaatatttgggttttttttggggaacccggccgggttggggggcccccttttggggcccctttctttggttaccaaagaagggggccccccccccggggggggggggcccccccgggggggggtctttaaaggaaaccggggtggtggggccaatttgtggtttgtgtggggggggcgccccccggggggtgccccccggggggggttaaagaaacggggggcggtgggggggggccccc

SEQ ID NO: 7435 - DNA, 556 bp, Zea mays
  Clone ID: LIB3061-072-Q1-N6-F5
agaaatgtactttcttatttctgggaagccacaaacatcagacaaaaaactttattattgaactataactcataagaaatctaaaagagggcaccaccaatgatgggttgttggtagaatgctgttgggtttgtcaaagcaagttggttgaatggcagcaattgttgcagttgtaagagggtgccagcgttaggcgcagcgtgctggtagaacggcaacaattgtggttgtgtcaagaaggtagcagggctcacaccagctagctggctgaatggtagtagttgttgctgctgtaaataagcaggagagttcaaagctgtcagttggttgaatggaagaaattgctgggggtaggcagcagatagctggctgaatggtagttgttgttgttgcaaataagaagcagagttcaatgcagctagttggttgaatggaagaaactgttgttgctgagagtaggcagcaagggttgctagcacaagttgttgtagttgttgtgccctgatgttttgtgccaataaatgcaccaaaggtaactgctgtaatagggctgatg

SEQ ID NO: 7436 - DNA, 426 bp, Zea mays
  Clone ID: LIB3061-072-Q1-N6-F7
aaaaggagttgggtgccttattcagacattaaataccgaacatgccccaccttggggtggccaagacgaaacacaagggcccaagatgggttttcctacacaaggcacaattactggacacaaggaaacaacatgggggtccattcaacataaaaccctaaaaccttacagacttatcccttcaggggacacaggaagcatgcctggatgggttgggcacccttacctttgggctttttttgggtgccaggcttcggttcaacaacttgacctttttacttagggccggggagacccccatttgatcggtggcggaccccagaagcttttggagaaactctttcaacttctgggtcttttttggcagcggttttttgtcgcttggctttggatcattaagaactggggaagcagaaaaaaccttgt

SEQ ID NO: 7437 - DNA, 376 bp, Zea mays
  Clone ID: LIB3061-072-Q1-N6-F8
cgggcccacaggccaaaataatgggggggcgggaacaaacaagcgggggggcccatggggcaccagttaacaaaaaaaaaaactttgggggcccaaaaaagcaggcccccctttaaaacgggcaaaattggggtggcaaaatgaaacaaaaccccccccgttctaaaaaattgggcccctatgggtcaaaaaacccccaaataaaatatttaaaaaaaaggggagaggttttttaagcggggggtatgcccgggtaaaaaattttggttcaaaaggccaaaaaaaagggggggcgggaacaaacaacccggggggcacatggggcaccaattaacaaaaaaaaaaactttgttgttccaaaaaaaaaaggccccct

SEQ ID NO: 7438 - DNA, 494 bp, Zea mays
  Clone ID: LIB3061-072-Q1-N6-G1
agaaatgtactttcttatttctgggaagccacaaacatcagacaaaaactttattattgaactataactcataagaaatctaaaagagggcaccaccaatgatgggttgttggtagaatgctgctgggtttgtcaaagcaagttggttgaatggcagcaattgttgcagttgtaagagggtgccagcgttaggcgcagcgtgctggtagaacggcaacaactgtggttgtgtcaagaaggtagcagggctcacaccagctagctggctgaatggtagtagttgttgctgctgtaaataagcaggagagttcaatgctgtcagttggttgaatggaagaaattgctgggggtaggcagcagatagctggctgaatggtagttgttgttgttgcaaataagaagcagagttcaatgcagctagttggttgaatggaagaaactgctgttgctgagagtaagcagcaaggtttgctagcacaagttgttgtagttgt

SEQ ID NO: 7439 - DNA, 537 bp, Zea mays
  Clone ID: LIB3061-072-Q1-N6-G10
cgagaaaaatctcaatcaatatattgattatttttaggaaacacatgccgctatgagggcaccattatcgagtacatctcatatgtaatctaaaaaaggcaccaccaacgatgggttgctgccacgacaaggggggggtcatcaaagagaactggttgtatggcagcaattgttgctgctgtaggaaggcagcgaccaatgggttagccaccgctagtggattaagtaactgttgtcgctgttgtaggtacgcagcagagttcgacacagtcagttggttgaatggaagtagttgttgcaagtaggcagcagggtttgccacagctagctgagtaagagctggtacaatttgttgcagcaactgttgttgcaacaactgttgttgcaggtatgtaggtgcattgcccatagcgagcgggctagatgaaagaagttgttgctgttgtaggtaggcgatagggttcaccatggctagttgactgaacgctggtagaaactgttgcaactgttgttggttgttggtattcagctacgttt

SEQ ID NO: 7440 - DNA, 541 bp, Zea mays
  Clone ID: LIB3061-072-Q1-N6-G11
gtggggggggttttttttttttttttttttagaaagtactttcttatttctgggaagccacaaacatcagacaaaaaactttattattgaactataactcataagaaactaaaaggggcaccaccaatgatgggttgttggtagaacactggggggggtgtcaaagcaagttggttgaatggcagcaattgttgcagttgtaagagggggccagcgttaggcgcagcgtgctggtagaacggcaacaactgtggttgtgtcaaaaaggtagcagggctcacaccaactagctggctgaatggtagtagttgttgctgctgtaaataaacaggagagttcaatgctgccagttggttgaatggaaaaaattgttgggggtaggcaacaggtagctggctgaatggtagttgttgttgttgcaaataagaagcagagttcaatgcagctagttgggtgaatggaagaaactgctgttgctgaaagtaggcagcaagggttgctagcacaagttgttgtaattgttgtgccctgatgttttgtg

SEQ ID NO: 7441 - DNA, 518 bp, Zea mays
  Clone ID: LIB3061-072-Q1-N6-G2
cacattagaatctggaaatgtaacttcttatttctggttggccacatacatcatccaaaaaactttattattgaattacaactaataagcaatctaaagggggcaccaccaatgatgtgttgttggtaggaggctgctgggtttgtcaaagcaagttggacaaagggcaacaattgttgtagttgtaagagggttgcggggttagccgcaaactgctggtaaaaaggcagcaactgttgctgtgtcaaaaaggaagcacggcttgctgcagctagctggctaaatggtagtaatatttgctgctgcaaataagcagcgaggttcagtgcggccaattggttaaatggaaaaagttgttgttgatgaaagtaggcagtacctagctggctgaatggtaatagttgttgctgcaaataagcagcagggttcagtgtaaatagttggttgaatggaaaaaattgttgttgctgataatagggagaaagggttgccagagctacttggttgatcacaggtag

SEQ ID NO: 7442 - DNA, 55 bp, Zea mays
  unsure (1)..(55): unsure at all n locations; Clone ID: LIB3061-072-Q1-N6-G3
tttttttttttttntttnntttttttttttttttttttttttttttttttttttt

SEQ ID NO: 7443 - DNA, 541 bp, Zea mays
  unsure (1)..(541): unsure at all n locations; Clone ID: LIB3061-072-Q1-N6-G4
gattgcaatgataatcaggacccaaacgatgggttaaacgaaagaatgttgacagcagatctgttatcacaatngaaagaagacaagcggtcgcttctcaatattcgacgtcagagcagccgaaatctccaaatcttccaatcatccctcctgttagatcctgaagagtatagcccttttcacccactcacagcataactttaactcccccccccccccaccaatgctatcacctacgtactatctatgcgccgctcctgcctttcttcgacttgttcttgttttcttgtgtcttctttttcttctcttcaggtgttgtccacacgtaattggaaggaatggcgaatgggtcctggatgtcctccacgcggctgcttgggccaggtgccgtcgacaagttctggaggtagggcgccttgatccactgaatccaggaacttgaagaaggctgcactgctgggctcttgctgttgtcaggacttgagggtggtgtggtgaactcatctagcggctgtagctcttcaaattttgtgaatgtcac

SEQ ID NO: 7444 - DNA, 518 bp, Zea mays
  Clone ID: LIB3061-072-Q1-N6-G5
aagaactagaaagtactttcttatttctgggacgccacaaacatcatccaaaaaacttcattattgaactataactcataagcaatctaaaagagggcaccaccaatgatgggttgttggtagaacactgttgggtttgtcaaagcaagttggttgaatggcagcaattgttgcagttgtaagagggtgccagcgttaggcatagcgtgcaggtagaacggcaacaactgttgttgtgtcaagaaggcagcagggctcacatcagctagctggctgaatggtagtagttgttgctgctgtaaataagcagcagagttcaatgctgctagttggttgaatggaagaaattgctgggggtaggcagcaactagctggctgaatggtaattgttgttgcaaataagcagcagagttcaatgcagccagttggttgaatggaagaaactgatgttgctgagagtatgcagcaaggtttgctagcacaagttgttgtagttgttgtgcccctgatgtttgtgc

SEQ ID NO: 7445 - DNA, 523 bp, Zea mays
  Clone ID: LIB3061-072-Q1-N6-G8
aatccggatcccctttaattattgttccggatgaacgatccgagaaatgcattcatcttcttgctgggcttattattcagacatatgagctagctacaagctcattcctcatgcactatgctcttcgcagttacttggagggcatcgttccgccgccgagaatccaggggcattcggcgacgccgctgatggtggccaggttgcactcggcctccgtgacgagggtgggggcgaatcccctctgcacctcccgcgggcagcccggcaggtcctttaggcggccctccagctgcgcgtccgggcccggggggatcgcgccgtccatgaggatgctcagcgccgtgcaccggcagtacgccgggatgtccgccagctcccggcagcatctcctcttcagctccggccacgggaggcgcggcccgatgccgcaggtccggctggtcacgtaccagcggcagctcgggagcgggttgtgcgggatggcccaccccggcacgcaggaggtcccggcgctggcgctggc

SEQ ID NO: 7446 - DNA, 520 bp, Zea mays
  Clone ID: LIB3061-072-Q1-N6-H1
aacaacatactatcattcacacaagtataatatatataggttcacgataatatactgtaccgaacttcaatctgctttttacaaattacaacacaacatcagcacgaccaagcagatgtaaatccaggtatgggtaccatcatgccccggtttactaagaccaaacgacacacacatataccacacatgcaatgatccaatgcatgtttatactagcacatgcatgcacacatatcttaccgactagtttttgcagaaatataggaaccatgcaaattttcacaaaatgcaatgcagatatagtagatataacatgcatattcatgcatttgtctccaaactccatatccactttttcagtacttgtacttccatatgccatccatctctatgggggtggtcgcggaccctgggccggtcacagacatcatcgacgagatctcggcggcattagcctgttcgtccttttgtgacaccatcgaggacggcctacttttccgggctgcaaacgtcaaagccg

SEQ ID NO: 7447 - DNA, 295 bp, Zea mays
  Clone ID: LIB3061-072-Q1-N6-H10
ggttgttgggttttttttttttttttttttttttttttttttttttttttttttttttttttttttttttttttttttttttttttttttttttttttttttttttttttttttttttttttttttttttttttgggttttttttttggggggggggggtggtttaaaaaaagagaaattaatcttttattttggggggggcggctaccttttccaaaaaaaatttttttttgttttcaacctaaagcccaattaaaaaaagggccccccaaaaatatttttttttggaaggggc

SEQ ID NO: 7448 - DNA, 390 bp, Zea mays
  Clone ID: LIB3061-072-Q1-N6-H4
gggaaagggaactttttattttgggggggccccattccttacccaaaaaactttttttttggattccacccaaaaagcaatctaaaagggggcccccccacagatttgttgttgggaggggggtgctgggtttttcaaagcgaggtggccaaagggcaacaattggtgtaattgaaaaaggggtggggggttacccccaacctgctggtaaaaaggcagcaactgttgttgtgtcaaaaaagaagccccgtttgctgcacctagctggctaaagggaggaaaattttgttggtgcaaatacacagcggggttcaaggcggccaaatggttaaaaggaaaaaatttttttttaagaaagaaggcaaaaactatccgggtaaaaggaaaaag

SEQ ID NO: 7449 - DNA, 531 bp, Zea mays
  Clone ID: LIB3061-072-Q1-N6-H5
cacattagaatctggaaatgtaacttcttatttctggttggccacatacatcatccaaaaaactttattattgaattacaactaataatcaatctaaaagaggcaccaccaatgatgtgttgttggtaggaggctgctgggtttgtcaaagcaagttggacaaagggcaacaattgttgtagttgtaagagggttgcggggttagccgcaaactgcttgtagaaaggcagcaactgttgctgtgtcaagaaggaagcacgacttgctgcagctagctcgctaaatggcagtagtatttgctgctgcaaataagcagcggggttcagtgcggccaattggttaaatggaagaagttgttgttgctgagagtaggcagtagctagctggctaaatggtaatagttgttgctgcaaataagcagcagggttcagtgtagacagttggttgaatggaagaaattgttgttgctgagagtagggagaaaagtttgccagagctacttggttgatcacaggtagcacgagttgctgc

SEQ ID NO: 7450 - DNA, 287 bp, Zea mays
  Clone ID: LIB3061-072-Q1-N6-H8
ggaacagcatggatactttttttcttttcatttcaattgttcattcaggtcattgctcacactgacactgccacccatggggatgcgggacacattattactcaatcatcgccgctaaatgactcaactagctagctggccagcggctatactacagcacatagtttcttcagtgggggacaccgccggcagcagcgtaggggcatggagtcggctgttgcaggccgcacagtcgcggcagttgctgcgctatttgcgccgccaacaaccccgcaacctggccgctt

SEQ ID NO: 7451 - DNA, 387 bp, Zea mays
  unsure (1)..(387): unsure at all n locations; Clone ID: LIB3061-073-Q1-K6-A1
agcgtccgnatggccgcactgnacctcgctgcttatttgcgagcagcaaaattactaccatttagccagctagctgcagcaagccgtgcttccttcttgacacagcaacagttgctgcctttctaccagcagtttgcggctaaccccgcaaccctcttacaactacaacaattgttgccctttgtccaacttgctttgacaaacccagcagcctcctaccaacaacacatcattggtggtgccctcttttagattgcttattagttgtaattcaataataaagttttttggatgatgtatgtggccaaccagaaataagaagttacatttccagattctaaaaaaaaaaaaaaaaaaaaaaaaaaaaaaaaaaaggggcgngccgtt

SEQ ID NO: 7452 - DNA, 573 bp, Zea mays
  unsure (1)..(573): unsure at all n locations; Clone ID: LIB3061-073-Q1-K6-A10
atttttgagcttcanaacacaccagcggagcgcactagcaacaacctaacaacaatggctaccaagatttatccctccttgcgcttcttgcgctttttgcgagcgcaacaaatgcgtccattattccacaatgctcacttgctcctagttccattattccacagttcctcccagcgggtacttcaatggccttcgaacacccagctgtgcaagcctataggctacaacaagcgattgcggcgagcgtcttacaacaaccaattgcccaattgcaacaacaatccttggcacatctaacaatacaaaccatcgcaacgcaacagcaacaacagttcctaccagcactgagccacctagccatggtgaaccctgtcgcctacttgcaacagcagctgcttgcatccaacccacttgctctagcaaacgtagttgcaaaccagcaacaacaacaactgcaacagtttctgccagcgcttagtcaactagccatggtgaaccctgccgcctacctacaacagcaacaactgctttcatctagcccgctcgctgtggccaatgcacctacatacctgc

SEQ ID NO: 7453 - DNA, 465 bp, Zea mays
  unsure (1)..(465): unsure at all n locations; Clone ID: LIB3061-073-Q1-K6-A11
gcgaacgcactacacgacctaggccagtnngtgccaanaattagccctccttgcgcttcttgcccttttagtgagcgcaacaaatgcgttcattattccacagtgctcacttgctcctagtgccattattccacagttcctcccaccagttacttcaatgggcttcgagcaggggggggggcgagcctacaggctacaactagcgcttgcggcgagcgccttacaacaaccaattgcccaattgcaacaacaatccttggcacatctaaccccgcaaccctcttacaactacaacaattgttgccctttgtccaacttgctttgacaaacccagcagcctcctaccaacaacacatcattggtggtgccctcttttagattgcttattagttgtaattcaataataaagttttttggatgatgtatgtggccaaccagaaataagaagttacatttccagattct

SEQ ID NO: 7454 - DNA, 579 bp, Zea mays
  unsure (1)..(579): unsure at all n locations; Clone ID: LIB3061-073-Q1-K6-A12
acaaccgcaccagcgaaccaaggggggtcgggctctcactgactgtgacgacggcaacaagccagtgagcagctcgccatggcagcagtgtccaccgcgccggcgctcgaaggccgcatcgcgctcgtcaccggcggctcccggggcatcggccgcgaggtgtcntcccaggcggcncgggcggcgcgcgtgtcgtggtcaactacgccaccaacccggccaaggccgaggagctcgtcgcggagctcgcctcgcgcggcctccgcgccgtggccgtgcgcgcggacgtctccgatccggacgccgtgcgcgcgctcttcgaccgcgccgaggaggccttcgggtccccgccccacgtagtggtcgcctgcgcgggcatcatggacgccaagtaccccgcgctggtcgacactgccgtcgaggacttcgacgccacgttcgcggtgaacacgcgcggcaagttcctggtgtgccgggaggccgcccggcgcatcccccccaacagcggtgggcgcatcgtgacgttctcgtccacgacggttgccgtgctgccgccgggctacgcggcgtacgctgcgt

SEQ ID NO: 7455 - DNA, 571 bp, Zea mays
  unsure (1)..(571): unsure at all n locations; Clone ID: LIB3061-073-Q1-K6-A2
agcgtccggcgcanaaaacccgtacgacacctgggggtgttgctcgttgccctcgctctcctggctctcgctgcgagcgccacctccacgcatacaagcggcggctgcggctgccagccaccgccgccggttcatctaccgccgccggtgcatctgccacctccggttcacctgccacctccggtgcatctcccaccgccggtccacctgccgccgccggtccacctgccaccgccggtccatgtgccgccgccggttcatctgccgccgccaccatgccactaccctactcaaccgccccggcctcagcctcatccccagccacacccatgcccgtgccaacagccgcatccaagcccgtgccagctgcagggaacctgcggcgttggcagcaccccgatcctgggccagtgcgtcgagtttctgaggcatcagtgcagcccgacggcgacgccctactgctcgcctcagtgccagtcgttgcggcagcagtgttgccagcagctcaggcaggtggagccgcagcaccggtaccaggcgatcttcggcttggtcctccagtccatcctgc

SEQ ID NO: 7456 - DNA, 579 bp, Zea mays
  Clone ID: LIB3061-073-Q1-K6-A3
atttcagcttcaaaacacaccaggcgggggcgctagcaacgacctaacaccaatggctaccaagatttagccctccttgcgcttcttgcccttttagtgagcgcaacaaatgcgttcattattccacagtgctcacttgctcctagtgccattattccacagttcctcccaccagttacttcaatgggcttcgaacatccagccgtgcaagcctacaggctacaactagcgcttgcggcgagcgccttacaacaaccaattgcccaattgcaacaacaatccttggcacatctaaccctacaaaccattgcaacgcaacaacaacaacaacaacagtttctgccatcactgagccacctagccgtggtgaaccctgtcacctacttgcaacagcagctgcttgcatccaacccacttgctctggcgaacgtagctgcataccagcaacaacaacagctgcaacagtttatgccagtgctcagtcaactagccatggtgaaccctgccgtctacctacaactactttcatctagcccgctcgcggtgggcaatgcacctacgtacctacaacaacagttg

SEQ ID NO: 7457 - DNA, 251 bp, Zea mays
  Clone ID: LIB3061-073-Q1-K6-A4
gttgtgtcaagaagcaacacagttgttgccgttctacctgcacgctgcgcctaacgctggcaccctcttacaactgcaacaattgctgccattcaaccaacttgctttgacaaacccaacagcgttctaccaacaacccatcattggtggtgccctcttttagattgcttatgagttatacttcaataatgaagttttttggatgatgtttgtggcttcccagaaataagaaagtacatttctagattctt

SEQ ID NO: 7458 - DNA, 442 bp, Zea mays
  Clone ID: LIB3061-073-Q1-K6-A7
catttcttccttcaaccaatagctgcattggactctgcttcttatttgcaacaacaacaactaccattcagccagctatctgctgcctacccccagcaatttcttccattcaaccaactgacagctttgaactctcctgcttatttacagcagcaacaactactaccattcagccagctagctggtgtgagccctgctaccttcttgacacaaccacaattgttgccgttctaccagcacgctgcgcctaacgctggcaccctcttacaactgcaacaattgctgccattcaaccaacttgctttgacaaacccaacagcattctaccaacaacccatcattggtggtgccctcttttagatttcttatgagttatagttcaataataaagttttttgtctgatgtttgtggcttcccagaaataagaaagtacatttctag

SEQ ID NO: 7459 - DNA, 576 bp, Zea mays
  unsure (1)..(576): unsure at all n locations; Clone ID: LIB3061-073-Q1-K6-A8
caacaagcacatagnaagtggnatacgaggggcgagcaatagagcaacaatggcggccaagatttttccatccttatgctccttgctctttctgcatgtgttgctaacgcgaccatttttcctcaatactcacaagctcctatagctgcccttcttcccccataccttccatcaatgacgcgggtcgagtttgtgaaaacccagcccttcaaccctacaggctccaacaagcaatcgcaacaagcaacttacctttatcacccctgttctttcaacaatcgccagccctatctttggtgcagtcattggtacaaaccatcagggcacaacagctgcaacaactcgtgctaccagtgatcagccaagtagctctggcaaacctttctccctactctcagcaacaacaatttcttccattcaaccaactgtctacactgaaccctgctgcttatttacaacaacaacaactactaccattcagccagctagctactgcctactctcagcagcaacaatttcttccatttaaccaattggccgcactgaacccctctgcttatttccagcagcaaatac

SEQ ID NO: 7460 - DNA, 293 bp, Zea mays
  unsure (1)..(293): unsure at all n locations; Clone ID: LIB3061-073-Q1-K6-A9
atattattaattttttttttntttttttatttttttatttttttttttttttttttacttttttttttatttttttttttctcttttcccctttttttatttnttttttttttttttctttttttatttatttctttttttttttttattattttattttttttattttttttttctatatacttttttttttatatttaaaatatatttattctnctttccctttattcacctattttttttattctttttattactttaacctatttcatacatttttttatttttttttt

SEQ ID NO: 7461 - DNA, 575 bp, Zea mays
  unsure (1)..(575): unsure at all n locations; Clone ID: LIB3061-073-Q1-K6-B1
tgaaaccaatagcaacatagnaagcacaatagtgtaccaacaatggcagccaaaaattttgcttccttatgctccttggtctttctgcaagtgttgctaccgcnaccattttcccacaatgctcacaagctcctatagcttcccttcttcccccatacctctcaccagcggtgtcttcaatgtgtgaaaccccaattgttcaaccctacaggatccaacaggcaatcgcaacaggcatcttaccattatcacccttgttcctccaacaaccgtcagccctattacagcagttacctttggtccatttggtggcacaaaacatcagggcacaacaactacaacaacttgtgctagcaaaccttgctgcatactctcagcaacatcagtttcttccattcaaccaactggctgcattgaactctgctgcttatttgcaacaacaattaccattcagccagctagttgctgcctacccccagcaatttcttccattcaaccaactagcagcattgaactctgctgcttatttacagcagcaacaactactaccattcagccagctagctgatgtgagc

SEQ ID NO: 7462 - DNA, 578 bp, Zea mays
  unsure (1)..(578): unsure at all n locations; Clone ID: LIB3061-073-Q1-K6-B10
gngnacancaagcaacatagnaaagtagaaccattagcaacaatagagcaacaatggcgaccaagatttttccctccttatgctccttgctctttctacatgtgttgctaacgcgacaattttccctcaatgctcacaagctcctatagcttcccttcttcccccataccttccatcaattatagcttcnagtatgtgaaaacccagctcttcaaccatataggcttcaacaagcaatcgcagcaagcaacatacctttatcgcccttgttgtttcaacaatcaccagccctatctttggtgcagtcattggtacaaaccatcagggcacaacagctgcagcaactcgtgctacctgtgatcaaccaagtagctctggcaaacctttctccctactctcagcaacaacaatttcttccattcaaccaactgtctacactgaaccctgctgcttatttgcagcaacaactattaccatttagccagctagctactgcctactctcagcaacaacaacttcttccatttaaccaattggccgcactgaaccccgctgcttatttgcagcagcaaatacta

SEQ ID NO: 7463 - DNA, 580 bp, Zea mays
  unsure (1)..(580): unsure at all n locations; Clone ID: LIB3061-073-Q1-K6-B11
atcanaacacaccagcgagcacgagtgggggcgacctaacaacaatggctaccaagatttatccctccttgcgcttcttgcgctttttgcgagcgcaacaaatgcgttcattattccacaatgctcacttgctccaagttccattattacacagttcctcccaccagttacttcaggggggtgggaacacccagctgtgcaagcctataggctacaacaagcaattgcggcgagcgtcttacaacaaccaatttcccagttgcaacaacaatccttggcacatctaacaatacaaaccatcgcaacgcaacagcaacaacaattcctaccagcactgagccacctagccatggtgaaccctgccgcctacttgcaacagcagttgcttgcatcaaacccacttgctctggcaaacgtagttgcaaaccagccacaacaacagctgcaacagtttctgccagcgctcagtcaactagccatggtgaaccctgccgcctacctacaacagcaacaactgctttcatctagcccgctcgctgtggccaatgcacctacatacctgcaacaacaattgttgcac

SEQ ID NO: 7464 - DNA, 522 bp, Zea mays
  Clone ID: LIB3061-073-Q1-K6-B12
aggaggcggggcgaagatgaggaagaagctcggcacccgattccccgcggctcgaatcaaaaagaaatgcaagcagatgaggatgttggaaagattgcactagcagttcctggggggggggcgaggtctcttgaattgtttttacaagatttaattgaccgtacttatgaaattactcttcaaagtggagcaaagacactgaattccttccacctgaagcaatgtgtgaagaggtacagttcttttgatttcctaactgaagttgtcagcaaggtaccagatcttggtggcgctgattcctgtggagatgaaagaggattacctagaagaagaaagtcaaatggcagtgacccagaaaatgatgaatcaagatctagtaaaatggccataagaaatgcaaacatcagccccagaggacgtgggaggggtcgaggcagaggacgaggtcggccaccaaccaagagaaaggaggttggttatgtacaatttgaagatgagagcagcatgtttgctgaacaaggt

SEQ ID NO: 7465 - DNA, 577 bp, Zea mays
  unsure (1)..(577): unsure at all n locations; Clone ID: LIB3061-073-Q1-K6-B2
cgctcctgtttcngactcccgnaatcccgacccgctaccggnagcggaggcgatggcggcggcgccggcggtaaggttcccggtcttcgggctcgtgcggctgctgggcttggccgccgcggcggcgatcctcttctgggccgtccacttccgaggcggcatggcgctctccaccgaagaggagagcaagctccccctcttcaacgttcacccagtgttaatgctgattggtttggtggccttgaatggcgaagctcttttggcttataaaactgtgccaggaaccaagaaactgaaaaagctagtgcaccttgccgtgcagttccttgccatgtttctgagtctaattggtctgtgggctgtatggaagttccatgatgaaagaaaaatcgatcatttatatacacttcactcgtggttgggccttacttgcttcatcttcttcagcttgcagtgggctgctgggttttggaccttttggtaccccggtggatcaagaagtggccgtgcatttttgcttccctggcatgtcttctttggtatattcatctatgttcttgctatcgccacaagtgtg

SEQ ID NO: 7466 - DNA, 573 bp, Zea mays
  unsure (1)..(573): unsure at all n locations; Clone ID: LIB3061-073-Q1-K6-B3
gggcgtgcgtangagggtcgtcgnacannaacactgnaanaggtcatcgttctcgtcgtgtgcctggctctgtcagctgccagcgcctctgcaatgcagatgccctgcccctgcgcggggctgcagggcttgtacggcgctggcgccggcctgacgacgatgatgggcgccggcgggctgtaccccntacgcggatacctgaggcagccgcagtgcagcccgctggcggcggcgccctactacgccgggtgtgggcagccgagcgccatgttccagccgctccggcaacagtgctgccagcagcagatgaggatgatggacgtgcagtccgtcgcgcagcagctgcagatgatgatgcagcttgagcgtgccgctgccgccagcagcagcctgtacgagccagctctgatgcagcagcagcagcagctgctggcagcccagggtctcaaccccatggccatgatgatggcgcagaacatgccggccatgggtggactctaccagtaccagctgcccagctaccgcaccaacccctgtggcgtctccgctgccattccgccctactactgattc

SEQ ID NO: 7467 - DNA, 336 bp, Zea mays
  unsure (1)..(336): unsure at all n locations; Clone ID: LIB3061-073-Q1-K6-B4
gggagccctnttgccttcttactgcaacaacagcttctgccattccatctgcaagctgtggcaaacattgttgctttcttgagacaacaacatttgttgccattttacccacaagttgtgggaaacattaatgccttcttgcaacagcaacaattgctaccattctacccacagaatgtggcaaacattgttgccttcttacaacaacaacaattgctaccatttagccaacatgctttgacgaatcctaccaccttattgcaaccgcccaccattggtggtgccatcttctagattttttatgatttatactgtaataataaagttctcatgctg

SEQ ID NO: 7468 - DNA, 573 bp, Zea mays
  unsure (1)..(573): unsure at all n locations; Clone ID: LIB3061-073-Q1-K6-B5
gcaactnanaagcacaatatgtaccaacatggcagccaaaaattttgcttcctttagctccttggtctttctgcagtgttgctaccgcaaccattttcccacaatgctcacaagctcctatagcttcccttcttcccccatacctctcaccagcggtgtcttcaagtgtgaaaccccaatgttcaaccctacaggatccaacaggcaatcgcaacaggcatcttaccattatcacccttgttcctccaacaaccgtcagccctattacagcagttacctttggtccatttggtggcacaaaacatcagggcacaacaactacaacaacttgtgctagcaaaccttgctgcatactctcagcaacatcagtttcttccattcaaccaactggctgcattgaactctgctgcttatttgcaacaacaattaccattcagccagctagttgctgcctacccccagcaatttcttccattcaaccaactagcagcattgaactctgctgcttatttacagcagcaacaactactaccattcagcccagctagctgagtgagccctgctgccttcttg

SEQ ID NO: 7469 - DNA, 575 bp, Zea mays
  unsure (1)..(575): unsure at all n locations; Clone ID: LIB3061-073-Q1-K6-B6
ctgcccttctggccanacacgnatattgttctccgtggtggtgcaaaccattcattgagnaactgaacgaatctccatnatgccatcatgattgtgaggagagcacttaaaaactcgacagttgtgccgggtggtggtgctattgatatggnaaataagcaagtatctcaagcagcatgcacgaacaattgctgggaagtctcagttctttgtaaattcatttgctaaagcccttgaggttattccacgccaactttgcgataatgctggatttgatgccactgacgttctcaataagctgaggcagaaaacatgcatctggtgaaggtgctaattatggtgtagacataaacactggcggaattgctgattcctttgcaaactttgtttgggaacctgctgttgtaaagatcaatgctataaatgctgcaaccgaagcttcctgccttattcttagtgtcgatgagacagtgaaaaacccaaagtcggagagcgcacaaggtgaggctgctgccggtgcgatggctggtcgcggtcgaggtgcaatgcgaggacgtggtggcaggggcatgcgc

SEQ ID NO: 7470 - DNA, 583 bp, Zea mays
  unsure (1)..(583): unsure at all n locations; Clone ID: LIB3061-073-Q1-K6-B7
tgccactggnatattgccgattttggttcaaagnatgataccattttttgtggagtttttgatggccatggaccaaacggccatttggttgccaagagggtcagagatcttctccctgtaaagttgagtgcaaatttagggaagggtgaatgcaaagagatttctactagcgatgtcaagagtgggactactaaaggagttgcaaccgaacacagggttgaagatactgatgcttcccctggaaatgaagagaatggcgagtacccagaatttttcacagcactgagggcttcattcttgcaggcgttttatgtcatggacagggatctgaaggcacatagaaatattgattgtgaattcagtggtacaacagcagtcacagtaatcaagcagggacaaaatcttataattggcaacttgggagattctagagctgtcttgggcacaagaggtgaacataatcagctagttgctcttcagctgacagtggacctcaaacctagtatcccgagtgaagcagaacgaattaggcaacaaagtggcagagtattttctcttccagatgaaccagacgttgttcgtg

SEQ ID NO: 7471 - DNA, 600 bp, Zea mays
  unsure (1)..(600): unsure at all n locations; Clone ID: LIB3061-073-Q1-K6-B9
cttcaaattgcaactgaaacttggcggncgagcagctggcgagtggtgaggggctggagaagttgaacaggagctaactgcttcagaagtgatggtccagtttctgatgttttccgtaagactttaaaggagttcattgattgttccagtgctgatgtacgctccctatcagcattctattctgaagtagggggagaagcgcagatggacttgctgtttattttggagaagaccctgcaaaatttccttttgagcaagttgctacaacccttctgacctttgtggggttgttccggaaagctcatgacgagaacctcaagcaaattgaggctgaaaagaagaaagcccagaaagaagctgaaaaggaggcaaaccaggacaaaactcctgtaaaatcaaaaaatgggaatgcagataaatcgccaagatcaccatcaaccttctaatgatgtacggcagaacttcacatggtcatcatttcttcctcaacgaatgcccgcctttgctggcctgggcacaatttcgcaagcatgaacagtatacaaatccataaattccttgtggacaaatgcttacaagacaagatggttttggttcaac

SEQ ID NO: 7472 - DNA, 567 bp, Zea mays
  Clone ID: LIB3061-073-Q1-K6-C1
acaatagtgtaccaacatggcagccaaaaattttgcctccttatgctccttggtctttctgcaagtgctgctacggcgaccattttcccgcaatgctcgcaagctcctatagcttcccttcttcccccgtacctctcaccagcggtgtcttcggtatgtgaaaacccaattcttcaaccctacaggatccaacaggcaatcacagctggcatcttacctttatcacccttgttcctccaacaatcatcagccctattacatcagttacctttggtgcatttattggcacaaaacatcagggcacaacaactacaacaacttgtgctagcaaaccttgctgcctactctcagcaacagcagtttcttccattcaaccaactagctgcattgaactctgcttcttatttgcaacaacaacaactaccattcagccagctacctgctgcctacccccagcaatttcttccattcaaccaactggcagcattgaactctcctgcttatttacagcagcaacaactactaccattcagccagctagctggtgtgagccctgctaccttcttg

SEQ ID NO: 7473 - DNA, 456 bp, Zea mays
  unsure (1)..(456): unsure at all n locations; Clone ID: LIB3061-073-Q1-K6-C11
ggncgcgcgtctccggtcccgtccggggggcggtgatccgatccagccggccggcgatggagctcatcaagtccagggcgaccgtgtgcgcgctcctcctggcgctgctcctgctctcacactacgacggcgggacgacgacgacgatggtggcggaggcccgggtgtgcatgggcgggggccagcaccactcgttcccctgcatctccgaccgcctctgcagcaacgagtgcgtcaaggaggacggcgggtggaccgccggctactgccacctccgctactgcaggtgccagaaggcgtgctaagcaaagctcttcaaacacccttggcttgccagaactgaactctagtagtactaagtaacacccttggctagctgtgcacaacctacgtaccgtgcatgcatgtaatgtggtgtcatgtaacgtgacagcaataaatagtattaataataat

SEQ ID NO: 7474 - DNA, 565 bp, Zea mays
  Clone ID: LIB3061-073-Q1-K6-C12
cccaacgaacgcctacacggggtagacaggggctaccaaaatttagccctccttgcgcttcttgccctttttgtgagcgcaacaaatgcgttcattattccacaatgctcacttgctcctagtgccattattccacagttcctcccaccagttacttcaatgggcttggggggggagctgtgcaagccaacatgcaacaacaagcgcttgcggcgagcgtcttacaacaaccaattgcccaattgcaacaacaatccttgccacatctaacaatacaagccatcacaacgcaacagcaacaacagttcctaccagcactgagccacctagccatggtgaaccctgccgcctacttgcaagagcagctgcttgcatccaacccacttgctctggcgaacgtagttgcaaaccagcaacaacaacagctacaacagtttctgccaacgctcatcaactagccatggtgaaccctgccgcctacgtacaacaacaacaactgctttcatctagcccgctcgctgtgggcaatgcacctacatacctgcaacaacaattgttgcaacag

SEQ ID NO: 7475 - DNA, 575 bp, Zea mays
  unsure (1)..(575): unsure at all n locations; Clone ID: LIB3061-073-Q1-K6-C3
ncanaaacacaccaagcgaacacattagcaacaacctaacaacaatggctaccaanaattatccctccttgcgctttttgcgctttttgcgagcgcaacaaatgcgttcattattccacaatgctcacttgctccaagttccattattacacagttcctcccaccagttacttcaatgggcttcgaacacccagctgtgcaagcctataggctacaacaagcaattgcggcgagcgtcttacaacaaccaatttcccagttgcaacaacaatccttggcacatctaacaatacaaaccatcgcaacgcaacagcaacaacaattcctaccagcactgagccacctagccatggtgaaccctgccgcctacttgcaacagcagttgcttgcatcaaacccacttgctctggcaaacgtagttgcaaaccagccacaacaacagctgcaacagtttctgccagcgctcagtcaactagccatggtgaaccctgccgcctacctacaacagcaacaactgctttcatctagcccgctcgctgtggccaatgcacctacatacctgcaacaacaattgt

SEQ ID NO: 7476 - DNA, 579 bp, Zea mays
  unsure (1)..(579): unsure at all n locations; Clone ID: LIB3061-073-Q1-K6-C4
tccggcaacatagnaaagcacaatagtgtaccaacatggcagccaaaaattttgcctccttatgctccttggtctttctgcaagtgctgctacggcgaccattttcccgcaatgctcgcaagctcctatagcttcccttcttcccccgtacctctcaccagcggtgtcttcggtatgtgaaaaacccaattcttcaaccctacaggatccaacaggcaatcacagctggcatcttacctttatcacccttgttcctccaacaatcatcagccctattacatcagttacctttggtgcatttattggcacaaaacatcagggcacaacaactacaacaacttgtgctagcaaaccttgctgcctactctcagcaacagcagtttcttccattcaaccaactagctgcattgaactctgcttcttatttgcaacaacaacaactaccattcagccagctacctgctgcctacccccagcaatttcttccattcaaccaactggcagcattgaactctcctgcttatttacagcagcaacaactactaccattcagccagctagctggtgtgagccctgcta

SEQ ID NO: 7477 - DNA, 575 bp, Zea mays
  unsure (1)..(575): unsure at all n locations; Clone ID: LIB3061-073-Q1-K6-C6
tccgacgcaaatgncaccagnaaaccatcggggggccgtcgncaggggnaattaatggcgtcgtcgtctagcagcagccaccgccgcctcatcctcgcagccgccgtcctgctctccgtgctcgcggctgccagcgccagcgccgggacctcctgcgtgccggggtgggccatcccgcacaacccgctcccgagctgccgctggtacgtgaccagccggacctgcggcatcgggccgcgcctcccgtggccggagctgaagaggagatgctgccgggagctggcggacatcccggcgtactgccggtgcacggcgctgagcatcctcatggacggcgcgatcccgccgggcccggacgcgcagctggagggccgcctagaggacctgccgggctgcccgcgggaggtgcagaggggattcgccgccaccctcgtcacggaggccgagtgcaacctggccaccatcagcggcgtcgccgaatgcccctggattctcggcggcggaacgatgccctccaagtaactgcgaagagcatagtgcatgaggaatgagcttgtagctagctcaatatgtct

SEQ ID NO: 7478 - DNA, 597 bp, Zea mays
  unsure (1)..(597): unsure at all n locations; Clone ID: LIB3061-073-Q1-K6-C7
gtcgtcggnggccgtcgaggnccagctcctcagaacttcctcgcgggggtcagcgaggccgagcgggacaacgaagtgctcaggatacttggttgcttcaagttaaaccccttcgagcatcttaagttgtcttttgattcatcaccagatgagggtgaaaaagcaatataggaagttgtcattgctggtccatcctgataaatgcaagcatcctcaggcacaagaagcttttgcagctctggcgaaagcacaacagctcctgcttgatccacaggaaagaggctacattcttgaccaagttactgctgcaaaagaagaattgagggcaaagcggaaaaaggagctgaagaaagacagtgcgtccaagataaaatctcttgtagatgagggaaaatatgaagagcagtttgaacgatcggatggatttcagcagcaattaataattaaagtacgtgaaattttgaccgacaaagaatggcgtaggagaaaaatgcaaatgaggatatcagaggaagaaggaagacttaagaaggatgaggaggaaacaaaanagatgtggaagaggaagagagagcatgaagagaagtgggaggagac

SEQ ID NO: 7479 - DNA, 573 bp, Zea mays
  unsure (1)..(573): unsure at all n locations; Clone ID: LIB3061-073-Q1-K6-C8
nanaagacacatagtgtaccaacatggcagccaaaaattttgcctccttatgctccttggtctttctgcaagtgctgctacggcgaccattttcccgcaatgctcgcaagctcctatagcttcccttcttcccccgtacctctcaccagcggtgtcttcggtatgtgaaaacccaattcttcaaccctacaggatccaacaggcaatcacagctggcatcttacctttatcacccttgttcctccaacaatcatcagccctattacatcagttacctttggtgcatttattggcacaaaacatcagggcacaacaactacaacaacttgtgctagcaaaccttgctgcctactctcagcaacagcagtttcttccattcaaccaactagctgcattgaactctgcttcttatttgcaacaacaacaactaccattcagccagctacctgctgcctacccccagcaatttcttccattcaaccaactggcagcattgaactctcctgcttatttacagcagcaacaactactaccattcagccagctagctggtgtgagccctgctaccttctt

SEQ ID NO: 7480 - DNA, 577 bp, Zea mays
  unsure (1)..(577): unsure at all n locations; Clone ID: LIB3061-073-Q1-K6-C9
gtcagcctagcaattagctcatcggctccaggatggnagaaactcgacaccatgaggtgctgatcgttgcccttgctctcctggcgctcgctgcgagcgccgcctccagtacaagcggcggctgtggctgccagacaccaccgtttcatctaccgcctccgttctatatgccgcctccgttctatctgccgccgcagcagcagccgcagccatggcaataccccactcaaccaccgcagctaagcccgtgccagcagttcggatcctgcggcgtcggcagcgtcggcagcccgttcctgggccagtgcgtcgagttcctgaggcaccagtgcagcccggcggcgacgccctacggctcgccacagtgccaggcgctgcagcagcagtgctgccaccagatcaggcaggtggagccgctgcaccggtaccaggcgacatacggtgtggtcctgcagtccttcctgcagcagcagccgcagggcgagctcgcggcgctgatggcggcccaggtagcgcagcagctgacggcgatgtgcggtctgcagctgcagcagccaggtccctgcccttgcaacgc

SEQ ID NO: 7481 - DNA, 346 bp, Zea mays
  unsure (1)..(346): unsure at all n locations; Clone ID: LIB3061-073-Q1-K6-D10
agcgtccgcggcgacgtcctcggcggcctgccgccgggcgtggccgcngacgggcaccgtgtcatggtcgtctctccccgctacgaccagtacaaggacgcctgggacaccagcgtcgtgtccgagatcaagatgggagacgggtancgnagnnacggtcaggttcttccactgctacaagcgcggagtggagcgcgtgttcgttgaccacccactgttcctggagagggtttggggaaagaccgaggagaagaatctacgggccttgtcgcttggaacggnnactacagggnacccaaccagnnctgcggttcagcctgctatgccaggcagcactttgaagctc

SEQ ID NO: 7482 - DNA, 600 bp, Zea mays
  Clone ID: LIB3061-073-Q1-K6-D11
gtgcaggtgacggcggcgcgctaccggggacgggggatacggcggcatcgtccccctcggcccctcctccatccccggcgcggcggcgccagcagccggcctgcaggttttgcaggtttcacacttcttatcatggatgataagaacaaagtcaagaaggaaatagatggcccccttggacccccacctcgcaggggggacttaaattcgcaccaaagtacctcagaagaaacctgccaaggttgtcccaaagaaggaaccggttgaagagagaaaggaggatgctttggataaggagttattgatgaaacttaagatgtcgcaaaacaagtatccctcaagaattaagtccgacgaaaagccaagaagtggtacacaggttgcatttggacaaggaaactcttattatgcaagaaattttcccatgcccaaaaaggattcttcatcaggtggagcttcgaagttaccaaaagaatatgcagaaccatgggactatagccatgattatcctgttactctcccactaaggaagccctactctggaaatcctgaaattctggatgaggaagaatttggagaatcttctgccagcaggaccca

SEQ ID NO: 7483 - DNA, 578 bp, Zea mays
  unsure (1)..(578): unsure at all n locations; Clone ID: LIB3061-073-Q1-K6-D12
ncactagcaacanagnaaagcacaataggggacgcgcgatggcagccaaaaattttgcttccttatgctccttggtctttctgcaagtgctgctaccgcaaccattttcccacaatgctcacaagctcctatagcttcctttcttcccccatacctctcaccagcggtgtcttcagggggggagggcccaattcttcaaccctacaggatccaacaggcaatcgcagcaggcatcttacctttatcacccttgttcctccaacaaccgtcagccctattacagcagttacctttggtgcatttgttggcacaaaacatcaaggcacaacaactacaacaacttgtgctaggaaaccttgctgcctactctcagcaacagcagtttcttccattcaaccaactggctgcattgaactctgctgcttatttgcaacaacaactaccattcagtcagctagctgctgcctacccccagcaatttcttccattcaaccaactggcagcattgaactctgctgcttatttacaacagcaacagctaccaccattcagccagctagctgatgtgagccctgttg

SEQ ID NO: 7484 - DNA, 588 bp, Zea mays
  Clone ID: LIB3061-073-Q1-K6-D2
cactttgtcaccaatctgcctgcgttccaccggtactggtattcctatgtgtcaaatcagttcctgtgccacatgtgcaaccggaggaacgatttctggtgggtcgcattggtccaaaagagtataggctatacagggtcattgtcagatatggttatcgcgatgtgcagaaggatgacctggagttcgagaaggagctagtcagcaacattgcagagttcatccgcagcagtggggaatatgacaagaatggcttcgtggaggacacagataagcccttgcccttcgagaagctgtccaccatcagtaccggaatcaatatgttggaagaggatggagaagttgatgcatatgtatcccctcataaggagatagacccacacaatgcagcacccaagcgaaagaaagccaggttcatgataccaaagagtgctcaggtggacagtgaggtgcgccgcgagctgcaggagctcatggacgctagggaggcaggcatgtccttcatcctggggcactcgtacatgaaggcgaagagcgggtcgagtttcataaagcggattgtgataaacttcttctacgagttcttga

SEQ ID NO: 7485 - DNA, 577 bp, Zea mays
  unsure (1)..(577): unsure at all n locations; Clone ID: LIB3061-073-Q1-K6-D3
ggnacatggnctagttgctgcactgtttctgtgattcaccatgggnagcagtggagcagatacaccgtctaaggagcagcagccacctgctacctcaggtgctgcaataccacctgtttatccagattggtctagcttccaggcatatcccccaatcccaccacatggattcttcccctcacctgtggcatcaagtccacagggtcatcctttcatgtggggagctcaagctatgattccaccttatggaacaccgccaccatatgtcatgtacccccctggagtatatgcccacccatctatgcccccgggtgcacatccatttactccttatgccattacttctccaaatggcaatgctgatgctactctggtaatactgatggcaagccctctgaaggcaaagataaaagtccaacaaagcgatccaaaggaagtttgggcagcttgaacatgcttactggaaagaatcccagtgaacatggtaagtcctcaggtgcatcgggtaatggagtcacttctcaaagtggcgaaagtggcagtgacagttcaagcgaagggagtgaaggaaattctc

SEQ ID NO: 7486 - DNA, 592 bp, Zea mays
  unsure (1)..(592): unsure at all n locations; Clone ID: LIB3061-073-Q1-K6-D4
ggnacatggnctagttgctgcactgtttctgtgattcaccatgggnnaagcagtggagcagaacaccgtctaaggagcagcagccacctgctacctcaggtgctgcaataccacctgtttatccagattggtctagcttccaggcatatcccccaatcccaccacatggattcttcccctcacctgtggcatcaagtccacagggtcatcctttcatgtggggagctcaagctatgattccaccttatggaacaccgccaccatatgtcatgtacccccctggagtatatgcccacccatctatgcccccgggtgcacatccatttactccttatgccattacttctccaaatggcaatgctgatgctactctggtaatactgatggcaagccctctgaaggcaaagataaaagtccaacaaagcgatccaaaggaagtttgggcagcttgaacatgcttactggaaagaatcccagtgaacatggtaagtcctcaggtgcatcgggtaatggagtcacttctcaaagtggcgaaagtggcagtgacagttcaagcgaagggagtgaaggaaattctcacaatgattcacat

SEQ ID NO: 7487 - DNA, 595 bp, Zea mays
  unsure (1)..(595): unsure at all n locations; Clone ID: LIB3061-073-Q1-K6-D5
nagnaaagcaggccaagcctgnccttatcattggcaactacagcgatggcaacctagtcgccactctgctcgcacacaagttgggagtcactcagtgtaccatcgctcatgccttggagaaaaccaaataccccaactcggacatctacttggacaagttcgacagccagtaccacttctcttgccagttcacagctgaccttattgccatgaaccacactgatttcatcatcaccagcacattccaagaaatcgcgggaagcaaggacaccgtggggcagtacgagtcccacatcgcgttcactcttcctgggctctaccgtgtcgtccatggcatcgatgttttcgatcccaagttcaacattgtctcccctggagcagacatgagtgtttactacccgtatacggaaaccgacaagagactcactgccttccatcctgaaatcgaggagctcatcaacagcgacgtcgagaactccgagcacaagttcgtgctgaaggacaagaagaagccgatcatcttctcgatggcgcgtctcgaccgcgtgaagaacatgacaggcctggtggagatgtacggcaagaacgcgcgcct

SEQ ID NO: 7488 - DNA, 553 bp, Zea mays
  unsure (1)..(553): unsure at all n locations; Clone ID: LIB3061-073-Q1-K6-D6
caccttccgcaaatactagtgacatcnctgggggggggggggccccagggagccaaaatttgtccgtgcttgccctccttgctctttcagcaagcgctgctacctttactattattccacaatgctcacaacaatacctttatccggtgacagccgccggatttcaacacccaactctacgggggggcgtgctacatgaggccatcgtagcaagcatcttacggtcattagcattaaccctccaacaggcatatgccctattgcaacaaccatccttagggcatctgtatctccaaagaatggcgacacaacaactacaaccactgttgctaccaacaatcaatcaagtagttgcagcgaaccttgctgcttatctccagcaacaacaatttcttccattcaatcaactaactggggtgaaccctgctgtactacttgcaggcacaacaactactaccatttaaccaacttgtgcggtagccctagatgccttgtttactgccaaccaacaacctatctgccattccattctcccaacctgggcaaaaacatt

SEQ ID NO: 7489 - DNA, 477 bp, Zea mays
  Clone ID: LIB3061-073-Q1-K6-D7
atcaccaatggctgcattgagctctgctgcttatttgcaacaacaactaccattcagtcagctagctgctgcctacccccagcaatttcttccattcaaccaactggcagcattgaactctgctgcttatttacaacagcaacagctaccaccattcagccagctagctgatgtgagccctgttgccttcttgacacaacaacagttgttgccgttctacctgcacgctgcgcctaacgctggcaccctcttacaactgcaacaattgctgccattcaaccaacttgctttgacaaacccaacagcgttctaccaacaacccatcattggtggtgccctcttttagattgcttatgagttatacttcaataatgaagttttttggatgatgtttgtggcttcccagaaataagaaagtacatttctagattcttatgtgcttctagcctccaaagtggttgatagttattttgctct

SEQ ID NO: 7490 - DNA, 589 bp, Zea mays
  Clone ID: LIB3061-073-Q1-K6-D8
gcaaacggcatgcgtaaagggatcgtcgacagaacacatgaagaggtcatcgttctcgtcgtgtgcctggctctgtcagctgccagcgcctctgcaatgcagatgccctgcccctgcgcggggctgcagggcttgtacggcgctggcgccggcctgacgacgatgatgggcgccggcgggctgtacccctacgcggagtacctgaggcagccgcagtgcagcccgctggcggcggcgccctactacgccgggtgtgggcagccgagcgccatgttccagccgctccggcaacagtgctgccagcagcagatgaggatgatggacgtgcagtccgtcgcgcagcagctgcagatgatgatgcagcttgagcgtgccgctgccgccagcagcagcctgtacgagccagctctgatgcagcagcagcagcagctgctggcagcccagggtctcaaccccatggccatgatgatggcgcagaacatgccggccatgggtggactctaccagtaccagctgcccagctaccgcaccaacccctgtggcgtctccgctgccattccgccctactactgattcatgatatttggga

SEQ ID NO: 7491 - DNA, 578 bp, Zea mays
  unsure (1)..(578): unsure at all n locations; Clone ID: LIB3061-073-Q1-K6-D9
ttcagnaacacacctnagcgaacgcactagcaacgacctaacaacaatggctaccaagnaattatccctctttgcgcttcttgccctttttgtgagcgcaacaaatgcgttcattattccacaatgctcacttgctcctagtgccattattccacagttcctccctccagttacttcaatgggcttcgaacacccagctgtgcaagcctacaggctacaacaagcgcttgcggcgagcgtcttacaacaaccaattgcccaattacaacaacaatccttggcacatctaaccatacaaaccatcgcaacgcaacagcaacaacaatttctaccagcactgagccaactagctgtggtgaaccctgtcgcctacttgcaacagcagttgcttgcatccaacccacttgctctggcaaacatagttgcataccaacaacaacaacaattgcaacagtttctaccagcgctcagtcaactagccatggtgaaccctgccgcctacctacaacagcaacaactgatttcatctagccctctcgctgtggttaatgcacctacatacctgcaacaacagttgc

SEQ ID NO: 7492 - DNA, 583 bp, Zea mays
  unsure (1)..(583): unsure at all n locations; Clone ID: LIB3061-073-Q1-K6-E1
tcgccccgcgtccgttccgccgccgctccggctggagcgcgtcgcccgccgccacatcctacagcgacctcatcgatcaccttcaactttcaatcatggcggacgtcgatgtcgaaccggaggttgccgccggcgctcccaagaagaggacgttccgcaagtacagctaccgcggcgtcgacctagatgcgcttctcgacatgtccacggacgacctcgtccagctcttccccgcgcgcgccaggagaaggttccagaggggtctgaagaggaagcccatggcactcatcaagaagctgcgcaaggcgaaaaaggatgctcctgctggtgagaagccagagccagtcaagacacatctccgtaacatgatcattgtccctgagatgattggaagcattgttggggtctacaacggcaagacgttcaaccaggttgagatcaagcctgagatgatcggccactaccttgctgagttctccatctcctataagccggtcaagcatggcaggcccggtatnggtgccacccactcctcgcggtttattcctctgaaatgagctgttacccgtctctgtagtctccc

SEQ ID NO: 7493 - DNA, 590 bp, Zea mays
  unsure (1)..(590): unsure at all n locations; Clone ID: LIB3061-073-Q1-K6-E10
agcgtccgctccaaacgcanaanacccgcacgacaccatggaggtgttgctcgttgccctcgctctcctggctctcgctgcgagcgccacctccacgcatacaagcggcggctgcggctgccagccaccgccgccggttcatctaccgccgccggtgcatctgccacctccggttcacctgccagcgccggtgcatctcccaccgccggtccacctgccgccgccggtccacctgccaccgccggtccatgtgccgccgccggttcatctgccgccgccaccatgccactaccctactcaaccgccccggcctcagcctcatccccagccacacccatgcccgtgccaacagccgcatccaagcccgtgccagctgcagggaacctgcggcgttggcagcaccccgatcctgggccagtgcgtcgagtttctgaggcatcagtgcagcccgacggcgacgccctactgctcgcctcagtgccagtcgttgcggcagcagtgttgccagcagctcaggcaggtggagccgcagcaccggtaccaggcgatcttcggcttggtcctccagtccatcctgcagcagcagccgc

SEQ ID NO: 7494 - DNA, 584 bp, Zea mays
  unsure (1)..(584): unsure at all n locations; Clone ID: LIB3061-073-Q1-K6-E11
cttggcctcatgcccactccattaaccatatattgcaatccctataggaaccccngattgtctcatatccaagtataacactgtcgttgaattatactccatacacaaaacaatatgaccataggagttgtgccagccaaaactagcataagtttaaccaagtttgtagtaaatagtgattaacatttatgtatctagctacgtttacaatngaaaatatacttcacaattgatttaaaacatatttattttatatcatagatgttagtaccccttccatcccatattattattcgttgtaactcctaatttatatgtctatattcaaataaaagataatgaatctagacacatgaaacttatacatcaagtattgtatgcatttcttaaaaatccaaaacgaattttaatatgggacagagggagtacctttttatataattttgatcaaacttcaaattatttgacccctcaaaaagtgataattgtattttttgtgtggagagagaacctataataaaataaaatgagttatgaacaggacggttccaaaatttgtgggctatgaattttgtcttcttttt

SEQ ID NO: 7495 - DNA, 577 bp, Zea mays
  unsure (1)..(577): unsure at all n locations; Clone ID: LIB3061-073-Q1-K6-E2
caaacaatagcgacagctcgacaaantttgtngagatgatccggcgctgagaagantggctaagatcgccgcagccgccgcggcggcggcggcgctgtgcttcgcggccctggtggccgtggccgtctgccaaggcgaggtcgagcggcagaggctcagggacctgcagtgctggcaggaggtccaggagagcccgctcgacgcgtgccgccaggtcctcgaccggcagctaaccggcggcggcgtcggcggcccgttccggtggggcaccgggctccggatgcggtgctgccagcagctccaggacgtgagccgcgagtgccgctgcgccgccatccggagcatggtcaggggctacgaggaggccatgccgcctctggagaaaggctggtggccatgggggcggcagcagcagccgccgccgcagggaggaggaggaggacaggggggctactactacccctgcagccgggcaggagagggataccaaacgcagatgtatccaccgtgtcgtcccggcaccaccgggccaaggatcggccgcgtgaggcttacgaaggcccgggagtacgccgcg

SEQ ID NO: 7496 - DNA, 565 bp, Zea mays
  unsure (1)..(565): unsure at all n locations; Clone ID: LIB3061-073-Q1-K6-E4
gngnaaagacacctcccccctcgngaattggggaacaggacagactgacacctattgcgagaaaaaaaaaacagccgacagttgcatgatccctngaacgaataaattcagaactagnaaaacagatgtcagtaaacaacatgtggtgaatgttggaacttgaactgctctagttcagtgggcatctgttgttgcatgcttgggatggatttaatgtttcgttttttttcttccttgtactgaagtgctctgatcggtaacgatcactgtgtgtgaagtgcttgattgttatgtggtatcatgagaatgaataaacataataatggagctgtttttttattttttactgaagaaaaaaaaaaaaaaaaaaaaaaaaaaaaaaaaaaaaaaaaaaaaaaaaaaaaaaaaaaaaaaaaaaaaaaaaaaaaaaaaaaaaaaaaaaaaaaaaaaaaaaaaaaaaagggggggggcccttttaaaggacccaagtttactaccccgggcttgcaaggaaaaagtttttttttggggcccccaaaataaaattcctgggccgggttttaaa

SEQ ID NO: 7497 - DNA, 579 bp, Zea mays
  unsure (1)..(579): unsure at all n locations; Clone ID: LIB3061-073-Q1-K6-E5
ggncgtcagcctagcaattagctcatcgactccagaattggagaactcgacaccatgaggtgctgatcgttgcccttgctctcctggcgctcgctgcgagcgccgcctccagtacaagcggcggctgtggctgccagacaccaccgtttcatctaccgcctccgttctatatgccgcctccgttctatctgccgccgcagcagcagccgcagccatggcaataccccactcaaccaccgcagctaagcccgtgccagcagttcggatcctgcggcgtcggcagcgtcggcagcccgttcctgggccagtgcgtcgagttcctgaggcaccagtgcagcccggcggcgacgccctacggctcgccacagtgccaggcgctgcagcagcagtgctgccaccagatcaggcaggtggagccgctgcaccggtaccaggcgacatacggtgtggtcctgcagtccttcctgcagcagcagccgcagggcgagctcgcggcgctgatggcggcccaggtagcgcagcagctgacggcgatgtgcggtctgcagctgcagcagccaggtccctgcccttgcaacg

SEQ ID NO: 7498 - DNA, 339 bp, Zea mays
  Clone ID: LIB3061-073-Q1-K6-E7
attcttccattaaccaatggccgcacgtgacccctctgcttatttccagcagcaaatactactaccatttggccagctagctacaacaagccccgcttccttcttgacacaacaacaagtgcttccgttctaccagcagtttgtggctaaccccgcaaccctcttacaactgcaacagttgctgccctttgtccaacttgctttgacaaacccagcagccttctaccaacaacacatcattggcggtgccctcttttagattgcttattagttgtaattcaataatgaagttttttggctgatgtatgtggcctcctagaaataagaagttatatttcc

SEQ ID NO: 7499 - DNA, 568 bp, Zea mays
  Clone ID: LIB3061-073-Q1-K6-E9
gcccgcccgggtctcttcctcttccttggttccattcaagaacactactgttaccagccagccagtcgttcgttaagaagagagcgagcgagcaagagagagagagagggagaagggggaagatcagaacgaagagagggagatgagggggcaaacgcagacagcttccgcggggggccggtggcgaggcgacggcgctgcggcgtggtgttggtggtgggtggccgtggtcctcctgcttggccatttaccgagctgcgcgcgcgcggggctgctggagtccaacccgggcctggcctacaacttctacaagaacagctgccccagcgtggactccatcgtccgcagcgtcacctgggcgcaggtcgccgccaaccctgccctcccggctcgcctcctccgcctccacttccatgactgcttcgtcaagggctgcgacgcgtcgatcctgctggacaccgcgcagagcgagaagacggcggcgccgaacctgtcggtgggcgggtacgaggtgatcgacgcgatcaaggcgcagctggagagggcgtgcccgggcgtggtgtcgtgc

SEQ ID NO: 7500 - DNA, 566 bp, Zea mays
  Clone ID: LIB3061-073-Q1-K6-F10
gtgctattttcaataacatctatgcattctgtgggttgatttctggcgaacagttctattcatccgagagtcttgatgatagccaaagctgtttgctgatgcattggtaaagaagcatatgatactggattatgcatgaattgaggcaaagtctattgaccttaaccaagaaaaggctgcatccactggtcaagctgagacgcatgcttctgcgggtggttcgacttcgtatcaacaacacctctcctcaacgagcatgccagggtcatcaccatcaggtggaactgattccgtagggtatggtgccgaccattcagcagcacatctacctcaactccagagttcatccaccaatgtccaggcgccatacgatgacacattttctttcttaccgcctaacatgctgacagggtctgcaaacgatgccatgggtctggaactgggccagttgcaccaagtaatttctcagggccaggcaattcagccagcaaacgtgggatacgttgattggcccagaaaccgcgacagtcagtacgccgacgacttcactgaagacattcgcgtga

SEQ ID NO: 7501 - DNA, 592 bp, Zea mays
  unsure (1)..(592): unsure at all n locations; Clone ID: LIB3061-073-Q1-K6-F12
ncagcaagcaacatagnaaagtanaatccattagcaacaatagnacaacaatggcgaccaagaattttccctccttatgctccttgctctttctacatgtgttgctaacgcgacaattttccctcaatgctcacaagctcctatagcttcccttcttcccccataccttccatcaattaggggggggggatgtgaaaacccagctcttcaaccatataggcttcaacaagcaatcgcagcaagcaacatacctttatcgcccttgttgtttcaacaatcaccagccctatctttggtgcagtcattggtacaaaccatcagggcacaacagctgcagcaactcgtgctacctgtgatcaaccaagtagctctggcaaacctttctccctactctcagcaacaacaatttcttccattcaaccaactgtctacactgaaccctgctgcttatttgcagcaacaactattaccatttagccagctagctactgcctactctcagcaacaacaacttcttccatttaaccaattggccgcactgaaccccgctgcttatttgcagcagcaaatactactgccatttagcgagcta

SEQ ID NO: 7502 - DNA, 583 bp, Zea mays
  unsure (1)..(583): unsure at all n locations; Clone ID: LIB3061-073-Q1-K6-F2
cgcctctactttcttctctctctgctcctccgcctccgcctngaccatccaagacgggatcgccatgtcggactcggaggagcaccacttcgaatcgaaggccgacgctggggcgtccaagacctacccgcagcaggctggcaccgtccgtaagaacggcttcatcgtcatcaagaaccgtccctgcaaggttgtggaggtttctacctccaagactggtaagcatggccacgccaaatgccactttgtcgccatagaccatattcaatgggaaaaagcttgaagatattgttccttcatcacacaactgtgacattccgcatgtgaaccgtactgagtatcagctgattgatatttctgaggatggatttgtgagccttcttacttcagatggcaacactaaggatgatcttagactcccaactgatgagactcttgtggcccagattaaggaagggttcgaaagcgggaaggatcttgttgtgactgtccagtctgcgatgggggaggagcagatctgcgcgttgaaggatgttggccccaagtaacttccttggctttggagacggaaccctactgtatc

SEQ ID NO: 7503 - DNA, 589 bp, Zea mays
  unsure (1)..(589): unsure at all n locations; Clone ID: LIB3061-073-Q1-K6-F3
caaaaaacacctaccagnactccttagagaggacaaccaattaagatctggcagtggtgaacattcttcagctacttgttctgctacagattcaatgcaggcaggattcacggcatcagatcatatggacctactgattgagcaaattaagatgctcgctggggaggttgcatttggtaccagttcgctgaaaggctaatcgaacagtccatagatgatcctgaagggtcaaaggaccaaatagagaatttagagcgtgaaatccagcaaaagagaagacatatgcgagccttgngaaaaacaaatcatggaaagtggcgaggcatcagttgctaatgcatccatggtggatatgcagcagactattacaaaactaactgctcagtgcagtgagaaggcttttgagttagagttaaagtcagctgataatcgtgttctccaggagcagctacaacagaagaatgcggaagtcaacgatttacaagaaaaagtttttcaccttgagcaacaactctccgcaaaagtgggtatatcccctgagcaggaaactgattgtgcacagcaggaggctattgatttgaaatctaaa

SEQ ID NO: 7504 - DNA, 513 bp, Zea mays
  unsure (1)..(513): unsure at all n locations; Clone ID: LIB3061-073-Q1-K6-F4
taaaaaatacatttctagattctggggaagcccaaactcatccaaaaacttcattattgaactataactcataagcaatctaaaagaggcaccgccaatgatgggttgttggtagaacgttgttgggtttgtcaaagcaagttggttgaatggcagcaattgttgcagttgtaagagggtgccagcgttaggcgcagcgtgcaggtagaacggcaacaactgttgttgtgtcaagaaggcaacagggctcacatcagctagctggctgaatggtggtagctgttgctgttgtaaataagcagcagagttcaatgctgccagttggttgaatggaagaaattgctgggggtaggcagcagctagctgactgaatggtagttgttgttgcaaataagcagcagagttcaatgcagccagttggttgaatggaagaaactgctgttgctgagagtaggcagcaaggtttcctagcacaagttgntgtngttttacctggacgctgtgcctaaagct

SEQ ID NO: 7505 - DNA, 586 bp, Zea mays
  unsure (1)..(586): unsure at all n locations; Clone ID: LIB3061-073-Q1-K6-F5
tagcaacatagnaagcacaatagtgtaccaacaatggcagctaaaaattttgcctccttatgctccttggtctttctgcaagtgctgctacggcgaccattttcccacaatgctcacaagctcctatagcttcccttcttcccccgtacctctcaccaacggtgtcttcggtattgtgaaaacccaattcttcaaccctacaggatccaacaggcaatcgcagctggcatcttacctttatcacccttgttcctccaacaatcatcagccctattacagcagttacctttggtgcatttattggcacaaaacatcagggcacaacaactacaacaacttgtgctagcaaaccttgctgcctactctcagcaacagcagtttcttccattcaaccaactagctgcattgaactctgcttcttatttgcaacaacaacaactaccattcagccagctatctgctgcctacccccagcaatttcttccattcaaccaactgacagcattgaactctcctgcttatttacagcagcaacaactactaccattcagccagctagctggtgtgagccctgctaccttcttga

SEQ ID NO: 7506 - DNA, 583 bp, Zea mays
  unsure (1)..(583): unsure at all n locations; Clone ID: LIB3061-073-Q1-K6-F6
ctgggtcttcaaaccatagctttactactccagacgcanaagacccgatcgacaccatgagggtgttgctcgttgccctcgctctcctggctctcgctgcgagcgccacctccacgcatacaagcggcggctgcggctgccagccaccgccgccggttcatctaccgccgccggtgcatctgccacctccggttcacctgccacctccggtgcatctcccaccgccggtccacctgccgccgccggtccacctgccaccgccggtccatgtgccgccgccggttcatctgccgccgccaccatgccactaccctactcaaccgccccggcctcagcctcatccccagccacacccatgcccgtgccaacagccgcatccaagcccgtgccagctgcagggaacctgcggcgttggcagcaccccgatcctgggccagtgcgtcgagtttctgaggcatcagtgcagcccgacggcgacgccctactgctcgcctcagtgccagtcgttgcggcagcagtgttgccagcagctcaggcaggtggagccgcagcaccggtaccaggcgatcttcggcttggtcct

SEQ ID NO: 7507 - DNA, 595 bp, Zea mays
  unsure (1)..(595): unsure at all n locations; Clone ID: LIB3061-073-Q1-K6-F7
agcgtccgnacatcattcatcttagtagtataggggcgcaaacaaatctgcaacatcaattatctaactccaaaaccatgaagctggtgcttgtggttcttgctttcattgctttagtatcaagtgtttcttgtacacagacaggcggctgcagctgtggtcaacaacaaagccatgagcagcagcgggatccacaacaacatcatccacaaaaacaacaacatcaaccaccaccacaacatcaccagcagcagcaacaccaacaacaacaagttcacatgcaaccacaaaaacatcagcaacaacaagaagttcatgttcaacaacaacaacaacaaccgcagcaccaacaacaacaacaacaacaacagcaccaacaacaacatcaatgtgaaggccaacaacaacatcaccaacaatcacaaggccatgtgcaacaacacgaacagagccatgagcaacaccaaggacagagccatgagcaacaacatcaacaacaattccagggtcatgacaagcagcaacaaccacaacagcctcagcaatatcagcagggccaggnaaaaatcacaacagcaacaatgtcattgccagg

SEQ ID NO: 7508 - DNA, 604 bp, Zea mays
  Clone ID: LIB3061-073-Q1-K6-F8
cttttattccacatgctcacaacaatacctctctccggtgacaggcgcggggattcaatacccaactatacaatcctacatggtacaagaggccatccaagcaagcatcttacggtcattagcattaaccctccaacaaccatatgctctattgcaacagccatccttagtgcatctgtatctccaaagaatcgcggcacaacaactacaacaacagttgctaccaacaatcaatcaagtagttgcagcgaaccttgctgcttacctccagcaacaacagtttcttccattcaatcaactagctggggtgaaccctgctatctacttgcaggcacaacagctactaccatttaaccaacttgtcgggagcccttatgccttcttactgcaacaacagcttctgccattccatctgcaagctgtggcaaacattgttgctttcttgagacaacaacatttgttgccattttacccacaagttgtgggaaacattaatgccttcttgcaacagcaacaattgctaccattctacccacagaatgtggcaaacattgttgccttcttacaacaacaacaattgctaccatttagccaacatgctttg

SEQ ID NO: 7509 - DNA, 589 bp, Zea mays
  unsure (1)..(589): unsure at all n locations; Clone ID: LIB3061-073-Q1-K6-F9
gtccgcgtcgtcgtcgcgcctgggcctgctgctccctcgntactccaacgtccattctcttgtctacatcgtccaagggagagggatcattgggttctcgtttccgggatgccaagaggagacccagcagcagcagtatggatacggatatggatatggacaccatcaccatcagcatgaccaccacaagatccaccgattcgagcagggcgacgtggtggccatgccggccggcgcccagcactggctgtacaacgacggcgacgcgccgcttgtggcggtctacgtcttcgacgagaacaacaacatcaaccagctcgagccgtccatgaggaaattcttgctggctgggggcttcagcaaggggcagccccacttcgccgagaacatcttcaaagggatcgacgcccggttcctgagcgaagccctgggcgtcagcatgcacgtcgccgagaagctgcagagccggcgtgaccagcgaggcgagatcgtccgcgtggagccggagcacggctttcaccagctgaatccgtcgccgtcgtcgtcgtcgttttcgttcccatcgtcacaaggccagtaccaaacgtgc

SEQ ID NO: 7510 - DNA, 566 bp, Zea mays
  unsure (1)..(566): unsure at all n locations; Clone ID: LIB3061-073-Q1-K6-G1
agcgtccggnacagggtcagcccttatacagcaggtacctttggtgcatttgttggcacaaaaatcaaggcacaacaactacaacaacttgtgctaggaaaccttgctgcctactctcagcaacagcagtttcttccattcaaccaactggctgcattgaactctgctgcttatttgcaacaacaactaccattcagtcagctagctgctgcctacccccagcaatttcttccattcaaccaactggcagcattgaactctgctgcttatttacaacagcaacagctaccaccattcagccagctagctgatgtgagccctgttgccttcttgacacaacaacagttgttgccgttctacctgcacgctgcgcctaacgctggcaccctcttacaactgcaacaattgctgccattcaaccaacttgctttgacaaacccaacagcgttctaccaacaacccatcattggtggtgccctcttttagattgcttatgagttatacttcaataatgaagttttttggatgatgtttgtggcttcccagaaataagaaagtacatttct

SEQ ID NO: 7511 - DNA, 578 bp, Zea mays
  unsure (1)..(578): unsure at all n locations; Clone ID: LIB3061-073-Q1-K6-G10
nagactcctcggtgccctatgacgatgggggggggggaagccagaaccgcgaggcgccccccgcgttcgatgacctgctcggtggatttggtaagagctcacaggtgaggggagaggtggatgacaagaggaaaccagaggcacctacggctgctgcggctactgggttcgattattggaggcgcgcaggctttggcgggagaagctccccgcggcaaagggatgctattggtgcaaaacaaaagaaagtttccatgtcgacatctaagcaatcagctagcttaagcgaccccttcgttgttctcgaaacaacttcatcctcagcccatccattcgcagatcccttggatgaatccggtaaagctgcaaaatatcaagggaaaagccgtgaaagtactagcgttgggagcagtctgtttgaggattcaagcactttcaatcaggctccaaaatctggacctttttttaccccagaggtggataatggctcgaaagataggaatgagtcaagcagagcccaaaactcaaatcctgtacaggatttttctaaaagaaactcctcccaacaaccttctgtt

SEQ ID NO: 7512 - DNA, 520 bp, Zea mays
  Clone ID: LIB3061-073-Q1-K6-G11
cgagtgatgcttatggcgcaaacaaacaaaagaatagtgccaaagttcaactgaaatcttccccgtggaggacgcgaactacccttacagcgccttcatcgcgtcggtccggaaagacgtgatcagggggggggccgaccataaagggatcttccagcccgtgctgccaccggagaagaaggtcccggagctatggttctacacagagctcaaaactaggaccagctccatcacgctcgccatacgcatggacaacctgtacctcgtgggcttcaggaccccgggcggggtgtggtgggagttcggcaaggacggcgacacccacctcctcggcgacaaccccaggtggctcggcttcggcggcaggtaccaggacctcatcggcaacaagggtctggagaccgtcaccatgggccgcgccgaaatgaccagggccgtcaacgacctggcgaagaagaagaagatggcgacactggaggaggaggaggtgcagatgcagatgcagatgccggaggccgct

SEQ ID NO: 7513 - DNA, 570 bp, Zea mays
  unsure (1)..(570): unsure at all n locations; Clone ID: LIB3061-073-Q1-K6-G2
gcaacatagnaagcacaatagtgtaccaacatggcagccaaaaattttgcctccttatgctccttggtctttctgcaagtgctgctacggcgaccattttcccgcaatgctcgcaagctcctatagcttcccttcttcccccgtacctctcaccagcggtgtcttcggtatgtgaaaacccaattcttcaaccctacaggatccaacaggcaatcacagctggcatcttacctttatcacccttgttcctccaacaatcatcagccctattacatcagttacctttggtgcatttattggcacaaaacatcagggcacaacaactacaacaacttgtgctagcaaaccttgctgcctactctcagcaacagcagtttcttccattcaaccaactagctgcattgaactctgcttcttatttgcaacaacaacaactaccattcagccagctacctgctgcctacccccagcaatttcttccattcaaccaactggcagcattgaactctcctgcttatttacagcagcaacaactactaccattcagccagctagctggtgtgagccctg

SEQ ID NO: 7514 - DNA, 569 bp, Zea mays
  unsure (1)..(569): unsure at all n locations; Clone ID: LIB3061-073-Q1-K6-G3
ggcccaatagcacatanaagcacatagtgtaccaacaatggcagccaaaatttttgcctccttatgctccttggtctttctgcaagtgctgctacggcgaccattttcccgcaatgctcgcaagctcctatagcttcccttcttcccccgtacctctcaccagcggtgtcttcggtatgtgaaaacccaattcttcaaccctacaggatccaacaggcaatcacagctggcatcttacctttatcacccttgttcctccaacaatcatcagccctattacatcagttacctttggtgcatttattggcacaaaacatcagggcacaacaactacaacaacttgtgctagcaaaccttgctgcctactctcagcaacagcagtttcttccattcaaccaactagctgcattgaactctgcttcttatttgcaacaacaacaactaccattcagccagctacctgctgcctacccccagcaatttcttccattcaaccaactggcagcattgaactctcctgcttatttacagcagcaacaactactaccattcagccagctagctggtgt

SEQ ID NO: 7515 - DNA, 561 bp, Zea mays
  unsure (1)..(561): unsure at all n locations; Clone ID: LIB3061-073-Q1-K6-G4
gcacatagcaacacctaacacatggctaccaagnaattatccctccttgcgcttcttgcgctttttgcgagcgcaacaaatgcgttcattattccacaatgctcacttgctccaagttccattattacacagttcctcccaccagttacttcaatgggcttcgaacacccagctgtgcaagcctataggctacaacaagcaattgcggcgagcgtcttacaacaaccaatttcccagttgcaacaacaatccttggcacatctaacaatacaaaccatcgcaacgcaacagcaacaacaattcctaccagcactgagccacctagccatggtgaaccctgccgcctacttgcaacagcagttgcttgcatcaaacccacttgctctggcaaacgtagttgcaaaccagccacaacaacagctgcaacagtttctgccagcgctcagtcaactagccatggtgaaccctgccgcctacctacaacagcaacaactgctttcatctagcccgctcgctgtggccaatgcacctacatacctgcaacaacaattgttgcaacag

SEQ ID NO: 7516 - DNA, 570 bp, Zea mays
  unsure (1)..(570): unsure at all n locations; Clone ID: LIB3061-073-Q1-K6-G5
nattccctgcgnatcctctcccctcgcctcctcgtctccccctagggatcgtcggagagaacgcaaangggccgtctcatccgagttaaggaagccatggagcacaaggaggctgggtgccaggcccccgagggacccatcctctgcatcaataactgtggcttcttcggcagcgcggcgaccatgaacatgtgctccaagtgccacaaggagatgataacgaagcaggatcaggccaagctggctgcctcctctatcgacagcatcgtgaacggcagcgacgccgtcatggagccggttgttgctggcagcaacacggtagtagctgttgcccaagttgagttgcaaacaatgaacgtgcagcagcccgctgatgttgccggacccagcgagggggtggcggcgatctccaaagggggaaggtagggccgaaccggtgcagcgcctgcaggaagagggttggacttacgggattcaactgccggtgtgggaacttgtactgcgcactccaccgctactccgacaagcacgactgcaagttcgactaccggactgctgccagggacgcca

SEQ ID NO: 7517 - DNA, 576 bp, Zea mays
  unsure (1)..(576): unsure at all n locations; Clone ID: LIB3061-073-Q1-K6-G6
cagcaagcacatanaagtagaatccatagcaacaatagagcaacaatggcgaccaagnaattttccctccttatgctccttgctctttctacatgtgttgctaacgcgacaattttccctcaatgctcacaagctcctatagcttcccttcttcccccataccttccatcaattatagcttcagtatgtgaaaacccagctcttcaaccatataggcttcaacaagcaatcgcagcaagcaacatacctttatcgcccttgttgtttcaacaatcaccagccctatctttggtgcagtcattggtacaaaccatcagggcacaacagctgcagcaactcgtgctacctgtgatcaaccaagtagctctggcaaacctttctccctactctcagcaacaacagtttcttccattcaaccaactagctgcattgaactctgcttcttatttgcaacaacaacaactaccattcagccagctatctgctgcctacccccagcaatttcttccattcaaccaactgacagctttgaactctcctgcttatttacagcagcaacaactactaccattcagc

SEQ ID NO: 7518 - DNA, 567 bp, Zea mays
  Clone ID: LIB3061-073-Q1-K6-G7
gcacaatagtgtaccaacatggcagccaaaaattttgcctccttatgctccttggtctttctgcaagtgctgctacggcgaccattttcccgcaatgctcgcaagctcctatagcttcccttcttcccccgtacctctcaccagcggtgtcttcggtatgtgaaaacccaattcttcaaccctacaggatccaacaggcaatcacagctggcatcttacctttatcacccttgttcctccaacaatcatcagccctattacatcagttacctttggtgcatttattggcacaaaacatcagggcacaacaactacaacaacttgtgctagcaaaccttgctgcctactctcagcaacagcagtttcttccattcaaccaactagctgcattgaactctgcttcttatttgcaacaacaacaactaccattcagccagctacctgctgcctacccccagcaatttcttccattcaaccaactggcagcattgaactctcctgcttatttacagcagcaacaactactaccattcagccagctagctggtgtgagccctgctaccttct

SEQ ID NO: 7519 - DNA, 582 bp, Zea mays
  unsure (1)..(582): unsure at all n locations; Clone ID: LIB3061-073-Q1-K6-G8
agcgtccgnatgnaaaccaatagcaacataggaagcgcgagtagtgtaccaacaatggcagccaaaatttttgcttccttatgctccttggtctttctgcaagtgctgctaccgcaaccattttcccacaatgctcacaagctcctatagcttcctttcttcccccatacctctcaccagcggtgtctggagtatgtgaaaacccaattcttcaaccctacaggatccaacaggcaatcgcagcaggcatcttacctttatcacccttgttcctccaacaaccgtcagccctattacagcagttacctttggtgcatttgttggcacaaaacatcaaggcacaacaactacaacaacttgtgctaggaaaccttgctgcctactctcagcaacagcagtttcttccattcaaccaactggctgcattgaactctgctgcttatttgcaacaacaactaccattcagtcagctagctgctgcctacccccagcaatttcttccattcaaccaactggcagcattgaactctgctgcttatttacaacagcaacagctaccaccattcagccagctagctgatg

SEQ ID NO: 7520 - DNA, 578 bp, Zea mays
  unsure (1)..(578): unsure at all n locations; Clone ID: LIB3061-073-Q1-K6-G9
ggtcttntatanagttttgtgccaaagcgggaaaaaactaccaaatagcagcattaaactgaccgtgtttgacacggtgaagacactgatagctactgggcagaaggagatggacaaattaattcaagaaaatgaggagaaaagagctaggaaaagagccttggtcaatcttgaaggctttggtagaaagcatgcctcgttgcacactccatatcgctatgtttcctcgtttgctggtgacatattttaggatctaggcagcgcatctttctgttccttttcaaatagatctagtttccagtgctttccgtagcatccacattcatagagatagaggttcgcattgagttgatctctttatctagtgtcggtagcattcccctacagatcttacctattctaatagaggatagtgtatcaatgtgaccgccccagattccttaaatgtaattatacataatagccagaacaatcaaatgtcatggagcacaggagcatgttctccttgtcaatgaattagcatctttgatttaangaaaaaaaaaaaaaaaaaaaaaaaaaaagggggcggccgctct

SEQ ID NO: 7521 - DNA, 548 bp, Zea mays
  unsure (1)..(548): unsure at all n locations; Clone ID: LIB3061-073-Q1-K6-H10
caacaatagnagcaacaatggcgaccaagatttttccctccttatgctccttgctctttctacatgtgttgctaacgcgacaattttccctcaatgctcacaagctcctatagcttcccttcttcccccataccttccatcagggagggcttcnagtatgtgaaaacccagctcttcaaccatataggcttcaacaagcaatcgcagcaagcaacatacctttatcgcccttgttgtttcaacaatcaccagccctatctttggtgcagtcattggtacaaaccatcagggcacaacagctgcagcaactcgtgctacctgtgatcaaccaagtagctctggcaaacctttctccctactctcagcaacaacaatttcttccattcaaccaactgtctacactgaaccctgctgcttatttgcagcaacaactattaccatttagccagctagctactgcctactctcagcaacaacaacttcttccatttaaccaattggccgcactgaaccccgctgcttatttgcagcagcaaatactactgcca

SEQ ID NO: 7522 - DNA, 583 bp, Zea mays
  unsure (1)..(583): unsure at all n locations; Clone ID: LIB3061-073-Q1-K6-H11
agcgtccgcccagcgtccgtcaaaatctttagggccagangggtatgcagcaattgctacttgagtgcccatcaatctatgagttgctggcagaaccctaacttccagtggaaagacatcccactgctacagatttggagagagaatttggataacagtggcaagaaagtgccctgttagaggggggggggcctgaggaagcaataaagatgattaaagaggctctttccagtaatgagatcattgctgatggcatgcatattccggtgccccttaatttggatatattgaattgggcaaaggaaacttatgatcttttatgcagtacaaagcttccggaatcagtgaaattctacaacatttatgggattgattatgatactccacatactgtctgctatggcagtgaacagcagccggtttcaagtcttagtagcctcttatatgctcagggaaaatacgtctatgttgatggcgacggatctgttcccgcagaatcagcaaaggctgacggatttaatgcagtggcaagggttggggttgctgctgaccaccggggaatcgtgtgcagtcgccgcgtgtt

SEQ ID NO: 7523 - DNA, 568 bp, Zea mays
  unsure (1)..(568): unsure at all n locations; Clone ID: LIB3061-073-Q1-K6-H12
cactcttcaccatatagcttcaacgagcgggggcagcaagcaacatacctttatcgcccttgttgtttcaacaatcgccagccctatctttggtgcagtcattggtacaaaccatcagggcacaacagctgcagcaactcgtgctacctctgatcaaccaagtagctctggcgggagggggggtgcctactctcagcaacaacaatttcttccattcaaccaactgtctacactgaaccctgctgcttatttgcagcaacaactattaccatttagccagctagctactgcctactctcagcaacaacaacttcttccatttaaccaattggccgcactgaaccccgctgcttatttgcagcagcaaatactactaccatttagccagctagctgcagcaaaccgtgcttccttcttgacacagcaacagttgctgcctttctaccagcagtttgcggctaaccccgcaaccctcttacaactacaacaattgttgccctttgtccaacttgctttgacagacccagcggcctcctaccaacaacacnatcattggtggtgccctctt

SEQ ID NO: 7524 - DNA, 569 bp, Zea mays
  unsure (1)..(569): unsure at all n locations; Clone ID: LIB3061-073-Q1-K6-H2
aaaacacacagcgaacgcactacacgacctacaccaaggctaccaagnaattagccctccttgcgcttcttgcccttttagtgagcgcaacaaatgcgttcattattccacagtgctcacttgctcctagtgccagtattccacagttcctcccaccagttacttcaatgggcttcgaacatccagccgtgcaagcctacaggctacaactagcgcttgcggcgagcgccttacaacaaccaattgcccaattgcaacaacaatccttggcacatctaaccctacaaaccattgcaacgcaacaacaacaacaacagtttctgccatcactgagccacctagccgtggtgaaccctgtcacctacttgcaacagcagctgcttgcatccaacccacttgctctggcgaacgtagctgcataccagcaacaacaacagctgcaacagtttatgccagtgctcagtcaactagccatggtgaaccctgccgtctacctacaactactttcatctagcccgctcgcggtgggcaatgcacctacgtacctacaacaacagttgctgcaacaa

SEQ ID NO: 7525 - DNA, 567 bp, Zea mays
  unsure (1)..(567): unsure at all n locations; Clone ID: LIB3061-073-Q1-K6-H3
tngcaacatagnaagcacaatagtgtaccaacaatggcagccaaaaattttgcctccttatgctccttggtctttctgcaagtgctgctacggcgaccattttcccgcaatgctcgcaagctcctatagcttcccttcttcccccgtacctctcaccagcggtgtcttcggtattgtgaaaacccaattcttcaaccctacaggatccaacaggcaatcacagctggcatcttacctttatcacccttgttcctccaacaatcatcagccctattacatcagttacctttggtgcatttattggcacaaaacatcagggcacaacaactacaacaacttgtgctagcaaaccttgctgcctactctcagcaacagcagtttcttccattcaaccaactagctgcattgaactctgcttcttatttgcaacaacaacaactaccattcagccagctacctgctgcctacccccagcaatttcttccattcaaccaactggcagcattgaactctcctgcttatttacagcagcaacaactactaccattcagccagctagctggtgtg

SEQ ID NO: 7526 - DNA, 558 bp, Zea mays
  unsure (1)..(558): unsure at all n locations; Clone ID: LIB3061-073-Q1-K6-H6
cccagcaggcaggtcggcgaggggggcagggaagaccgaanaccgaccgtgcgggggctcgggacgggaacgggacaggacctcaaaatctcagatccttcctgcccgcccgcccgtgcccgtcgacgcgtcgttcttgccggccgcgccccacctccgccctctcctcctccaggggatcggatacgccacaggctgcgcgatggtgctgtgggtcttcggctacggctccctcatctggaaccccggcttcgacttcgacgacaaaatcctcggcttcatcaagggctacaagcgcacctttaatctcgcttgcattgaccacagaggcacaccggagcatccggcgaggacctgcacgcttgaaaccgacgacgaggccatatgctggggaattgcatattgtgtcaagggtggtccagaaaaagagctaaaagcaatgcagtacttggagagaagagagtgtgagtacgaccagaagatatccattgatttctacaaggaaggagatcccttgaaaccagctgtgacaggcgtcttagtgttcgtttccactcc

SEQ ID NO: 7527 - DNA, 577 bp, Zea mays
  unsure (1)..(577): unsure at all n locations; Clone ID: LIB3061-073-Q1-K6-H7
cagnccattagctttatctactccgggggcagnagnacccgatcgacaccatgagggtgttgctcgttgccctcgctctcctggctctcgctgcgagcgccacctccacgcatacaagcggcggctgcggctgccagccaccgccgccggttcatctaccgccgccggtgcatctggcagctgcggttcacctgccacctccggtgcatctcccaccgccggtccacctgccgccgccggtccacctgccaccgccggtccatgtgccgccgccggttcatctgccgccgccaccatgccactaccctactcaaccgccccggcctcagcctcatccccagccacacccatgcccgtgccaacagccgcatccaagcccgtgccagctgcagggaacctgcggcgttggcagcaccccgatcctgggccagtgcgtcgagtttctgaggcatcagtgcagcccgacggcgacgccctactgctcgcctcagtgccagtcgttgcggcagcagtgttgccagcagctcaggcaggtggagccgcagcaccggtaccaggcgatcttcggcttggtcct

SEQ ID NO: 7528 - DNA, 143 bp, Zea mays
  Clone ID: LIB3061-073-Q1-K6-H8
ttctgctctgcatcccgtctggggcggggggggtgcttggctgctgctcccttctcccaccgaccaactcgatcccgcgccatggatcgcgccgaccccgcgcggggccgccttgccgtgctctcctcccacctccgtggtgc

SEQ ID NO: 7529 - DNA, 330 bp, Zea mays
  Clone ID: LIB3061-073-Q1-N6-A1
agaaactggaaatgtaacttcttatttctggttggccacatacatcatccaaaaaactttattattgaattacaactaataagcaatctaaaagaggcaccaccaatgatgtgttgttggtaggaggctgctgggtttgtcaaagcaagttggacaaagggcaacaattgttgtagttgtaaaagggttgcggggttagccgcaaactgctggtagaaaggcagcaactgttgctgtgtcaaaaaggaagcacggcttgctgcagctagctggctaaatggtagtaatatttgctgctgcaaataaacagcgaggttcagtgcggccaat

SEQ ID NO: 7530 - DNA, 526 bp, Zea mays
  unsure (1)..(526): unsure at all n locations; Clone ID: LIB3061-073-Q1-N6-A10
atcgagaaaaatctcaaccaatatattgattatttctaggaaacacatgccggtatgagggcaccattatcgagtacatctcatatgtaatctaaaaaaggcacctccaacgatgggttgctgcctcnacaagacagggttcgtcaaagagaaccggttgtatggcagcaattgttgctgctgtaggaaggcagcgaccaatgggttagccactggcaatggattaagtaactgttgtcgctgttgtaggtacgcaacaaagttcgacataattagttggttgaatggaagcagctgttgcaagtaggcaacagggtttgccacagctagctgagttagagctggtacaatatgttgcaacaattcttgttgcaggtatgtaggtgcattggccacagcgagcgggctagataaaaacagttgttgctgttgtaggtaggcggnagggttcaccatgggtagttgactaagcgctggcagaaactgttgcagatgttgttgttggtggtttgaaactacgtttgct

SEQ ID NO: 7531 - DNA, 350 bp, Zea mays
  unsure (1)..(350): unsure at all n locations; Clone ID: LIB3061-073-Q1-N6-A11
gggggggtgttttttattttttttttttttttttttttttttttttttttttttttttttttttttttttttttttttttttttttttttttttttttttttttttttttttttttttttttttttttttttttttttaaaaaatagggaggaggggggggatattttggngggccccaaaaatataaaaaaaaaatttttttataaaaaaaacaataaaaaaaatataaaaaaggggccccacaaaaaattttttttggggagaggggttttggtttttaaaaaaaaaggggaaaaaagggaaaaaattttttgttttaaaaaagggggggggggttatagggccaaaa

SEQ ID NO: 7532 - DNA, 52 bp, Zea mays
  Clone ID: LIB3061-073-Q1-N6-A12
gtacaacctttttcattcagtcacgtagatagacacgtcagggaaaacaaca

SEQ ID NO: 7533 - DNA, 250 bp, Zea mays
  Clone ID: LIB3061-073-Q1-N6-A2
ttttttttttttttttttttttttttttttttttttttttgtttttttttttttttttttttttttttttttttttggtaaaataatttttttttttaaattgaagtggtaaagtagggtattgataaaattgagtttggaaaaaaaggggaggggggaaaaaagagaaggaaaaaatgggagaataatgataaaaaaagggagaaagggggggggtataagaaaagagaaaaaaagtttagaggggggg

SEQ ID NO: 7534 - DNA, 550 bp, Zea mays
  Clone ID: LIB3061-073-Q1-N6-A3
atcgagataaatctcaatcaatatattgattatttctaggaaacacatgtcggtatgagggcaccattgtcgagtacatctcatatgtaatctaaaagaggcacctccaacgatgggttgctgcaaggcagggttcatcaaagagaactggttgtatggcagcaattgttgttgctgctgcaggaaggtagcgaccaatgggttagccactgccaatggattaagtaactgttgtcgctgttgtaggtacgcagcagagtttgacacagccagttggttgaatggaagcaactgttgtaagtaggcagcagggtttgccacagctagctgagtcagagctggtacaatttgttgcagcaactgttgttgtaggtacgtaggtgcattgcccaccgcgagcgggctagatgaaagtagttgtaggtagacggcagggttcaccatggctagttgactgagcactggcataaactgttgcagctgttgttgttgctggtatgcagctacgttcgccagagcaagtgggttggatgcaagcagctgctgttgc

SEQ ID NO: 7535 - DNA, 252 bp, Zea mays
  Clone ID: LIB3061-073-Q1-N6-A4
aaaaatctagaaatgtactttcttatttctgggaagccacaaacatcatccaaaaaacttcattattgaagtataactcataagcaatctaaaagaggcaccaccaatgatgggttgttggtagaacgctgttgggtttgtcaaagcaaggtggttgaatggcagcaattgttgcagttgtaagagggtgccagcgttaggcgcaacgtgcaggtagaacggcaacaactgttgttgcctttttgacacaac

SEQ ID NO: 7536 - DNA, 137 bp, Zea mays
  Clone ID: LIB3061-073-Q1-N6-A6
atcagatggtatatatctttaaaatccgcactccaaaccagcaacgcttatattcgtcaggcacaaaagtggagcatggtctccatggcttcgctcaaagcagcacagtatggtaattaaactgatcaatttacagc

SEQ ID NO: 7537 - DNA, 486 bp, Zea mays
  unsure (1)..(486): unsure at all n locations; Clone ID: LIB3061-073-Q1-N6-A7
gttttgttttttttttttttttttttttttttttttttttttttttttttttttttttttttttttttttttttttttttttttttttttaaaaaaaagggattttttttttttggggggggcaaaaaaaaaaaaaaaaaaatttttggggggggggggggggaaaaaaaaaaaaaggggggggccccccaagggggggggggggaaaaaagggtggggggttaaaaaaaaaaaggggggggaagggaaaaaaatgttgaaaaaaaaaaaggggggcaaggttaaggggagagggttggaaaaaaaaaaaaaaattggggtggagaaaaaaggganaggggtaaaaaaaaaaaaatgggggaaagagagaagtgtgaggtggttaaaaaaagaaggggaggggaaaagtgttagaggggaaaaaaaaaaaaaattgtggggggagggaaaaaaaaagggggagaaaagggggatgtgtggtggttg

SEQ ID NO: 7538 - DNA, 512 bp, Zea mays
  Clone ID: LIB3061-073-Q1-N6-A8
ggaaatgtaacttcttatttctaggaggccacatacatcagccaaaaaacttcattattgaattacaactaataagcaatctaaaagaggcaccgccaatgatgtgttgttggtagaaggctgctgggtttgtcaaagcaagttggacaaagggcagcaactgttgcagttgtaagagggttgcggggttagccacaaactgctggtagaacggaagcaattgttgttgtttcaaaaaggaagtggggcttgttgtagctagctggccaaatggtagtagtatttgctgctggaaataagcagaggggttcagtgcggccaattggttaaatggaagaaattgttgctgctgagagtaggcagtagctagctggctgaatggtagtagttgttgttgttgtaaataagcagcagggttcagtgtaaacagttggttgaatggaagaaattggtgttgctgagagataggagaaaggtttgcccagagctacttggctgatcactggtagcac

SEQ ID NO: 7539 - DNA, 543 bp, Zea mays
  Clone ID: LIB3061-073-Q1-N6-B1
agaaatgtactttcttatttctgggacgccacaaacatcatccaaaaaacttcattattgaactataactcataagcaatctaaaagagggcaccaccaatgatgggttgttggtagaacactgttgggtttgtcaaagcaagttggttgaatggcagcaattgttgcagttgtaagagggtgccagcgttaggcatagcgtgcaggtagaacggcaacaactgttgttgtgtcaagaaggcagcagggctcacatcagctagctggctgaatggtagtagttgttgctgctgtaaataagcagcagagttcaatgctgctagttggttgaatggaagaaattgctgggggtaggcagcaactagctggctgaatggtaattgttgttgcaaataagcagcagagttcaatgcagccagttggttgaatggaagaaactgatgttgctgagagtatgcagcaaggtttgctagcacaagttgttgtagttgttgtgccctgatgttttgtgccaccaaatggaccaaaggtaactgctgtaat

SEQ ID NO: 7540 - DNA, 535 bp, Zea mays
  Clone ID: LIB3061-073-Q1-N6-B10
cattagaactggaaatgtaacttcttatttctggttggccacatacatcatccaaaaactttattattgaattacaactaataatcaatctaaaagaggcaccaccaatgatgtgttgttggtaggaggctgctgggtttgtcaaagcaagttggacaaagggcaacaattgttgtagttgtaagagggttgcggggttagccgcaaactgcttgtagaaaggcagcaactgttgctgtgtcaagaaggaagcacgacttgctgcagctagctcgctaaatggcagtagtatttgctgctgcaaataagcagcggggttcagtgcggccaattggttaaatggaagaagttgttgttgctgagagtaggcagtagctagctggctaaatggtaatagttgttgctgcaaataagcagcagggttcaatgtagacagttggttgaatggaaaaaattgttgttgctgagagtagggagaaaggtttgccagaactacttggttgatcaccagtagccacgagttgctgcagctgtt

SEQ ID NO: 7541 - DNA, 337 bp, Zea mays
  Clone ID: LIB3061-073-Q1-N6-B4
cagcatgagaaactttattattacagtataaatcataaaaaatctagaagatggcaccaccaatggtgggcggttgcaataaggtggtaggattcgtcaaagcatgttggctaaatggtagcaattgttgttgttgtaagaaggcaacaatgtttgccacattctgtgggtagaatggtagcaattgttgctgttgcaagaaggcattaatgtttcccacaacttgtgggtaaaatggcaacaaatgttgttgtctcaagaaagcaacaatgtttgccacagcttgcagatggaatggcagaagctgttgttgcagtaagaaggcataagggctccc

SEQ ID NO: 7542 - DNA, 382 bp, Zea mays
  Clone ID: LIB3061-073-Q1-N6-B7
aaaaaaaatttttttttaaaataatttttttttttttgaaaaaaaaagaaaccccaaaaaaaaaaatatggggggggggggaacaaacaaaattttaaaaatggaataaaaaaaaaggaggggaaaacttaagcgcaggggggggacaggaccccccccaaccaaaaaaaaagggcaaaaaataaaaaaagttataataaaaaaaaaaggaccccaaaaaagggggggaacaccggaaaaaaaaacaaaaaaggcccaaaaaaaaatgccactgggaaaaaaattacaaaaaatccaaaaaaaaaggggaggggtataaaagaaaaaaaaaattgggggaaaaaaaggtctggaaaaaggggggaaaaaaatccaacaaaaa

SEQ ID NO: 7543 - DNA, 522 bp, Zea mays
  Clone ID: LIB3061-073-Q1-N6-C1
cagacaaaaaactttattattgaactataactcataagaaatctaaaagagggcaccaccaatgatgggttgttggtagaacgctgctgggtttgtcaaagcaagttggttgaatggcagcaattgttgcagttgtaagagggtgccagcgttaggcgcagcgtgctggtagaacggcaacaactgtggttgtatcaagaaggtagcagggctcacaccagctagctggctgaatggtagtagttgttgctgctgtaaataagcaggagagttcaatgctgccagttggttgaatggaagaaattgctgggggtaggcagcaggtagctggctgaatggtagttgttgttgttgcaaataagaagcagagttcaatgcagctagttggttgaatggaagaaactgctgttgctgagagtaggcagcaaggtttgctagcacaagttgttgtagttgttgtgccctgatgttttgtgccaataaatgcaccaaaggtaactgatgtaatagggctgatgattg

SEQ ID NO: 7544 - DNA, 458 bp, Zea mays
  Clone ID: LIB3061-073-Q1-N6-C11
attattattaatactatttattgctgtcacgttacatgacaccacattacatgcatgcacggtacgtaggttgtgcacagctagccaagggtgttacttagtactactagagttcagttctggcaagccaagggggggtgaagagctttgcttagcacgccttctggcacctgcagtagcggaggtggcagtagccggcggtccacccgccgtcctccttgacgcactcgttgctgcagaggcggtcggagatgcaggggaacgagtggtgctggctcttgcccatgcacacccgggcctccgccaccatcgtcgtcgtcgtcccgccgtcgtagtgtgagagcaggagcagcgccaggaggagcgcgcacacggtcgccctggacttgatgagctccatcgccggccggcgtggatcggatcagtgttattacggacgggaccggagacgcgcgttc

SEQ ID NO: 7545 - DNA, 524 bp, Zea mays
  Clone ID: LIB3061-073-Q1-N6-C12
atcgagataaatctcaatcaatatattgattatttctaggaaacacacgtcggtatgagggcaccattatcgagtacatctcatatgtaatctaaaaaaggcacctccaacgatgggttgctgcctcgacaagacaggattcatcaaagagaactggttgtatggcagcaattgttgctgctgtaggaaggcggcgaccaatgggttagccactaccaatggattaagtaactgttgtcgctgttgtaggtacgcagcagagttcgacagagtcagttggttgaatggaagcagctgttgcaagtaggcaacagggtttgccacagctagttgagtcagagctggtacaatctgttgcaacaattgttgttgcaggtatgtaggtgcattgcccacagcgagcgggctagatgaaagcagttgttgttgttgtacgtaggcggcagggttcaccatggctagttgactgagcgttggcagaaactgttgtagctgttgttgttgctggtttgcaactacgttcg

SEQ ID NO: 7546 - DNA, 487 bp, Zea mays
  Clone ID: LIB3061-073-Q1-N6-C3
gagataaatctcaatcaatatattgattatttctaggaaacacatgccgggatgagggcaccattatcgagtacatctcatatgtaatctaaaaaaggcacctccaacgatgggttgctgcctcgacaagacagggtttatcaaaaagaactggttgtatggcagcaattgttgctgctgtaggaaggcagcgaccaatgggttagccactgctagtggattaaataactgttgtcgctgttgtaggtacccaccaaagttcgacataatcagttggttgaatggaagcagctgttgcaagtaggcagcagggtttgccacaactagctgagtcagagctggtacaatctgttgcaacaattgttgttgcaggtatgtaggtgcattggccacagcgagcgggctagatgaaagcagttgttgctgttgtaggtaggcggcagggttcaccatggctagttgactgagcgctggcagaaactgttgc

SEQ ID NO: 7547 - DNA, 511 bp, Zea mays
  Clone ID: LIB3061-073-Q1-N6-C4
ctagaaagtactttcttatttctgggaagccacaaacatcagacaaaaactttattattgaactataactcataagaaatctaaaagagggcaccaccaatgatgggttgttggtagaacgctgctgggtttgtcaaagcaagttggttgaatggcagcaattgttgcagttgtaagagggtgccagcgttaggcgcagcgtgctggtaaaacggcaacaactgtggttgtatcaagaaggtagcagggctcacaccagctagctggctgaatggtagtagttgttgctgctgtaaataagcaggagagttcaatgctgccagttggttgaatggaaaaaattgctgggggtaggcagcaggtagctggctgaatggtagttgttgttgttgcaaataagaagcagagttcaatgcagctagttggttgaatggaagaaactgctgttgctgagagtaggcagcaaggtttgctagcacaagttgttgtagttgttgtgccctgatgtttt

SEQ ID NO: 7548 - DNA, 506 bp, Zea mays
  Clone ID: LIB3061-073-Q1-N6-C6
aacaggaatcgttaattatatcacaagaacaaatccggatcccctttaattattgttccggatgaacgatccgaggaaagcattcatcttcttgctgtgcttattattcagacatatgagctagctacaagctcattcctcatgcactatgctcttcgcagttacttggagggcatcgttccgccgccgagaatccaggggcattcggcgacgccgctgatggtggccaggttgcactcggcctccgtgacgagggtggcggcgaatcccctctgcacctcccgcgggcagcccggcaggtcctctaggcggccctccagctgcgcgtccgggcccggcgggatcgcgccgtccatgaggatgctcagcgccgtgcaccggcagtacgccgggatgtccgccagctcccggcagcatctcctcttcagctccggccacgggaggcgcggcccgatgccgcaggtccggctggtcacgtaccagcggcagctcgggagcgggttgtg

SEQ ID NO: 7549 - DNA, 527 bp, Zea mays
  unsure (1)..(527): unsure at all n locations; Clone ID: LIB3061-073-Q1-N6-C7
gaagcagtaaagagacggcctgtcaacattcacttcagtaggttcttttccaacggaaaatttgtacttttttttcccagtaaaatcttcagactgatgatgagtacatcaaaccaaatcattctagctagcaatacgggtaaaatctgctctgttccgttctgtttcccagcgggcgtaattcaaccttaccacattcaggacaagtacaacattgaagggttgcagctctaatctggtgagatgaaaggccgctaccggatgttctttgattgctgacattccactcagtttcgctttactggcctttgcacgtaagatttgttcggatcttcagtcttcagttttgggggtttgatttcacctttccgtcccttctttcctgtcttcatgaaatccctccagctggagacccgcttgtctctggtctcctnccacttctcttcatgctctctcttcctcttncacatatnttttgtttncttctcatccttcttaagtcttccttcttcctctgatatcctcat

SEQ ID NO: 7550 - DNA, 552 bp, Zea mays
  Clone ID: LIB3061-073-Q1-N6-C8
agaatctagaatgtactttcttatttctgggaagccacaaacatcagacaaaaaactttattattgaactataactcataagaaatctaaaagagggcaccaccaatgatgggttgttggtagaacgctgctgggtttgtcaaagcaagttggttgaatggcagcaattgttgcagttgtaagagggtgccagcgttaggcgcagcgtgctggtagaacggcaacaactgtggttgtatcaagaaggtagcagggctcacaccagctagctggctgaatggtagtagttgttgctgctgtaaataagcaggagagttcaatgctgccagttggttgaatggaagaaattgctgggggtaggcagcaggtagctggctgaatggtagttgttgttgttgcaaataagaagcagagttcaatgcagctagttggttgaatggaagaaactgctgttgctgagagtaggcagcaaggtttgctagcacaagttgttgtagttgttgtgccctgatgttttgtgccaataaatgcaccaaaagtaactgatgtaat

SEQ ID NO: 7551 - DNA, 454 bp, Zea mays
  Clone ID: LIB3061-073-Q1-N6-C9
ccaaacatcctttttccctatatattattcctttccatttcaatgggtcattcagggcattggtcacactgccacccatggggatgggggacactccgttactcatcgccgctaaacgagggaactagctttagccctataggtagctagtcagcggctccattacattattactacagtacatagtttcctcagtagtaaacacccccggcagctgctttgcaagggcagggacctggctgctgcagctgcaaaccgcacatcgccgtcagctgctgcgctacctgggccgccatcagcgccgggagctccccctgcggttgttgctgcaggaaggactgcaggaccacaccgtatgtcgcctggtaccggtgcagcggctccacctgcctgatctggtggcagcactgttgctgcagcgcctggcactgtggcgagccgtagggcgtccccc

SEQ ID NO: 7552 - DNA, 523 bp, Zea mays
  Clone ID: LIB3061-073-Q1-N6-D10
atgacgtcggggcccttctgctcttccagcctgccgatgaacgccaccagcgggatgttccggtccaccgggagcccgacctccgcctgcagcgcctccttgttcagcgccttggcctccacggccgtcgacacgtcgtacttcacggcgatgtacttgtccctgctggggtcccactcgctgacgtccatgccgttgacgatgccggtgatgccggtgaggcgcatgatgttgtcgagctcgcagcccctggcgatgccggagatgagctcctcggcgtagtaggggctgacggtgaggaccctgtcggcctcgaggatcccggccttcatccagttgatcttccggccttccacgggcttctcgtagccgtcgatgaaatcgaaggacgacttgaatctctccgggaggttcagctccgggtagtcggagaaggcgaaccggccctggtaggagatgttgtggatgcagaaagcggtctttgcggtcctgtagatgccgtgggactggtagttgctcttga

SEQ ID NO: 7553 - DNA, 508 bp, Zea mays
  unsure (1)..(508): unsure at all n locations; Clone ID: LIB3061-073-Q1-N6-D7
agagcaaaataactatcaaccacatttggaggctagaagcacataagaatctagaaatgtactttcttatttctgggaagccacaaacatcatccaaaaaacttcattattgaagtataactcataagcaatctaaaagagggcaccaccaatgatgggttgttggtagaacgctgttgggtttgtcaaagcaagttggttgaatggcagcaattgttgcagttgtaagagggtgccagcgttaggcgcagcgtgcaggtagaacggcaacaactgttgttgtgtcaaaaaggcaacagggctcacatcagctagctggctgaatggtggtagctgttgctgttgtaaataagcagcaaagttcaatgctgccagttggttgaatggaaaaaattgctgggggtaggcagcagctagctgactgaatggtagatggtgttgcaaataaacagcanagttcaatgcaggcagttggttgaatcggaccccggggtccgaccccggaaat

SEQ ID NO: 7554 - DNA, 524 bp, Zea mays
  Clone ID: LIB3061-073-Q1-N6-E1
aaatgtgcaatgcttagctttgaattcttgagctggaatggaacaaaacaaaatgtcttgggcatttaacttgttcaaaacaagtagaaaagctgaatggacattgccaacggactcttgggagactacagagacgggtaacagctcatttcagaggaataaaccgcgaggagtgggtggcaccgataccgggcctgccatgcttgaccggcttataggagatggagaactcagcaaggtagtggccgatcatctcaggcttgatctcaacctggttgaacgtcttgccgttgtagaccccaacaatgcttccaatcatctcagggacaatgatcatgttacggagatgtgtcttgactggctctggcttctcaccagcaggagcatcctttttcgccttgcgcagcttcttgatgagtgccatgggcttcctcttcagacccctctggaaccttctcctggcgcgcgcggggaagagctggacgaggtcgtccgtggacatgtcgagaagcgcatctaggtcg

SEQ ID NO: 7555 - DNA, 327 bp, Zea mays
  Clone ID: LIB3061-073-Q1-N6-E10
gtgggttaaaaggggaaattgggggtatgggtaaaatgggcccggccccccaggggggggggggacaaatttttcctaaaaatgggcggtaaaaggataaaaataggttggtggccgggggttttttcaaaaaaaaaatttttttaagggggggaccccgccgccggacccgggggggaaggagatggttttttgagggccaaaaaacgcccgaagggggggggtttttggggcggaaaaaagccccaaaacgggggcttttttgggttttttttggagaaggaagtgggagcccaacccaaaaaagcggggggcccgggttggggg

SEQ ID NO: 7556 - DNA, 548 bp, Zea mays
  Clone ID: LIB3061-073-Q1-N6-E11
cagccattcacatagtcatcacatagtacacattccatatttcagccatgtactgcacaattgacttaataaaagactaatattgttcatatttttgcacgctgaatagcacaacaaaacaagttattacaaagcattgccaattagactccgtcacgcattatactgagaaggtctaaagggctctcttcatttttttattgaaccaatgaaacggccgagggagctgtttaagcacaaataaaaaaaagactaattaaccataacatcagatgtatatataaaatataacaaaaagaagacaaaattcatagcccacaaattttggaaccgtcctgttcataactcattttattttattataggttctctctccacacaaaaaatacaattatcactttttgaggggtcaaataatttgaagtttgatcaaaattatataaaaaggtactccctctgtcccatattaaaattcgttttggatttttaagaaatgcatacaatacttgatgtataagtttcatgtgtctagaatcattatcttttat

SEQ ID NO: 7557 - DNA, 476 bp, Zea mays
  Clone ID: LIB3061-073-Q1-N6-E2
acgaaaaacacggcgccagtactatttggcactggcaacattcccatatttattcctcatagttattatcattattggaaccaacacccgaaaatattgggagcccacgtcagagctacctcattctggatttgcacgcccacaaaacacatgctgggccttgcacgtcgcgcccactcacttttttttttttaaccctggtagctagtactggtcgcccccggaaaaaatgctgcacttctggggctccgacagccggcacattattggcaaccccgcggggtactcccgggcctttgtaagccttacgcgggcgatccttggcccgggggggccgggaccacacgggggatacatttgcgtttggtatccctttcctgcccggctgcaggggtagtaataacccccctgtcctcctccttctccctgcggcgggggttgctgctgccccccccatggccaccaacctttttcca

SEQ ID NO: 7558 - DNA, 356 bp, Zea mays
  Clone ID: LIB3061-073-Q1-N6-E4
ctcaagaaaaaaaaaaaaaaaggccccataataaggttaattaattcgggggaacccaaaaaaaaaaaaggcccttaaaaaaaggggggggttcccgaaaagggcctttcggcccgggggaaaaaaaaaaacgaacaattaaatccccccaagggaggaaaaaaaagaggcccaggaaacaaagacagtaaaagtcccaaaatcacccaagggggggtaacggaaaagggttttaaaggtcagaataaattcgaaaaggaaaaaagcaacgggggggggttattttaatttttcgaaaggggggggaaaaatttgccttggtccccaaattttgggggggggaggggaaattttcc

SEQ ID NO: 7559 - DNA, 540 bp, Zea mays
  Clone ID: LIB3061-073-Q1-N6-E5
caaacatcctttttccctatatattattcctttccatttcaatggttcattcaggtcattgctcacactgccacccatggtgatgggtgacactccgttactcatcgccgctaaacgagtgaactagctatagccctataggtagctagtcagcggctccattacattattactacagtacatagtttcctcagtagtagacaccgccggcagctgcgttgcaagggcagggacctggctgctgcagctgcagaccgcacatcgccgtcagctgctgcgctacctgggccgccatcagcgccgcgagctcgccctgcggctgctgctgcaggaaggactgcaggaccacaccgtatgtcgcctggtaccggtgcagcggctccacctgcctgatctggtggcagcactgctgctgcagcgcctggcactgtggcgagccgtagggcgtcgccgccgggctgcactggtgcctcaggaactcgacgcactggcccaggaacgggctgccgacgctgccgacgccgcaggatccgaactgct

SEQ ID NO: 7560 - DNA, 342 bp, Zea mays
  Clone ID: LIB3061-073-Q1-N6-E7
ggaaatataacttcttatttctaggaggccacatacatcagccaaaaaacttcattattgaattacaactaataagcaatctaaaagagggcaccgccaatgatgtgttgttggtagaaggctgctgggtttgtcaaagcaagttggacaaagggcagcaactgttgcagttgtaagagggttgcggggttagccacaaactgctggtagaacggaagcacttgttgttgtgtcaagaaggaagcggggcttgttgtagctagctggccaaatggtagtagtatttgctgctggaaataagcagaggggttcagtgcggccaattggttaaatggaagaaat

SEQ ID NO: 7561 - DNA, 547 bp, Zea mays
  unsure (1)..(547): unsure at all n locations; Clone ID: LIB3061-073-Q1-N6-E9
agagtggatgatccgcattgtttttttgcttacatctttaatctttcttacattttgcaaggcaagacaatcgaacacaggacagtgagtaaactaatataaataacaaagaaagcaatggatttctttcgtcggaggagggccctcaatcacggcgcgggggcgaaatatatttgatgcgcgccgagccgaagccgagccgaaaccggatgcatggaacaataataccaggcggtgcagaaaaagagaagaacgaagagggaaaaaccatggcccctccctgtgacgccttgttgatcaggaggtgttgacctggcggcactgcttcctgatctggccgtttgcgccggtgagcacgtcgacgcggcccatcttcttcatggacatggagaaggcggcgtagaacttgatggggtgnngaaaggtcggccaccatctgcgcggcggcggcgttctgcgccagcgcggcgtcggaggccagcgtgccctgcctctgctgcaccctggtgtagtacccgctgtcgaaccggaacggcgtgccgccgtc

SEQ ID NO: 7562 - DNA, 523 bp, Zea mays
  Clone ID: LIB3061-073-Q1-N6-F10
aattcgcactgtaacggtatattctgcactgaagagctagggaaggggaaaaaataaagatacacaagctggtccagtcatgtgtcaaacttagcagagctatgttacaccactaacacaagcaagcaaggagaattctgggatctgtacaagatagcagaactactcgttgtacatttcagaacagtttcagaaacctgtttcaatggggtatcaagagggtatgtgggggcacagatgactactagtaatttacaacgcagccttgaccgttgtaaagccacgacgacgctaatcctccagctcgacgagctgcgcccgtctctcggcagctttcttcctgacgaagatcccccacctcattgccgccttgatcttgagccagccgacgacagctttgccggatgaatggctgcgctcgctttcgaacccggggttgggcaagggagagggcatgtagggctggaagttgaacgtgtcgtctgacaaactcccggaagctccacccatgctgaagaccctc

SEQ ID NO: 7563 - DNA, 553 bp, Zea mays
  unsure (1)..(553): unsure at all n locations; Clone ID: LIB3061-073-Q1-N6-F12
cacattanaatctggaaatgtaacttcttatttctggttggccacatacatcatccaaaaactttattattgaattacaactaataatcaatctaaaagaggcaccaccaatgatgtgttgttggtaggaggctgctgggtttgtcaaagcaagttggacaaagggcaacaattgttgtagttgtaagagggttgcggggttagccgcaaactgcttgtagaaaggcagcaactgttgctgtgtcaagaaggaagcacgacttgctgcagctagctcgctaaatggcagtagtatttgctgctgcaaataagcagcggggttcagtgcggccaattggttaaatggaagaagttgttgttgctgagagtaggcagtagctagctggctaaatggtaatagttgttgctgcaaataagcagcagggttcagtgtagacagttggttgaatggaagaaattgttgttgctgagagtagggagaaaggtttgccagagctacttggttgatcacaggtagcacgagttgctgcagctgttgtgccctgatggtttg

SEQ ID NO: 7564 - DNA, 474 bp, Zea mays
  Clone ID: LIB3061-073-Q1-N6-F3
ggaacataaaaggcaccttttttgctaaggaaaaaagagaaacatttcccaccgcccattttacaagagggcgccatgcttaaaaatagcctgtcagagatacacagcacatcattaggtacatttcaaagggatagcgttggcgtgagcaccaacatgcaagcatttaagtgtttggcacctgaagctagcaccccgttcatgtgaatgggattatcctgtctgctattcttgggcggcacaaagggcactctgaacaggcaagcgagcaaggcttgcacaaacaaaaatgccggcaaggaaacaatactgcagcggttgcaaattcaaagcaaactttgcaaacatgtgagttcccatctttatcgctcaggggatcaggggccttttccttcatctcctgaattttagccttcaaacaaacaagaagtggttcaaactctggacttctatgttcttctgggctcagcgact

SEQ ID NO: 7565 - DNA, 281 bp, Zea mays
  Clone ID: LIB3061-073-Q1-N6-F4
ttttttttttttttttttttttttttttttttttttttttttttttttttttttttttttttttttttttttttttttttttttttttttttttttttttgaaaaacaaaaaagggccttttttatttcggggaaagcccaaacatagtgcaaaaaacttattttgggaccataactcaaaagcaatataaaaagaggggccccccaagggggggggggggggagaaccgtgagggggttggaaaaaaaaggtgggggaaggggagaaattggggaagaag

SEQ ID NO: 7566 - DNA, 549 bp, Zea mays; identical to SEQ ID NO: 7102
  Clone ID: LIB3061-073-Q1-N6-F6

SEQ ID NO: 7567 - DNA, 549 bp, Zea mays
  Clone ID: LIB3061-073-Q1-N6-F9
agacatgcagtttagccataacaaacatgttttgcttacaacaatctgctcatttttttcctggcaaatcactcggtgtatcaaaaactttagagctatgtagttgaaagactaatcaacacgcagtttaaccatgagcaagctttgtttaattattacagtctacgagtacttattcaggcagatcactctgaggttgtgcctactgttgggcgctgccagcttgaccttgttggtagctgccactgccagcaggagtaagcacagccagctcatgcttcctaccgttcttgagctctgcagcttcctccatggagatggcatacgagctggcgatgacggcggccggcaagtcgctcaggacggagttcttcccggcaacgtggctgaccatggtgtcagggttcgtctcgaaggcgatgtactggaagccttctccctgcgccttggtggcgacgaggtagccctggggtacgatgagcagctgccccgcacggagcacgtcgtcgaacaccgtggtcccgttgtcgctggcgacctggacccttg

SEQ ID NO: 7568 - DNA, 520 bp, Zea mays
  Clone ID: LIB3061-073-Q1-N6-G1
agaaagtactttcttatttctgggaagccacaaacatcatccaaaaaacttcattattgaagtataactcataagcaatctaaaagagggcaccaccaatgatgggttgttggtagaacgctgttgggtttgtcaaagcaagttggttgaatggcagcaattgttgcagttgtaagagggtgccagcgttaggcgcagcgtgcaggtagaacggcaacaactgttgttgtgtcaagaaggcaacagggctcacatcagctagctggctgaatggtggtagctgttgctgttgtaaataagcagcagagttcaatgctgccagttggttgaatggaagaaattgctgggggtaggcagcagctagctgactgaatggtagttgttgttgcaaataagcagcagagttcaatgcagccagttggttgaatggaaaaaactgctgttgctgaaagtaggcagcaaggtttcctagcacaagttggtggtagtttgttgtgcctttgatgttttgggccaacaa

SEQ ID NO: 7569 - DNA, 493 bp, Zea mays
  unsure (1)..(493): unsure at all n locations; Clone ID: LIB3061-073-Q1-N6-G10
gcctcatctctctttcttgttctagtctttcctttctctctttgtcctcacgatcctgggcatacgaccttattacattatctcgttcctgttgttctctatttctaagctttgcatcacgctctctctctcgtacttcctgggcatgtttgaactttgcctcagctttatccatagcctctttcatagccgctgctgccgtacttctctcaaattcttcctcattaaacgtatgcacattctgagacttacccatgggaaaatcttctagtccatctactgtagaaacaccagcctgatttgagaaactcctttgatggtcattgtttttcctagaccgccgcaaatgttcatcttttcttgttgattttgatccatgtttttgcttaactgcaagaggtggcggtggccttgaaggtggtggggcactagttggctgtgtgaagaggggaatcttanaagctgtaagccatatctcatcttcggattcatc

SEQ ID NO: 7570 - DNA, 470 bp, Zea mays
  Clone ID: LIB3061-073-Q1-N6-G11
gtggggtgtgtttttttttttttttttttttttttttttttttttttttttttttttttttttttttttttttttttttttttttttttttttttttttttttttttttggggaaaagggccccaaaaaaaaaggggttaaaaaaaaagggggggcggtgtgaaaccaaaaaaggaacacccccgcccccggggggttttatttggataccaacaaaaaaattaagggcagcaacaaaccaagaaggggcggtgcattaaaaaagccccccccccgtccttgtcaacactggcaacaatagcggcaggggcaggagtttgattttaaaaaagggcaacaaaccccgcgggttggttcttaaccttgaggccaaacttttggatgggggggaacaaaggggggggggggggaacccactcaaaggccgccttggaaaacctggcccaattttgcacctgcttcccctgggg

SEQ ID NO: 7571 - DNA, 549 bp, Zea mays
  unsure (1)..(549): unsure at all n locations; Clone ID: LIB3061-073-Q1-N6-G2
aatctaaaaagtactttcttatttctgggaagccacaaacatcagacaaaaaactttattattgaactataactcataagaaatctaaaagaggcaccaccaatgatgggttgttggtagaacgctgctgggtttgtcaaagcaagttggttgaatggcagcaattgttgcagttgtaagagggtgccagcgttaggcgcagcgtgctggtagaacggcaacaactgtggttgtatcaagaaggtagcagggctcacaccagctagctggctgaatggtagtagttgttgctgctgtaaataagcaggagagttcaatgctgccagttggttgaatggaagaaattgctgggggtaggcagcaggtagctggctgaatggtagttgttgttgttgcaaataagaagcagagttcaatgcagctagttggttgaatggaagaaactgctgttgctgagagtaggcagcaaggtttgctagcacaagttgttgtagttgttgtgccctgatgttttgtgccaataanatgcaccaaagtaactgatgtaat

SEQ ID NO: 7572 - DNA, 91 bp, Zea mays
  unsure (1)..(91): unsure at all n locations; Clone ID: LIB3061-073-Q1-N6-G3
atctagaaatagtactttcttatttctgggnaagcccacaaacatcagnacaaaaaacttattattgaactataactcataagaaatctaa

SEQ ID NO: 7573 - DNA, 322 bp, Zea mays
  Clone ID: LIB3061-073-Q1-N6-G4
gggggaaaaacccaaacaaaatattggttatttctaggaaacccccgcccgaatgggggcccccttatcggggcccccccatatggaaaccaaaagagggccccccccaccagggggtgctgcccccacaagaccggggttaacaaaaaaaaccgggtgtatggcaacaattgttgctgctgtaggaaggcccccacccatggggtacccaccgctaggggataaaaaaaccgttgcccctgttgtagggcccccccaaaattccacaaaatcaattgggtgaaaggaaacacctgttgcaagaaggcaacaaggtttgccc

SEQ ID NO: 7574 - DNA, 472 bp, Zea mays
  Clone ID: LIB3061-073-Q1-N6-G5
aacgcacaggggcagattactattacggggggggggggaccatataatacccaggggcaagacaacagtacatcaaatagctagataactgggaagccaaaaacccgtctcaggggggaccaccataaatggggcttacacaacatagccaacatgcaaattattttaaaactgaccaaatgcagaggcaggaattttcgaggggggctacaaaagggggcaccgggcactggaatgcccaaaaacaagattgtagcaccaaacatggaaaaaaaaggggcggggggcaaggcaaaatttccccatgacaagttaccgcggtttacaattttcctgatacccaaccggagggaaccccccctaaatcttggcaagcttgtttgccttcaccaccggattaaccttggcaatggggtccctggcagcagtccggtagtaaaacttgcaatcgggcttgtcggaatagcggggg

SEQ ID NO: 7575 - DNA, 533 bp, Zea mays
  Clone ID: LIB3061-073-Q1-N6-G6
tttttttttttttttttttttttttttttttttttttttttttttttttttttttttttcttgggtttttttttttttttttttttttttttttttttttttttttttttttttttttttttttttttttttaaaaaaaaaaaaaaagggccttttttttttgggggggcccaaaaaacaaaaaaaaaaaatttttttttaaaaacaaacccaaaaaaaaaaaaaaaagggggcccccccaaaagggggggggggaaaaaaacccggggggtttaaaaaaaaaaggggggaaaagggaaaaaaattggccaaaaaaaaaaggggccccccttaagccccacgggggtgaaaaaaaaaaaaaaaatggggggggaaaaaaaaggggagggggccaaaaaaaaaaaaagggaaaaaaggaaaaagtgggtcccccttaaaaaaaacgggaaaggcaaaaccccccaagggggaaaaaaaaaaaaaaagggggggggaagaaaaaaaaaaccgcaaaaaaaaaaattgggttttgg

SEQ ID NO: 7576 - DNA, 483 bp, Zea mays
  Clone ID: LIB3061-073-Q1-N6-G7
agaatctagaaatgtactttcttatttctgggaagccacaaacatcagacaaaaaactttattattgaactataactcataagaaatctaaaagagggcaccaccaatgatgggttgttggtagaacgctgctgggtttgtcaaagcaagttggttgaatggcagcaattgttgcagttgtaagagggtgccagcgttaggcgcagcgtgctggtagaacggcaacaactgtggttgtatcaagaaggtagcagggctcacaccagctagctggctgaatggtagtagttgttgctgctgtaaataagcaggagagttcaatgctgccagttggttgaatggaagaaattgctgggggtaggcagcaggtagctggctgaatggtagttgttgttgttgcaaataagaagcagagttcaatgcagctagttggttgaaaggaagaaactgctgttgctgagagtaagcagcaagggttgctag

SEQ ID NO: 7577 - DNA, 557 bp, Zea mays
  Clone ID: LIB3061-073-Q1-N6-G8
aaaaatgtactttcttatttctgggaagccacaaacatcatccaaaaaacttcattattgaagtataactcataagcaatctaaaagaggcaccaccaatgatgggttgttggtagaacgctgttgggtttgtcaaagcaagttggttgaatggcagcaattgttgcagttgtaagagggtgccagcgttaggcgcagcgtgcaggtagaacggcaacaactgttgttgtgtcaagaaggcaacagggctcacatcagctagctggctgaatggtggtagctgttgctgttgtaaataagcagcagagttcaatgctgccagttggttgaatggaagaaattgctgggggtaggcagcagctagctgactgaatggtagttgttgttgcaaataagcagcagagttcaatgcagccagttggttgaatggaagaaactgctgttgctgagagtaggcagcaaggtttcctagcacaagttgttgtagttgttgtgccttgatgttttgtgccaacaaatgcaccaaaggtaactgctgtaatagggctgacggttgt

SEQ ID NO: 7578 - DNA, 523 bp, Zea mays
  Clone ID: LIB3061-073-Q1-N6-G9
aaatcaaagatgctaattcattgacaaggagaacatgctcctgtgctccatgacatttgattgttctggctattatgtataattacatttaaggaatctggggcggtcacattgatacactatcctctattagaataggtaagatctgtaggggaatgctaccgacactagataaagagatcaactcaatgcgaacctctatctctatgaatgtggatgctacggaaagcactggaaactagatctatttgaaaaggaacagaaagatgcgctgcctagatcctaaaatatgtcaccagcaaacgaggaaacatagcgatatggagtgtgcaacgaggcatgctttctaccaaagccttcaagattgaccaaggctcttttcctagcttcttttctcctcattttcttgaattaatttgtccatctccttctgcccagtagctatcagtgtcttcaccgtgtcaaacacggtcagtttaatgctgctatttggtagattttttaacgcatttggcacaaaacc

SEQ ID NO: 7579 - DNA, 495 bp, Zea mays
  Clone ID: LIB3061-073-Q1-N6-H10
gggggggggggttttttttttttttttttttttattttttatttttatttttttttttttttttttttttttttttttttttttttttttttttggggaagggaactttttttttttgggggggcccataccttatccaaaaaacttttttgggggggtggcgcttataatcaatttaaaagggggccccccccatgatgtgttgttgggagggggcttttgggtttttcaaaacaaggtggacaaagggcaacaattgttgtatttgtaaaaggggtggggggtttgccccaaactgttttaaaaaaggggaaaactgttgttttgtcaaaaagggaacccgaattggtggagttagctccctaaatgggaggagtttttgttggtggaaataaagcggggggtttagggcgggccattggttaaatggaaaaaatttttgttttttgaagttggccgaaactagctggctaaaagggaaaaggtggttggtgg

SEQ ID NO: 7580 - DNA, 537 bp, Zea mays
  Clone ID: LIB3061-073-Q1-N6-H12
agaatctggaaatgtaacttcttatttctggttggccacatacatcatccaaaaaatttattattgaattacaactaataagcaatctaaaagaggcaccaccaatgatgtgttgttggtaggagggcggtgggtctgtcaaagcaagttggacaaagggcaacaattgttgtagttgtaagagggttgcggggttagccgcaaactgctggtagaaaggcagcaactgttgctgtgtcaagaaggaagcacggtttgctgcagctagctggctaaatggtagtagtatttgctgctgcaaataagcagcggggttcagtgcggccaattggttaaatggaagaagttgttgttgctgagagtaggcagtagctagctggctaaatggtaatagttgttgctgcaaataagcagcagggttcagtgtaaacagttggttgaatggaagaaattgttgttgctgagagtagggagaaaggtttgccagagctacttggttgatcagaggtagcacgagttgctgcagctgttgtgccc

SEQ ID NO: 7581 - DNA, 529 bp, Zea mays
  Clone ID: LIB3061-073-Q1-N6-H2
ccaaaccaacttattgataattaatactagaaagtagagagacatgaaagcataaaaaatacagggtccagaatgtaaccacagataatgataagtcaggtaggtacgacacccagcaaccccttgcacgctatagcaaaagccagctcaagccaggtgaatgtctcggtagcaatcctttggtgatacacttcttttccgatttaagttgagatacagtagggttccgtctccaaagccaaggaagttacttggggccaacatccttcaacgcgcagatctgctcctcccccatcgcaaactggacagtcacaacaagatccttcccgctttcgaacccttccttaatctgggccacaagagtctcatcagttgggagtctaagatcatccttagtgttgccatctgaagtaagaaggctcacaaatccatcctcagaaatatcaatcagctgatactcagtacggttcacatgcggaatgtcacagttgtgtgatgaaggaacaatatcttcaagctttttcccatt

SEQ ID NO: 7582 - DNA, 550 bp, Zea mays
  Clone ID: LIB3061-073-Q1-N6-H3
ctaaaaagtactttcttatttctgggaagccacaaacatcagacaaaaaactttattattgaactataactcataagaaatctaaaagagggcaccaccaatgatgggttgttggtagaacgctgctgggtttgtcaaagcaagttggttgaatggcagcaattgttgcagttgtaagagggtgccagcgttaggcgcagcgtgctggtagaacggcaacaactgtggttgtatcaagaaggtagcagggctcacaccagctagctggctgaatggtagtagttgttgctgctgtaaataagcaggagagttcaatgctgccagttggttgaatggaagaaattgctgggggtaggcagcaggtagctggctgaatggtagttgttgttgttgcaaataagaagcagagttcaatgcagctagttggttgaatggaagaaactgctgttgctgagagtaggcagcaaggtttgctagcacaagttgttgtagttgttgtgccctgatgttttgtgccaataaatgcaccaaaggtaactgatgtaatagg

SEQ ID NO: 7583 - DNA, 553 bp, Zea mays
  Clone ID: LIB3061-073-Q1-N6-H5
ctagaaatgtactttcttatttctgggaagccacaaacatcagacaaaaactttattattgaactataactcataagaaatctaaaagagggcaccaccaatgatgggttgttggtagaatgctgctgggtttgtcaaagcaagttggttgaatggcagcaattgttgcagttgtaagagggtgccagcgttaggcgcagcgtgctggtagaacggcaacaactgtggttgtgtcaagaaggtagcagggctcacaccagctagctggctgaatggtagtagttgttgctgctgtaaataagcaggagagttcaatgctgtcagttggttgaatggaagaaattgctgggggtaggcagcagatagctggctgaatggtagttgttgttgttgcaaataagaagcagagttcaatgcagctagttggttgaatggaagaaactgctgttgctgagagtaggcagcaaggtttgctagcacaagttgttgtagttgttgtgccctgatgttttgtgccaataaatgcaccaaaggtaactgctgtaatagggct

SEQ ID NO: 7584 - DNA, 545 bp, Zea mays
  Clone ID: LIB3061-073-Q1-N6-H6
caaggatcgccgatagatttttcaagttaatatcattattagtgccggcttttagcattttttttaactccagaagatacagcctcacgacaactgttgaaaagggaaaatcagtacatgatggccacaaacatgcaagagctggaagtagattccgagtagaggtccaacgtccaaggcgagctatctcgagtccacaacggtgccttctggaagcgcggacaggtgcacaagaggggcatgtgatttcagggaagcattggcaccagtgatcttggtctcctttgttctgttgagcaccttcctcacctcgtttgcaagctctatgatcgaatcatcttcgtggctaatgctggctaatgccttctccattgagaacaggtaatccctattatagccagtagggccattggctgtagcaatttgcattgccatatcctgcaaaggagcagggccaagatagtacttgttgccaattggatctggagtggaaacgaacactaagacgcctgtcacagctggtttcaagggatctccttccttgt

SEQ ID NO: 7585 - DNA, 547 bp, Zea mays
  Clone ID: LIB3061-073-Q1-N6-H7
caattgttcattcaggtcattgctcacactgacactgccacccatggtgatgcgtgacacattattactcaatcatcgccgctaaatgactcaactagctagctagccagcggctatactacagcacatagtttcttcagggggggacaccgccggcagcagcgtaggggcatggagtcggctgctgcaggccgcacatcgccgtcagttgctgcgctatctgcgccgccaacagccccgcgacctggccgctttgcggctgctgctgcaggatggactggaggaccaaaccgaagatcgcctggtaccggtgctgcggctccacctgcctgagctgctggcaacactgctgccgcaacgactggcactgaggcgagcagtagggcgtcgccgtcgggctgcactgatgcctcaaaaactcgacgcactggcccaggatcggggtgctgccaacgccgcaggttccctgcagctggcacgggcttggatgcggctgttggcacgggcatgggtgtggctggggatgaggctgaggccggggcggttg

SEQ ID NO: 7586 - DNA, 552 bp, Zea mays
  unsure (1)..(552): unsure at all n locations; Clone ID: LIB3061-073-Q1-N6-H8
aaaatatagatctctaatacttanttactgagaggtcgcacatatcagcatgagaactttattattacagtataaatcataaaaaatctagaagatggcaccaccaatggtgggcggttgcaataaggtggtaggattcgtcaaagcatgttggctaaatggtagcaattgttgttgttgtaagaaggcaacaatgtttgccacattctgtgggtagaatggtagcaattgttgctgttgcaagaaggcattaatgtttcccacaacttgtgggtaaaatggcaacaaatgttgttgtctcaagaaagcaacaatgtttgccacagcttgcagatggaatggcagaagctgttgttgcagtaagaaggcataagggctcccgacaagttggttaaatggtagtagctgttgtgcctgcaagtagatagcagggttcaccccagctagttgattgaatggaagaaactgttgttgctggaggtaagcagcaaggttcgctgcaactacttgattgattgttggtagcaactgttgttgtagttgttgtgccgc

SEQ ID NO: 7587 - DNA, 484 bp, Zea mays
  Clone ID: LIB3061-074-Q1-N6-A1
gggggggaaacagggggggggggaaaaaaaaaaaggggaaaaaaggtggtggggggaaaaaggggggggggggggggaaggggggtttaaaggaggggggttggggggggggggggggggggttggggaaaaggggggggaaagggggaaaattggggggggttgggggggggggggggggttgggtagaaaaggagggaaaaaagggggaaggtgggggggggggagggggggaggaggggtgggtgagggggatgggggggaaggggggggggggtgaggggggaggaaaaggaaggggggaggatatggggggtagaggggtaggggggaagggggggaggggggaggggggggggagagggagggggggagggggggggaggggatggggtgggtggagggggggagggagtggggagggggggaaggaaggagggaggaggggaggagggaggggggggatcccccccccccccccccc

SEQ ID NO: 7588 - DNA, 510 bp, Zea mays
  Clone ID: LIB3061-074-Q1-N6-A10
ggccacatacatcatccaaaaaatttatttattgaaaacaactaataagcaatctaaaagagggcaccaccaatgatgtgttgttggtaggaggccgctcggtcttgttcaaagcaagttggacaaagggcaacaattgttgtatttgtaagagggttgcgggggtagccccaaactgctggaaaaaaggcagcaactgttgctgtgtcaaaaaggaagcacggggtgccccacctagctggctaaatgggaggaggatttgctgctgcaaataaacagcggggttcagtgcggccaattggttaaatggaaaaattgttgttgctgaaagtaagcactagctagctggctgaatggtaatagttgttgctgcaaataaacaccagggttcagtgtaaacagttggttgaatggaaaaaatgttgttgctgaaaaagggagaaagtttgccacacctacttggatgatcacaggtagcacgagttgctgcagctgctgtgccctggtggt

SEQ ID NO: 7589 - DNA, 454 bp, Zea mays
  Clone ID: LIB3061-074-Q1-N6-A11
ggggttgtgggggttttttttttttttttttttttttttttttttttttttttttttttttttttttttttttaacacaaaaaagctttgagggtttcattcttggtaccccggctgggaggaggatcgggccatggatcaggcccccaaaagggggggggggccactgccaaagctcgctccagtccccgcgttacagccaaggagggggaactctttccttcccctaaaaacctttttttaaaccacgggtagggctaaactggcaccggggctagttttattgccgggggcgggcgttgtccccggggcggcccccggcaaaggaaacgggggaaaggcggttggggcggggccccccggggccggcgcggggggggggcttcccggggggggaggggcgggcggtggacgaaagggcgcggggggcgaaaaggggggccttcagggggcc

SEQ ID NO: 7590 - DNA, 538 bp, Zea mays
  Clone ID: LIB3061-074-Q1-N6-A12
gtggggggtttgtagaatctggaaagtaacttcttatttctggttggccacatacatcatccaaaaactttattattgaattacaactaataagcaatctaaaagaggcaccaccaatgatgtgttgttggtaggaggctgctgggtttggcaaagcaagttggacaaagggcaacaattgttgtagttgtaagagggttgcggggttagccgcaaactgctggtagaaaggcagcaactgttgctgtgtcaagaaggaagcacggcttgctgcagctagctggctaaatggtagtaatatttgctgctgcaaataagcagcgaggttcagtgcggccaattggttaaatggaagaagttgttgttgatgagagtaggcagtagctagctggctgaatggtaatagttgttgctgcaaataagcagcagggttcagtgtagatagttggttgaatggaagaaattgttgttgctgatagtagggagaaaggtttgccagagctacttggttgatcacaggtagcacgagttgctgcag

SEQ ID NO: 7591 - DNA, 520 bp, Zea mays
  unsure (1)..(520): unsure at all n locations; Clone ID: LIB3061-074-Q1-N6-A2
aaagcttgttactcccanatcttaggaaagtaattatcgaacacccttggagaccaatatcacattagaatctggaaatgtaacttcttatttctggttggccacatacatcatccaaaaactttattattgaattacaactaataatcaatctaaaagagggcaccaccaatgatgtgttgttggtaggaggctgctgggtttgtcaaagcaagttggacaaagggcaacaattgttgtagttgtaagagggttgcggggttagccgcaaactgcttgtagaaaggcagcaactgttgctgtgtcaagaaggaagcacgacttgctgcagctagctcgctaaatggcagtagtatttgctgctgcaaataagcagcggggttcagtgcggccaattggttaaatggaagaagttgttgttgctgagagtaggcagtagctagctggctaaatggtaatagttgttgctgcaaataagcagcagggttcagtgtagacagttggttgaatggaagaaatt

SEQ ID NO: 7592 - DNA, 387 bp, Zea mays
  Clone ID: LIB3061-074-Q1-N6-A3
ggggggggggtttttttttttttgggttttttgtagggggggaaaatcaaaaaaaaattggttgttttgttgaaaaaaaaaaaggggggggggggggcccattgggaagggcctttcaaatggaaaaaaaaaaaggggccccccaaacggggggggggacgagggggggtttaaaaaaaaaaaaggggggaaggggaaaaaatgttgtttgttggcagaagggggggccacaaaagggggaccccccgccgggggaaaaaaaaacaggagccggtggtggggggccccaagagaattggccacccccaggggggtaaaagaaaaaaatttttggaaaaagggaagggggttccccccaagttgggtgagcaaagggggaaaaatttg

SEQ ID NO: 7593 - DNA, 184 bp, Zea mays
  Clone ID: LIB3061-074-Q1-N6-A5
ccaatcatcttttttccttatatattattcctttccatttcaatggttcattcaggtcattgctcacactgccacccatggtgatgggtgacactacgttactcatcgccgctaaatgagtaaactagcgagctaggtagctagtcagcggctccattacattattactacagtacatagtttc

SEQ ID NO: 7594 - DNA, 525 bp, Zea mays
  Clone ID: LIB3061-074-Q1-N6-A6
aatcttccaatccccatgtattaggaatccgtatgtattagaaataattgaacaagcctatacgggaagatgtgccccaatcgtcaaccacaaactagcatgacctgcctgcggcacgcagagacaataccgcacatttacatttgtgattttcacttactgcagaatttcacctatatctacaatctgtaaagggaatgaatccacactgcattacacacgtatgaatcattataccaccccaaaccacaacataattccaatgtttattgacatctcaagtaatagtttcagcaccagcacacctgcttatctatccaggtgtgtctacactctattcgtagcaaggccttgcgatttcactacttcaaacataggctgcttgtagcttggatgatatcattcttccaactattacccttttcctgaagaagctcagcaactccagcgatagtaaatcagctctggttacactcgaaactttctgaaaactctcgcatccgaactcgttccaaaaattcaaaa

SEQ ID NO: 7595 - DNA, 488 bp, Zea mays
  Clone ID: LIB3061-074-Q1-N6-A7
ggaaaaaaagaaacttttgcaaaaacaacaagctaacaatatatttaccctcggatcatgacttccaaactggggaaggctaaaatgagcagtatagatattttgctagaaaacacaccaccattttagcagcacaggcggctattacgatttggctatttctagtattacatacacatgaaggcatgtttaggagcataatcgaattcacttgactgcaggaatcagtccacctgacgagccaccggtaggggtaggtcctttgccatggaaagcaaattgcctttttggtctaccgatcggcttcggaggcaagggggaagcaggcacaccaccgtttgcattcgagtcgcccttcaggctcaattcaaacatgttgtaaaggtctttggcattcaggggaggcgttgaatgaacagccactggcttgacaaccttatgcggagcctgtgcagcaccttgtggctcacagtaaaaaggaacataac

SEQ ID NO: 7596 - DNA, 524 bp, Zea mays
  Clone ID: LIB3061-074-Q1-N6-A8
gatccaggtacacttcagatccgcttcatttctttgtagctacaagtcaaaatggtcgatacagacccatacgcaagcctccttttcatttaccccattctactactatatatatatctaaagtagatacaagatacggtcatgctagagcactgtatttaattcacaaaaaataaaagaaatacggaatagtgagcaaggtaaattaaaagactcgacgagcttgcaccagcgaaaaaaaaaggaaatcaaggtttacttactcctcttatccccccgggctgtgattacgtctaaaacatctccatcagatgtgccagctctgctcaagctcatccaccttcggtaccagtatttaacatctgacatctccggctcctcacatgttaacacttccatttcacatgaggtaaaaggaactgtccaacgacgatactaccttatgccaccgaaccctgcatagaacaatctccataccgtccaaggccaccaactgcttgctaactcaataattaccacgaggc

SEQ ID NO: 7597 - DNA, 517 bp, Zea mays
  Clone ID: LIB3061-074-Q1-N6-B1
attcccaaagactggattaaccaaaaaaaaggggctgtacatctccggtagcaactcaatttacagaactttgatcccggcaggaagttaggagaaacattcacagcgcctgaggcagtgccatggattttataaatcgaagtaggtcaactgaaaaaaaaaacgacgcctaagatgtatatccagaccccggtggggatcccagaaggcgtcgcgccataggtacattagtcgaagcggatgcaggggaagcagacgcggagaaaccatacgcatagaccattggagcaaccactgtaggatggtcgaatttacagttggcgccgaacttgcagatgccgtaacgagaatagaatttgcacagttcttcacctggacgtagtggaagacccattggacttaagacacaatctggagggggcagtgatctcacccggggatgatggaacttgcacactgcaccgaatttacaatctcctgtcttcatgtaatattggcattctggttcatcaggtct

SEQ ID NO: 7598 - DNA, 529 bp, Zea mays
  Clone ID: LIB3061-074-Q1-N6-B11
aagaatctagaaagtactttcttatttctgggaagccacaaacatcagacaaaaactttattattgaactataactcataagaaatctaaaagagggcaccaccaatgatgggttgttggtagaatgctgctgggtttgtcaaagcaagttggttgaatggcagcaattgttgcagttgtaagagggtgccagcgttaggcgcagcgtgctggtagaacggcaacaactgtggttgtgtcaagaaggtagcagggctcacaccagctagctggctgaatggtagtagttgttgctgctgtaaataagcaggagagttcaatgctgtcagttggttgaatggaagaaattgctgggggtaggcagcagatagctggctgaatggtagttgttgttgttgcaaataagaagcagagttcaatgcagctagttggttgaatggaagaaactgctgttgctgagagtaggcagcaaggtttgctagcacaagttgttgtagttgttgtgccctgatgttttgtgccaataaat

SEQ ID NO: 7599 - DNA, 518 bp, Zea mays
  Clone ID: LIB3061-074-Q1-N6-B2
agaaaagtactttcttatttctgggacgccacaaacatcatccaaaaaacttcattattgaactataactcataagcaatctaaaagaggcaccaccaatgatgggttgttggtagaacactgttgggtttgtcaaagcaagttggttgaatggcagcaattgttgcagttgtaagagggtgccagcgttaggcatagcgtgcaggtagaacggcaacaactgttgttgtgtcaagaaggcagcagggctcacatcagctagctggctgaatggtagtagttgttgctgctgtaaataagcagcagagttcaatgctgctagttggttgaatggaaaaaattgctgggggtaggcagcaactagctggctgaatggtaattgttgttgcaaataagcagcagagttcaatgcagccagttggttgaatggaagaaactgatgttgctgagagtatgcagcaaggtttgctagcacaagttgttgtagttgttgtgccctgatgttttgtgccaccaaa

SEQ ID NO: 7600 - DNA, 534 bp, Zea mays
  Clone ID: LIB3061-074-Q1-N6-B3
agtaaattaaagaaatacacaattaggtcctattttgatatacagaaaatggataacacttgtcccaactttagctgctaagggatggcttgaagtacatgcaaattggcgggtcaatcctaaggattgacagtatcgcagaaggaacagtccagatcccatcaccacagatcaagccagaggcaaccgcacctgcgaagtcatcacactccttgcggttcaccctctcccagacgaaaaggataactgtcccaacaaacatgtcgatggcgaagtacgcaccgatgtagaagggaatggccatagccatcgggattgggatgaatctggagacattctttggggtgacgtccctgaggaggttgatcactagagatgcaatgaagaaaaacgagcagatcgctaggcagtgctgaggcagtgcagaaaacccttccacgccaagaattgacatctcacggaagattacagcatatggagctttgaatgcgccgtcagggttaccaatatcgaaagccgaccagtagagccaaa

SEQ ID NO: 7601 - DNA, 521 bp, Zea mays
  Clone ID: LIB3061-074-Q1-N6-B5
cagacaaaaactttattattgaactataactcataagaaatctaaaagagggcaccaccaatgatgggttgttggtagaacgctgctgggtttgtcaaagcaagttggttgaatggcagcaattgttgcagttgtaagagggtgccagcgttaggcgcagcgtgctggtagaacggcaacaactgtggttgtatcaagaaggtagcagggctcacaccagctagctggctgaatggtagtagttgttgctgctgtaaataagcaggagagttcaatgctgccagttggttgaatggaagaaattgctgggggtaggcagcaggtagctggctgaatggtagttgttgttgttgcaaataagaagcagagttcaatgcagctagttggttgaatggaagaaactgctgttgctgaaagtaggcagcaaggtttgctagcacaagttgttgtagttgttgtgccctgatgttttgtgccaataaatgcaccaaaggtaactgatgtaatagggctgatgattg

SEQ ID NO: 7602 - DNA, 492 bp, Zea mays
  Clone ID: LIB3061-074-Q1-N6-B9
aaaaagtactttcttatttctgggaccccacaaacatcatccaaaaaacttcattattgaactataactcataagcaatctaaaagagggcccccccaatgatgggttgttggtaaaacactgttgagtttgtcaaaacaagttggttgaatggcaacaattgttgcagttgtaaaagggtgccagcgttaggcataacgtgcaggtaaaacggcaacaactgttgttgtgtcaaaaaggcagcagggctcacatcaactaactggctgaatggtaatagttgttgctgctgtaaataaacagcaaagttcaatgctgctagttggttgaatggaaaaaattgctgggggtaggcaacaactaactggctgaatggtaattgttgttgcaaataaacagcaaagttcaatgcacccagttggttgaatggaaaaaactgatgttgcttaaagtattcaacaaggtttgctaacacaaattgttgtaattgtt

SEQ ID NO: 7603 - DNA, 499 bp, Zea mays
  Clone ID: LIB3061-074-Q1-N6-C1
agaaatgtactttcttatttctgggacgccacaaacatcatccaaaaaattcattattgaactataactcataagcaatctaaaagagggcaccaccaatgatgggttgttggtagaacactgttgggtttgtcaaagcaagttggttgaatggcagcaattgttgcagttgtaagagggtgccagcgttaggcatagcgtgcaggtagaacggcaacaactgttgttgtgtcaagaaggcagcagggctcacatcagctagctggctgaatggtagtagttgttgctgctgtaaataagcagcagagttcaatgctgctagttggttgaatggaagaaattgctgggggtaggcagcaactagctggctgaatggtaattgttgttgcaaataagcagcagagttcaatgcagccagttggttgaatggaagaaactgatgttgctgagagtatgcagcaaggtttgctagcacaagttgttgtagttgttgtgccct

SEQ ID NO: 7604 - DNA, 492 bp, Zea mays
  Clone ID: LIB3061-074-Q1-N6-C10
gaacttaaaaatagatctctaatcttttattactggagagttgcacatatcagtatgagaactttattattacagtataaagcataaaaaaactagaagaggcaccaccaatggtgggctgctgcaataaggtggtaggattcgtcaaagcaagttggttaaatggcagcaattgttgttgttgtaagaaggcgacattgtttgccacatcctgtgggtagaatggtagcaactgttgctgttgcaagaaggcgttaatgtttcccacaacctgtgggtaaaatggcagcaattgttgttgttgttgcaagaaagcagcaatgtttgccacaacttgtagatggaatggaagcaactgttgctgcagtaagaaggcagcagggctcctgacaagttggttgaatggtagtagctgttgtgcctgcaagtaagcagcagggttcaccccagctagttgattgaatggaagaaattgttgttgctggaggtcag

SEQ ID NO: 7605 - DNA, 551 bp, Zea mays
  Clone ID: LIB3061-074-Q1-N6-C12
gggggggttttttctaaaaagtactttcttatttctgggaagccacaatcatcatacaaaaaactttattattgaactatcactcataagaaactaaaaaaggcaccaccaatgatgggttgctggtagaatgctgctgggtttgggaaggggggggggttcattggcaccaatcgttgcagttgtgaagagggtgccagcgttaggcgcaacgtgctggtcgaacggcaacaactgtggttgtgtcaagaaggtagcaagcctcacaccatctagctggttgaatggtaaaagctgttgctgctgcaaataagcaggagagttcactgctgacagttggttgaatggaacaaattgctgggggtaggcagcaaatagctggctgaatggtagttcgtgttgttgcaaataataatcagagttcaatgcacctagttggttgaatggaagaaactgctgctgctgatagaaggcaacatggtttgctaacacaacttgtaggatttgttgggccctgatgttttgtgccaataaatgcaccaaagggaact

SEQ ID NO: 7606 - DNA, 289 bp, Zea mays
  Clone ID: LIB3061-074-Q1-N6-C6
agaaagtactttcttatttctgggaagccacaaacatcagacaaaaactttattattgaactataactcataagaaatctaaaagagggcaccaccaatgatgggttgttggtagaacgctgctgggtttgtcaaagcaagttggttgaatggcagcaattgttgcagttgtaagagggtgccagcgttaggcgcagcgtgctggtagaacggcaacaactgtggttgtatcaagaaggtagcagggctcacaccagctagctggctgaatggtagtagttgttgctgc

SEQ ID NO: 7607 - DNA, 531 bp, Zea mays
  Clone ID: LIB3061-074-Q1-N6-C9
ggaacagatggagtactttttttcttttcatttcaattgttcattcaggtcattgctcacactgacactgccacccatggtgatgcgtgacacattattactcaatcatcgccgctaaatgactcaactagctagctagccagcggctatactacagcacatagtttcttcagtgggggacaccgccggcagcagcgtaggggcatggagtcggctgctgcaggccgcacatcgccgtcagttgctgcgctatctgcgccgccaacagccccgcgacctggccgctttgcggctgctgctgcaggatggactggaggaccaagccgaagatcgcctggtaccggtgctgcggctccacctgcctgagctgctggcaacactgctgccgcaacgactggcactgaggcgagcagtagggcgtcgccgtcgggctgcactgatgcctcaggaactcgacgcactggcccaggatcggggtgctgccaacgccgcaggttccctgcagctggcacgggcttggatgcggctgtt

SEQ ID NO: 7608 - DNA, 500 bp, Zea mays
  Clone ID: LIB3061-074-Q1-N6-D10
gagataaatctcaatcaatatattgattatttctaggaaacacacgtcggtatgagggcaccattatcgagtacatctcatatgtaatctaaaaaaggcacctccaacgatgggttgctgcctcgacaagacaggattcatcaaagagaactggttgtatggcagcaattgttgctgctgtaggaaggcggcgaccaatgggttagccactaccaatggattaagtaactgttgtcgctgttgtaggtacccagcaaagttcgacagagtcagttggttgaatggaagcagctgttgcaagtaggcaacagggtttgccacagctagttgagtcagagctggtacaatctgttgcaacaattgttgttgcaggtatgtaggtgcattgcccacagcgagcgggctaaatgaaagcagttgttgttgttgtacctaggcggcagggttcaccatggctagttgactgagcgttggcaaaaactgttgtagctgttgttgtt

SEQ ID NO: 7609 - DNA, 443 bp, Zea mays
  Clone ID: LIB3061-074-Q1-N6-D11
gggggggggttttttttttttttttagaatctagaaagtactttcttatttctgggacgccacaaacatcatccaaaaacttcattattgaactataactcataagcaatctaaaagagggcaccaccaatgatgggttgttggtagaacactggggggtttgtcaaagcaagttggttgaatggcagcaattgttgcagttgtaagagggtgccagcgttaggcatagcgtgcaggtagaacggcaacaactgttgttgtgtcaagaaggcagcagggctcacatcagctagctggctgaatggtagtagttgttgctgctgtaaataagcagcagagttcaatgctgctagttggttgaatggaagaaattgctgggggtaggcagcaactagctggctgaatggtaattgttgttgcaaataagcagcagagttcaatgc

SEQ ID NO: 7610 - DNA, 534 bp, Zea mays
  Clone ID: LIB3061-074-Q1-N6-D12
gggggggggtttttctttttatcgagaaaaatctcaatcaatatattgattatttctaggaaacacatgtcggtatgagggcaccattgtcgagtacatctcatatgtaatctaaaagaggcacctccaacgatgggttgctgcaaggggggggtcatcaaagagaactggttgtatggcagcaattgttgttgctgctgcaggaaggtagcgaccaatgggttagccactgccaatggattaagtaactgttgtcgctgttgtaggtacgcagcagagtttgacacagccagttggttgaatggaagcaactgttgtaagtaggcagcagggtttgccacagctagctgagtcagagctggtacaatttgttgcagcaactgttgttgtaggtacgtaggtgcattgcccaccgcgagcgggctagatgaaagtagttgtaggtagacggcagggttcaccatggctagttgactgagcactggcataaactgttgcagctgttgttgttgctggtatgcagctacgttcgcc

SEQ ID NO: 7611 - DNA, 396 bp, Zea mays
  Clone ID: LIB3061-074-Q1-N6-D2
aaattaaaaggggaaatagggggatggggaaaaagggccccggccccccgggggggggggggaaaaattttaccaaaaaaagggccgaaaaaggacaaaaagggggggggggccgggggttttccaaaaaaaaaaatttttttaggggggggaacccccggggaaaagggggggggaggggagggggggggggggggccaaaaaaggccggaggggggggggtttttgggccccaaaaaacccccggaacggggcctttttggggttgttttggagggggggccgggggaaccaacccaaaaaacccggggaccgggggggggggcccccccggcgggggggggggaaaaaattggggccaaaaaaaggggccttgggggaaaaaagggggccccc

SEQ ID NO: 7612 - DNA, 545 bp, Zea mays
  unsure (1)..(545): unsure at all n locations; Clone ID: LIB3061-074-Q1-N6-D3
acattagaatctgngaatgtaacttcttatttctggttggccacatacatcatccaaaaactttattattgaattacaactaataagcaatctaaaagagggcaccaccaatgatgtgttgttggtaggaggctgctgggtttgtcaaagcaagttggacaaagggcaacaattgttgtagttgtaagagggttgcggggttagccgcaaactgctggtagaaaggcagcaactgttgctgtgtcaagaaggaagcacggcttgctgcagctagctggctaaatggtagtaatatttgctgctgcaaataagcagcgaggttcagtgcggccaattggttaaatggaagaagttgttgttgatgagagtaggcagtagctagctggctgaatggtaatagttgttgctgcaaataagcagcagggttcagtgtagatagttggttgaatggaagaaattgttgttgctgatagtagggagaaaggtttgccagagctacttggttgatcacaggtagcacgagttgctgcagctgctgtgccttg

SEQ ID NO: 7613 - DNA, 504 bp, Zea mays
  Clone ID: LIB3061-074-Q1-N6-D4
atcgagataaatctcaatgaatatattgattatttctaggaaacacatgccggtatgagggcgccattatcaagtacatctcatatgtaatctaaaaaaggcacctccaacgatgggttgctgcctcgacaagacagggttcatcaaagagaactggttgtatggcagcaattgttgctgctgtaggaaggcagcgaccaatggggtagccactgctagtggattaagtaactattgtcgttgttgtaggtacccaacagagttcgacacaatcagttggttgaatggaagcagctgttgcaagtaggcagcagggtttgccatagctagctgagtcagagctggtagattctattgcaacaattgttgttgcaggtatgtaggtgcattggccaaaacgagcggggtaaatgaaagcagttgttgctgttgtaggtaggcggcagggttcaccatggctagttgactgagcgctggcagaaactgttgcagctgttgttgtta

SEQ ID NO: 7614 - DNA, 509 bp, Zea mays
  Clone ID: LIB3061-074-Q1-N6-D5
atatgatgaacatagttcagaaatatatcgagataaatctcaatcaatatattgattatttctaggaaacacacgtcggtttgagggccccattatcgagtccatctcatatgtaatctaaaaaaggcacctccaacgatgggttgctgcctcgacaagacaggattcatcaaagagaactggttgtatggcagcaattgttgctgctgtaggaaggcggcgaccaatgggttagccactaccaatggattaagtaactgttgtcgctgttgtaggtacccagcaaagttcgacagagtcagttggttgaatggaagcagctgttgcaagtaggcaacagggtttgccacagctagttgagtcaaagctggtacaatctgttgcaacaattgttgttgcaggtatgtaggtgcattgcccacagcgagcgggctaaataaaagcagttgttgttgttgtacgtaggcggcagggttcaccatggctagttgactgagcgttggcaaaaa

SEQ ID NO: 7615 - DNA, 544 bp, Zea mays
  Clone ID: LIB3061-074-Q1-N6-D6
agaaatgtactttcttatttctgggaagccacaaacatcagacaaaaaatttattattgaactataactcataagaaatctaaaagagggcaccaccaatgatgggttgttggtagaacgctgctgggtttgtcaaagcaagttggttgaatggcagcaattgttgcagttgtaagagggtgccagcgttaggcgcagcgtgctggtagaacggcaacaactgtggttgtatcaagaaggtagcagggctcacaccagctagctggctgaatggtagtagttgttgctgctgtaaataagcaggagagttcaatgctgccagttggttgaatggaagaaattgctgggggtaggcagcaggtagctggctgaatggtagttgttgttgttgcaaataagaagcagagttcaatgcagctagttggttgaatggaagaaactgctgttgctgagagtaggcagcaaggtttgctagcacaagttgttgtagttgttgtgccctgatgttttgtgccaataaatgcaccaaaggtaactgatgtaa

SEQ ID NO: 7616 - DNA, 528 bp, Zea mays
  Clone ID: LIB3061-074-Q1-N6-D7
cacattaaaatctggaaatgtaacttcttatttctggttggccacatacatcatccaaaaactttattattgaattacaactaataatcaatctaaaagaggcaccaccaatgatgtgttgttggtaggaggctgctgggtttgtcaaagcaagttggacaaagggcaacaattgttgtagttgtaagagggttgcggggttagccgcaaactgcttgtagaaaggcagcaactgttgctgtgtcaagaaggaagcacgacttgctgcagctagctcgctaaatggcagtagtatttgctgctgcaaataagcagcggggttcagtgcggccaattggttaaatggaagaagttgttgttgctgagagtaggcagtagctagctggctaaatggtaatagttgttgctgcaaataagcagcagggttcagtgtagacagttggttgaatggaagaaattgttgttgctgagagtagggagaaaggtttgccagagctacttggttgatcacaggtagcacgagttgct

SEQ ID NO: 7617 - DNA, 544 bp, Zea mays
  unsure (1)..(544): unsure at all n locations; Clone ID: LIB3061-074-Q1-N6-D8
gngaaagtaacttcttatttctaggaggccacatacatcagccaaaaacttcattattgaattacaactaataagcaatctaaaagatggcaccgccaatgatgtgttgttggtagaaggctgctgggtttgtcaaagcaagttggacaaagggcagcaactgttgcagttgtaagagggttgcggggttagccacaaactgctggtagaacggaagcaattgttgttgtttcaaaaaggaagtggggcttgttgtagctagctggccaaatggtagtagtatttgctgctggaaataagcagaggggttcagtgcggccaattggttaaatggaagaaattgttgctgctgagagtaggcagtagctagctggctgaatggtagtagttgttgttgttgtaaataagcagcagggttcagtgtagacagttggttgaatggaagaaattgttgttgctgagagtagggagaaaggtttgccagagctacttggctgatcactggtagcacgagttgttgcagctgttgtgccctgatggtttg

SEQ ID NO: 7618 - DNA, 540 bp, Zea mays
  unsure (1)..(540): unsure at all n locations; Clone ID: LIB3061-074-Q1-N6-D9
aaaatctggnaatgtaacttcttatttctggttggccacatacatcatccaaaaaatttattattgaattacaactaataagcaatctaaaagagggcaccaccaatgatgtgttgttggtaggaggccgctcggtctgtcaaagcaagttggacaaagggcaacaattgttgtagttgtaagagggttgcggggttagccgcaaactgctggtagaaaggcagcaactgttgctgtgtcaagaaggaagcacggtttgctgcagctagctggctaaatggtagtagtatttgctgctgcaaataagcagcggggttcagtgcggccaattggttaaatggaagaagttgttgttgctgagagtaggcagtagctagctggctgaatggtaatagttgttgctgcaaataagcagcagggttcagtgtagacagttggttgaatggaagaaattgttgttgctgagagtagggagaaaggtttgccagagctacttggttgatcacaggtagcacgagttgctgcagctgctgtgccctg

SEQ ID NO: 7619 - DNA, 536 bp, Zea mays
  Clone ID: LIB3061-074-Q1-N6-E1
agaaagtactttcttatttctgggaagccacaaacatcagacaaaaaatttattattgaactataactcataagaaatctaaaagagggcaccaccaatgatgggttgttggtagaacgctgctgggtttgtcaaagcaagttggttgaatggcagcaattgttgcagttgtaagagggtgccagcgttaggcgcagcgtgctggtagaacggcaacaactgtggttgtatcaagaaggtagcagggctcacaccagctagctggctgaatggtagtagttgttgctgctgtaaataagcaggagagttcaatgctgccagttggttgaatggaagaaattgctgggggtaggcagcaggtagctggctgaatggtagttgttgttgttgcaaataagaagcagagttcaatgcagctagttggttgaatggaagaaactgctgttgctgagagtaggcagcaaggtttgctagcacaagttgttgtagttgttgtgccctgatgttttgtgccaataaatgcaccaaaggtaact

SEQ ID NO: 7620 - DNA, 515 bp, Zea mays
  Clone ID: LIB3061-074-Q1-N6-E10
atcgagataaatctcaatcaatatattgattatttctaggaaacacatgtcggtatgagggcaccattgtcgagtacatctcatatgtaatctaaaagatggcacctccaacgatgggttgctgcaaggcagggttcatcaaagagaactggttgtatggcagcaattgttgttgctgctgcaggaaggtagcgaccaatgggttagccactgccaatggattaagtaactgttgtcgctgttgtaggtacgcagcagagtttgacacagccagttggttgaatggaagcaactgttgtaagtaggcagcagggtttgccacagctagctgagtcagagctggtacaatttgttgcagcaactgttgttgtaggtacgtaggtgcattgcccaccgcgagcgggctagatgaaagtagttgtaggtagacggcagggttcaccatggctagttgactgagcactggcataaactgttgcagctgttgttgttgctggtatgcagctacgttcgcc

SEQ ID NO: 7621 - DNA, 491 bp, Zea mays
  Clone ID: LIB3061-074-Q1-N6-E11
gagataaatctcaatcaatatattgattatttctaggaaacacacgtcggtatgagggcaccattatcgagtacatctcatatgtaatctaaaaaaggcacctccaacgatgggttgctgcctcgacaagacaggattcatcaaagagaactggttgtatggcagcaattgttgctgctgtaggaaggcggcgaccaatgggttagccactaccaatggattaagtaactgttgtcgctgttgtaggtacccagcaaagttcgacagagtcagttggttgaatggaagcagctgttgcaagtaggcaacagggtttgccacagctagttgagtcaaagctggtacaatctgttgcaacaattgttgttgcaggtatgtaggtgcattgcccacagcgagcgggctaaatgaaagcagttgttgttgttgtacgtaggcggcagggttcaccatggctagttgactgagcgttggcagaaactgttgtagct

SEQ ID NO: 7622 - DNA, 398 bp, Zea mays
  unsure (1)..(398): unsure at all n locations; Clone ID: LIB3061-074-Q1-N6-E3
ggggggagggggggggttttttgggggggggggccaaacattggaaaaaaaaatgtttgtgggggaaaaaaaaaaaaagggggaaaaagggggggccccccaggggggggggggggggggggggggggggggttttaaaaaaagggggggaaaaaggggaaaaattgggggaataaaaaagggggggggggggtaccccaaaatggggggaaaaaagggggaaatttgggggggaaaaaaaaagaaaaggggggggggggccttgggggggaaaaggggaaaattttttgggggaaaaaaaaaaaggggggggtaaagggggcaaattgttaaaaaaaaaaaaattttgtttggaaaaaaggaaagncctgcgggggaaaaagggaaaatgcgggggc

SEQ ID NO: 7623 - DNA, 534 bp, Zea mays
  Clone ID: LIB3061-074-Q1-N6-E4
ggagaaaatctcaatcaatatattgattatttctagggaacacatgccgctatgagggcaccattatcgagtacatctcatatgtaatctaaaagaggcacctccaacgatgggttgctgccacaacaaggcagggttcatcaaagagaactggttgtatggcagcaattgttgctgctgtaggaaggcagcgaccaatgggttagccaccgctagtggattaagtaactgttgtcgctgttgtaggtacgcagcagagttcgacacagtcagttggttgaatggaagcagctgttgcaagtaggcagcagggtttgccacagctagctgagtcagagctggtacaatctgttgcagcaactgttgttgcaggtatgtaggtgcattaaccacagcgagagggctagatgaaatcagttgttgctgttgtaggtaggcggcagggttcaccatggctagttgactgagcgctggtagaaactgttgcaattgttgttgttgttggtatgcaactatgtttgccagagcaagtgg

SEQ ID NO: 7624 - DNA, 467 bp, Zea mays
  Clone ID: LIB3061-074-Q1-N6-E7
ggggggaaaaaaactacctaatttcacgggggaaaagagggacaagcattcgggcccccaggggatttccatgaacagaggggggtcccgcccttttaggggggggggtaccaaatcaatcaacttgctcaaacccatcgcacatgctggggctatttttttttcaacttctccaaattggccatgctcaaagcccaaacttcgctgggaatctgaatttccaccggacccccacagttcaccccctttgggaaaattcataatgcccgcagctttcttttttttttaagcccccttttgcccccgggtttatgaacatcaaaatttgagcccaaattactggtattatccccgggacgattggggacccttctattttaaaaagaatccccccttgggctgtttgaaatactgctcgagctggatatcccacgtttatttgcatgtctgcctctatttggggctaa

SEQ ID NO: 7625 - DNA, 495 bp, Zea mays
  Clone ID: LIB3061-074-Q1-N6-E8
aatctagaaagtactttcttatttctgggaagccacaaacatcagataaaaactttattattgaactataactcataagaaatctaaaagagggcaccaccaatgatgggttgttggtagaacactgctgggtttgtcaaagcaagttggttgaatggcagcaattgttgcagttgtaagagggtgccagcgttaggcgcaacgtgctggtagaacggcaacaactgtggttgtgtcaagaaggtagcagggctcacaccagctagctggctgaatggtagtagttgttgctgctgtaaataagcaggagagttcaatgctgctagttggttgaatggaaaaaattgctgggggtaggcagcaggtagctggctgaatggtagttgttgttgttgcaaataagaagcagagttcaatgaacctagttggttgaatggaaaaaactgctgttgctgagagtaggcagcaaggtttgctagcacaagttgttgtagt

SEQ ID NO: 7626 - DNA, 511 bp, Zea mays
  Clone ID: LIB3061-074-Q1-N6-E9
atcgagaaaaatctcaatcaatatattgattatttctaggaaacacacgtcggtatgagggcaccattatcgagtacatctcatatgtaatctaaaaaaggcacctccaacgatgggttgctgcctcgacaagacaggattcatcaaagagaactggttgtatggcagcaattgttgctgctgtaggaaggcggcgaccaatgggttagccactaccaatggattaagtaactgttgtcgctgttgtaggtacccagcagagttcgacagagtcagttggttgaatggaagcagctgttgcaagtaggcaacagggtttgccacagctagttgagtcagagctggtacaatctgttgcaacaattgttgttgcaggtatgtaggtgcattgcccacagcgagcgggctagatgaaagcagttgttgttgttgtacgtaggcggcagggttcaccatggctagttgactgagcgttggcagaaactgttgtagctgttgttgttgctggttt

SEQ ID NO: 7627 - DNA, 417 bp, Zea mays
  Clone ID: LIB3061-074-Q1-N6-F10
gcttcattaaagaatctcatcattgaagtgaaaagtttctctctctctttcctccctaaaatgtctcgcattgttcgcgttgctccagccgcgcaaggagaatgaataaactgcaaagggccatggcaaaggccagcaccaatcaaatcaaccaagcgccgatctcgtgatctcgtaggccacgaatgtcgcggcattggctggaacgctgcgtgccatggcgggtccgaaccccttgtacaggcccttcaccccatcagccgccacgatcttcctcagcgcgtcgagggacccggagtacttgggcttcttgtaatcgtccacctggatcacgctcttcaccacgtccgtcgggtacacggacagccagaaggcggcgccggcgaggccgcccgccaggacctgggagcccctgcc

SEQ ID NO: 7628 - DNA, 536 bp, Zea mays
  unsure (1)..(536): unsure at all n locations; Clone ID: LIB3061-074-Q1-N6-F11
actccaaattttatccattataaatacacagctaaactacagtanccgaagcgctatgaagccatgcagctacctcctaccaaccagaacacagaaagcacgccgtaccggcggcgggaatcgggatgccactgtccaggcgactaggagacgcagcggagcgagtgcagggacgccgaggtgtccatggacgcggcgtcatacatgcagcgggtctccgtcgcctcgatgccgtagtccatcagcgggcggcgctccagctcgtcgtcgtgctcgcgcacgcattcggggacctccagctgctccttgtctatgtgggcccaaacgtactcaagccggctcatgtatcgcagcttctcatacaaccctgagctgaagaggaagcgcccgaaggtggcgaagaagatcctggactggagggccgggtgcacgaagtagacggcgcgcagcctctccttggccgcggccggcagcgtctcgtacgcgccgcggatcgcaccgacgccgggngaagttgtggccgcgatccacgcggg

SEQ ID NO: 7629 - DNA, 541 bp, Zea mays
  Clone ID: LIB3061-074-Q1-N6-F12
cacattaaaactggaaagtaacttcttatttctggttggccacatacatcatccaaaaactttattattgaattacaactaataagcaatctaaaagaggcaccaccaatgatgtgttgttggtaggaggccgctcgggctgtcaaagcaagttggacaaagggcaacaattgttgtagttgtaagagggttgcggggttagccgcaaactgctggtagaaaggcagcaactgttgctgtgtcaagaaggaagcacggtttgctgcagctagctggctaaatggtagtagtatttgctgctgcaaataagcagcggggttcagtgcggccaattggttaaatggaagaaattgttgttgctgagagtagggagaaaggtttgccagagctacttggttgatcacaggtagcacgagttgctgcagctgctgtgccctgatggtttgtaccaatgactgcaccaaagatagggctggcgattgttgaaacaacaagggtgataaaggtatgttgcttgctgcgattgcttgttggagcctat

SEQ ID NO: 7630 - DNA, 503 bp, Zea mays
  Clone ID: LIB3061-074-Q1-N6-F2
ccaatcatcttttttccttatatattattcctttccatttcaatggttcattcaggtcattgctcacactgccacccatggtgatgggtgacactacgttactcatcgccgctaaatgagtaaactagcgagctaggtagctagtcagcggctccattacattattactacagtacatagtttcctcagtagtaaacaccgccggcagctgcgttgcaagggcagggacctggctgctgcagctgcaggccgcacatcgccgtcagctgctgcgctacctgggccgccatcagcgccgcgagctcgccctgcggctgctgctgcaggaaggactgcaggaccacaccgtatgtcgcctggtaccggtgcagcggctccacctgcctgatctggtggcagcactgctgctgcagcgcctggcactgtggcgagccgtagggcgtccccgccgggctgcactggtgcctcaggaactcgacgcactggcccaggaacgggctgcc

SEQ ID NO: 7631 - DNA, 540 bp, Zea mays
  Clone ID: LIB3061-074-Q1-N6-F3
cacattaaaatctggaaaatgtaacttcttatttctggttggccacatacatcatccaaaaactttattattgaattacaactaataagcaatctaaaagagggcaccaccaatgatgtgttgttggtaggaggccgctcggtctgtcaaagcaagttggacaaagggcaacaattgttgtagttgtaagagggttgcggggttagccgcaaactgctggtagaaaggcagcaactgttgctgtgtcaagaaggaagcacggtttgctgcagctagctggctaaatggtagtagtatttgctgctgcaaataagcagcggggttcagtgcggccaattggttaaatggaagaagttgttgttgctgagagtaggcagtagctagctggctgaatggtaatagttgttgctgcaaataagcagcagggttcagtgtaaacagttggttgaatggaagaaattgttgttgctgagagtagggagaaaggtttgccagagctacttggttgatcacaggtagcacgagttgctgcagctgctg

SEQ ID NO: 7632 - DNA, 501 bp, Zea mays
  Clone ID: LIB3061-074-Q1-N6-F5
atcgagataaatctcaatcaatatattgattatttctaggaaacacatgtcggtatgagggcaccattgtcgagtacatctcatatgtaatctaaaaaaggcacctccaacgatgggttgctgcaaggcagggttcatcaaaaaaaactggttgtatggcagcaattgttgttgctgctgcaggaaggtagcgaccaatgggttagccactgccaatggattaagtaactgttgtcgctgttgtaggtacccagcaaagtttgacacaaccagttggttgaatggaagcaactgttgtaagtaggcagcagggtttgccacagctagctgagtcagagctggtacaatttgttgcaacaactgttgttgtaggtacctaggtgcattgcccaccgcgagcgggctaaatgaaagtagttgtaggtagacggcagggttcaccatggctagttgactgagcactggcataaactgttgcagctgttgttgttgctggtatgc

SEQ ID NO: 7633 - DNA, 495 bp, Zea mays
  Clone ID: LIB3061-074-Q1-N6-F6
aaatgaaacactgagatccagttacccatttaacactttatataaggtacatgattctgccttatggttcagttccagattcaaggcccaccaaatgaacggaatgcagggcagtcttgtcacgtttaacattttagctgctacccaatcctagctggatgcatgtataacaagcaactctctatactggggattagatgtgggccggctctcaagccaccccgccgctggttgccgtcctgatgatctgaaacaacgatgatccaatgacgacaaagatgaagaacccaagcactagagggccaacagggtagtcatttcccttcttgacagtggtttcaggcacagaacccctcctggtgatgttcttctggaactttgcggtcttcctgtcagcaaggcgccttgaagtagtcatgttcccgccggtgagcgagatcgccggaccgccgagcctgtggcggtggggtcggagcagcacgaatgctcgagcct

SEQ ID NO: 7634 - DNA, 509 bp, Zea mays
  Clone ID: LIB3061-074-Q1-N6-F8
gacaagaacattgatatccatttatatttaaaaaaagtcaccatacattataagtttagaaccacacttgaactgattacacccatatgactacaataggttacgcttcaacacgagtcttccaaggaaaacagcttaacaaccacagcacccttaaccatacaagctaaatgattcccagtacattttttttatcttggggccatcctctgcacagtttggtcacacagtttagcagttttgtttggcgcctcatcttttgtgcagcctcgtctttttcaatatttggtcgtagcagcctcaaccttttcaatatttggtcactcatctagctttccatgtagtataatcgaggattgtggttgtaaaaagcgcaggttcttggtttaccatacaaatcaggagcagtagaggcagaagcctcggtcgaagccacctcgtcatcattgggcagttgtgtttctccatgctcaagtctaccagaatcaggcctcctacgccagccactg

SEQ ID NO: 7635 - DNA, 546 bp, Zea mays
  Clone ID: LIB3061-074-Q1-N6-F9
cacattagaaatctggaaaagtaacttcttatttctggttggccacatacatcatccaaaaactttattattgaattacaactaataatcaatctaaaagagggcaccaccaatgatgtgttgttggtaggaggctgctgggtttgtcaaagcaagttggacaaagggcaacaattgttgtagttgtaagagggttgcggggttagccgcaaactgcttgtagaaaggcagcaactgttgctgtgtcaagaaggaagcacgacttgctgcagctagctcgctaaatggcagtagtatttgctgctgcaaataagcagcggggttcagtgcggccaattggttaaatggaagaagttgttgttgctgagagtaggcagtagctagctggctaaatggtaatagttgttgctgcaaataagcagcagggttcagtgtagacagttggttgaatggaagaaattgttgttgctgagagtagggagaaaggtttgccagagctacttggttgatcacaggtagcacgagttgctgcagctgttgtgccct

SEQ ID NO: 7636 - DNA, 535 bp, Zea mays
  Clone ID: LIB3061-074-Q1-N6-G1
agagaaaaatgtcacaatataatgcagatacttattacatagcggaagtcttacaaaataaaatataaatataaatcgaactaaaatccatccttggcgccagaaagtcaacagggagatgccacctagatcaaatcgaactccacaatgtgtggctccacttgaaccacctgttcttctcctgtgggggtgtgagacaacaagggtgagctcacacatgttcatcgctcaataagttgtggggaataatgtggcatgaactcatcaaaggtgggagttcatgtgatgtataaagctggtcaacaataggggttaaagctgagcattgcttttaataagttggtcaaattttattagcagttactaaatgtaagtgaataccaaatcataataaaataatagaacaaaattaataataaatcccatgcaatgcatatgacaaattgagtttaagtttcataatttaatcatgcgagagttctgagctgctcatgaccgtgagctcggtagtataccagttttacactatgcagag

SEQ ID NO: 7637 - DNA, 533 bp, Zea mays
  Clone ID: LIB3061-074-Q1-N6-G10
aaacagccataattattctcaataacccggtagcaatgcagggggaattaacgactcttacaacatcaggtgttgtaaaccacacaatacttcataacagacacacataacacgatagcaggagcaactcacggcagatcacgggataagggcagcacactggcctgatgctgcgtcatcagcaaacttctctagtactcgtcaccctcgtcgccatcctcgccctcatcgaactcagcgccgacctcctcgtagtccttctcgagcgccgccaggtcctcacgggcctcagagaactcaccttcctccataccctcaccgacgtaccagtgcacgaaggcacgcttggcgtacatgaggtcgaacttgtggtcgatgcgggagaacacctccacgacactggtggagttggagatcatgcacacggcacgctgcaccttggccaggtcgccaccaggcacaacgctaggaggctggtagttgatgccgcacttgaagccagtcgggcaccaatccacgaactggatggtgcg

SEQ ID NO: 7638 - DNA, 560 bp, Zea mays
  unsure (1)..(560): unsure at all n locations; Clone ID: LIB3061-074-Q1-N6-G11
gggggggggggggttttttttttttttttttttttttttttttttttttttttttttttttttttttttttttttttttttttttttttttttttttttttttaaaatttggaaatggaattttttatttttgggggggcaaatacattaggggggggggggggggaaagaaaacaaaaaaaaaggggggggaaaaaaagggcccccaaaaaaggggtggggggaaaaaaggaaaagggaaaaaaaaaaaaaggcccccccaaaaagggggggggggaagggggaaaaaggggaaaaaaaaaaacggggaaggattaaaaaaaaaaggggggggggaaaaaaagaggcaaaaagaggaagggggaaaaggaggaaaaaanagggggcgggaaaaaaagcccaaaagaggggagggggataaaagggggaaaaaaaaccgggggccccacccgggaaaataaggaggggaaccggaaagcaaaccaggggccccgagggggggcccgaaaaaagggggggggaaaaagggggaaaaaaacttccccgggaaaaagggcacc

SEQ ID NO: 7639 - DNA, 72 bp, Zea mays
  Clone ID: LIB3061-074-Q1-N6-G12
gggtgttgggtttttcaaccagtaaaacagaattcgttccgttccattctgtgttccgctacaacagaacac

SEQ ID NO: 7640 - DNA, 550 bp, Zea mays
  unsure (1)..(550): unsure at all n locations; Clone ID: LIB3061-074-Q1-N6-G2
gggcgctgacctcgnatgcctcctccacgtcccgctgcgagaagccgaagcggtgggtgatgagaggcttgacgtccaccttgccgctgcgcaggaagtcgatgcacagtggccaggtgtccttgtaccggaacacgcccaccacgtccacctcccgcgccgccgccgccgtcaggggcagcgtcatctcgttgtggcccatcccgaccaggcacaccttcccgccgggccgcgtcgcctccagcgccgtcgacatggtcttgctgaacccggcgcagtccaggctgacgtcgatgtccgagcccatggccgcgcggatgcgctccacctcgtccgccaggtcctccgcgcggggcgacacccgcaccgccgcgtccgcgcccagcgacctggccacggccaggcggtgctcgtccacgtccacgaccaccacgcgcggcgcgccgaaggcccgcgccgccagcagcgacaccaggccgatggggccggcgcccaccacgagcacgcccgtcttgggccccacccccgcgcggcggcacgcgtgcacgcc

SEQ ID NO: 7641 - DNA, 523 bp, Zea mays
  unsure (1)..(523): unsure at all n locations; Clone ID: LIB3061-074-Q1-N6-G3
aagaactaaaaagtactttcttatttctgggaagccacaaacatcagacaaaaactttattattgaactataacnataagaaactaaaagaggcaccaccaatgatgggttgttggtagaacgctgctgggtttgtcaaagcaagttggttgaatggcagcaattgttgcagttgtaagagggtgccagcgttaggcgcagcgtgctggtagaacggcaacaactgtggttgtatcaagaaggtagcagggctcacaccagctagctggctgaatggtagtagttgttgctgctgtaaataagcaggagagttcaatgctgccagttggttgaatggaagaaattgctgggggtaggcagcaggtagctggctgaatggtagttgttgttgttgcaaataagaagcagagttcaatgcagctagttggttgaatggaagaaactgctgttgctgagagtaggcagcaaggtttgctagcacaagttgttgtagttgttgtgccctgatgttttgtgccaataa

SEQ ID NO: 7642 - DNA, 530 bp, Zea mays
  Clone ID: LIB3061-074-Q1-N6-G4
attaagccttgttccggatcttaaaggtaaaaaagcagaccattaaaaggatccgcaactatttgtcccaaatccaggataaatcacatcgaatcgatacacagatcaattcaccgcacaagccgaaaagaaccaacacctatcctagatacgctgctccatctacacagccgacgacattgcagtttcagcagcgcgagtcactcgacgccctcggtggatctctgcaccagcacaacgcccagggtgatggcggaggcgtagagcgcgttgggcaccttgcgtaccaccttgcccacgccggggacgccctccgtcgcccgcttggtcgccatcgccagcgccggcgccgccaccagcgtgatcagcagcttcacgctgatcgagcacagcgagtccgcggtcagcttccggatgaactccgcgaactcctcgcggtccaggagcccgtccaggttcacgtcgtactcctccatcatggccctgagcttctccttggacggggggtcgtggtgtggccccggcaagta

SEQ ID NO: 7643 - DNA, 495 bp, Zea mays
  Clone ID: LIB3061-074-Q1-N6-G5
aaaaccaaaactttattatgatgcatatattattggtcataccacacatgataatgggtgtcgtcttactgcattattacatatatagatagagagggatggatagaggagatttcccaaatatcatgaatcagtagtagggcggaatggcagcggaaaccccacaggggttggtgcggtagctgggcagctggtactggtactggtagagtccacccatggccggcatgttctgcgccatcatcatggccatggggttgaaaccctgggctgccagcagctgctgctgctgctgcataaaaactggctcgtacaggctgctgctggcggcagcggcaccctcaagctgcattattatttgcagctgctgcgcgacggactgcacgtccatcatcctcatctgctgctggcagcactgttgccggagcggctggtacatggcgctcgtctgcccacacccggcgtagtagggcgccgccgccagcgggctgcact

SEQ ID NO: 7644 - DNA, 532 bp, Zea mays
  Clone ID: LIB3061-074-Q1-N6-G6
aaatctcaatcaatatattgattatttttaggaaacacatgccgctatgagggcaccattatcgagtacatctcatatgtaatctaaaagatggcaccaccaacgatgggttgctgccacgacaaggcagggttcatcaaagagaactggttgtatggcagcaattgttgctgctgtaggaaggcagcgaccaatgggttagccaccgctagtggattaagtaactgttgtcgctgttgtaggtacgcagcagagttcgacacagtcagttggttgaatggaagtagttgttgcaagtaggcagcagggtttgccacagctagctgagtaagagctggtacaatttgttgcagcaactgttgttgcaacaactgttgttgcaggtatgtaggtgcattgcccatagcgagcgggctagatgaaagaagttgttgctgttgtaggtaggcgatagggttcaccatggctagttgactgagcgctggcagaaactgttgcaactgttgttgttgttggtatgcagctacgtttg

SEQ ID NO: 7645 - DNA, 533 bp, Zea mays
  Clone ID: LIB3061-074-Q1-N6-G7
aacatcagataaaaaatttattattgaactataactcataagaaatctaaaagagggcaccaccaatgatgggttgttggtagaacactgctgggtttgtcaaagcaagttggttgaatggcagcaattgttgcagttgtaagagggtgccagcgttaggcgcaacgtgctggtagaacggcaacaactgtggttgtgtcaagaaggtagcagggctcacaccagctagctggctgaatggtagtagttgttgctgctgtaaataagcaggagagttcaatgctgctagttggttgaatggaagaaattgctgggggtaggcagcaggtagctggctgaatggtagttgttgttgttgcaaataagaagcagagttcaatgaacctagttggttgaatggaagaaactgctgttgctgagagtaggcagcaaggtttgctagcacaagttgttgtagttgttgtgccctgatgttttgtgccaataaatgcaccaaaggtaactgttgtaatagggctgatgattgttggagg

SEQ ID NO: 7646 - DNA, 526 bp, Zea mays
  Clone ID: LIB3061-074-Q1-N6-G9
tttttttttttttttttttttttttttttttttttttttttttttttttttttttttttttttttttttttttttttttttatttttttttttttttttttttttttttttttttttttttttttttttttttttttttttcaaaaaaaaaaatttttttgggacctaaacccaaaaaaaaaaaaaaagagggggcccccccaagggggggggggggggaaaacccgggggggtttgaaaaaaaaggggggggaaaggggaggggccccgggggcccccccggaaattccggccggggcccggggggggacccaattttcctaaaaggggggggaaaaaaaggggggggaaaaaaggggaaaaggggttcccgggggaaaaaggtttccccttaaaaatcccaaaaaaaaaaagggggggaagaaaaaagggaaaacccgggggggccaaaggggggggccaccccaaataaatggggggggcccaacggccccttttcaaaggggaaaaccgggggggccccggg

SEQ ID NO: 7647 - DNA, 524 bp, Zea mays
  Clone ID: LIB3061-074-Q1-N6-H10
cgagaaaaatctcaatcaatatattgattatttctaggaacacatgccgctatgagggcaccattatcgagtacatctcatatgtaatctaaaagaggcacctccaacgatgggttgctgccacaacaggggggggttcatcaaagagaactggttgtatggcagcaattgttgctgctgtaggaaggcagcgaccaatgggttagccaccgctagtggattaagtaactgttgtcgctgttgtaggtacgcagcagagttcgacacagtcagttggttgaatggaagcagctgttgcaagtaggcagcagggtttgccacagctagctgagtcagagctggtacaatctgttgcagcaactgttgttgcaggtatgtaggtgcattaaccacagcgaggagggctagatgaaatcagttgttgctgttgtaggtaggcggcagggttcaccatggctagttgactgagcgctggtaaaaactgttgcaattgttgttgttgttggtatgcaactatgtttgcc

SEQ ID NO: 7648 - DNA, 480 bp, Zea mays
  Clone ID: LIB3061-074-Q1-N6-H11
ataatatcttttcttttttggcttcttcagtcttttacattatttttaacccctttgtgtactccctgtccttttttaagcctttatctttcttatccttggcccggggggggggggaccacactttggatacatctgccttaggtatccctctaaaaccctgttgcaggggtagtaaatagcccccctgtcctaactaactcctccctccagcggcgggtgctgctgacaaccccagggcacagcctaactccagagcggaatggcctcctcgtagcccctgaccatagctccccatggcggcgcaccggcactcgcggatcacgtcctaaagctgctggcagcaacaaatccggagcccaaaaccccaccggaacgggccggcgacgccgccgccggttagctaccaaacgaggacctgacggcacgcgtcgagcgaactataaaaaacctcctggcagcactgcaagtccctgagcc

SEQ ID NO: 7649 - DNA, 520 bp, Zea mays
  unsure (1)..(520): unsure at all n locations; Clone ID: LIB3061-074-Q1-N6-H2
gnaccgggcctcgcgggccaggtacgcgccgcgcaccagcttgacccccaggcgcacgcgcgcgcgctccacgccgcgcgccatggtctccagccgctcccgcgcgtcgcgtaggtacgcctggaccgtgccgtgcacgatggagcgctcggcgttgcacgccagcgcgccggcgagcgtgaggtagtcgatcgccggctgcaccgccgcgtactccgcgtccaccagcagcggcacgccgcgctccgcgcaccgcgcgcacaccgccagcacccgctcgtgcgccagctccagctccctctcctcctccgccgacagcgccggcggctccgacgccgtgaggtgcagcgggctcgagtccgacaggatcgggaagtcgtgcgtcttccacggcaggttcagcgacgggtgcctcttctgccaccgcagcaggtcgctcgccttctccagcagcgcgatcgggcacagcgccgtgatcttgatgcacacgctcgccgagcccggaggcagcttggcggcg

SEQ ID NO: 7650 - DNA, 517 bp, Zea mays
  Clone ID: LIB3061-074-Q1-N6-H3
aaatgtcaatcaatatattgattatttcttaggaacacatgccggtatgagggcaccattatcgattacatctcatatgtaatctaaaagaggcacctccaacgatgggttgctgccacgacaaggcagggttcatcaaagagaatggctgtatggtagcaattgttgctgctgtaggaaggcagtgaccaatgggttaggcactgctagtggattaagtaactgttgtcgctgttgtaggtacgcagcagagttcgacacagtcagttggttgaatggaagcagctgttgcaagtaggcagcagggtttgccacagctagctgagtcagagctggtacaatctgttgcagcaattgttgttgcaggtatgtaggtgcattacccacaacgagagggctagatgaaagcagttgttgctgttgtaggtaggcggcagggttcaccatggctagttgactgagcgctggcagaaactgttgcaattgttgttgttgttggtatgcagctacgtttgcc

SEQ ID NO: 7651 - DNA, 498 bp, Zea mays
  Clone ID: LIB3061-074-Q1-N6-H4
aatagaacagccgatcttaatgtaaagagatagcgtcagactagcaaaagttttaagtgtcacataggtcgatgacccgcgcacacacattcatcgacaaaacaagccccaaaacccaaacgcggcctagtagctgataggcggattgtttaggatctctctctctctcgctttgacgacacggatcaaaaccttatgtttgctgctcgactgaatcagttccttggagtggggctcccaagtatgcccctcttttggggaggagcacgaccgtaaccgtttgacctcccacggttactattgtactcgtcgcctccacctttcgaatatccccggcctccaccactgaaacggccacgtcctcccctccttccaccttttattccgctatttggcttcctctcctcaacatatatctgccgcccatttatttcaattggtgaagcctttaacgcattgtgtacaccgctgagttcctcgaattccacgaaagcataa

SEQ ID NO: 7652 - DNA, 524 bp, Zea mays
  Clone ID: LIB3061-074-Q1-N6-H5
agaaagtactttcttatttctgggaagccacaaactcatccaaaaacttcattattgaactataactcataagcaatctaaaagaggcaccgccaatgatgggttgttggtagaacgttgttgggtttgtcaaagcaagttggttgaatggcagcaattgttgcagttgtaagagggtgccagcgttaggcgcagcgtgcaggtagaacggcaacaactgttgttgtgtcaagaaggcaacagggctcacatcagctagctggctgaatggtggtagctgttgctgttgtaaataagcagcagagttcaatgctgccagttggttgaatggaagaaattgctgggggtaggcagcagctagctgactgaatggtagttgttgttgcaaataagcagcagagttcaatgcagccagttggttgaatggaagaaactgctgttgctgagagtaggcagcaaggtttcctagcacaagttgttgtagttgttgtgccttgatgttttgtgccaacaaatgcaccaaa

SEQ ID NO: 7653 - DNA, 117 bp, Zea mays
  Clone ID: LIB3061-074-Q1-N6-H6
aaaaaaggactttcttatttttgggaagccacaaacattagacaaaaaattttttattgaactataactcataaaaaacctagcagggttctaccaacaacccatcccgggaattcc

SEQ ID NO: 7654 - DNA, 535 bp, Zea mays
  Clone ID: LIB3061-074-Q1-N6-H7
aaatctcaatcaatatattgattatttctaggaaacacacgtcggtatgagggcaccattatcgagtacatctcatatgtaatctaaaagatggcacctccaacgatgggttgctgcctcgacaagacaggattcatcaaagagaactggttgtatggcagcaattgttgctgctgtaggaaggcggcgaccaatgggttagccactaccaatggattaagtaactgttgtcgctgttgtaggtacgcagcagagttcgacagagtcagttggttgaatggaagcagctgttgcaagtaggcaacagggtttgccacagctagttgagtcagagctggtacaatctgttgcaacaattgttgttgcaggtatgtaggtgcattgcccacagcgagcgggctagatgaaagcagttgttgttgttgtacgtaggcggcagggttcaccatggctagttgactgagcgttggcagaaactgttgtagctgttgttgttgctggtttgcaactacgttcgccagagcaagtgggttgg

SEQ ID NO: 7655 - DNA, 255 bp, Zea mays
  Clone ID: LIB3061-074-Q1-N6-H9
atatcgagaaaaatctcaatcaatatattgattatttctaggaaacacatgccgctatgagggcaccattatcgagtacatctcatatgtaatctaaaagatggcacctccaacgatgggttgctgccacaacaaggcagggttcatcaaagagaactggttgtatggcagcaattgttgctgctgtaggaaggcagcgaccaatgggttagccaccgctagtggattaagtaactgttgtcgctgttgtaggta

SEQ ID NO: 7656 - DNA, 467 bp, Zea mays
  Clone ID: LIB3061-075-Q1-N6-A1
aaaaaaaaggaacaaaaccgggcccccttaaattatgggcccgggggaacgacccgggaaaagcattcatgggggggggggggttattattcaaacaaaggagctagctacaaggccattcctaaggcactagggtcttcggaggtactggggggggattgttccgccgccgggaaaccaggggcattgggggaccccggggggggggggcagggggaactcggcctccgggacgggggggggggggaatcccctttggacctcccggggggagcccgggagggcctttaggggggcctccagttgggggtccgggcccggggggatcgggccgtccatggggggggtaagggccgggcaccgggagtaccccgggatggtcgacagttcccgggagaattttcttttaagatccggccagggggggggggggccgaagccgaaggtccggctggaaaccaaccaac

SEQ ID NO: 7657 - DNA, 458 bp, Zea mays
  Clone ID: LIB3061-075-Q1-N6-A10
aaacccacagccgggaatccaggttcaaaaaaaccacaataaaacagggtggcaaaacttgcttcggtaacaggtaaaatggggcttcaccagctaggatcaggcatagggactaaaggaaacgcttacaggaacttattaacaaacaccagggggggggcttaatcggggacaaaggaatttgcatcggggggaagggtaacggccctccaaagggcccttaaaaaggggaaccagcttcagggagcccgctcccggaaaaccccgagggccacctccgagggggcgggcgcctggatttcgaaggggaacccggaaagctcgtacttgaggggggccttcgacgggggggacagaattttaacacgtatgcgggatgtcgagggggaccaggcaaagaaaaaaaattggttttttggaaattctccccgggaacaaaatcaaaatcatacagggca

SEQ ID NO: 7658 - DNA, 524 bp, Zea mays
  Clone ID: LIB3061-075-Q1-N6-A11
ccaaactcctttttccctatatattattcctttccatttcaatggttcattcaggtcattgctcacactgccacccatggtgatgggtgacactccgttactcatcgccgctaaacgagtgaactagctatagccctataggtagctagtcagcggctccattacattattactacagtacatagtttcctcagtagtagacaccgccggcagctgcgttgcaagggcagggacctggctgctgcagctgcagaccgcacatcgccgtcagctgctgcgctacctgggccgccatcagcgccgcgagctcgccctgcggctgctgctgcaggaaggactgcaggaccacaccgtatgtcgcctggtaccggtgcagcggctccacctgcctgatctggtggcagcactgctgctgcagcgcctggcactgtggcgagccgtagggcgtcgccgccgggctgcactggtgcctcaggaactcgacgcactggcccaggaacgggctgccgacgctgccgacgccg

SEQ ID NO: 7659 - DNA, 533 bp, Zea mays
  Clone ID: LIB3061-075-Q1-N6-A12
catcattaattgcttatttatgatatattattccatcaagatcacatttttcacggtagccatacatgaggtcctccttttttaatggtgtactagtagcttattagaagctaacaccaaccaaggaaggacaaccaagaagctaaggcctggtttattattaactggaaacataaataaaaaagtagggtttgtttattgcatttggtatgtatcacccaactgtcggagtcatggcgacggtgtcaacgaagatacggacgcggtcggggcgaaggtccagcgtcacgggcgacccaacaggcagcacctggatgtacgcgttgggcatgtccttgagaatggtctccgtcgcctccttgatggacatgcccatcacctccggccacgacgtcttcttctcgctgctgctggtagcagcagcatccacgacgacggaactcatcatctccgatccgacaacgatgggttttgttatgcagtcaacaatctagctacatgcacaaatatacagaggaggagcggaatcagtt

SEQ ID NO: 7660 - DNA, 446 bp, Zea mays
  Clone ID: LIB3061-075-Q1-N6-A2
gggggttcaggatatagcaatcacaaaaccaaagcagggcccggtacaagcagaacaggaccccactctctggccccagacccaatataccaacaaaccacatacttacccagcaacaaccaggtcacattctaaccgacccactgaacaacagtttccaaggaacccaattattacccaaaaaaagggccaaaaaaaaaatgaaacaataataataataataccggacccccctaaaacggacactaccggacccccctaaaacggacaccggaccagaaacctaatgaacccacccctcgaccaccaaaacgggatgaaagaaagaaaaggcaggcccccgctgcgtccaatgcgaccacaccttgtaaacacaccggggggaacttttgattacaatataccaacaaatgaaggggtatgaacaaaacccaggcataaatggc

SEQ ID NO: 7661 - DNA, 543 bp, Zea mays
  Clone ID: LIB3061-075-Q1-N6-A3
agaaatgtactttcttatttctgggaagccacaaacatcagacaaaaactttattattgaactataactcataagaaatctaaaagagggcaccaccaatgatgggttgttggtagaacgctgctgggtttgtcaaagcaagttggttgaatggcagcaattgttgcagttgtaagagggtgccagcgttaggcgcagcgtgctggtagaacggcaacaactgtggttgtatcaagaaggtagcagggctcacaccagctagctggctgaatggtagtagttgttgctgctgtaaataagcaggagagttcaatgctgccagttggttgaatggaagaaattgctgggggtaggcagcaggtagctggctgaatggtagttgttgttgttgcaaataagaagcagagttcaatgcagctagttggttgaatggaagaaactgctgttgctgagagtaggcagcaaggtttgctagcacaagttgttgtagttgttgtgccctgatgttttgtgccaataaatgcaccaaaggtaactgatgta

SEQ ID NO: 7662 - DNA, 527 bp, Zea mays
  Clone ID: LIB3061-075-Q1-N6-A5
ctaaaaagtactttcttatttctgggaagccacaaacatcagacaaaaactttattattgaactataactcataagaaatctaaaagagggcaccaccaatgatgggttgttggtagaacgctgctgggtttgtcaaagcaagttggttgaatggcagcaattgttgcagttgtaagagggtgccagcgttaggcgcagcgtgctggtagaacggcaacaactgtggttgtatcaagaaggtagcagggctcacaccagctagctggctgaatggtagtagttgttgctgctgtaaataagcaggagacttcaatgctgccagttggttgaatggaagaaattgctgggggtaggcagcaggtagctggctgaatggtagttgttgttgttgcaaataagaagcagagttcaatgcagctagttggttgaatggaagaaactgctgttgctgagagtaggcagcaaggtttgctagcacaagttgttgtagttgttgtgccctgatgttttgtgccaataaatgcac

SEQ ID NO: 7663 - DNA, 539 bp, Zea mays
  Clone ID: LIB3061-075-Q1-N6-A6
ttttttttttttttttttttttttttttttttttttttttttttttttttttttttttttttttttttttttttttttttttttttttttttttttttttttttttttttttttttttttttttttttttttttaaaaaaaaaacccccatttgatccttggaaagaagggagggcccccccaaaacccctgggttttttaaaaaaaaaaaaaaccccaaaaaaagggggggggggaaaaaaagggggggaaagggggtcccacggaaaaaagggggtccggaaaaaaacttggggggttccgggttacccaaaaaaaacaaaaaataaaagccccctataaaaaaaccccaaaaagggggggaaccaggggcccaactttttaaccccaaagaaaaaaccccccccccctaggggggaaaaaaaacccttttttttgggaaaggggaaccttttttgcccggggcaaaggggaggggggtctaaaaaaaaaaactttgggggggggccaaaaagggaaaaaaatttttgggggttccc

SEQ ID NO: 7664 - DNA, 463 bp, Zea mays
  Clone ID: LIB3061-075-Q1-N6-A8
cagcacaaaaactttattatggaactataactcataagaaatctaaaagggggcccccccaatgatgggttgtgggtagaacgctgctgggtttgccaaagcaagttggttgaagggcagcaattgttgcagttgtaaaagggggccagcgttaggcgcagcgtgctggtaaaacggcaacaactggggttgtatcaaaaagggagcagggctcacaccagctagctggctgaatggtagtagttgttgctgctgtaaataagcaggagagttcaatgctgccagttggttgaatggaaaaaattgctgggggtaggcaacaggtacctggctgaatggtagttgttgttgttgcaaataaaaagcaaagttcaatgcacctagttggttgaatggaaaaaactgctgttgctgaaagtaggcaacaaggtttgctagcacaagttgttgaagttgttgggcc

SEQ ID NO: 7665 - DNA, 514 bp, Zea mays
  Clone ID: LIB3061-075-Q1-N6-B1
agaaagtactttcttatttctgggaagccacaaactcagacaaaaactttattattgaactataactcataagaaatctaaaagagggcaccaccaatgatgggttgttggtagaacgctgctgggtttgtcaaagcaagttggttgaatggcagcaattgttgcagttgtaagagggtgccagcgttaggcgcagcgtgctggtagaacggcaacaactgtggttgtatcaagaaggtagcagggctcacaccagctagctggctgaatggtagtagttgttgctgctgtaaataagcaggagagttcaatgctgccagttggttgaatggaagaaattgctgggggtaggcagcaggtagctggctgaatggtagttgttgttgttgcaaataagaagcagagttcaatgcagctagttggttgaatggaagaaactgctgttgctgagagtaggcagcaaggtttgctagcacaagttgttgtagttgttgtgccctgatgttttgtgcca

SEQ ID NO: 7666 - DNA, 278 bp, Zea mays
  Clone ID: LIB3061-075-Q1-N6-B12
ggggggggggttttgtatcaatattcttctatcctctgagcaacgggaatcaaattgtcaacgtacaaacagacacaggacaggcagcgcttgccactagcaacagagcggcgactgcctttgttatggcatacacgggatataactcaaccggggaacccaaatcaattcaaacgctgcacctaattatcttcgactagcagtttatactaacataaaaccatcggttggacgcaatgcaacaaacaataacagcttgtttcttttttctgctcgag

SEQ ID NO: 7667 - DNA, 494 bp, Zea mays
  Clone ID: LIB3061-075-Q1-N6-B2
ctggaaatgtaacttcttatttctggttggccacatacatcatccaaaaactttattattgaattacaactaataagcaatctaaaagagggccccaccaatgatgtgttgttggtaggaggccgctgggtctgtcaaagcaagttggacaaagggcaacaattgttgtagttgtaaaagggttgcggggttagccgcaaactgctggtaaaaaggcagcaactgttgctgtgtcaaaaaggaagcacggtttgctgcagctagctggctaaatggtagtagtatttgctgctgcaaataagcagcggggttcagtgcggccaattggttaaatggaaaaagttgttgttgctgaaagtaggcagtacctagctggctaaatggtaatagttgttgctgcaaataagcaacagggttcagtgtaaacagttggttgaatggaaaaaattgttgttgctgaaagtagggaaaaaggtttgccaaaactacttggt

SEQ ID NO: 7668 - DNA, 533 bp, Zea mays
  unsure (1)..(533): unsure at all n locations; Clone ID: LIB3061-075-Q1-N6-B3
anattatcgacacccttggagaccaatatcacattagaatctggaaatgtaacttcttatttctggttggccacatacatcatccaaaaaactttattattgaattacaactaataatcaatctaaaagagggcaccaccaatgatgtgttgttggtaggaggctgctgggtttgtcaaagcaagttggacaaagggcaacaattgttgtagttgtaagagggttgcggggttagccgcaaactgcttgtagaaaggcagcaactgttgctgtgtcaagaaggaagcacgacttgctgcagctagctcgctaaatggcagtagtatttgctgctgcaaataagcagcggggttcagtgcggccaattggttaaatggaagaagttgttgttgctgagagtaggcagtagctagctggctaaatggtaatagttgttgctgcaaataagcagcagggttcagtgtagacagttggttgaatggaagaaattgttgttgctgagagtagggagaaaggtttgccagagctacttg

SEQ ID NO: 7669 - DNA, 528 bp, Zea mays
  Clone ID: LIB3061-075-Q1-N6-B4
ctgggaagccacaaacatcagataaaaaatttattattgaactataactcataagaaatctaaaagagggcaccaccaatgatgggttgttggtagaacactgctgggtttgtcaaagcaagttggttgaatggcagcaattgttgcagttgtaagagggtgccagcgttaggcgcaacgtgctggtagaacggcaacaactgtggttgtgtcaagaaggtagcagggctcacaccagctagctggctgaatggtagtagttgttgctgctgtaaataagcaggagagttcaatgctgctagttggttgaatggaagaaattgctgggggtaggcagcaggtagctggctgaatggtagttgttgttgttgcaaataagaagcagagttcaatgaacctagttggttgaatggaagaaactgctgttgctgagagtaggcagcaaggtttgctagcacaagttgttgtagttgttgtgccctgatgttttgtgccaataaatgcaccaaaggtaactgttgtaatagg

SEQ ID NO: 7670 - DNA, 511 bp, Zea mays
  Clone ID: LIB3061-075-Q1-N6-B5
gggggaatgcggacagccattcatttactcattgcgccatcattgtttccaaatgaacagatgctagggtctaacaaatttgatcatttgacaccattttcacagagtgcacttggccttccctctggatcctacacagcaaaatacatgcctagctgggtaccccaaaataaaaataaccaacaactttaaaacttcggcagaagccacccaagagtccagccaagaagaaacccagctccagcaagacccaacccaacagcaaataagatcgcgtcgaagaacccggctgccttcttctgccttctacctttcctcctagtccaatctctctgcccctgaccctgtgtaggcttctcttttagggttaaccatggaagttcaggtatgatggctgctatctgatgctctttgttcttgagctgcaggacaatattctccagctgcattattttcagccactggttgcacgcaaagagatgtgaggcctgtcggagcaaaagcttgatga

SEQ ID NO: 7671 - DNA, 548 bp, Zea mays
  unsure (1)..(548): unsure at all n locations; Clone ID: LIB3061-075-Q1-N6-B7
gggcgctngacctcgatgcctcctccacgtcccgctgcgagaagccgaagcggtgggtgatgagaggcttgacgtccaccttgccgctgcgcaggaagtcgatgcacagtggccaggtgtccttgtaccggaacacgcccaccacgtccacctcccgcgccgccgccgccgtcaggggcagcgtcatctcgttgtggcccatcccgaccaggcacaccttcccgccgggccgcgtcgcctccagcgccgtcgacatggtcttgctgaacccggcgcagtccaggctgacgtcgatgtccgagcccatggccgcgcggatgcgctccacctcgtccgccaggtcctccgcgcggggcgacacccgcaccgccgcgtccgcgcccagcgacctggccacggccaggcggtgctcgtccacgtccacgaccaccacgcgcggcgcgccgaaggcccgcgccgccagcagcgacaccaggccgatggggccggcgcccaccacgagcacgcccgtcttgggccccacccccgcgcggcggcacgcgtgcacc

SEQ ID NO: 7672 - DNA, 137 bp, Zea mays
  Clone ID: LIB3061-075-Q1-N6-B9
atcagcaaaaaaactttattattgaactataactcataagcaatctaaaaggggcaccaccaatgatgggttgttggtagaacactgctgggtttgtcaaagcaagttggtcgaatggcagcaattgttgcagttgt

SEQ ID NO: 7673 - DNA, 518 bp, Zea mays
  Clone ID: LIB3061-075-Q1-N6-C1
cgaagtaacgtgaattgataacaaaatatccggttgccaaattgcagactctctttggacagatgcacatacccccacgctaacaagaaaatcagctatagccaagttaaggttccacagctactaatcaaaaaccaaagaaaccaagctcagtcgccctttccttctcaaaggtttcgaagtattggtatatgattgtcacagcgagcaatataccagttcctgaaccaatcgcacccatgaaatcagccaggacggtcaatgcgccaatgcatacaccaccaaatgcagcggcagtggggatgtatcggttaagttccttctgcaagttcgactcacgatggcctggcatcaccatttgttgttccttgagctgcttagcaacatcctttgctgatgaaccagaaacttcaatccatgtctttgagaacagagcacaggctgacagcatgaagaccacataaaacagtgcatggaatggatttgcaaggacatcagccaaacttgatggggcagtt

SEQ ID NO: 7674 - DNA, 520 bp, Zea mays
  Clone ID: LIB3061-075-Q1-N6-C10
agaaatgtactttcttatttctgggaagccacaaacatcagacaaaaactttattattgaactataactcataagaaatctaaaagagggcaccaccaatgatgggttgttggtagaacgctgctgggtttgtcaaagcaagttggttgaatggcagcaattgttgcagttgtaagagggtgccagcgttaggcgcagcgtgctggtagaacggcaacaactgtggttgtatcaagaaggtagcagggctcacaccagctagctggctgaatggtagtagttgttgctgctgtaaataagcaggagagttcaatgctgccagttggttgaatggaagaaattgctgggggtaggcagcaggtagctggctgaatggtagttgttgttgttgcaaataagaagcagagttcaatgcagctagttggttgaatggaagaaactgctgttgctgagagtaggcagcaaggtttgctagcacaagttgttgtagttgttgtgccctgatgttttgtgccaataa

SEQ ID NO: 7675 - DNA, 545 bp, Zea mays
  Clone ID: LIB3061-075-Q1-N6-C11
ggggggggggttttttcaaacaaaaaaaaagaattcgacctattattatacagtgaaaccctacaatggtcaaatatatacagggtcaagaatacaagccggggaaaatgctccactctacatataaaacaaactgcagcaaaaagccctagggggggggtgagcaaaactcgattctacaagtggattcatgggggaaaaaagtgaagctaggggtaacttcctcaggtgagcccttgagttttattctcagactagcgctcaactacttcaagactggacgctagcaaatcgttccatgtgtcagttggtcctggcaaacaccaatgcatgcaatcatcgtgctttttgccgccagttgttgaagggtgagcatccgctctgaattcactcatgcgagtgatgtccagaactctaaaactagactgctgttcaagagccttcaccaggtgttggtttaccaagcgtgcctctacgttggtgctgttattgtccaaagagaaaaattctcccacctcttctgacgacaagggctggttacgttc

SEQ ID NO: 7676 - DNA, 470 bp, Zea mays
  Clone ID: LIB3061-075-Q1-N6-C2
aaatcccaatcaatatattgattatttctaggaaacacacgtcggtatgagggccccattatcgagtccatctcatatgtaatctaaaagatggcccccccaacgatgggttgctgcctcgacaagacaggattcatcaaaaaaaactggttgtatggcaacaattgttgctgctgtaggaaggcggccaccaatgggttacccactaccaatggattaagtaactgttgcccctgttgtaggtccccaacaaagttcgacagaatcagttggttgaatggaagcagctgttgcaagtaggcaacagggtttgccacagctagttgagtcaaagctggtacaatctgttgcaacaattgttgttgcaggtatgtaggtgcattgcccacagcgagcgggctaaataaaagcaattgttgttgttgtacctaggcggcagggttcaccatggctagttgactgaaccttgg

SEQ ID NO: 7677 - DNA, 545 bp, Zea mays
  Clone ID: LIB3061-075-Q1-N6-C3
aataaaaggacgaaatcaaataattaatacacgtcacggtacaactgagttgaagtttctggacagccgtctggctaaagcaaattaaataatttattcccccggcccggcccacaagagaatgagaattgacaacgagacatgaaccaaattaaaagagcccagttaacggcggccgtcgcactcgcacccaaaagatgaaatttgagtagcacgcagcaatacgtagggggcagggcagggcacttgtttggtcacaaactcatcacacctcgacgctgcatcctgtgggctgggcgaacttgagcgacgacacggtgttgttgacgccggggtagcccgcggagagcacggcggggcagctgacgaagaggtggtagctgccggagacccagctgccgaccttccacttgacgcggccgtccaccttgacctgcagcgcgacgaagcccgcggcgacgtcctgcttcatggcgtcggcgacgtaggcggcaacgggcacggactcggccgacagcacgggggaccagacggtgaagtcgcgg

SEQ ID NO: 7678 - DNA, 520 bp, Zea mays
  Clone ID: LIB3061-075-Q1-N6-C5
ggagaaaatctcaatcaatatattgattatttctaggaaacacatgccggaatgagggcaccattatcgagtacatctcatatgtaatctaaaagaggcacctccaacgatgggttgctgcctcgacaagacagggtttatcaaagagaactggttgtatggcagcaattgttgctgctgtaggaaggcagcgaccaatgggttagccactgctagtggattaagtaactgttgtcgctgttgtaggtacgcagcagagttcgacatagtcagttggttgaatggaagcagctgttgcaagtaggcagcagggtttgccacaactagctgagtcagagctggtacaatctgttgcaacaattgttgttgcaggtatgtaggtgcattggccacagcgagcgggctagatgaaagcagttgttgctgttgtaggtaggcggcagggttcaccatggctagttgactgagcgctggcagaaactgttgcagctgttgttgtggctggtttgcaactacgttt

SEQ ID NO: 7679 - DNA, 527 bp, Zea mays
  Clone ID: LIB3061-075-Q1-N6-C6
caatggttcattcaggtcattgctcacactgccacccatggtgatgggtgacactccgttactcatcgccgctaaacgagtgaactagctatagccctataggtagctagtcagcggctccattacattattactacagtacatagtttcctcagtagtagacaccgccggcagctgcgttgcaagggcagggacctggctgctgcagctgcagaccgcacatcgccgtcagctgctgcgctacctgggccgccatcagcgccgcgagctcgccctgcggctgctgctgcaggaaggactgcaggaccacaccgtatgtcgcctggtaccggtgcagcggctccacctgcctgatctggtggcagcactgctgctgcagcgcctggcactgtggcgagccgtagggcgtcgccgccgggctgcactggtgcctcaggaactcgacgcactggcccaggaacgggctgccgacgctgccgacgccgcaggatccgaactgctggcacgggcttagctgcggtggttga

SEQ ID NO: 7680 - DNA, 524 bp, Zea mays
  unsure (1)..(524): unsure at all n locations; Clone ID: LIB3061-075-Q1-N6-C7
accgaaaggctggagttactttaattcagcaaggcagctagagttcttcacaccttgaaaaatcaatctcagctcaatcaatcgcttcggcaaatccacaccgctaattaattaatgaacccaagtacccaacgcagcgctccagcaccagctactgctcctcttgagagcccaagcacactacgngaaaagatggagaggatgaacgaacaaaaaaaaaaggagtcccaattcgaaccaacgaaggggccggcgggtagattcttcccagctagaccatcctgaggagcgcggcgagcacggcgatggcggcgtagatgacgggcgcgtgggacctggcgaaggcggcgatggcggcggcggagcggtcgctgcgggaccgccggcggcgacggcggcggcagcttctcggccttgatggcgaggcgcatcccgccgaagcagtagccgtagctgcagatgaagtagtaggtcttggtctcgttgagctggaaggcgaagctgcgccccttgctgtagttgta

SEQ ID NO: 7681 - DNA, 409 bp, Zea mays
  Clone ID: LIB3061-075-Q1-N6-C8
aaaaaaaaaaattttttttgggaccaaaaccaaaaaaaaaataaaagggggggcccccccagggggggggggggggaaaaccccgggggggttgaaaaaaaaaggggggggaaggggaaaaattgggggcagggaaaaggggggcccgggttggggcccaggggggggaaaaaaggaaaaaacggggggtggaaaaaaaaggggggggggccaaaaccaacttgggggggaaaagggaaaaagggggggcggttaaaaaaaacggggaaatccaacggcccccagggggaaaaaggaaaaaaatgggggggggggggaaaaaggaaccgggtaaaagggaattgggggtggtcaaaaaaaaaaaaaaagttcaaggccccttgggggggaaaaggaaaaaaaccctttt

SEQ ID NO: 7682 - DNA, 526 bp, Zea mays
  Clone ID: LIB3061-075-Q1-N6-C9
ccaaacatcctttttccctatatattattcctttccatttcaatggttcattcaggtcattgctcacactgccacccatggtgatgggtgacactccgttactcatcgccgctaaacgagtgaactagctatagccctataggtagctagtcagcggctccattacattattactacagtacatagtttcctcagtagtagacaccgccggcagctgcgttgcaagggcagggacctggctgctgcagctgcagaccgcacatcgccgtcagctgctgcgctacctgggccgccatcagcgccgcgagctcgccctgcggctgctgctgcaggaaggactgcaggaccacaccgtatgtcgcctggtaccggtgcagcggctccacctgcctgatctggtggcagcactgctgctgcagcgcctggcactgtggcgagccgtagggcgtcgccgccgggctgcactggtgcctcaggaactcgacgcactggcccaggaacgggctgccgacgctgccgacgccgc

SEQ ID NO: 7683 - DNA, 515 bp, Zea mays
  Clone ID: LIB3061-075-Q1-N6-D1
accgagtccaacacagcatgaaggtgtgctttgtttgtatttagtacggtagtttgaccaggtccgtctaacagaacaggactgctacatctcattttttgaagttgctactagtttgctacatccttgagctgacaatacaagatggtaggtagatacacgtcccaaactcaattcagtacatcccaagatggtagatacacagagcatcccaaagtacattacattatctaaataagataatgacgtctgctcgagggaccaaccagcatgagtcactggtcacttatacaggtcggtcaatcttgagattcctccaaggcttccttctccctctgctgttccaatgcaatctcagccaacgctttctgcgtgcgcctttccagtttatcaattctcttctgcacatcacgtttcagatcccaatttggattctttggtgctatgtttccaaaaagttctccacttcctttggctctgcagtttcggcactaattgggtcttcaaacttggga

SEQ ID NO: 7684 - DNA, 501 bp, Zea mays
  Clone ID: LIB3061-075-Q1-N6-D10
aggaaagcgaaaaacgaaactctatgtttaattgacaccttggaggtcttaaatatatagagaggacaacgcagcgagatgcatgggctttccagcatcgattaaagtatcagaaccttattgtagcatgcatgcatgcatctgccggttttggaagaaggtttttcctcacatcgacagccccacacatgccgcgcagcaacgagtaccccgctatcactccactggagcatagacgacacatgttctgcttggtgtataaaccgagaatgaatatggcctattatcatgcgaacagtcggcggtgaagtgctcggctgcgtgatggatcctgctaaatccaccaaatagtccagcgtcggagtccaagaccaccttatacaccccaggctttcgacaaccaatacggtagtcaaaatagctgttgttgcagtggaagttgaacacaaataccaaatctcccttttcgaacacaatcaccttatcctcctcatgtttccg

SEQ ID NO: 7685 - DNA, 517 bp, Zea mays
  Clone ID: LIB3061-075-Q1-N6-D11
gacacacaacaagcaagagccgatcgaaactgttacacaggcgctacaccaagtaggtaaaaacaagtttgcggctgcctgccgccataccatgccatactcttggccggtatagctgcagcagattgtatacaagggggaaaaaagaagatacacatacagtactgaagaaggcaaatgaaatgccgttcgggcggtagcctaggcgtgtacagctgacgcagacagaccccgcctcgcggtagcctaggcgtgtacagctgacgcgcagacagaccccgcctcgccgcacttaaaagcttccttccttgacctcgagggtacacaggcctattgtccgagcaatttggaatcacatgccacaatcttcaccttgcccacctgctccgtggcctcctcattcttgaagcttgcgtctgtcaagatgaaggtccacacgttgtcacagaacctgtaggtgtgcaggtgacccttgacagtaaccttgctcttcacttggttctccagagcatccgtc

SEQ ID NO: 7686 - DNA, 512 bp, Zea mays
  Clone ID: LIB3061-075-Q1-N6-D2
gaaggacagaagtaaatttacctttataagcccttcagcctatctaacaattaaattgggtagcgagtattacaaatccatgagccaatacttgaaactactaattaaactccttttgcaggtctcaattcgcccatacatgcatacagtttgttctgatacgacggcaccatatacacatgatcttgtaaaataatagggcaactgactagtctgatcaacctcagctcagcagatttattttcaattttcaccgagcagatcgtcactccacatgccagatcttattactaatatgagctggccagttgtcatcccaagtggtgtatgattcagggtccaattgtgcctgtatcgaagtagagtgtcgtcccagaagacccaccggcaacaccctccatgagcgcgaaccgcatgtcctcagatggcttccaatgcctcttcctctggttgatgaaccagttgttgatctgcttcgggtcgagaccggtcattgctgcgagcctcacctt

SEQ ID NO: 7687 - DNA, 226 bp, Zea mays
  Clone ID: LIB3061-075-Q1-N6-D3
gaatggccaaatacatatttttcattcataagtggtaagcggcagtcatgctgataaatttgaagtcaaaagtacgcggacaagtctacatttctatccttttttttgttagcaactataatctacagttcctccaacggagatgcagattatagttgcatctccgttggaggaactgtaagtttacagcaatattgtagagggcaagttcatcgtacagttcctc

SEQ ID NO: 7688 - DNA, 457 bp, Zea mays
  Clone ID: LIB3061-075-Q1-N6-D4
cggagggcaaaaagatttgcagatggtgggccgctaaaatcagctcaggggcgtcccaggtaacaagcggtttgtccccggccctagactactaaacgaagggcccaagctaactgcggcccccaattctgcatgttgccccaggattgtatgacctggtctaaacatgaggccctcctccagtcttgctaaaaccaagctgcaggcctgcagctcacctgataaaaactctgggcagcttcaaaacttcggcccctgaagttgcaatcaaacagggtcttcactgcttcacgtttatcaatcatgtcatggaaccctgtcaggtctaaaaaaggggactggcaacccccttgaagtagaccaaggctcgctatctcttcctcattcttcgaacagagtcatatatcggccggaacaaaatggggggaaatgtatctctctccaaagctggggaaaa

SEQ ID NO: 7689 - DNA, 536 bp, Zea mays
  Clone ID: LIB3061-075-Q1-N6-D6
cattaaaaccaaaactttattatgaccatgcatatattattggtcataccacacatgataatgtgtgtcgtcttactgcattattacatatatagatagagagagatggatagaggagatttcccaaatatcatgaatcagtagtagggcggaatggcagcggagacgccacaggggttggtgcggtagctgggcagctggtactggtagagtccacccatggccggcatgttctgcgccatcatcatggccatggggttgagaccctgggctgccagcagctgctgctgctgctgcatcagagctggctcgtacaggctgctgctggcggcagcggcacgctcaagctgcatcatcatctgcagctgctgcgcgacggactgcacgtccatcatcctcatctgctgctggcagcactgttgccggagcggctggaacatggcgctcggctgcccacacccggcgtagtagggcgccgccgccagcgggctgcactgcggctgcctcaggtactccgcgtaggggtacagcccgcc

SEQ ID NO: 7690 - DNA, 501 bp, Zea mays
  Clone ID: LIB3061-075-Q1-N6-D7
ggagaaaatgtcaatcaatatattgattatttctaggaaacacatgccggtatgagggcaccattatcgattacatctcatatgtaatctaaaaaaggcacctccaacgatgggttgctgccacgacaaggcagggttcatcaaagagaactggctgtatggtagcaattgttgctgctgtaggaaggcagtgaccaatgggttaggcactgctagtggattaagtaactgttgtcgctgttgtaggtacgcagcaaagttcgacacagtcagttggttgaatggaagcagctgttgcaagtaggcagcagggtttgccacagctagctgagtcagagctggtacaatctgttgcagcaattgttgttgcaggtatgtaggtgcattacccacaacgagagggctagatgaaagcagttgttgctgttgtaggtaggcggcagggttcaccatggctagttgactgagcgctggcagaaactgttgcaattgttgttgttg

SEQ ID NO: 7691 - DNA, 500 bp, Zea mays
  Clone ID: LIB3061-075-Q1-N6-D8
aattgccgattccttttctcgcaaatatgagtgattgcatacggtatcttcccattaggccattacatatggattgggatacgttcgatgcaagggcgacacagagaggatgaatttcctatagattagtttcccatttaatttacaagggcacactttgtgccatatccatttttattttaacttattctgtatctcgtataaaaatcaatcaggctggcatatcatgccaggaacatgtactatgctatcccaaatgacgaagcctgcatctataacctctcctaatactttcctttcctgccgtatatttccttcctccctccctttccgtatcgcaagatttccatcaaaggggagagaaaaagaaaagaaaagggaaaccaaaaaaaaaaaagactccgtcacacactctacacccgagtggacgagttttttttcctctgtgcgttgcaacttgtaaataccctactccggtgaacataaataaactggttgat

SEQ ID NO: 7692 - DNA, 538 bp, Zea mays
  unsure (1)..(538): unsure at all n locations; Clone ID: LIB3061-075-Q1-N6-D9
aaaaatctagnaaatgtactttcttatttctgggaagccacaaacatcagacaaaaactttattattgaactataactcataagaaatctaaaagagggcaccaccaatgatgggttgttggtagaacgctgctgggtttgtcaaagcaagttggttgaatggcagcaattgttgcagttgtaagagggtgccagcgttaggcgcagcgtgctggtagaacggcaacaactgtggttgtatcaagaaggtagcagggctcacaccagctagctggctgaatggtagtagttgttgctgctgtaaataagcaggagagttcaatgctgccagttggttgaatggaagaaattgctgggggtaggcagcaggtagctggctgaatggtagttgttgttgttgcaaataagaagcagagttcaatgcagctagttggttgaatggaagaaactgctgttgctgagagtaggcagcaaggtttgctagcacaagttgttgtagttgttgtgccctgatgttttgtgccaataaatgcaccat

SEQ ID NO: 7693 - DNA, 425 bp, Zea mays
  unsure (1)..(425): unsure at all n locations; Clone ID: LIB3061-075-Q1-N6-E1
gngacagatggagtactttttttcttttcatttcaattgttcattcaggtcattgctcacactgacactgccacccatggtgatgcgtgacacattattactcaatcatcgccgctaaatgactcaactagctagctagccagcggctatactacagcacatagtttcttcagtgggggacaccgccggcagcagcgtaggggcatggagtcggctgctgcaggccgcacatcgccgtcagttgctgcgctatctgcgccgccaacagccccgcgacctggccgctttgcggctgctgctgcaggatggactggaggaccaagccgaagatcgcctggtaccggtgctgcggctccacctgcctgagctgctggcaacactgctgccgcaacgactggcactgaggcgagcagtagggcgtcgcc

SEQ ID NO: 7694 - DNA, 512 bp, Zea mays
  Clone ID: LIB3061-075-Q1-N6-E10
tagaatctgggaatgtaacttcttatttctggttggccacatacatcatccaaaaactttattattgaattacaactaataagcaatctaaaagaggcaccaccaatgatgtgttgttggtaggaggctgctgggtttgtcaaagcaagttggacaaagggcaacaattgttgtagttgtaagagggttgcggggttagccgcaaactgctggtagaaaggcagcaactgttgctgtgtcaagaaggaagcacggcttgctgcagctagctggctaaatggtagtaatatttgctgctgcaaataagcagcgaggttcagtgcggccaattggttaaatggaagaagttgttgttgatgagagtaggcagtagctagctggctgaatggtaatagttgttgctgcaaataagcagcagggttcagtgtagatagttggttgaatggaagaaattgttgttgctgatagtagggagaaaggtttgccagagctacttggttgatcacaggtag

SEQ ID NO: 7695 - DNA, 534 bp, Zea mays
  Clone ID: LIB3061-075-Q1-N6-E11
ggggggggggttttattttttttttttttttttttttttttttttttttttttttttttttttttttttttttttttttttttttttttcggggaaaaagggcaacaaaaaaatggataatttcaaggaaacaaaccccggttggggggccccgggggggataacatctaaaaggaaatccgggccccggggggcgccccggaaattccggcaccgggcccggggggggacccagtttcccctaaaggggggcgaataaaagctgggggaaaaaaggggaaaagcggttcccgggggaaaatggtaatccgttaaaaatcccaaaaaaaaaacaagccggaagcaaaaagggaaaagccgggggggccaaaggggggggcaaacccacataaatgggggggggccaacggcccgttttccagggggaaaacctggcgggccagctgaataaaaaaaacggccaacccccggggggggggggtttgcgaatggggccccaggggggttttttttttcaccagggaaacgggcaaa

SEQ ID NO: 7696 - DNA, 531 bp, Zea mays
  Clone ID: LIB3061-075-Q1-N6-E12
caattgttcattcaggtcattgctcacactgacactgccacccatggtgatgcgtgacacattattactcaatcatcgccgctaaatgactcaactagctagctagccagcggctatactacagcacatagtttcttcagtgggggacaccgccggcagcagcgtaggggcatggagtcggctgctgcaggccgcacatcgccgtcagttgctgcgctatctgcgccgccaacagccccgcgacctggccgctttgcggctgctgctgcaggatggactggaggaccaagccgaagatcgcctggtaccggtgctgcggctccacctgcctgagctgctggcaacactgctgccgcaacgactggcactgaggcgagcagtagggcgtcgccgtcgggctgcactgatgcctcaggaactcgacgcactggcccaggatcggggtgctgccaacgccgcaggttccctgcagctggcacgggcttggatgcggctgttggcacgggcatgggtgtggctggggatgaggct

SEQ ID NO: 7697 - DNA, 542 bp, Zea mays
  unsure (1)..(542): unsure at all n locations; Clone ID: LIB3061-075-Q1-N6-E3
aagaactanaaagtactttcttatttctgggacgccacaaacatcatccaaaaacttcattattgaactataactcataagcaatctaaaagagggcaccaccaatgatgggttgttggtagaacactgttgagtttgtcaaagcaagttggttgaatggcagcaattgttgcagttgtaagagggtgccagcgttaggcatagcgtgcaggtagaacggcaacaactgttgttgtgtcaagaaggcagcagggctcacatcagctagctggctgaatggtagtagttgttgctgctgtaaataagcagcagagttcaatgctgctagttggttgaatggaagaaattgctgggggtaggcagcaactagctggctgaatggtaattgttgttgcaaataagcagcagagttcaatgcagccagttggttgaatggaagaaactgatgttgctgagagtatgcagcaaggtttgctagcacaagttgttgtagttgttgtgccctgatgttttgtgccaccaaatggaccaaaggtaactgc

SEQ ID NO: 7698 - DNA, 299 bp, Zea mays
  Clone ID: LIB3061-075-Q1-N6-E6
agaatctagaaagtactttcttatttctgggaagccacaaacatcagacaaaaactttattattgaactataactcataagaaatctaaaagagggcaccaccaatgatgggttgttggtagaacgctgctgggtttgtcaaagcaagttggttgaatggcagcaattgttgcagttgtaagagggtgccagcgttaggcgcagcgtgctggtagaacggcaacaactgtggttgtatcaagaaggtagcagggctcacaccagctagctggctgaatggtagtagttgttgctgctgt

SEQ ID NO: 7699 - DNA, 521 bp, Zea mays
  Clone ID: LIB3061-075-Q1-N6-E7
attatgaccatgcatatattattggtcataccacacatgataatgtgtgtcgtcttactgcattattacatatatagatagagagagatggatagaggagatttcccaaatatcatgaatcagtagtagggcggaatggcagcggagacgccacaggggttggtgcggtagctgggcagctggtactggtagagtccacccatggccggcatgttctgcgccatcatcatggccatggggttgagaccctgggctgccagcagctgctgctgctgctgcatcagagctggctcgtacaggctgctgctggcggcagcggcacgctcaagctgcatcatcatctgcagctgctgcgcgacggactgcacgtccatcatcctcatctgctgctggcagcactgttgccggagcggctggaacatggcgctcggctgcccacacccggcgtagtagggcgccgccgccagcgggctgcactgcggctgcctcaggtactccgcgtaggggtacagcccgccgga

SEQ ID NO: 7700 - DNA, 545 bp, Zea mays
  unsure (1)..(545): unsure at all n locations; Clone ID: LIB3061-075-Q1-N6-E9
aaacacaacgaaaagagcttgaaaattgaaataggcaaatatagtaattacatggnaacatgcaacctaacaaattgagctccggataggcaaatggaacattgattaacttggactcaaaatattgtattttttttcatctgagacaaacacacgatccggaaacaccacatcaaactccaaatatacttgtccatccgtttccagttcacgtacgcttcacgacattgccaccttcttggccaagaactttgatcattcaacctttttcttgtcatcctctccgccgccggctccgtcctcctcctcctcatcctcctccttgtcgacgaggatcttcttgcacgcctcgtagcacatgaaggcgatgccggcggcgggcatgagcttgatgcagctagggccgagacctcggtacaggccgccggcgccctccttcttgaggatgcagtagatagcgtggaggacgttctggtacacctgcctcccgcccacagcgcccacctgcatctgcttgcgggccacctccagcgggaacgtggccg

SEQ ID NO: 7701 - DNA, 525 bp, Zea mays
  Clone ID: LIB3061-075-Q1-N6-F1
atatcgagaaaaatctcaaccaatatattgattatttctaggaaacacatgccggtatgagggcaccattatcgagtacatctcatatgtaatctaaaagaggcacctccaacgatgggttgctgcctcgacaagacaggattcatcaaagagaaccggttgtatggcagcaattgttgctgctgtaggaaggcagcgaccaatgggttagccactgccaatggattaagtaactgttgtcgctgttgtaggtacgcaacagagttcgacatagttagttggttgaatggaagcagctgttgcaagtaggcaacagggtttgccacagctagctgagttagagctggtacaatctgttgcaacaattcttgttgcaggtatgtaggtgcattggccacagcgagcgggctagatgaaagcagttgttgctgttgtaggtaggcggcagggttcaccatggctagttgactaagcgctggcagaaactgttgcagttgttgttgttgctggtttgcaactacgttt

SEQ ID NO: 7702 - DNA, 550 bp, Zea mays
  Clone ID: LIB3061-075-Q1-N6-F11
gggggggggtttttagaaatgtactttcttatttctgggaagccacaaacatcagacaaaaactttattattgaactataactcataagaaactaaaaggggcaccaccaatgatgggttgttggtagaatgctgctgggtttgtcaaagcagggggggtgaatggcagcaattgttgcagttgtaagagggtgccagcgttaggcgcagcgtgctggtagaacggcaacaactgtggttgtgtcaagaaggtagcagggctcacaccagctagctggctgaatggtagtagttgttgctgctgtaaataagcaggagagttcaatgctgtcagttggttgaatggaagaaattgctgggggtaggcagcagatagctggctgaatggtagttgttgttgttgcaaataagaagcagagttcaatgcagctagttggttgaatggaagaaactgctgttgctggagagtaggcagcaaggtttgctagcacaagttgttgtagttgttgtgccctgatgttttgtgccaataaatgcaccaaaggtaact

SEQ ID NO: 7703 - DNA, 479 bp, Zea mays
  Clone ID: LIB3061-075-Q1-N6-F12
ggggggggggtttttttttttttttttttttttttttttttttttttttttttttttttttttttttttttttttttttttttttttttttttttaaataaaaaggccaattgcctccaatggtttaggcccaaaaaaaatgcccaattggggggggggggggttttttttaaaggaaacaaaacttaaaactttcactcctttaaaaaacaaaagaatccccccccacggaaaacaaaattcccaatgctttctgacctttttaaaaaactgccccttttaaaactttgggctcgggtagcttttttccaccccccacccatgaagaaacatcatgttgaacaacaatttcaccccctttttgggggaaacccccctaggaaaagggaccccaacagccaaaaccccttccgaaaaaagagcgggggaaaacaaaacctaacctggaaacccaaataattttaacctttgccacctgg

SEQ ID NO: 7704 - DNA, 507 bp, Zea mays
  Clone ID: LIB3061-075-Q1-N6-F2
atatgcacacactgttataatatattggtaaaaaaaaattagtcctttcccactatcactgacgccacctgcacgtccacatttacaaacgaggtgaagtgtggggaaacatggaagaaaaagaaggataaacagccttgagatcgcaaagatctcaattactaactgtcaagtatatcgaactccgaatcttcaatgacatcccacgattccttctttgacagcgatgcaggtggagttggctgcggaggtcggcggctgtaatcggcggacgaagcaggttttcgtctgactgaatcccggcgcaccgaggagctagcgtagggaaggttcctccggtcagagaggagtgaatccatgtatttgtccatgacaacaacgttggcactatcaacgtcactcagctcctcgctactgaggtaccttttaccttctctgaaggattccacatctgaaggtatttcagaccactgatccatgctttcttcagattttgactttgcaaat

SEQ ID NO: 7705 - DNA, 531 bp, Zea mays
  Clone ID: LIB3061-075-Q1-N6-F4
ttttttttttttctttttttgttttttttttttttttttttttttttttttttttttttttttttttttttttttttttttttttttttttttttttttttttttttttttttttttttttttttttttttttttttttttttttttttttttttttttttttttttttttttttttttttttttttttttttttgggaaaaaaaaaaaatttttaggggggggggggaaaaaaaaaaaaaaaaaaaatttttttaaaaaaaaaaaaaaaaaaaaaaaaaaaaaggggcccccaaaaaggtgggtggggagaaaaagaggttggtttttaaaaaaaaaaggggaaaaaaggaaaaaaattttttttaaaaaaaaaaggggggggggggggtaaaaaaaaaaaaccccgcaggggggggggcccccccggggggggaacaaaaggggaccccccaaaaaaaaaatttgggaaaaaaaaggggccccctcggggaaaaaaaattttggggggggaaaaaaatcccggcgccct

SEQ ID NO: 7706 - DNA, 436 bp, Zea mays
  Clone ID: LIB3061-075-Q1-N6-F5
accgagcggccgcttattctttatgggttaaattattctggaaacaaggacctacaggcaggccccaaccggaaaaggaaaaaggccccttccccgaaaaggaaaaaggcagctgcttaaggcttaaggccgaccggggaggttccccttgattttggccaaaaaaccctttttttcgggagggccttaaaggggcggcgccccaaacggggggggggggggtcccccaaaaccaccccccccaccggttgccccgggggggggctaaagctggcccaaacccttggggccccccgggaacttttccttgaacttttccaccaaacccttttttttgggggggcccccgggcgtgggcccaaccacgaaccctgtcccccccaacccaccgggggccggcccctggccctggccttccctggggccccccggcatt

SEQ ID NO: 7707 - DNA, 489 bp, Zea mays
  Clone ID: LIB3061-075-Q1-N6-F8
gccaagccaactaactgatcggcattatttgatatcgacagggcatatatacagagggttctttgccggcttttacaatatactccacccgttctttttatttggcacattttagttcacaaatatatattccaaaacggggttaatacaaaaaaacatgggccctgctatatcaaactatctttatctggggatcagggaactttcaaggctccactttctcaaccagcttgatgcccgacgactccaaaatctccaatgctggaacgtaaatttccggttgcaaaggcctgaacactcctttcgtctggaccttattctttaacaatagcagggcccctattgctgctggaatgcccacgggcaacgccatggcagggggggacctgccattttaaaccttcccgaactccaataacggcgcttggggcttttcggggggttgcccctccgggtattccacctcgacttcgggggggagcaatacca

SEQ ID NO: 7708 - DNA, 533 bp, Zea mays
  Clone ID: LIB3061-075-Q1-N6-F9
tttttttttttttttttttttttttttttttttttttttttttttttttttttttttttttttttttttttttttttttttttttttttttttttttttttttttttttttttttttttttttttttttttttttttttttttttttttttggggaaaaaaaaaacccaaaagggggggggaaaaaaaaaaaaaatttcccccccaaaatggggggggaaaaaaaaggggggggggaaaaaaaaattttttataaaaaaaaaaaaaaaaaacttttttttgggaaagccaaaaaataaaaaaaaaaaaagggggggggaaaaccccaccaccccccggggagggggaaaaaaccaacccccccctttttgtgggaaaaaaaaaaaaaaaaaactttttcccaccccggggaaaaaaaggggaggccccccctttttaaaaaaaaagaaaaattggcccccaaaaccccgaaaaaaaaaaacacatggggggccccccggggaaaaaaaaaaaaggggctttttgggggggggg

SEQ ID NO: 7709 - DNA, 530 bp, Zea mays
  Clone ID: LIB3061-075-Q1-N6-G1
ggaaacatacttttttcttttcatttcaattgttcattcaggtcattgctcacactgacactgccacccatggtgatgcgtgacacattattactcaatcatcgccgctaaatgactcaactagctagctagccagcggctatactacagcacatagtttcttcagtgggggacaccgccggcagcagcgtaggggcatggagtcggctgctgcaggccgcacatcgccgtcagttgctgcgctatctgcgccgccaacagccccgcgacctggccgctttgcggctgctgctgcaggatggactggaggaccaagccgaagatcgcctggtaccggtgctgcggctccacctgcctgagctgctggcaacactgctgccgcaacgactggcactgaggcgagcagtagggcgtcgccgtcgggctgcactgatgcctcagaaactcgacgcactggcccaggatcggggtgctgccaacgccgcaggttccctgcagctggcacgggcttggatgcggctgttggcacc

SEQ ID NO: 7710 - DNA, 527 bp, Zea mays
  Clone ID: LIB3061-075-Q1-N6-G10
ggagagaaagacaccttgttcatgcatctacgttccatttcgtagattggttccatactgcgcattttcacttgtacagattctaaactaaactactacaggatattagaatcaacaagaccagatatatagctccaagtaaaccatagtcatctttcgagaaagatccatagaaaactgctagtatgtagcaacgagaggtgagaagattacccttgtcctatgctccaactctcaaaggttctccatctggatattgctcttgagtggcacgtactccccaaggtagcctccaaggtgctcatacaatgcagtgcggtcaatctgctggctgtggaaggccttgcaggcgtagtagaagacactctgcacgagcagtcctagcagattgacagagacaagaacgcacaccagcacggcgccgacaagcagccggccaggcaaggccaggccgaagctcccctcctcggtgcgtcccttaacgacagcggcacggaacagcaacgaggtcgcgccacagaccgcga

SEQ ID NO: 7711 - DNA, 197 bp, Zea mays
  Clone ID: LIB3061-075-Q1-N6-G11
ggggggggggggttttttttttttttttttttttttttttttttttttttttttgtctcttggtttttcctttggattccggacggggccccgggggcgtcccagccggccccagagggggccccattagaccctggcgtaaccagggggaggggggggggcagtgaaaaacagaaatccgcccagagggacaaacg

SEQ ID NO: 7712 - DNA, 547 bp, Zea mays
  Clone ID: LIB3061-075-Q1-N6-G12
ggggggggtttttttttttttttttttttttttttttttttttttttttttttttttttttttttttaactaatgggggccggtaattagaccgagtcactgaactgaagttggtccaagtccaaagcacgggcaaaaaaaaaaagatcccggggggggggccaaaacaaaaagctggcccctggcagggaggggagctccccgatatctaaactaaacgggagctacagttagacttaaaaacaaatcccgaaaacgaaaccaacgcacgccgactacagttggtccttgggaaaggacggttccaacccctccttggccgccggttcctttttttccacctccgggtggtcctgggcctcgtcctcctcctccacggccgggtgggggctaaggtccaggcttttgggcaccgacttgaaaatgctggacccaaactccttggggtgggggagggtgaacccgttttccataagggccgtttggaacaccagcctcgccgtttgtttaagctcctcgctttcgtggccctgggcaaccttgtcgg

SEQ ID NO: 7713 - DNA, 521 bp, Zea mays
  Clone ID: LIB3061-075-Q1-N6-G2
cacacaagggtttagtagcattataattacaattagtattcttattcaaatatcatagtacaaacatcataatgtatggtactttattgcttaacaccgttatatgagtataacggctaggtagacacaattcttcaattgcaaacaccactaatgtcattgctgctgcatggattattttggtagtatgagtggtacaagccgcacattgatggtaggtattgtgctgctgtcaagattgccaccgcactttgagtagcttgttgagatccacataactcacatggttgttgttgttgctcctcctggattatggattgaaccatgttgtagattgcttggtgaatgtattgtggctcaatctgcctaagatcatgacaacattgttgctgcaatacctggcagctacttggttgtatcaaacgtgattggagaaaaggcattaccaaagggctgcactgctgccttaggaattcatgacaattttttagatttgagctactgctatagtagttatagct

SEQ ID NO: 7714 - DNA, 539 bp, Zea mays
  Clone ID: LIB3061-075-Q1-N6-G3
aaaaatgtactttcttatttctgggacgccacaaactcatccaaaaacttcattattgaactataactcataagcaatctaaaagaggcaccaccaatgatgggttgttggtagaacactgttgagtttgtcaaagcaagttggttgaatggcagcaattgttgcagttgtaagagggtgccagcgttaggcatagcgtgcaggtagaacggcaacaactgttgttgtgtcaagaaggcagcagggctcacatcagctagctggctgaatggtagtagttgttgctgctgtaaataagcagcagagttcaatgctgctagttggttgaatggaagaaattgctgggggtaggcagcaactagctggctgaatggtaattgttgttgcaaataagcagcagagttcaatgcagccagttggttgaatggaagaaactgatgttgctgagagtatgcagcaaggtttgctagcacaagttgttgtagttgttgtgccctgatgttttgtgccaccaaatggaccaaaggtaactgctgtaa

SEQ ID NO: 7715 - DNA, 508 bp, Zea mays
  Clone ID: LIB3061-075-Q1-N6-G4
aatatattgagataaatctcaatcaatatattgattatttctaggaaacacatgccggaatgagggcaccattatcgagtacatctcatatgtaatctaaaaaaggcacctccaacgatgggttgctgcctcgacaagacagggtttatcaaagagaactggttgtatggcagcaattgttgctgctgtaggaaggcagcgaccaatgggttagccactgctagtggattaagtaactgttgtcgctgttgtaggtacccagcaaagttcgacatagtcagttggttgaatggaagcagctgttgcaagtaggcagcagggtttgccacaactagctgagtcagagctggtacaatctgttgcaacaattgttgttgcaggtatgtaggtgcattggccacagcgagcgggctaaatgaaagcagttgttgctgttgtaggtaggcggcagggttcaccatggctagttgactgagcgctggcaaaaactgttgcagctgttgttgtg

SEQ ID NO: 7716 - DNA, 521 bp, Zea mays
  Clone ID: LIB3061-075-Q1-N6-G5
agaaagtactttcttatttctgggacgccacaaactcatccaaaaacttcattattgaactataactcataagcaatctaaaagagggcaccaccaatgatgggttgttggtagaacactgttgggtttgtcaaagcaagttggttgaatggcagcaattgttgcagttgtaagagggtgccagcgttaggcatagcgtgcaggtagaacggcaacaactgttgttgtgtcaagaaggcagcagggctcacatcagctagctggctgaatggtagtagttgttgctgctgtaaataagcagcagagttcaatgctgctagttggttgaatggaagaaattgctgggggtaggcagcaactagctggctgaatggtaattgttgttgcaaataagcagcagagttcaatgcagccagttggttgaatggaagaaactgatgttgctgagagtatgcagcaaggtttgctagcacaagttgttgtagttgttgtgccctgatgttttgtgccaccaaatggac

SEQ ID NO: 7717 - DNA, 530 bp, Zea mays
  Clone ID: LIB3061-075-Q1-N6-G7
aaatctcaatcaatatattgattatttctaggaaacacatgtcggtatgagggcaccattgtcgagtacatctcatatgtaatctaaaagatggcacctccaacgatgggttgctgcaaggcagggttcatcaaagagaactggttgtatggcagcaattgttgttgctgctgcaggaaggtagcgaccaatgggttagccactgccaatggattaagtaactgttgtcgctgttgtaggtacgcagcagagtttgacacagccagttggttgaatggaagcaactgttgtaagtaggcagcagggtttgccacagctagctgagtcagagctggtacaatttgttgcagcaactgttgttgtaggtacgtaggtgcattgcccaccgcgagcgggctagatgaaagtagttgtaggtagacggcagggttcaccatggctagttgactgagcactggcataaactgttgcagctgttgttgttgctggtatgcagctacgttcgccagagcaagtgggttggatgcaag

SEQ ID NO: 7718 - DNA, 509 bp, Zea mays
  unsure (1)..(509): unsure at all n locations; Clone ID: LIB3061-075-Q1-N6-H1
atagaacacgcacgtgtcattatttatttatgggacttgcctcagtagcatacagcatcgtatccgcacgtacatactacagagccacacttattgcactgcctgccgcttacgtacatagttaacacgcagagaggtatatacatacacgtccaacgtctccactcaggctcatgctacgtacgcacgtcggtcgcgcgccaccctcttgttgcttcttgctcgttttggcgagcgcggcggcctcacatcctggcggtaaccatcctcatgagcgtctccgccacctcctcgcggcgcccgcggccgtggcgtccttcgcgttcctcctcctctttctcccgctcctcacgtccgtggcgttccctctccccacggccgccgtggcgttcttcgcgttcctcctcctcctcttgctcccgctcctcgtggccgccgctctccttggggccaggaaggaaccccttctcgcgccgcgagccgagcacctngtccacctcctccgcctt

SEQ ID NO: 7719 - DNA, 532 bp, Zea mays
  Clone ID: LIB3061-075-Q1-N6-H10
ggggggggtttttttattttttttttttttttttttttttttttttttttctttttttttttttttttttttttttttttaggggcattataattacaattaggattcttattcaaatatcatagtacaaacatcataatgtatgggacttgggggggaaacaccgttataggagtataacgggtagggagacacaattcttcaattgcaaacaccactaagggcattgctgctgcatggattattttgggagtatgagggggacaagccgcacattgaggggaggtattgggctgctgtcaaaattgccaccgcactttgagtagcttggtgagatccacaaaactcacatggggggggggggggctcctcctggattatggattgaaccatgttgtaaattgcttggggaatgtattggggctaaatctgcctaaaaaatgacaacattgttgctgaaaaacctggcagctacttgggtggataaaacgtgattggagaaaaggcattaccaaaggggtgcactggtgcc

SEQ ID NO: 7720 - DNA, 534 bp, Zea mays
  unsure (1)..(534): unsure at all n locations; Clone ID: LIB3061-075-Q1-N6-H11
accattgaagttgtacattaccagtttaagttatccaacagacaaacagggatcaacattttgcaactcatttttcatctccattacaacttacaaggacacatgagcatacatacagctgctctactctagatggggtacattccacccgacaccaacttaacagcactatttactcagcagaactctagttcatacttaaccaaaaagagaagctatataagcttttgcacagcacagctagaggcacatatcatgcacaatgcttctgagatctggccccggcttagtgttggtggagctgagcaggggccagaagtcagaagcaccacacatcacgatgggccgctgagctgactatacatgcataacatggcacaaacatgagatggcatattaagacctgacctctgcagcaaccttgccgccgtttgaaaacctgagattacaaagtagtgcatcacgccctgtaagcacanatatggaagaagtcatccacccgcttcgacagcgagtccaaccccaactggagcc

SEQ ID NO: 7721 - DNA, 473 bp, Zea mays
  Clone ID: LIB3061-075-Q1-N6-H2
agatctctaatcttttattactgagaagttgcccatatcagtatgagaactttattattacaggataaagcataaaaaaactagaagaggcccccccaatggggggctgctgcaataaggggggaggattcgtcaaagcaaggtggttaaatggcagcaattgttgttgttgtaagaaggcgacattgtttgccacatcctgggggtagaatgggagcaactgttgctgttgcaagaaggcgttaatgtttcccacaacctgggggtaaaatggcagcaattgttgttgttgttgcaaaaaagcaacaatgtttgccacaacttgtaaatggaatggaagcaactgttgctgcaataaaaaggcaacagggctcctgacaagttggttgaatggtaatagctgttgggcctgcaagtaaacagcagggttcaccccaactagttgattgaatggaaaaaattgttgttgctgg

SEQ ID NO: 7722 - DNA, 255 bp, Zea mays
  unsure (1)..(255): unsure at all n locations; Clone ID: LIB3061-075-Q1-N6-H3
cagaaatatatcgagnaaaatctcaatcaatatattgattatttctaggaaacacatgtcggtatgagggcaccattgtcgagtacatctcatatgtaatctaaaagatggcacctccaacgatgggttgctgcaaggcagggttcatcaaagagaactggttgtatggcagcaattgttgttgctgctgcaggaaggtagcgaccaatgggttagccactgccaatggattaagtaactgttgtcgctgttgta

SEQ ID NO: 7723 - DNA, 524 bp, Zea mays
  Clone ID: LIB3061-075-Q1-N6-H4
aattgcttatttatgatatattattccatcaagatcacatttttcacggtagccatacatgaggtcctcctttttttaatggtgtactagtagcttagaagctaacaccaaccaaggaaggacaaccaagaagctaaggcctggtttattattaactggaaacataaaataaaaagtagggtttgtttattgcatttggtatgtatcacccaactgtcggagtcatggcgacggtgtcaacgaagatacggacgcggtcggggcgaaggtccagcgtcacgggcgacccaacaggcagcacctggatgtacgcgttgggcatgtccttgagaatagtctccgtcgcctccttgatggacatgcccaccacctccggccacgacgtcttcttctcgctgctgctggtagcagcagcatccacgacgacggaactcatcatctccgatccgacgacgatgtgtttcgttatgcagtcaacaatgtgatgaagcatgcatgtgagacctaactcccctgcttgtcga

SEQ ID NO: 7724 - DNA, 506 bp, Zea mays
  Clone ID: LIB3061-075-Q1-N6-H7
gggaatgtaacttcttatttctggttggccacatacatcatccaaaaactttattattgaattacaactaataatcaatctaaaagaggcaccaccaatgatgtgttgttggtaggaggctgctgggtttgtcaaagcaagttggacaaagggcaacaattgttgtagttgtaagagggttgcggggttagccgcaaactgcttgtagaaaggcagcaactgttgctgtgtcaagaaggaagcacgacttgctgcagctagctcgctaaatggcagtagtatttgctgctgcaaataagcagcggggttcagtgcggccaattggttaaatggaagaagttgttgttgctgagagtaggcagtagctagctggctaaatggtaatagttgttgctgcaaataagcagcagggttcagtgtagacagttggttgaatggaagaaattgttgttgctgagagtagggagaaaggtttgccagagctacttggttgatcacaggtagca

SEQ ID NO: 7725 - DNA, 529 bp, Zea mays
  Clone ID: LIB3061-075-Q1-N6-H8
cgctcaaagcacacagtatggtaattaaactgatcaatttacagcatgatgtatccccaaatccaggcccccaatgtcgattcaacatgtaactaacatttgctgctacaacattctaccctacaacattgaaggacacaaaagagcaaaaagaaagaaaaaatgccttggatgacacttttattgctccgatgatctccaacagactgatctgcagatcacgcatgtaaccaggtgctgatcattgtcgaatgtcgagacacacagctgcatgtcgcacgttcacttcatataactgttccactagggagtaaagcatccttgatcactgtgacaattccacctttgatgaagtacccgtctgtctccattgcagcttcttgaacattgtcagcattgagtatcttaacattgtctccaattcgagcattcttgtcaatgattgctctcctgatgcatgaatttttcccaataccaataggaatgccacctttttcggcaaggagttttttatcagcttctgtctcat

SEQ ID NO: 7726 - DNA, 534 bp, Zea mays
  unsure (1)..(534): unsure at all n locations; Clone ID: LIB3061-075-Q1-N6-H9
aatacccgatgtaaaatcagatttataaataatgtatacagganaaataaaatacagataacaccagtatgtttaatcccatggaacaccacgaattacgaatcacatatagctcccagtcccaaggggtagttttcaatccaacaaccctggaatggcacattaaagttcacagcttctgttgaccaaatgacaatagaggctcaagttcagaccagcccagcgtcagtaggtgattagctcttctgatgcacagcaataagatgaatctccatctccttaagcatgatcgaccgtccacaggagtcacatggtgctgtcctggatccgcagatactctcatgctcagacatgtttcgcatcctgtcacgaacatcagaaggctctccaccagcctggactgtgtcaccacagaagcggcacacaattaatcgcaaggggcaagtcaaggactggtgctgaaccatatcttccttctccaggaccaccccacaggggcactgcaacggttcatggaagactttcatatgcttt

SEQ ID NO: 7727 - DNA, 390 bp, Zea mays
  Clone ID: LIB3061-076-Q1-N6-A1
aaaaaggggggggggtttttggggcaaccccccgttgggggggtaagggggggggggaacccaattttttaaggggaaacccccctaggggtttggggggggggggggttttttggggggggggggggggcccccccccccctgggggggggggttggggggggggaaaaaaagcccccccccctttggggggggggggggaaccccaaaaaccaaaagggggggggggggggcccccccggggtttgggggggaacccttttggaaaatggggggggaaagtttggggggaaaaatggccaaaaaaaaaaaaaaatgggggggggaaaaccggggggtttttgggggggttaaaaccgttgggggaaaaagctttcccagggggggggc

SEQ ID NO: 7728 - DNA, 512 bp, Zea mays
  Clone ID: LIB3061-076-Q1-N6-A10
ttttttttttttttttttttttttttttttttttttttttttttttttttttttttttttttttttttttttttttttttttttttttttttttttttttttttttttttttttttttttttttttttttccccaaaaaaaaaaaaagggggggaaaaaaaaaaaaaaaaaaaaggggggggaaacccaaaacccgggggccaaaagaaaaaaaaaaaaaaaaaaaaaaaaggggaaaaaaaaaaaaaaaccaaaaaaaagggggggaaaaaaaaaaaaaaaaaaaaaaaaagggggcggggaaaaaatttttggggggcgaaaaaaaaaaaaaaaagggagggaaaaaaaaaaaggaaaaaggggggggaaaaaggggaaaaaaaaaaaaaaaaaaggggaggggaaaaaaaaaaaaaaaaaaaagggggaaaagggggaaaaaaaatttttgaaaaagggaaaaaattaaaaatggaaaaaaaccccccgtgggccctttggggattttt

SEQ ID NO: 7729 - DNA, 395 bp, Zea mays
  Clone ID: LIB3061-076-Q1-N6-A11
aaagagggggtagaaaaattttttttcttcccagaaaaaaagagagcccaaaaaaaaaggtttgacggggggggacaaatttaagaaaaaaaaaaaaaaaaaaaaaaaaatttaaaaaaaaaacccaaaattaaaaaaagggagcacctaattcaccccttttgggcgtaaaaaattaaaaaaaattttttaaaaaaaaaagtggaaagaaaataaaaaaaaattctaaaaggggggaaagcaaaaaaaaaccaaccaagggggaaaaaaaaattaaaaaaaagggctctcaaaaccgggggggggaaaaaacctaagaaaaccaaataggggaaaaaagaaagggattaccaaaagccaggcaaaaccacacaaccggaaaaagaaaaggaaaa

SEQ ID NO: 7730 - DNA, 528 bp, Zea mays
  Clone ID: LIB3061-076-Q1-N6-A12
agaaatgtactttcttatttctgggaagccacaaacatcagacaaaaactttattattgaactataactcataagaaatctaaaagagggcaccaccaatgatgggttgttggtagaacgctgctgggtttgtcaaagcagggtggttgaatggcagcaattgttgcagttgtaagagggtgccagcgttaggcgcagcgtgctggtagaacggcaacaactgtggttgtatcaagaaggtagcagggctcacaccagctagctggctgaatggtagtagttgttgctgctgtaaataagcaggagagttcaatgctgccagttggttgaatggaagaaattgctgggggtaggcagcaggtagctggctgaatggtagttgttgttgttgcaaataagaagcagagttcaatgcagctagttggttgaatggaagaaactgctgttgctgagagtaggcagcaaggtttgctagcacaagttgttgtagttgttgtgccctgatgttttgtgccaataaatgcacca

SEQ ID NO: 7731 - DNA, 338 bp, Zea mays
  Clone ID: LIB3061-076-Q1-N6-A2
aaaaaaaaaaaaaagggggggggagaggggggaaaaaaaggaggaaaaaaaaaagggggggggggaaaaaaaaaaaaaaaaaaaaaaaaaaaaaaaagggggggggggggggggggattttggggggggggggggggggaaaggggaaaaaggggggggggggggggggggggaaaaaaaaaggcccccccttgggggggggggggggggaaaaaaaaaaaaaaaggggggggggggggggttcccccggggggggggggaaaaaaaaggggaaaaggggggggaaaaaagttggggggaaaaaaaggaaaaaaaaaaaaaaaaatgggggggaaaaa

SEQ ID NO: 7732 - DNA, 494 bp, Zea mays
  Clone ID: LIB3061-076-Q1-N6-A3
caaacaacaaacttattcatgatttggcatagttctgggtagtacgcacacacaacacaaccggtccatttttaaaccaacactgacacgaacagcagatacttcgacaacctccatatggggagggccccagacgacgcaggcccatcggcagcttaaacgacccatgacttactgaccaccacggggacggagcacaagggggagggggctctccttttggatgttgtagtctgctagggggcggccatcctccagctgtttgccggcgaaaatacaaaccctgctggtccggggggatgccctccttggcctggatcttcgccttcacattggcgatggggtccgagctctcaacctccagggttatggtttttccagtcagggtcttcacaaagatctgcataccacccctgaggcggaaaacaaggggaagggggctctccttctggatgttgtagtccgcgagagtgcggccatcctccagctgcttg

SEQ ID NO: 7733 - DNA, 536 bp, Zea mays
  Clone ID: LIB3061-076-Q1-N6-A4
agaaatgtactttcttatttctgggaagccacaaacatcatccaaaaaattcattattgaagtataactcataaacaatctaaaagagggcaccaccaatgatgggttgttggtagaacgctgttgggtttgtcaaagcaagttggttgaatggcagcaattgttgcagttgtaagagggtgccagcgttaggcgcagcgtgcaggtagaacggcaacaactgttgttgtgtcaagaaggcaacagggctcacatcagctagctggctgaatggtggtagctgttgctgttgtaaataagcagcagagttcaatgctgccagttggttgaatggaagaaattgctgggggtaggcagcagctagctgactgaatggtagttgttgttgcaaataagcagcagagttcaatgcagccagttggttgaatggaagaaactgctgttgctgagagtaggcagcaaggtttcctagcacaagttgttgtagttgttgtgccttgatgttttgtgccaacaaatgcaccaaaggtaactgc

SEQ ID NO: 7734 - DNA, 501 bp, Zea mays
  Clone ID: LIB3061-076-Q1-N6-A5
gcagcaccaagaaacaccatttttttccttaggatttaacttagaataaagcctgacgggggtaacagcacccatcgatccgcagtccatgctggttgatgcatgggtctgctggagccgaggatgaacacagcactaacaactgacacagagcgaccttcaatcaaaaacacagatgggcaacaacaaacacgagacgaacgaagataaacactctggactagggtaaacaacacggtagcgaacaggataacttggccgcgcgggccccaccgctcagttcctccagttcccgtcggagttgccgtagccgccgccacggttgccaccgccgtagccgccgccaccaccaccgtagccgccgccgccaccaccgtagccgccgccaccgccgtagccgccgccgccatcacggggcccgccaccgccgtagccgccgcctacacggccaccaccgtacccgccgccgccgccgcctccacgggcgccgcgggactgggc

SEQ ID NO: 7735 - DNA, 479 bp, Zea mays
  Clone ID: LIB3061-076-Q1-N6-A7
aggaaaacgacggaccatttaacgcacaggtgcagattactattactgggtgcaggggaccatataatacccagggacaagacaacagtacatcacatagctagataactgggaagccaaatacccgtcttagcgaggaccaccataaatagagcttacacaacatagccaacatgcaaatcattttaaaactgaccagatgcagaggcaggaattctcgaggggggctacacaagggtgcaccgggcactggaatgcccaacaacaagattgtagcagcaaacatggaaaaaaaaggcgcggggggcaaggcaacaattccccatgacgagttaccgcggtttacaattttcctgatacccaaccgtagggaaccccccctaaatcttgtcgagcttgtctgccttcaccaccggattaaccttggcaatggcgtccctggcagcagtccggtagtcaaacttgcagtcgtgcttgtc

SEQ ID NO: 7736 - DNA, 520 bp, Zea mays
  Clone ID: LIB3061-076-Q1-N6-A8
actcccaatcttaggagaagtaattatcgaacacccttggagaccaatatcacattaaaatctggaaatgtaacttcttatttctggttggccacatacatcatccaaaaaatttattattgaattacaactaataagcaatctaaaagagggcaccaccaatgatgtgttgttggtaggaggccgctcggtctgtcaaagcaagttggacaaagggcaacaattgttgtagttgtaagagggttgcggggttagccgcaaactgctggtagaaaggcagcaactgttgctgtgtcaagaaggaagcacggtttgctgcagctagctggctaaatggtagtagtatttgctgctgcaaataagcagcggggttcagtgcggccaattggttaaatggaagaagttgttgttgctgagagtaggcagtagctagctggctgaatggtaatagttgttgctgcaaataagcagcagggttcagtgtagacagttggttgaatggaagaaattgttgttgctg

SEQ ID NO: 7737 - DNA, 507 bp, Zea mays
  Clone ID: LIB3061-076-Q1-N6-A9
aatctagaaaagtactttcttatttctgggaagccacaaacatcagataaaaaactttattattgaactataactcataagaaatctaaaagagggcaccaccaatgatgggttgttggtagaacactgctgggtttgtcaaagcaagttggttgaatggcagcaattgttgcagttgtaagagggtgccagcgttaggcgcaacgtgctggtagaacggcaacaactgtggttgtgtcaagaaggtagcagggctcacaccagctagctggctgaatggtagtagttgttgctgctgtaaataagcaggagagttcaatgctgctagttggttgaatggaaaaaattgctgggggtaggcagcaggtagctggctgaatggtagttgttgttgttgcaaataagaagcagagttcaatgaacctagttggttgaatggaaaaaactgctgttgctgagagtaggcagcaaggtttgctagcacaagttgttgtagttgttgtgccc

SEQ ID NO: 7738 - DNA, 508 bp, Zea mays
  Clone ID: LIB3061-076-Q1-N6-B1
ccaaacatcctttttccctatatattattcctttccatttcaatggttcattcaggtcattgctcacactgccacccatggggatgggggacactccgttactcatcgccgctaaacgagtgaactagctatagccctataggtagctagtcagcggctccattacattattactacagtacatagtttcctcagtagtagacaccgccggcagctgcgttgcaagggcagggacctggctgctgcagctgcaaaccgcacatcgccgtcagctgctgcgctacctgggccgccatcagcgccgcgagctcgccctgcggctgctgctgcaggaaggactgcaggaccacaccgtatgtcgcctggtaccggtgcagcggctccacctgcctgatctggtggcagaactgttgctgcagcgcctggcactgtggcaagccgtagggcgttgccgccgggctgcactggtgcctcaggaactcgacgcactggcccagaaacgggctgc

SEQ ID NO: 7739 - DNA, 541 bp, Zea mays
  Clone ID: LIB3061-076-Q1-N6-B10
gggaaatgtaacttcttatttctggttggccacatacatcatccaaaaaatttattattgaattacaactaataatcaatctaaaagagggcaccaccaatgatgtgttgttggtaggaggctgctgggtttgtcaaagcaagttggacaaagggcaacaattgttgtagttgtaagagggttgcggggttagccgcaaactgcttgtagaaaggcagcaactgttgctgtgtcaagaaggaagcacgacttgctgcagctagctcgctaaatggcagtagtatttgctgctgcaaataagcagcggggttcagtgcggccaattggttaaatggaagaagttgttgttgctgagagtaggcagtagctagctggctaaatggtaatagttgttgctgcaaataagcagcagggttcagtgtagacagttggttgaatggaagaaattgttgttgctgagagtagggagaaaggtttgccagagctacttggttgatcacaggtagcacgagttgctgcagctgttgtgccctgatggttt

SEQ ID NO: 7740 - DNA, 516 bp, Zea mays
  Clone ID: LIB3061-076-Q1-N6-B11
agaaagtactttcttatttctgggacgccacaaactcatccaaaaacttcattattgaactataactcataagcaatctaaaagagggcaccaccaatgatgggttgttggtagaacactgttgggtttgtcaaagcaagttggttgaatggcagcaattgttgcagttgtaagagggtgccagcgttaggcatagcgtgcaggtagaacggcaacaactgttgttgtgtcaagaaggcagcagggctcacatcagctagctggctgaatggtagtagttgttgctgctgtaaataagcagcagagttcaatgctgctagttggttgaatggaagaaattgctgggggtaggcagcaactagctggctgaatggtaattgttgttgcaaataagcagcagagttcaatgcagccagttggttgaatggaagaaactgatgttgctgagagtatgcagcaaggtttgctagcacaagttgttgtagttgttgtgccctgatgttttgtgccaccaaa

SEQ ID NO: 7741 - DNA, 446 bp, Zea mays
  Clone ID: LIB3061-076-Q1-N6-B12
gggggggggttttttggaaatatctctttttttaaaaaaaaaaacatgttcaatccgggtacagggaagtatgagcacatcagtggcttgaaaaagatcttcctcggttaccatgttcaacatggagcttgaatcaccacccacgcgaactaaggggcacaacaagtcgcccaaggtctcgtccactgccttgttccatacatgagccagttcagttgagcttcttcgactggcaatttcaccaggctggtaaaagtagggcgacccgtcggcttcagcgattgaacggtagatggcccggcgctggtggaggacgaagccgccgatggagacggaacccagggcgaacccgaggaggcgctcctgcgcgaggatgctgatcatggcagtgatggtggtggccgccggcggcacgcgagattttttttgggggtcggacgcgtggg

SEQ ID NO: 7742 - DNA, 520 bp, Zea mays
  Clone ID: LIB3061-076-Q1-N6-B2
atatcgagaaaaatctcaatcaatatattgattatttctaggaaacacacgtcggtatgagggcaccattatcgagtacatctcatatgtaatctaaaagaggcacctccaacgatgggttgctgcctcgacaagacaggattcatcaaagagaactggttgtatggcagcaattgttgctgctgtaggaaggcggcgaccaatgggttagccactaccaatggattaagtaactgttgtcgctgttgtaggtacgcagcagagttcgacagagtcagttggttgaatggaagcagctgttgcaagtaggcaacagggtttgccacagctagttgagtcagagctggtacaatctgttgcaacaattgttgttgcaggtatgtaggtgcattgcccacagcgagcgggctagatgaaagcagttgttgttgttgtacgtaggcggcagggttcaccatggctagttgactgagcgttggcagaaactgttgtagctgttgttgttgctggtttgcaacta

SEQ ID NO: 7743 - DNA, 518 bp, Zea mays
  Clone ID: LIB3061-076-Q1-N6-B3
agaaagtactttcttatttctgggaagccacaaacatcagacaaaaactttattattgaactataactcataagaaatctaaaagaggcaccaccaatgatgggttgttggtagaatgctgttgggtttgtcaaagcaagttggttgaatggcagcaattgttgcagttgtaagagggtgccagcgttaggcgcagcgtgctggtagaacggcaacaattgtggttgtgtcaagaaggtagcagggctcacaccagctagctggctgaatggtagtagttgttgctgctgtaaataagcaggagagttcaaagctgtcagttggttgaatggaagaaattgctgggggtaggcagcagatagctggctgaatggtagttgttgttgttgcaaataagaagcagagttcaatgcagctagttggttgaatggaagaaactgttgttgctgagagtaggcagcaaggtttgctagcacaagttgttgtagttgttgtgccctgatgttttgtgccaataa

SEQ ID NO: 7744 - DNA, 542 bp, Zea mays
  Clone ID: LIB3061-076-Q1-N6-B4
ttttttttttttatttttttatttttttttttttttttttttttttttattttttttttttttttttttttttttttttttttttttttttttttttttttttttttttttttttttttttttttttttttttggggggaaaaccccaacaaatttgggggtttttttggggaaccccccgggggggggggggccccctttgggggcccccttttttgggaataaaaagagggggcccccccccggggggggggggccccccccggggggggttttttaaaaaaaacgggggggggggggaaaatttgggggggtggggggggggggggccccaggggggccccccccccccgggggtaaaaacccggggggccgtggggggggcccccccaaaatttccccaggaccttggggggaagggggaccctttttggaaggggggcaaaggggttcccccccctttggggggaaaagggggggccaattgggggaaaaaattgggggggggggttttggggggttttcccccaagggggggggtt

SEQ ID NO: 7745 - DNA, 491 bp, Zea mays
  Clone ID: LIB3061-076-Q1-N6-B5
aacccagggatgaaaacaaatatgctgctcagtagtacaataagggggctagttttcgacaaagcaaaatcctaaacccaaacagacagcattgtcttaaaatacagatcatcatcctggctgccctttttaaagtacacaaagggggcaaatcaaatcctccagatcggatagttcaaaggtaaccatctccagacgggtggtcactcccctatcctcctcttttctcagttggccttcccatttatgatggcatgtaggtcgaggggtcaatttgctcaggcagttcctttatgtctacctcaaaccttttttgcacctggttaaaaacatcagaatccgaagcagaggaaacaaaggtgattgcaagtcccttcgtgccaaaacgtccagcccttccaaccctgtgcaaataagtatcagctgagtctggcatgtcatagtttatcacaatgttgacacgctcaatgtcaatgcccctgccaactaaa

SEQ ID NO: 7746 - DNA, 497 bp, Zea mays
  Clone ID: LIB3061-076-Q1-N6-B6
agtagcattataattacaattagtattcttattcaaatatcatagtacaaacatcataatgtatggtactttattgcttaacaccgttataggagtataacggctaggtagacacaattcttcaattgcaaacaccactaatgtcattgctgctgcatggattattttggtagtatgagtggtacaagccgcacattgatggtaggtattgtgctgctgtcaagattgccaccgcactttgagtagcttgttgagatccacataactcacatggttgttgttgttgctcctcctggattatggattgaaccatgttgtagattgcttggtgaatgtattgtggctcaatctgcctaagatcatgacaacattgttgctgcaatacctggcagctacttggttgtatcaaacgtgattggagaaaaggcattaccaaagggctgcactgctgccttaggaattcatgacaattttttagatttgagctactgctatag

SEQ ID NO: 7747 - DNA, 406 bp, Zea mays
  unsure (1)..(406): unsure at all n locations; Clone ID: LIB3061-076-Q1-N6-B7
ggggtgtgttttttattttttgtaaattgggttttttatgtgtggtggtagaaggggggaggattgtgggtgtttgtaaaataggtgggaaaaaagggaaaaaatggtggttttatgggggggggggggggaaagggaaaaaaaagttttgtaaaaaaaaaaaagaaaggaaaaaaaaaaagggggggggaaaagaaaaaaagggggggggagagggagggaatttggttaaaaaaaaaaagaggggggggaaaaggggggtatgggaaaaagggggggggggggggaagnaaaagattttttgaaagaaaaaaaaatgtttttggtagaaaaaaaaaaaagggttagtgtgagtaaagggggaagaaaggggaaaataattttttggggaaaaaaaagggggggg

SEQ ID NO: 7748 - DNA, 266 bp, Zea mays
  Clone ID: LIB3061-076-Q1-N6-B9
gaacgagcaggcatttttattcgaagcaaaggggcagccaattctcaccatactaggaaccaggccagcgctgcccaaaacgctcaaacaagaaagaaaaaaaaacaggaaccaaagttcttggaaaccaagtacacataactccaatacacgactaacaatgcgaattgcggtgaaacagatcgaaatgcaggcgatggttctccggcctgggcttcttcttcttcttctttccccgtactaatcgaaggacagcggaacctggc

SEQ ID NO: 7749 - DNA, 522 bp, Zea mays
  Clone ID: LIB3061-076-Q1-N6-C10
aaaaatgtactttcttatttctgggaagccacaaacatcagacaaaaactttattattgaactataactcataagaaatctaaaagagggcaccaccaatgatgggttgttggtagaacactgctaggtttgtcaaagcaagttggttgaatggcagcaattgttgcagttgtaagagggtgccagcgttaggcgcagcgtgctggtagaacggcaacaactgtggttgtgtcaagaaggtagcagggctcacaccagctagctggctgaatggtagtagttgttgctgctgtaaataagcaggagagttcaatgctgccagttggttgaatggaagaaattgttgggggtaggcaacaggtagctggctgaatggtagttgttgttgttgcaaataagaagcagagttcaatgcagctagttggttgaatggaagaaactgctgttgctgagagtaggcagcaaggtttgctagcacaagttgttgtagttgttgtgccctgatgttttgtgccaataaat

SEQ ID NO: 7750 - DNA, 535 bp, Zea mays
  Clone ID: LIB3061-076-Q1-N6-C11
gggggggggtttttccaactggacggtgtttcgaattaaagcaaattaactctggtactggtacattcgactcgaataggatccaaaaaactcacggcaatatcactggccacacaaagcagacatatagctatggataaattaggctggggggggggccagccaccaccatcgccagcaccccaggagaaggactgatcggaagtcacgcctagatcttgttgaaggcaactatgtcgcagctctgcacgtactcgttcactggctcagcgcacagatagtcctcaatgagagtgtcgacagagacaaggtcgtcgacgatggtcatcatgatttgcagcttcttgataccatatccaactgggacaagcttggatgcgccccagagcagcccttccatctggacactcctaacagcttcctcgagcttggccatgtcagtctcatcgtcccatggcttcacatcaagtaaaactgatgacttcccagattctttcttcttgccagaagccttggcagctgcagcacgctcttc

SEQ ID NO: 7751 - DNA, 528 bp, Zea mays
  Clone ID: LIB3061-076-Q1-N6-C2
ttttttttttttttttttttttttttttttttttttttttttttttttttttttttttttttttttttttttttttttttttttttttttttttttgaaaaagggcccttcttatttggggggccccccaaacatcacccaaaaaacctcattagggaaccaaaacccaaaagcaatctaaaagggggcccccccaagggggggggggggggaaaacacggggggggttggaaaaacaaggggggggaagggcaacaattggggcagttgaaaaagggggcccgcgttaggcatagcgggcagggaaaacggcaacaacggggggggggtaaaaaagggagcagggcccacaaaaactagctggctgaaggggaaaagttggtgctgctggaaaaaaaccgcaaagttcaaggccgctagtggggggaaaggaaaaaaatgggggggggggggaaaaaccagcggggggaaggggaattgggggggcaaaaaagccgcaaagttcaaggccccccgttggttgaaggg

SEQ ID NO: 7752 - DNA, 496 bp, Zea mays
  Clone ID: LIB3061-076-Q1-N6-C3
atcagcaaaaaaactttattattgaactataactcataagcaatctaaaagagggccccaccaatgatgggttgttggtagaacactgctgggtttgtcaaagcaagttggtcgaatggcagcaattgttgcagttgtaagagggggccaacgttaggcgcagtgtgcaggtagaacggcaacaaatgttgctgtgtcaaaaaggcagcagggctcacagcagctagctggctgaatggtagtagttgttgttgttgtacataagcatgagagttcaatgctgccagttggttgaatggaaaaaattgccgggggtaggcagcaactagctggctgaatggtagtagttgttgttgctgcaaataagcagcagagttcaatgcagctagttggttgaatggcaaaaactgttgttgctgaaagtaggcaacaaggtttgctagcacgagttgttgtagttgttgggccctgatgttttgtgccaacaaatgcacca

SEQ ID NO: 7753 - DNA, 520 bp, Zea mays
  unsure (1)..(520): unsure at all n locations; Clone ID: LIB3061-076-Q1-N6-C4
aagccgcaaaaccccctcaacacaagctttacaaccgaccaccaaaattcgacgctgacaaagggaaaaagagcaaagggcaccaagcactacttgtcagagcctagctactatccctaccaaggaatttcacctaactaggaatctcgtgtgcttgaatgtcctcaagaccctcttcgtaatgaacatctgcaagattaagactgcagccagtagcaaccagaagaagaaaggggatgaccacattcaccttgtacttgttgctgtataacagctcctaccaaaaatgtatacctaaatagaactagagtaaaaagtgacctaaacttggcagacccctctacttgggagcaactgtaacatcaatcccaggcactcggagccccagctccaccgtgtccgccaccaccataaccaccactgctgcctccaccatagtagtcaccaccaccacgggnatccccccttgccaaatgacgaagaatcattgcggaagtcacggccaccaaagcggctccct

SEQ ID NO: 7754 - DNA, 443 bp, Zea mays
  Clone ID: LIB3061-076-Q1-N6-C5
atataaaatttattaaagtatttttatttataattaaattaaaaggaggggattaataaggggggggggggggaaaaaagggggggggggggagaaaaggaggggggggaaggggagggggggggggggggggaaaaaggggggggggggggggggaggggggggggggaagggggaaaaagggggggggagagggaaggagaagggggaaaaaaaaaaaagggggggaaaggaaagaggggggggggggggaaaaaagggggggagggaaaaaaagaaggggggaaaaaaggaaaaaaagtggggggaaagaaaggaggaaagggggggaaaggggagggggtaggggaaaaaaaaaaaagggggggggaaagaaggaagggggggaaaaaaaaaaaacagggggggaaaaggaagaggaaggggggggggaaaaaaaaaga

SEQ ID NO: 7755 - DNA, 433 bp, Zea mays
  Clone ID: LIB3061-076-Q1-N6-C7
cttcccgaacccgggggagccacccgggaaaacccgaaccggacccggaaggggccccaacccccccaaaaagaaagcggaaaaaagcggggaaaaaaaaagggaaaaaaggcccccggggaaaaaaggaaacccgaaaaaagcaaaaaaaaaaaaaaacccggaaaaaaaaaaaaaaaaaccgggggggccaaaaaaaaaaacaaacaaaaaaaaagaaaaagggacaaaccaccccaaaaaaaaaaggaaaacccgcccggccaggggaaaaaaaaaaaaggccaacccccggggaaaagcggaaaacaaaaaaggccccaaaggggggtttctttaaaaaagggaaaccggaaaaaagtgatggccccaaacccccgggcccaaaaaaaaggaaaaaagcgccccacccgggggaacccaaacagaaaaa

SEQ ID NO: 7756 - DNA, 488 bp, Zea mays
  Clone ID: LIB3061-076-Q1-N6-C8
ccaatcatcttttttccttatatattattcctttccatttcaatggttcattcaggtcattgctcacactgccacccatggtgatgggtgacactacgttactcatcgccgctaaatgagtaaactagcgagctaggtagctagtcagcggctccattacattattactacagtacatagtttcctcagtagtagacaccgccggcagctgcgttgcaagggcagggacctggctgctgcagctgcaggccgcacatcgccgtcagctgctgcgctacctgggccgccatcagcgccgcgagctcgccctgcggctgctgctgcaggaaggactgcaggaccacaccgtatgtcgcctggtaccggtgcagcggctccacctgcctgatctggtggcagcactgctgctgcagcgcctggcactgtggcgagcccgtaggcgtcgccgccgggctgcactggtgcctcaggaactcgacgcactggcc

SEQ ID NO: 7757 - DNA, 538 bp, Zea mays
  Clone ID: LIB3061-076-Q1-N6-D1
agaatagaattatatacttttatctaaaaagctagaaccttatataaagtttacagaaattaatttatttttattagaaacaataaaggaaaggaaaatatccgatgctcaaaaggggcttaactaaaaacgaatccaaacgcagcgaatggactagtagagtcatcattccgtctgtccgggccacgaaatggcatcaggagctcaggtgaggatcaggcaatatgacgcgcgcggagtccccgggctcgcagaccagaacacggcgatccgcggggatcctggagaccagctcgggctgggccttttcgtactcggcacggacgtatgcagccgcatcctccgcgcggtcgctctccacgatggccaggcagcagcccctgaagccggcgccgctgaaccgggcgccgagggcgccgggggccttcagcaggatctcgtacagctggatcatctctttgctcccacattcgtagttgagtatggagctgcgaccagattcagagatcagctgtccaagttcttgtaggttcccatg

SEQ ID NO: 7758 - DNA, 397 bp, Zea mays
  Clone ID: LIB3061-076-Q1-N6-D3
ggggggaaaatttttttttttttttaaaaaaattttttttttttttttttgggaaaaaaaaaaaaaagaaaattttaaaaggggggggggggaaaaaaaaaaaaaaaaaaaattttagggggaaaaaaaaaaaaaaaaaaaaaaaaaaaggggggccccaaaaagggggggggggaaaaaaaaaagggggggaaaaaaaaaaaaaagggggggaaggaaaaaaaattttttttttgaaaaaaaaacaaaaaaaagggggaacacccgggggggaaaaaaaaaaaagggggggggggggggaaaacccaaaaaaaaaaaaaaaaaaggggggggggaaaaaaaaaaaaatttggaaaaaagaaaaaaggggttcccaaaaaattttggaaaaaaggga

SEQ ID NO: 7759 - DNA, 541 bp, Zea mays
  Clone ID: LIB3061-076-Q1-N6-D4
aagaatctagaaagtactttcttatttctgggacgccacaaacatcatccaaaaacttcattattgaactataactcataagcaatctaaaagagggcaccaccaatgatgggttgttggtagaacactgttgggtttgtcaaagcaagttggttgaatggcagcaattgttgcagttgtaagagggtgccagcgttaggcatagcgtgcaggtagaacggcaacaactgttgttgtgtcaagaaggcagcagggctcacatcagctagctggctgaatggtagtagttgttgctgctgtaaataagcagcagagttcaatgctgctagttggttgaatggaagaaattgctgggggtaggcagcaactagctggctgaatggtaattgttgttgcaaataagcagcagagttcaatgcagccagttggttgaatggaagaaactgatgttgctgagagtatgcagcaaggtttgctagcacaagttgttgtagttgttgtgccctgatgttttgtgccaccaaatggaccaaaggtaact

SEQ ID NO: 7760 - DNA, 524 bp, Zea mays
  unsure (1)..(524): unsure at all n locations; Clone ID: LIB3061-076-Q1-N6-D5
agaatctgngaaagtaacttcttatttctggttggccacatacatcatccaaaaactttattattgaattacaactaataatcaatctaaaagagggcaccaccaatgatgtgttgttggtaggaggctgctgggtttgtcaaagcaagttggacaaagggcaacaattgttgtagttgtaagagggttgcggggttagccgcaaactgcttgtagaaaggcagcaactgttgctgtgtcaagaaggaagcacgacttgctgcagctagctcgctaaatggcagtagtatttgctgctgcaaataagcagcggggttcagtgcggccaattggttaaatggaagaagttgttgttgctgagagtaggcagtagctagctggctaaatggtaatagttgttgctgcaaataagcagcagggttcagtgtagacagttggttgaatggaagaaattgttgttgctgagagtagggagaaaggtttgccagagctacttggttgatcacaggtagcacgagttgctg

SEQ ID NO: 7761 - DNA, 499 bp, Zea mays
  Clone ID: LIB3061-076-Q1-N6-D6
ttttttttttttttttttttttttttttttttttttttttttttttttttttttttttattttttttttttttttttgggttgttttaattttttttttaaaaatttatttttttataattatttataaaaaatataaaaaagggggccaccaaagaaggggggggggaagaaaaaggggggggggggaaaaaaaaggggggggaaaggaaaaaaaggggggggggggggaaaaggggggggggggaaggggggggggggggggggggaagaaaaaggggggggaaaggaagggggggggggaaaggaaaaaaaaggggggggggaaaaaagggaggaaggggtggtggcacaaggggggggagaagaagggccccgatgttgtgggccaaaaaaagcaccaaaaggaaaaggggggaaaggggggaaaaagggggggggaaaaagggggaaaaagggaaaaagacaacagcggggggcggggggaaccagcagggggg

SEQ ID NO: 7762 - DNA, 506 bp, Zea mays
  Clone ID: LIB3061-076-Q1-N6-D8
aaaaaggacctttttatttttgggaccccccaaaccttattccaaaaactcatttttggacctttacccataagccatctaaaagagggccccccccatggtggggtggtgggagaacactggtgagtttggcaaaaccaggtggttgaatggcaacaattggtgccgttgtaaaaaggggcccacctttggccttacctgccaggtgaaccgcaaccaccggtggtgggtcaaaaaagccacaaggcttacattaacttacttgcttaatgggaataattggtgcttcttgaaataaaccacaaaattcaatgcttcttattgggtgaatggaaaaaaatgcttggggtaggccacaacttacttgcttaatgggaaatggtggtgccaataaaccgccaaattcaatgccacccgttggttgaatggaaaaaaccggtgtttcttaaagaattccacaagggttgcttacccaaattggtggaattggtgggcccttatgtttt

SEQ ID NO: 7763 - DNA, 267 bp, Zea mays
  Clone ID: LIB3061-076-Q1-N6-D9
gacaccatatagtaataatattactagacttctgaaacgatttatgtcatgctgaagaccctgaacaggaacacacgagttacgactgaaaaacgttgcagcagcctatgcagctacaaaagctttgaaacttcgtcttgttgacgcaaaccatgcaaggaaccgatttggcaagcttcagttcttgatcttcttctttgccctcagctggttgctgtggccacacttcttcttgcggcagttaacagccctggggtgcagccgtgc

SEQ ID NO: 7764 - DNA, 532 bp, Zea mays
  Clone ID: LIB3061-076-Q1-N6-E1
aagaatctagaaagtactttcttatttctgggacgccacaaacatcatccaaaaaattcattattgaactataactcataagcaatctaaaagaggcaccaccaatgatgggttgttggtagaacactgttgagtttgtcaaagcaagttggttgaatggcagcaattgttgcagttgtaagagggtgccagcgttaggcatagcgtgcaggtagaacggcaacaactgttgttgtgtcaagaaggcagcagggctcacatcagctagctggctgaatggtagtagttgttgctgctgtaaataagcagcagagttcaatgctgctagttggttgaatggaagaaattgctgggggtaggcagcaactagctggctgaatggtaattgttgttgcaaataagcagcagagttcaatgcagccagttggttgaatggaagaaactgatgttgctgagagtatgcagcaaggtttgctagcacaagttgttgtagttgttgtgccctgatgttttgtgccaccaaatggaccaa

SEQ ID NO: 7765 - DNA, 419 bp, Zea mays
  Clone ID: LIB3061-076-Q1-N6-E10
ggaaaaaaaacaagggaaaacccatgggtcaaccaaaagggggggaaaagaggggcccccccccaaaaaaaaaagaaacccccaggaaaaagggaaccccaaaagaaaaacccccaaaggcaaaaaggggggaagcaaaaattgggccccggcccccaacccccgggaattggggcccccaaccccggaaaaggggggggaaaagccctggcaaaccttcccaaagcgggacccggggaaaaaccccaaattcaccaaaatttggggcccaaaaccccggggggggttcaaaaaggagccaaccccccccgttttgggggcccaaaaaatccccccaaagttaaaaaaaaaatggggggggcccgcccctggtttaaaccccccacccacccgggaaaaatccacccccaccccaaaaa

SEQ ID NO: 7766 - DNA, 551 bp, Zea mays
  Clone ID: LIB3061-076-Q1-N6-E12
gggggggttgttttttttttttttgcagcaccaaggaacaccattttttccttaggattaacttagaacaaatcctgacaggagtaacagcatccatcgatccacagtccatgctggttgatgcatgggtctgctggagccgaggatgaacacaggactaacaactgacacagagcgaccttgcaatcaaaaacacagatgggcaacaacaaacgagacgaacgaagataaaccctctggactagggtaaacatcacggtagcgaacaggataacttggccgcgcgggccccaccgctcagttcctccagttcccgtcggagttgccgtagccgccgccacggttgccaccgccgtagccgccaccaccaccaccgtagccaccgccgccaccgtagccgccgccgccaccgccgtagccgccgccgccatcacggcgcccgccaccgccgtagccgccgcctccacggccaccaccgtagccgccgccgccgcctccacggccgccgcgggactgggcctcgttgacggtgatgttgcggccgtccagct

SEQ ID NO: 7767 - DNA, 524 bp, Zea mays
  Clone ID: LIB3061-076-Q1-N6-E2
aaaaatctagaaagtactttcttatttctgggaagccacaaacatcagacaaaaactttattattgaactataactcataagaaatctaaaagagggcaccaccaatgatgggttgttggtagaatgctgctgggtttgtcaaagcaagttggttgaatggcagcaattgttgcagttgtaagagggtgccagcgttaggcgcagcgtgctggtagaacggcaacaactgtggttgtgtcaagaaggtagcagggctcacaccagctagctggctgaatggtagtagttgttgctgctgtaaataagcaggagagttcaatgctgtcagttggttgaatggaagaaattgctgggggtaggcagcagatagctggctgaatggtagttgttgttgttgcaaataagaagcagagttcaatgcagctagttggttgaatggaagaaactgctgttgctgagagtaggcagcaaggtttgctagcacaagttgttgtagttgttgtgccctgatgttttgtgccaa

SEQ ID NO: 7768 - DNA, 523 bp, Zea mays
  Clone ID: LIB3061-076-Q1-N6-E3
ccaaaccaacttattgataattaatactagaaagtagaggagacatgaagcatagaaaaacagggtccagaatgtaaccacagataatgataagtcaggtaggtacgacacccagcaaccccttgcacgctatagcaaaagccagctcaagccaggtgaatgtctcggtagcaatcctttggtgatacacttcttttccgatttaagttgagatacagtagggttccgtctccaaagccaaggaagttacttggggccaacatccttaaacgcgcagatctgctcctcccccatcgcaaactggacagtcacaacaagatccttcccgctttcgaacccttccttaatctgggccacaagagtctcatcagttgggagtctaagatcatccttagtgttgccatctgaagtaagaaggctcacaaatccatcctcagaaatatcaatcagctgatactcagtacggttcacatgcggaatgtcacagttgtgtgatgaaggaacaatatcttcaagctttttc

SEQ ID NO: 7769 - DNA, 516 bp, Zea mays
  unsure (1)..(516): unsure at all n locations; Clone ID: LIB3061-076-Q1-N6-E7
aacggaactactcaagnaactagctgtcataaccatcggacagtcaatgcctcacacatacaatttggttcatcatgactaacagtagggggtgactggttagttacaacttacaacaaatactttacacggcactaagctcctagaagaactgccgcgtcatcacattacgaatacacaacactacaacagtcgtacaagaaatttcccaaatcactggaagtcttaacgcgcaaaatcggcgttagatagtactgtatcaccgaaacagtgcgggtacatgggaatgctccaggacattccccttggcgaaggcagcccaccagcgtctcagcagtaaaacatgacacgcttcacgttctccttgagagcaggtaggggcctgacctcgacactcccggcccctctcgtgctgctgcgtgccgcaccgggtggggggccacgggcaccgctggccagtgacccgctgtccgaggtgtctggctccatgtagaagcgagctcggaaggctgccag

SEQ ID NO: 7770 - DNA, 526 bp, Zea mays
  unsure (1)..(526): unsure at all n locations; Clone ID: LIB3061-076-Q1-N6-E8
gngaaatgtaacttcttatttctaggaggccacatacatcagccaaaaaattcattattgaattacaactaataagcaatctaaaagatggcaccgccaatgatgtgttgttggtagaaggctgctgggtttgtcaaagcaagttggacaaagggcagcaactgttgcagttgtaagagggttgcggggttagccacaaactgctggtagaacggaagcaattgttgttgtttcaaaaaggaagtggggcttgttgtagctagctggccaaatggtagtagtatttgctgctggaaataagcagaggggttcagtgcggccaattggttaaatggaagaaattgttgctgctgagagtaggcagtagctagctggctgaatggtagtagttgttgttgttgtaaataagcagcagggttcagtgtagacagttggttgaatggaagaaattgttgttgctgagagtagggagaaaggtttgccagagctacttggctgatcactggtagcacgagttgttgcagct

SEQ ID NO: 7771 - DNA, 521 bp, Zea mays
  Clone ID: LIB3061-076-Q1-N6-E9
cacccaaaaaattcattattgaagtataactcataagcaatctaaaagaggcaccaccaatgatgggttgttggtagaacgctgttgggtttgtcaaagcaagttggttgaatggcagcaattgttgcagttgtaagagggtgccagcgttaggcgcagcgtgcaggtagaacggcaacaactgttgttgtgtcaagaaggcaacagggctcacatcagctagctggctgaatggtggtagctgttgctgttgtaaataagcagcagagttcaatgctgccagttggttgaatggaaaaaattgctgggggtaggcagcagctagctgactgaatggtagttgttgttgcaaataagcagcagagttcaatgcagccagttggttgaatggaaaaaactgctgttgctgagagtaggcagcaaggtttcctagcacaagttgttgtagttgttgtgccttgatgttttgtgccaacaaatgcaccaaaggtaactgctgtaatagggctgacggttgttgg

SEQ ID NO: 7772 - DNA, 529 bp, Zea mays
  unsure (1)..(529): unsure at all n locations; Clone ID: LIB3061-076-Q1-N6-F1
gngaaatgtaacttcttatttctaggaggccacatacatcagccaaaaacttcattattgaattacaactaataagcaatctaaaagatggcaccgccaatgatgtgttgttggtagaaggctgctgggtttgtcaaagcaagttggacaaagggcagcaactgttgcagttgtaagagggttgcggggttagccacaaactgctggtagaacggaagcaattgttgttgtttcaaaaaggaagtggggcttgttgtagctagctggccaaatggtagtagtatttgctgctggaaataagcagaggggttcagtgcggccaattggttaaatggaagaaattgttgctgctgagagtaggcagtagctagctggctgaatggtagtagttgttgttgttgtaaataagcagcagggttcagtgtagacagttggttgaatggaagaaattgttgttgctgagagtagggagaaaggtttgccagagctacttggctgatcactggtagcacgagttgttgcagctgtt

SEQ ID NO: 7773 - DNA, 400 bp, Zea mays
  Clone ID: LIB3061-076-Q1-N6-F10
aagggaaaggagggggaaaaaaaaaggggggaaaaaaaaaaaaccattagggggggggccgggggttttaaaagggaaaaaaaaaaaaaaaaaggggggggggaagaaaaaaaaaaagggggggaaaaaaaaaaaaaaacccggggggggggggggggggaaaaaaataaaaaaaaagggggcccggggggggggaaaaaaccggggaaaaaaaggggcccgggggaaaaaacaaaaggggggggcccggtttgccctaaaaaaaaaactttgggggggccccaacgccaaacccaaccacctaggggaaaaagttttggggggccgggcccgcggggggaaaattgggggagaaaagggggggaaaaaagggggcaccactgaaaaaaaaaaggggggg

SEQ ID NO: 7774 - DNA, 293 bp, Zea mays
  Clone ID: LIB3061-076-Q1-N6-F11
ggggggggggtttttttttttttttttttttttttttttttttttttgttttttttttttttttttttttaaaagatgtttttttttatttttttttttttttttttttttttttttttttttttaaaaatgtttttttttttttttggggggggggggggggttttttttaaaaaaaggccctttttaattggggggggccaaaaaaaaaggggaaaaaaccggaaggggcaacaatggcaaaaagagggaggaacgagggcgcacaccagggagggggcgggaaggaagaa

SEQ ID NO: 7775 - DNA, 529 bp, Zea mays
  Clone ID: LIB3061-076-Q1-N6-F12
agatctataatactttattactgaggggtcgcacatatcagcatgagaactttattattacagtataaatcataaaaaatctagaagatggcaccaccaatggtgggcgattgcaataaggtggtaggattcgggaaagcatgttggctaaatggcagcaattgttgttgttgtaagaaggcaacaatgtttgccacattatgtgggtagaatggcagcaattgttgctgttgcaagaaggcattaatgtttcccacaacctgtgggtaaaatggcaacaattgttgttgtcgcaagaaagaagcaatgttttccacagcttgcagatggaatggcagaagctgttgttgcagtaagaaggcatcagggctcccgacaagttggttaaatggtagtagttgttgtgcctgcaagtagacagcagggttcaccccagctagttgattgaatggaagaaattgttgttgctggagataagcagcaaggttcgctgcaactacttgattgattgttggtagcaactgttgtt

SEQ ID NO: 7776 - DNA, 502 bp, Zea mays
  Clone ID: LIB3061-076-Q1-N6-F2
gttatcttattcagattatgagtatgccgcataacctctaatacaatacagtacaatattaatgcgagtaaccccaatcagacagacccacgcttatggctggtattgacaacatcacgatggtattttcacatcggtcttggttggagatgatatccagactcatgcgtaatcctttacaatgatattcttagtgtccattgccagcatataatgcccactgaggtgtggttggacaggttacatccaagagtgtcattgaccttgattgcagctttctaaacacgcagccaaaagacctcgctcgatgcactgaagaagatagctgtgaagccaatctaatgtttgaggaaacgaatttgctgagatatcaacaatggtcaatccctgtgactcaaaagaacaaaggtagtcctgaataagcttaaggttgtttataagtttccgatgatcctgaggaatgcaattatctctgaaagctctagtggctatccattcctct

SEQ ID NO: 7777 - DNA, 371 bp, Zea mays
  unsure (1)..(371): unsure at all n locations; Clone ID: LIB3061-076-Q1-N6-F3
agaaatgtactttcttatttctgggaagccacaaacatcagataaaaactttattattgaactataactcataagaaatctaaaagagggcaccaccaatgatgggttgttggtagaacactgctgggtttgtcaaagcaagttggttgaatggcagcaattgttgcagttgtaagagggtgccagcgttaggcgcaacgtgctggtagaacggcaacaactgtggttgtgtcaagaaggtagcagggctcacaccagctagctggctgaatggtagtagttgttgctgctgtaaataagcaggagagttcaatgctgctagttggttgaatggaagaaaatgctggnggtaggcagcangtagctggctg

SEQ ID NO: 7778 - DNA, 512 bp, Zea mays
  Clone ID: LIB3061-076-Q1-N6-F4
cttgctgggcttattattcagacatatgagctagctacaagctcattcctcatgcactatgctcttcgcagttacttggagggcatcgttccgccgccgagaatccaggggcattcggcgacgccgctgatggtggccaggttgcactcggcctccgtgacgagggtggcggcgaatcccctctgcacctcccgcgggcagcccggcaggtcctctaggcggccctccagctgcgcgtccgggcccggcgggatcgcgccgtccatgaggatgctcagcgccgtgcaccggcagtacgccgggatgtccgccagctcccggcagcatctccttttcagctccggccacgggaggcgcggcccgatgccgcaggtccggctggtcacgtaccagcggcagctcgggagcgggttgtgcgggatggcccaccccggcacgcaggaggtcccggcgctggcgctggcagccgcgagcacggagagcaggacggcggctgcaaggatgaggcggcc

SEQ ID NO: 7779 - DNA, 521 bp, Zea mays
  Clone ID: LIB3061-076-Q1-N6-F5
atgagttatagttcaataataaaggttttttcacaaagtactttcttatttctggtgaagcgcacctaacatcacacaaaaaactttattattgacactctccctcgattggaaatctaaaagagcccccaccaatgatggaatgctggtagaacgctggtgggtttggcaaagcaagttggtatgaatgccaccaattgctccacttgctagagggtagccagccttcggcgcatcgtgctggtagaacggcaacctctgaccttgtatcaagataggtagcagggctcacaccatcttgctggctgaatggtaagagctgttgctgctgtaaataaacaggaaaattcaatgctgccagttcgttgaatggaagaaatgctgggggtaggcagcatgtaactggctgaatggtagctgttgatgttgcaaataaaaagcaaaaaacaatgcatcttgttgagttgaatggaaggaaactgctgctcctgagagtaggcagcaagggccgctagcacaag

SEQ ID NO: 7780 - DNA, 509 bp, Zea mays
  Clone ID: LIB3061-076-Q1-N6-F6
agaaatgtactttcttatttctgggaagccacaaacatcagacaaaaactttattattgaactataactcataagaaatctaaaagagggcaccaccaatgatgggttgttggtagaacgctgctgggtttgtcaaagcaagttggttgaatggcagcaattgttgcagttgtaagagggtgccagcgttaggcgcagcgtgctggtagaacggcaacaactgtggttgtatcaagaaggtagcagggctcacaccagctagctggctgaatggtagtagttgttgctgctgtaaataagcaggagagttcaatgctgccagttggttgaatggaaaaaattgctgggggtaggcagcaggtagctggctgaatggtagttgttgttgttgcaaataagaagcagagttcaatgcagctagttggttgaatggaagaaactgctgttgctgagagtaggcagcaaggtttgctagcacaagttgttgtagttgttgtgccctgatgttt

SEQ ID NO: 7781 - DNA, 531 bp, Zea mays
  Clone ID: LIB3061-076-Q1-N6-F7
gaatctagaaagtactttcttatttctgggaagccacaaacatcatccaaaaacttcattattgaagtataactcataagcaatctaaaagagggcaccaccaatgatgggttgttggtagaacgctgttgggtttgtcaaagcaagttggttgaatggcagcaattgttgcagttgtaagagggtgccagcgttaggcgcagcgtgcaggtagaacggcaacaactgttgttgtgtcaagaaggcaacagggctcacatcagctagctggctgaatggtggtagctgttgctgttgtaaataagcagcagagttcaatgctgccagttggttgaatggaagaaattgctgggggtaggcagcagctagctgactgaatggtagttgttgttgcaaataagcagcagagttcaatgcagccagttggttgaatggaagaaactgctgttgctgagagtaggcagcaaggtttcctagcacaagttgttgtagttgttgtgccttgatgttttgtgccaacaaatgcaccaa

SEQ ID NO: 7782 - DNA, 504 bp, Zea mays
  Clone ID: LIB3061-076-Q1-N6-F8
ataatggcatatcataccacgaacagaggctaaatcagaaaattattcccagtatacaaaggtcaagattatcatagatactggaactgatatttcgactcgttttgcataatagatgatacatggaatgtaagagaaaggcagaaaccagtgatggcatatacatttctacattattaaccttgagatgttattggagataatcatggtaataactatcactggggcatggtctgtagattttactgaagggagtgacaacactcgagtacctactggggcctcctcctcgttcttcttatggttggagactccgaaggccttgaccgcctacttgacccaggctcgcccaatataacagctgtggtgctagaagttgacagctgttcgacagatgatgactgctgaggagctgcaagaaccatctgtgcagcattgtcaccgttagaatgtgacaactggatttggttgctgctctcaggggcaacattgcccatattctgc

SEQ ID NO: 7783 - DNA, 521 bp, Zea mays
  Clone ID: LIB3061-076-Q1-N6-G1
aatctagaaagtactttcttatttctgggaagccacaaacatcagacaaaaactttattattgaactataactcataagaaatctaaaagagggcaccaccaatgatgggttgttggtagaacgctgctgggtttgtcaaagcaagttggttgaatggcagcaattgttgcagttgtaagagggtgccagcgttaggcgcagcgtgctggtagaacggcaacaactgtggttgtatcaagaaggtagcagggctcacaccagctagctggctgaatggtagtagttgttgctgctgtaaataagcaggagagttcaatgctgccagttggttgaatggaagaaattgctgggggtaggcagcaggtagctggctgaatggtagttgttgttgttgcaaataagaagcagagttcaatgcagctagttggttgaatggaagaaactgctgttgctgagagtaggcagcaaggtttgctagcacaagttgttgtagttgttgtgccctgatgttttgtgccaa

SEQ ID NO: 7784 - DNA, 463 bp, Zea mays
  unsure (1)..(463): unsure at all n locations; Clone ID: LIB3061-076-Q1-N6-G10
attaatgtctttttttatttttggacaccccaccgacctcaaggcaaaaaatttatttaaaaaaaattaggcatatgcgatgcactgcagggnaccaccctgcacgggttcacgcacgcaacactgttgtacagagacacctatggtggccgaaagtcagcactcgttgcacctatcagacgggtcagcgaccaggcctagcctaatccttgaactggcacaactgttaacaagttaagaaggccgcacgccaaatatgagataactagttctatggtactcggtggggttgctgccaataagccccacaactgaatgctcttagccggctgaatggaaaacattgctggaggaaggcacccactacttgcctgaatgggaattgtggctgcatataagccccacaggacactgcatgcaagtggtcgaatggaacaaactgatgtcgctgagagtataccac

SEQ ID NO: 7785 - DNA, 361 bp, Zea mays
  Clone ID: LIB3061-076-Q1-N6-G11
gggtggggttttttttttttttttttttttttttttttttttttgtaaatttaactttttatttttaggaggccacatacttttatccaaaaaacttatttattgaaaacaactaataagcaatctaaaagagggcaccgccaatgatgtgggggggggggaaggcttctgggtttgtcaaagcaagttggacaaagggcagcaactgttgcagttgtaagaggggggcggggttagccacaaactggggggaaaacggaagcacttgaagatgtgtcaaaaaggaagcggggcttgttgtagctagctggccaaacggcactaatatttgctgctggaaataagcagaggggttcaaagc

SEQ ID NO: 7786 - DNA, 516 bp, Zea mays
  unsure (1)..(516): unsure at all n locations; Clone ID: LIB3061-076-Q1-N6-G12
agatctataatacttanttactgaggggtcgcacatatcagcatgagaactttattattacagtataaatcataaaaaatctagaagatggcaccaccaatggtgggcgattgcaataaggtggtaggattcgtgaaagcatgttggctaaatggcagcaattgttgttgttgtaagaaggcaacaatgtttgccacattatgtgggtagaatggcagcaattgttgctgttgcaagaaggcattaatgtttcccacaacctgtgggtaaaatggcaacaattgttgttgtcgcaagaaagaagcaatgttttccacagcttgcagatggaatggcagaagctgttgttgcagtaagaaggcatcagggctcccgacaagttggttaaatggtagtagttgttgtgcctgcaagtagacagcagggttcaccccagctagttgattgaatggaagaaattgttgttgctggagataagcagcaaggttcgctgcaactacttgattgattgttggt

SEQ ID NO: 7787 - DNA, 452 bp, Zea mays
  Clone ID: LIB3061-076-Q1-N6-G2
ggggaccaaagcacactagaatgggaaaataacttcttattttggggggcacatacatcagccaaaaaattcattatgggattacaactaaaaagcaatctaaagggggccccgccaaggaggggttggggggagaagggtggtgggtttggaaaagcaagggggacaaagggcagcaactggtgcagttgaaaaaggggtggggggttagccacaaactggtgggaaaacggaagcacttgttgttgggtaaaaaaggaagcggggcttggtgtaactagctggccaaaggggagaagtatttgctggtggaaataaacagagggggtcagggcggccaattggttaaatggaaaaaaagttgctgctgaaagaaggcaatacctagctggctgaatgggagaagttgttggtgctgcaaaaaagcagcagggttcaatataaacaggggg

SEQ ID NO: 7788 - DNA, 517 bp, Zea mays
  Clone ID: LIB3061-076-Q1-N6-G3
agaatctagaaaagtactttcttatttctgggacgccacaaacatcatccaaaaacttcattattgaactataactcataagcaatctaaaagaggcaccaccaatgatgggttgttggtagaacactgttgggtttgtcaaagcaagttggttgaatggcagcaattgttgcagttgtaagagggtgccagcgttaggcatagcgtgcaggtagaacggcaacaactgttgttgtgtcaagaaggcagcagggctcacatcagctagctggctgaatggtagtagttgttgctgctgtaaataagcagcagagttcaatgctgctagttggttgaatggaagaaattgctgggggtaggcagcaactagctggctgaatggtaattgttgttgcaaataagcagcagagttcaatgcagccagttggttgaatggaagaaactgatgttgctgagagtatgcagcaaggtttgctagcacaagttgttgtagttgttgtgccctgatgttttgtgc

SEQ ID NO: 7789 - DNA, 460 bp, Zea mays
  Clone ID: LIB3061-076-Q1-N6-G4
ggaacaaaacttttttcttttcatttcaattggtcattcagggcattgctcacactgacactgccacccatggggatgcgtgacacattattacccaatcatcgccgctaaatgactcaactagctagctagccagcggctatactacagcacatagtttcttcagggggggacacccccggcagcagcgtaggggtatggagtcggctgctgcaggccccacatcgccgtcagttgctgcgctatttgcgccgccaacagccccgcgacctggccgctttgcggctgctgctgcaggatggactggaggaccaaacccaaaatcgcctggtaccggggctgcggctccacctgcctgagctggtggcaacactgctgccgcaaccactggcactgaggcgagcagtagggcgtccccctcgggctgcactgatgcctcaaaaactcgacccactggccc

SEQ ID NO: 7790 - DNA, 521 bp, Zea mays
  Clone ID: LIB3061-076-Q1-N6-G5
agaaatgtactttcttatttctgggaagccacaaacatcagacaaaaactttattattgaactataactcataagaaatctaaaagagggcaccaccaatgatgggttgttggtagaatgctgctgggtttgtcaaagcaagttggttgaatggcagcaattgttgcagttgtaagagggtgccagcgttaggcgcagcgtgctggtagaacggcaacaactgtggttgtgtcaagaaggtagcagggctcacaccagctagctggctgaatggtagtagttgttgctgctgtaaataagcaggagagttcaatgctgtcagttggttgaatggaagaaattgctgggggtaggcagcagatagctggctgaatggtagttgttgttgttgcaaataagaagcagagttcaatgcagctagttggttgaatggaagaaactgctgttgctgagagtaggcagcaaggtttgctagcacaagttgttgtagttgttgtgccctgatgttttgtgccaataaa

SEQ ID NO: 7791 - DNA, 240 bp, Zea mays
  Clone ID: LIB3061-076-Q1-N6-G6
ctgggaagccacaaacatcagacaaaaactttattattgaactataactcataagaaatctaaaagagggccccaccaatgatgggttgttggtagaacgctgctgggtttgtcaaagcaagttggttgaatggcagcaattgttgcagttgtaagagggtgccagcgttaggcgcagcgtgctggtagaacggcaacaactgtggttgtatcaagaaggtagcagggctcacaccagct

SEQ ID NO: 7792 - DNA, 455 bp, Zea mays
  Clone ID: LIB3061-076-Q1-N6-G7
atcgagaaaaatcccaatcaatatattgattatttctaggaaacacatgtcggtatgagggccccattggcgagtccctctcatatgtaatctaaaagatggcccccccaaccatgggttgctgcaaggcagggttcatcaaaaaaaaccggttgtatggcaacaattgttgttgctgctgcaggaagggacccaccaatgggttacccactgccaatggattaaaaaactgttgcccctgttgtaggtccccaccaaagtttgacacaccccgttggttgaatggaaacaactgttgtaagtaggcaacagggtttgccacaactagctgagtcaaagctggtacaatttgttgcaacaaccgttgttgtaggtacctaggggcattgcccaccccgagcgggctaaataaaagaaattgtaggtaaaccgcagggttcaccatggctagttga

SEQ ID NO: 7793 - DNA, 515 bp, Zea mays
  unsure (1)..(515): unsure at all n locations; Clone ID: LIB3061-076-Q1-N6-G8
agatctataatacttanttactgaggggtcgcacatatcagcatgagaactttattattacagtataaatcataaaaaatctagaagatggcaccaccaatggtgggcgattgcaataaggtggtaggattcgtcaaagcatgttggctaaatggcagcaattgttgttgttgtaagaaggcaacaatgtttgccacattatgtgggtagaatggcagcaattgttgctgttgcaagaaggcattaatgtttcccacaacctgtgggtaaaatggcaacaattgttgttgtcgcaagaaagaagcaatgttttccacagcttgcagatggaatggcagaagctgttgttgcagtaagaaggcatcagggctcccgacaagttggttaaatggtagtagttgttgtgcctgcaagtagacagcagggttcaccccagctagttgattgaatggaagaaattgttgttgctggagataagcagcaaggttcgctgcaactacttgattgattgttgg

SEQ ID NO: 7794 - DNA, 445 bp, Zea mays
  Clone ID: LIB3061-076-Q1-N6-G9
ggtggggtttttttttttttttttttttttttttttttttttttttttttttttttttttttttttttttttttttttttttttttaaaagggaaatggccccgaggaaacgcttctgggtggaaaaagcccggaagaattacagccaaaagggggggcccaggacccccaattcagggggaaaacagaaccggacgaaaagacccggggggttctggtttcgggggcctaacttccccggtctggcccgggaaggagggccccccatcatggggggggggcccgggggcatctaaaactatcagttcaaggggagccgaggccacgggcgggggttattgggggccggggagggggttgacccaagcgttgcggagctggagcccaacgggggccccaaaacacttggcccgcgcgagggaaaagggcgtgcaaaacccggccg

SEQ ID NO: 7795 - DNA, 497 bp, Zea mays
  Clone ID: LIB3061-076-Q1-N6-H10
ggccatccaaatggacgagcaatgtcatcaaaatagttcaaacgggccatgctatcgtttcacaatgcattattcaaaccgagaacacacaaaaaaaaacttcccacaaacacttggctatgcgacacacctcaaacaatgtgttcagccagggccaggatcttgaggggcttcttcttcctcagctcgggggggacggggccaaaaacccgggtgccgatcagctccccctttttgttcacgaggaccaccgcgttgtcgtcaaactggacctcgctgccatcgctgcgtcctttcttcatgggggcacggacgaccaccccgtaaactacgtctcctttcttgaccttgccacgaggctgggcctcctttacggatcccatgatcatgtcccccagccttgctcctttcttccccctcagggactggatgcacatcacccgcttggccccggagttatcgaccaccttcaggttagtcctcatctggatgaatgt

SEQ ID NO: 7796 - DNA, 547 bp, Zea mays
  Clone ID: LIB3061-076-Q1-N6-H12
ggggtgggttttttgcaaaatatgaatctattcgatggccacgaccctagcagcatatacatacatcaacacacatgacatgtagcttcagttctggtggtgtgtatcagcgtatgtacagacagcgaatggaatcgctcttttttcagaagggttatgcatatgcacaagctggtaagctagcttgcttgatccgtaaaccatacactacattacagctgcagatggatcgtagatttgggccgctgtggcatgatcatgcccagcccagggtggcacaccttaagctgcgcctgtccagagaaacgtcaggcctggctcactctggtcgcgatggcagaagcatactcggagatcgttggatcaggtgactgcctgaggtggacgatgacggggagcagctccgaagaccgtaggaagttcctgcagatggcgtggtcgcacatcttgcgcagggcgaagagcacgattcttagcggagattcggttagagcatctcgtctgttggggctcagggcaacagtagagtaactgccgaccatcttca

SEQ ID NO: 7797 - DNA, 531 bp, Zea mays
  Clone ID: LIB3061-076-Q1-N6-H2
taaatctcaatcaatatattgattatttctaggaacacatgtcggtatgagggcaccattgtcgagtacatctcatatgtaatctaaaagaggcacctccaacgatgggttgctgcaaggcagggttcatcaaagagaactggttgtatggcagcaattgttgttgctgctgcaggaaggtagcgaccaatgggttagccactgccaatggattaagtaactgttgtcgctgttgtaggtacgcagcagagtttgacacagccagttggttgaatggaagcaactgttgtaagtaggcagcagggtttgccacagctagctgagtcagagctggtacaatttgttgcagcaactgttgttgtaggtacgtaggtgcattgcccaccgcgagcgggctagatgaaagtagttgtaggtagacggcagggttcaccatggctagttgactgagcactggcataaactgttgcagctgttgttgttgctggtatgcagctacgttcgccaaagcaagtgggttggatgcaagca

SEQ ID NO: 7798 - DNA, 531 bp, Zea mays
  Clone ID: LIB3061-076-Q1-N6-H3
agtcaaccacaaacagatctttcattattttcagataagatgggtacaccatgcaactaaaatcagattcatcatatacttacaacccgaaatagcgagcgggcaattcaggtttcgagtattttgcacctaaccgccagcaaaacacactaacgtcacggttcattctcgcaacaaaaaactggatttgacaccattttggacaacgaaaacacgaggaatgctacacaccacacaaagaatagacagactcagccatggttccgagggctggagagtggagatgaccgaaagctggcacaagaaaggttgtgatctgaagatccaccactgcactaggcaatgccattgtccggggtaacttaggcaggatttgcatggcatgccacgtacagttgagatacgtacactgcaggtttcttcgttcctttttttcacctgccttatgaaagcaaatggttgcgccctggtgagtgccagccatgcttcactcctcagcaacacgactcttggcttcgtccacattgctgg

SEQ ID NO: 7799 - DNA, 511 bp, Zea mays
  unsure (1)..(511): unsure at all n locations; Clone ID: LIB3061-076-Q1-N6-H5
ggaagacacatatataattatagagtgtatagagataaatgtcacaataaaatcagagtacttattacatagcggaagtcttacaaaataaaagatgaatatagcaggaactaaaatctatccttggcgccagaaagctgactgggagacgccacctagatcatctcgaaagcctcagtgttaggcggctcctcttcgaccacatgttcttctccttcaacgagctcctgctcagtagtctctaccagctgaacctcaggatcctctgtgacttgctcgtcatattgtttgatatcatactgcatatatgntcgacgtcaccgtgcgccgcggctagagacagcaatgaataaatatccaccaggtattactatctcatacacatacctaagtaacaaatgacctaaacagattccacgtgtttccagaggccaatctggttgggtacaagtattccaagtgtgccagaaatgaaagccattagcttcataagttctcagtcagcactaca

SEQ ID NO: 7800 - DNA, 532 bp, Zea mays
  Clone ID: LIB3061-076-Q1-N6-H6
aattacaattagtattcttattcaaatatcatagtacaaacatcataatgtatggtactttattgcttaacaccgttataggagtataacggctaggtagacacaattcttcaattgcaaacaccactaatgtcattgctgctgcatggattattttggtagtatgagtggtacaagccgcacattgatggtaggtattgtgctgctgtcaagattgccaccgcactttgagtagcttgttgagatccacataactcacatggttgttgttgttgctcctcctggattatggattgaaccatgttgtagattgcttggtgaatgtattgtggctcaatctgcctaagatcatgacaacattgttgctgcaatacctggcagctacttggttgtatcaaacgtgattggagaaaaggcattaccaaagggctgcactgctgccttaggaattcatgacaattttttagatttgagctactgctatagtagttatagctgcaccttgtagtctgttgctgctcctggcaatgac

SEQ ID NO: 7801 - DNA, 511 bp, Zea mays
  Clone ID: LIB3061-076-Q1-N6-H7
gattcattaaaaccaaaactttattatgaccatgcatatattattggtcataccacacatgataatgtgtgtcgtcttactgcattattacatatatagatagagagagatggatagaggagatttcccaaatatcatgaatcagtagtagggcggaatggcagcggagaccccacaggggttggtgcggtagctgggcagctggtactggtagagtccacccatggccggcatgttctgcgccatcatcatggccatggggttgagaccctgggctgccagcagctgctgctgctgctgcatcaaagctggctcgtacaggctgctgctggcggcagcggcacgctcaagctgcatcatcatctgcagctgctgcgcgacggactgcacgtccatcatcctcatctgctgctggcagcactgttgccggagcggctggaacatggcgctcggctgcccacacccggcgtagtagggcgccgccgccagcgggctgcactgcggctgcctc

SEQ ID NO: 7802 - DNA, 505 bp, Zea mays
  Clone ID: LIB3061-077-Q1-N6-A1
agaaagtactttcttatttctgggaagccacaaacatcatccaaaaacttcattattgaagtataactcataagcaatctaaaaggggcaccaccaatgatgggttgttggtagaacgctgttgggtttgtcaaagcaagttggttgaatggcagcaattgttgcagttgtaagagggtgccagcgttaggcgcagcgtgcaggtagaacggcaacaactgttgttgtgttaagaagggaacagggctcacatcagctagctggctgaatgggggtagctgttgctgttgtaaataagcagcagagttcaatgctgccagttggttgaatggaaaaaattgctgggggtaggcagcagctagctgactgaatggtagttgttgttgcaaataagcagcagagttcaatgcagccagttggttgaatggaaaaaactggtgttgctgagagtaggcagcaagggtttctagcacaagttgttgtagttgttgggccttgatgtttt

SEQ ID NO: 7803 - DNA, 512 bp, Zea mays
  Clone ID: LIB3061-077-Q1-N6-A10
aagatagaaactctctaatccacacgccaatacatttgcgcataaatcttgaatgttacaaatgatcaatttgtgacaatacatcaaaccaaattgttgaaacccataaggccttgtttggttgcataggtaggaggggattgagggaaagtaaacccatttctattcagttttaagagatttgattatctctaatccgcttcaatccactcctaaccgagaacacctcaaatcggggcctgtcactctagctacttagcatctcaaggacatttcccatggtaggccgacgtttcggatcccgctcaatgcacttcagtccgacctctctgcacctattaatcttcatcagctgagactcgttagctagcgccggatcaaataaccctttcgctgatgtaatcatctcatcaactgaaccccattccggtaaatcaacgaaaggtgaagctctcctgccggtaatgatctcaatgatgatgattccaaaagagaacacatcagacatcatt

SEQ ID NO: 7804 - DNA, 535 bp, Zea mays
  Clone ID: LIB3061-077-Q1-N6-A11
ggtgtgtttttttaaaaagtctttcttattctgggagcccaaactcagacaaaaactttattattgaactataactcataagaaatctaaaagagggcaccaccaatgatgggttgttggtagaatgctgctgggtttgtcaaagcaagggggttgaatggcagcaattgttgcagttgtaagagggtgccagcgttaggcgcagcgtgctggtagaacggcaacaactgtggttgtgtcaagaaggtagcagggctcacaccagctagctggctgaatggtagtagttgttgctgctgtaaataagcaggagagttcaatgctgtcagttggttgaatggaagaaattgctgggggtaggcagcagatagctggctgaatggtagttgttgttgttgcaaataagaagcagagttcaatgcagctagttggttgaatggaagaaactgctgttgctgagagtaggcagcaaggtttgctagcacaagttgttgtagttgttgtgccctgatgttttgtgccaataaatgcacca

SEQ ID NO: 7805 - DNA, 357 bp, Zea mays
  unsure (1)..(357): unsure at all n locations; Clone ID: LIB3061-077-Q1-N6-A2
ccttgttgtggggggggggtgttcctttttggggggggggggaaaaccaaacgggttttttgcccctcttttttgggggggggggccccaggagatttccgggggggtgtgaatcggtttttgggcaaaatggaaggggggaggcctagggggggattttggaaaaacccgggatattcgggagggggccggggggggtacaaaacccccgggggggggggggggttaaaccgggggataaaaaggggggaaaagggggggncttggggtaaaattttttttgggggggaaaaattttcaaaaaaagggggggtagaaatggggggggggaaaaaaaaggggtttgggggggggggg

SEQ ID NO: 7806 - DNA, 244 bp, Zea mays
  Clone ID: LIB3061-077-Q1-N6-A3
gcgtatgaacagctcgctttcgattgcattattattgatttgttcttgtacaaaatacatcggtaccacaattacatcaaggatgaaacgaaaaaggggggctgcaacatactatcagatccctccatccagtaaattttgtaccttcagttacaggacacacggaggtatgatttccagtcctacgacgacaacaacaacaacaacaggagacacaagaaatagctactacatctattatgat

SEQ ID NO: 7807 - DNA, 528 bp, Zea mays
  Clone ID: LIB3061-077-Q1-N6-A4
aaatctcaatcaatatattgattatttctaggaaacacatgtcggtatgagggcaccattgtcgagtacatctcatatgtaatctaaaagatggcacctccaacgatgggttgctgcaaggcagggttcatcaaagagaactggttgtatggcagcaattgttgttgctgctgcaggaaggtagcgaccaatgggttagccactgccaatggattaagtaactgttgtcgctgttgtaggtacgcagcagagtttgacacagccagttggttgaatggaagcaactgttgtaagtaggcagcagggtttgccacagctagctgagtcagagctggtacaatttgttgcagcaactgttgttgtaggtacgtaggtgcattgcccaccgcgagcgggctagatgaaagtagttgtaggtagacggcagggttcaccatggctagttgactgagcactggcataaactgttgcagctgttgttgttgctggtatgcagctacgttcgccagagcaagtgggttggatgca

SEQ ID NO: 7808 - DNA, 175 bp, Zea mays
  Clone ID: LIB3061-077-Q1-N6-A6
ccaatcatcttttttccttatatattattcctttccatttcaatggttcattcaggtcattgctcacactgccacccatggtgatgggtgacactacgttactcatcgccgctaaatgagtaaactagcgagctaggtagctagtcagcggctccattacattattactacagta

SEQ ID NO: 7809 - DNA, 434 bp, Zea mays
  Clone ID: LIB3061-077-Q1-N6-A8
aacaagggaagagccggacaaaggccggctgtgaacaagggaaaaaccggggaggggggccccgaacgaaaggggacagaaaggggaaaaggggccaagggggcacgaacaaggcgggggctgggaggagagccccacggggggacccgggagcaagggccgggccacaaggggggcaaaagggggccgggggggaagcgccaccaggggcccaggagggccagggaatgttggggacccagcgcaccccgggagctggggctaagagggaatagggaacccggttaaagcggggtaagggcgcctcaagggcgagggcacggggggggaaagggggattaagggcccggacccggggggggacccggggacccccgggggagtccgggcggggccccgggggggcacaaacttagccgaaacagggggggaaa

SEQ ID NO: 7810 - DNA, 530 bp, Zea mays
  Clone ID: LIB3061-077-Q1-N6-A9
aaagcttgttactcccaatcttaggagaagtaattatcgaacacccttggagaccaatatcacattagaatctggaaatgtaacttcttatttctggttggccacatacatcatccaaaaactttattattgaattacaactaataatcaatctaaaagagggcaccaccaatgatgtgttgttggtaggaggctgctgggtttgtcaaagcaagttggacaaagggcaacaattgttgtagttgtaagagggttgcggggttagccgcaaactgcttgtagaaaggcagcaactgttgctgtgtcaagaaggaagcacgacttgctgcagctagctcgctaaatggcagtagtatttgctgctgcaaataagcagcggggttcagtgcggccaattggttaaatggaagaagttgttgttgctgagagtaggcagtagctagctggctaaatggtaatagttgttgctgcaaataagcagcagggttcagtgtagacagttggttgaatggaagaaattgttgttgctg

SEQ ID NO: 7811 - DNA, 478 bp, Zea mays
  Clone ID: LIB3061-077-Q1-N6-B10
cagaaatatattgagataaatctcaatcaatatattgattatttctaggaaacacatgccggaatgagggcaccattatcgagtacatctcatatgtaatctaaaagaggcacctccaacgatgggttgctgcctcgacaagacagggtttatcaaagagaactggttgtatggcagcaattgttgctgctgtaggaaggcagcgaccaatgggttagccactgctagtggattaagtaactgttgtcgctgttgtaggtacgcagcagagttcgacatagtcagttggttgaatggaagcagctgttgcaagtaggcagcagggtttgccacaactagctgagtcagagctggtacaatctgttgcaacaattgttgttgcaggtatgtaggtgcattggccacagcgagcgggctagatgaaagcagttgttgctgttgtaggtaggcggcagggttcaccatggctagttgactg

SEQ ID NO: 7812 - DNA, 530 bp, Zea mays
  Clone ID: LIB3061-077-Q1-N6-B2
gaactaaaaagtactttcttatttctgggaagccacaaacatcagacaaaaactttattattgaactataactcataagaaatctaaaagagggcaccaccaatgatgggttgttggtagaatgctgctgggtttgtcaaagcaagttggttgaatggcagcaattgttgcagttgtaagagggtgccagcgttaggcgcagcgtgctggtagaacggcaacaactgtggttgtgtcaagaaggtagcagggctcacaccagctagctggctgaatggtagtagttgttgctgctgtaaataagcaggagagttcaatgctgtcagttggttgaatggaagaaattgctgggggtaggcagcagatagctggctgaatggtagttgttgttgttgcaaataagaagcagagttcaatgcagctagttggttgaatggaagaaactgctgttgctgagagtaggcagcaaggtttgctagcacaagttgttgtagttgttgtgccctgatgttttgtgccaataaatgcac

SEQ ID NO: 7813 - DNA, 404 bp, Zea mays
  Clone ID: LIB3061-077-Q1-N6-B3
aaatggttaattcaggtaatggctaaaactgacactgccacccagggggatgcgggacaaattattactaaatcatcgccgttaaaggactaaactagctagctagccaggggttatactacagaaaatagttttttaagggggggacaccgccggcagaagcgtaggggcatggagtcggttgttgaaggccgaaaatcgccgtaagttgttgggttatttgcgccgcaaaaagccccggaacctggccgttttgcggttgttgttgcaggatggactggaggaccaacccaaaaatcgcctggaaccggggctgcggttccacctgcctgagctgttggaaaaactgttgccgaaacaactggaactgaggcaagcagtagggcgtccccgtcgggctgaac

SEQ ID NO: 7814 - DNA, 536 bp, Zea mays
  Clone ID: LIB3061-077-Q1-N6-B9
aggaggcaactgatcaattcaacacctttattgcaacaattcaattaatcagctacaaattgaataaaaaccttatgcgctcctttcgactttatatagcattcagctaattgttgagtcaatcacaggagaagttcgcgaaaaactatctctatcaactccatgctagatagcctatagtaacaatcccaacacaaaaaaggaacaatttgttcactccttaacgccaaccttgctcaacacatggccatgcatcaatcacccctcaattgctatctgtgaagtctgcgtcaatgacatccccatcattctgcgttggtccggtaccaggcgtaggtccggcctcagcaccaggagtaggcccagcagcactggcaccaggctggttatacattgcctggccaatctgcatcacctcctggttcagagcagccatggcatctttcatactctgtgttgatccaccagaaatggcgtctttgagctcctggagcttcacatccaccttctctttcacaggagcggggactttgtcc

SEQ ID NO: 7815 - DNA, 463 bp, Zea mays
  Clone ID: LIB3061-077-Q1-N6-C1
ggccaacaaaaaaacaaaggggccgatggattcattaaaaccaaaactttattaggaccccgcataaattatggggcaaaccacaaaggaaaagggggggcgccttacgggcttattccctatatagaaggggggagaggggtaggggggatttcccaaaaatgaagaaataacagtaggggggaagggcagcggaaaccccacagggggtggggcggaaactgggcaactgggactgggagagcccccccaggggcgggatgttctgccccaatatcaaggccaagggggtgagaccctgggctgccaaaaactggtggtgctgctgcaaaaaaaatggctcaaacagggtgttgttggggggagcggcaccccaaagctggaaaaatatttggaattgttgggcaaaggactgcacctccaacaaccccaactggtgggggcaacactgttgccgggagcg

SEQ ID NO: 7816 - DNA, 471 bp, Zea mays
  Clone ID: LIB3061-077-Q1-N6-C10
gaaaaaggaaaatcttgggggacccattatccgggaccacttattatcgttggaccacgagctcccgatcccgaccaactaactggccacaaagcaatcgccaaaaacaacgatgtccactcctgacaacccatatcccaatcaatctaccacctttccggccgttccacactgatcggatgggggccttaaccttccacccggccgcctttttcccacgaccaccagaggcagcagtgacagcgaggcagccgctccaccattactggtcgccgcctttccggacccttgtccctaaaactacaaaaccgggccttttcagggccaggtcctccaacgggctcccgcaaatcgggggggccttgttcggcagcagcaatggtatcgggtcgcgcgccttgcctgccgttggaatatgcgagcgtgcatgatgaccgactgtacccaaaatcacgtactggttcctggccc

SEQ ID NO: 7817 - DNA, 452 bp, Zea mays
  Clone ID: LIB3061-077-Q1-N6-C11
catggatagtttacatgggtattgttgtaagtcgtcgcaacgcacgggcaaccgactagtaataataataaaagggttttgtctgtgtgcgtgcgtggatgtaggagcgggtactttagattgggcatcccgcatccatacccttgcgcggaggtgaagagatcatccgggcgagaagacaagttaattttatttttgtctgtgcgcgcgcgcgtgggccgcttcggtcacacgcgtcgctcggcgtcgcgacgccgacgtccggcgaaggcgacgggtacggtccgacttgcgcgtcaggaacagcggacacctaccggctaccgccgcctcctttccacttccaccggcttgtgttctcgcccgggcagcgccagcgccgaggaggggaagctccgtcatcaatcggccggccggggtccggtgcccaaggaaagcttagcgatgcggag

SEQ ID NO: 7818 - DNA, 544 bp, Zea mays
  Clone ID: LIB3061-077-Q1-N6-C12
gtgttgttttttttttttttttttttttatcgaacacccttggggaccaatatcacattaaaatctggaaatgtaacttcttatttctggttggccacatacatcatccaaaaactttattattgaattacaactaataagcaatctaaaagagggcaccaccaatgatgtgttgttggtaggaggccgctcggtctgtcaaagcaagttggacaaagggcaacaattgttgtagttgtaagagggttgcggggttagccgcaaactgctggtagaaaggcagcaactgttgctgtgtcaagaaggaagcacggtttgctgcagctagctggctaaatggtagtagtatttgctgctgcaaataagcagcggggttcagtgcggccaattggttaaatggaagaagttgttgttgctgagagtaggcagtagctagctggctgaatggtaatagttgttgctgcaaataagcagcagggttcagtgtaaacagttggttgaatggaagaaattgttgttgctgagagtagggagaaaggtttgc

SEQ ID NO: 7819 - DNA, 519 bp, Zea mays
  Clone ID: LIB3061-077-Q1-N6-C2
atcaaaatgcaaagagctttatttgacaaccatgtatgtacatacagacacgacgacgatcgaacatataagaccatgataggtcatatgacatatataagacctttatctagcatatctgtagtacccgtcctgctgctgaaaccagactaaagttggcgcaggtagacaccgatcgcagcgacgagcctggtcgtcgcgcgtccatagaatcccacgatgctgctgccgatgggcgcggtgatgcaaaaacgtgtgccgctctcgatgccccatggcccccaagctctggcggtgctggtgacaatcctgaacgaggtaagggtagtcgcaccttcgaatgcgccgtacgttccagaaacttccttgacgtattcagcgtcgccaagatcgagcttccggacgttgccgccaagtccaccccatcgcccagcggtgcgcgtctgaccacctgtgtcggtactgtaggtgaactcgatggagtccacggcaacgccggcgcggacggtcaggctctgc

SEQ ID NO: 7820 - DNA, 530 bp, Zea mays
  unsure (1)..(530): unsure at all n locations; Clone ID: LIB3061-077-Q1-N6-C3
cacattaaaatctgngaaagtaacttcttatttctggttggccacatacatcatccaaaaactttattattgaattacaactaataagcaatctaaaagaggcaccaccaatgatgtgttgttggtaggaggccgctcggtctgtcaaagcaagttggacaaagggcaacaattgttgtagttgtaagagggttgcggggttagccgcaaactgctggtagaaaggcagcaactgttgctgtgtcaagaaggaagcacggtttgctgcagctagctggctaaatggtagtagtatttgctgctgcaaataagcagcggggttcagtgcggccaattggttaaatggaagaagttgttgttgctgagagtaggcagtagctagctggctgaatggtaatagttgttgctgcaaataagcagcagggttcagtgtagacagttggttgaatggaagaaattgttgttgctgagagtagggagaaaaggtttgccagagctacttnggttgatcacaggtagcacgagttgct

SEQ ID NO: 7821 - DNA, 333 bp, Zea mays
  unsure (1)..(333): unsure at all n locations; Clone ID: LIB3061-077-Q1-N6-C4
aggaaatgtactttcttatttctgggaagccacaaacatcagacaaaaactttattattgaactataactcataagaaatctaaaanagggcaccaccaatgatgggttgttggtagaacgctgctgggtttgtcaaagcaagttggttgaatggcagcaattgttgcagttgtaagagggtgccagcgttaggcgcagcgtgctggtagaacggcaacaactgtggttgtatcaagaagggagcagggctcacaccagctagctggctgaatggtagtagttgttgctgctgtaaataagcaggagagttcaatgctgacagttggttgact

SEQ ID NO: 7822 - DNA, 511 bp, Zea mays
  Clone ID: LIB3061-077-Q1-N6-C5
aggggaacggttaagacgttcaaagatagcaaaaaacacgacagtcagcaattcaaacaaaatatgatcttaagacaacattgacctacacaaagaaccaaaagcagataacgccatgctgaaccaccaataccgataaaactttcttagatcttctcataatatttgacagacttcaagcagaatgaaacaaggtaggccttcagctctgggagaccatctcgtggggcttgtcacaagagagcacagccaaagcgacttcctccgaactccaaaactcggtttagaagaccatctcgtggggcttgtcaccatccctaagggagaaccgagcgccaagataggccttcagctctgggatagcctcaatagccttgatcagagcagcatccacggccttctggtcatcctttttgaaatcaggcagagacttggacgcctccttctctgtctcaaaaagctcaccctccgtcttcttcaccttctgctttttctccctggcaaagtactt

SEQ ID NO: 7823 - DNA, 365 bp, Zea mays
  Clone ID: LIB3061-077-Q1-N6-C7
gggggcggggggggccccccggggaatcgggggggggcccggggggggccccccttttccctaagggggggggtaaaaagggggggggaaaaaaggggaaaaggggttcccgggggaaaaaggtttccccccaaaaaacccccaaaaaaaaggggcgggggaaaaaaaggggaaaccggggggggcccaaggggggggcccccccaaaaaaagggggggggccccacggccccttttcaaaggggaaaacccgggggccccccgtttaaaaaaaaacccccccccccgggggggggggggtttttatttggggcccccggggggtttttttttttcccgggggggggggcaaaagtggtgggccc

SEQ ID NO: 7824 - DNA, 529 bp, Zea mays
  Clone ID: LIB3061-077-Q1-N6-C8
tagaatacaaatttaattagtattgcacaatgatagatccacatcacataaaccatcaacaagcaccacaacaaaatcattcacaaaacctacacatgttattatgttttgcacatatttacaaacactttacaaaatcattcacaaaagtactaacgcttcaagtgattcgcaaaagccttcattgagcaactcaacaggattttccatagatctttctctgcagcttttgccgcttcattgagcaactcaacaggattttccagataacttatgtattcagaagagagacgtggagaaatgtttatatccagctgaacatctttgtatggtactgggactaggcaaaactgatcaacacgagcaagtagttcagaataggaattatcttcttgaccatgtaagatgcatctcgcaatactgagaagtggtcaactctactgatgcaaccatcaggctcctgttattccagatccctgaaaaacaagatagacagcaggagagaagtgtacaggattccttgcttaag

SEQ ID NO: 7825 - DNA, 425 bp, Zea mays
  Clone ID: LIB3061-077-Q1-N6-C9
aaaaagggggggaggcacagagggttaccaaaaaaaaaaggggggggcccaaaaaaaaaaaagaacacagggaaaccatcaccaaaaaaaaaaatacccccttgagccaaaagggggggggggctggggggaaataaaaacaggggggggggggattttaaaaaaagaaaaaggcctgccatcaccagcaaggaaaatatccttgaaagccccccccctggggataaaaggcaaaacaggccccgggggggggacaattatatccaaaagggacggccctggaacccaaaacaatttttttaaggggggggggacttttttttttttttgaaaacggaccccgggaaagttaaaccctttggcaaaccaaaaaaaaaggggaaaaacccaaattccattcctggggggtcccaaatatggggccc

SEQ ID NO: 7826 - DNA, 544 bp, Zea mays
  Clone ID: LIB3061-077-Q1-N6-D1
ctaaaaagtactttcttatttctgggaagccacaaacatcagacaaaaaactttattattgaactataactcataagaaatctaaaagagggcaccaccaatgatgggttgttggtagaacgctgctgggtttgtcaaagcaagttggttgaatggcagcaattgttgcagttgtaagagggtgccagcgttaggcgcagcgtgctggtagaacggcaacaactgtggttgtatcaagaaggtagcagggctcacaccagctagctggctgaatggtagtagttgttgctgctgtaaataagcaggagagttcaatgctgccagttggttgaatggaagaaattgctgggggtaggcagcaggtagctggctgaatggtagttgttgttgttgcaaataagaagcagagttcaatgcagctagttggttgaatggaagaaactgctgttgctgagagtaggcagcaaggtttgctagcacaagttgttgtagttgttgtgccctgatgttttgtgccaataaatgcaccaaaggtaactgatgt

SEQ ID NO: 7827 - DNA, 491 bp, Zea mays
  Clone ID: LIB3061-077-Q1-N6-D2
aaattaaaggattcaattatttagaattataattttattttacgggaaaaacaggaacggccccatgtagtcagcccgcaaacccacgagggccatctcatagcaacgctagacatccctccatgcagctagctacttgggtagaccaaaactgacagagccccacacgggaaacgtatggacttggcctattcatatgataatttaacgagaaaggggcgaatcacagcttgggaccctgttctcaattccaagggtcgcaatataacaagcgattcggcttattaaaatcaccccccgatccaagacccatgataaataaattggtgcttgcaatctactgcctcaagctttgcaaaatatactgggcatacaggtccatggagtactgaatggcttcttgagctgttgtcgcgggcaaaaatgcatcaactgcgacttctttggtctcggttttcttggaaacttaaaaaaagcgcttgatcttttgc

SEQ ID NO: 7828 - DNA, 529 bp, Zea mays
  Clone ID: LIB3061-077-Q1-N6-D3
agaaatgtactttcttatttctgggaagccacaaacatcagataaaaactttattattgaactataactcataagaaatctaaaagagggcaccaccaatgatgggttgttggtagaacactgctgggtttgtcaaagcaagttggttgaatggcagcaattgttgcagttgtaagagggtgccagcgttaggcgcaacgtgctggtagaacggcaacaactgtggttgtgtcaagaaggtagcagggctcacaccagctagctggctgaatggtagtagttgttgctgctgtaaataagcaggagagttcaatgctgccagttggttgaatggaagaaattgctgggggtaggcagcaggtagctggctgaatggtagttgttgttgttgcaaataagaagcagagttcaatgcagctagttggttgaatggaagaaactgctgttgctgagagtaggcagcaaggtttgctagcacaagttgttgtagttgttgtgccctgatgttttgtgccaataaatgcaccaa

SEQ ID NO: 7829 - DNA, 538 bp, Zea mays
  Clone ID: LIB3061-077-Q1-N6-D4
cagcaaaaaaactttattattgaactataactcataagcaatctaaaagaggcaccaccaatgatgggttgttggtagaacactgctgggtttgtcaaagcaagttggtcgaatggcagcaattgttgcagttgtaagagggtgccaacgttaggcgcagtgtgcaggtagaacggcaacaaatgttgctgtgtcaagaaggcagcagggctcacagcagctagctggctgaatggtagtagttgttgttgttgtacataagcatgagagttcaatgctgccagttggttgaatggaagaaattgccgggggtaggcagcagctagctggctgaatggtagtagttgttgttgctgcaaataagcagcagagttcaatgcagctagttggttgaatggcagaaactgttgttgctgagagtaggcagcaaggtttgctagcacgagttgttgtagttgttgtgccctgatgttttgtgccaacaaatgcaccaaaggtaactgctgttgctgagagtaggcagcaaggtttgctagcc

SEQ ID NO: 7830 - DNA, 476 bp, Zea mays
  Clone ID: LIB3061-077-Q1-N6-D6
aaaaaatatcgagataaatcccaatcaatatattgattatttctaggaaacacatgccgctttgagggccccattatcgagtccatctcatatgtaatctaaaagatggcccccccaacgagggggtgctgccacaacaaggcagggttcatcaaaaaaaactggttgtatggcaacaattgttgctgctgtaggaaggcagccaccaatgggttagccaccgctaggggattaagtaactgttgtccctgttgtaggtacccaacaaagttcgacacaatcagttggttgaatggaagcagctgttgcaagtaggcagcagggtttgccacaactagctgagtcaaagctggtacaatctgttgcaacaactgttgttgcaggtatgtaggtgcattaaccacagcgagagggctagatgaaaacaattgttgctgttgtaggtaggcggcagggttcaccacggctagttgact

SEQ ID NO: 7831 - DNA, 491 bp, Zea mays
  Clone ID: LIB3061-077-Q1-N6-D7
ccaaccaaaatattgattatttctaggaaacacatgccggtttgagggccccattatcgattccatctaatatgaaatcaaaaaaagggcccccccaacgatgggttgctgccacaacaaggcagggttaataaaaaaaaactggctgtatggaaacaattgttgctgctgtagaaaggcaggaaccaatgggttaggccctgctaggggataaaaaaactgttgcccctgttgtaggtccccaccaaagttcaacacaaccagttggttaaatggaaccacctgttgcaagtaggcaacagggtttgccacagttagctgagtcaaagctggtccaatctgttgcaaaaattgttgttgcaggtatttaggtgcattacccacaacgaggagggctaaataaaagcatttgttgcttttgtaggtaggcggcagggttcaccatggttagttaactgacccctggcaaaaactgttgcaattgttgttgt

SEQ ID NO: 7832 - DNA, 519 bp, Zea mays
  Clone ID: LIB3061-077-Q1-N6-D8
gccagtaaaacccgcagcagcgagaaacagcacaattgtattgtatgccaacagttcagacgcacaccaccctttgcagcaatgcagctattttccattaactgatgcactacattagaagtttacatgcccaaacattagcaggtcagagcttccggcgcctatacttacagtctgaaaaaaacaaaagatgccagttttgcacagatgaaaagcacctgcgtgttggttcccttacaaaaaaatcagatacacaagctatgccttaacaaagcgcaaatgatacagacagagcagagcggcacggcaaaatagaatatctgatctataacatcaactacgatgcggagtcactcgacaagtacctcttcactggagctgcaagcacccctaccccatgcggatggaaaagaacaagacaagctgtgaaacacaaaacagccgcaaccgccacagtcgtaacaagtcgcattctcgtggcaccaccaggataagtaacaatcagtgagggcttaagcc

SEQ ID NO: 7833 - DNA, 411 bp, Zea mays
  Clone ID: LIB3061-077-Q1-N6-D9
gaggaaaaaaaaaaaaagggggggggccttaaggggaaaaacccggaaagggggaaaaagggggggggaaaaaaaatttttaaagggaaaaccccaaaaagggaatggggggggaggggaaaattgggggggaagggggggaaaaacccccaaaaggggggggggaatggggcgggggaaaaaaaggcccccccccttgggggggcggggggaaacccaaaaaacaaaaagggggggggggggggcccccccgggaaaagggagaaaaccatgtggaaaaaggggggggaaaggaatgggggcaaaatcggccaaaaaaaaaaaaaaagggggggggaaaaaccggggagaaatggggggggaaaaaacgggttgggaaaaagggtttcccaagggggggaacgggggcca

SEQ ID NO: 7834 - DNA, 431 bp, Zea mays
  Clone ID: LIB3061-077-Q1-N6-E1
aaaaaaaaacccttggggggcaaaaaaaaaaaaaaaatgggaaaagggaggtgtttttttggggggggcaaaaaaaaaaaaaaaaaaaattttttggggaaaaaaaaaaaaaaaaaaataaaaaaaggggccccccaaagaggggttggggggaaaaggggggggggtttgtaaaaaaaagggggaaaaaggggaaaaattgtgggaatttaaaaaggggggggggggtaaaaaaaaaagggggggaaaaaggaaaaaattgggggttttaaaaaaaggaagggggggttgggggagttaggggggaaaaggggggaaatttttggggggggaaaaaaaaaaggggggtaaggggggccaattgggaaaaaggaaaaaaatttttttttaaaaaaggggaagagttagggggggagaaggggaaaagtggt

SEQ ID NO: 7835 - DNA, 533 bp, Zea mays
  Clone ID: LIB3061-077-Q1-N6-E10
aaattgattatgaaacattttctcataacggtataacatacattttgtatataagttatcatagtatactcatattatatattttcattacaacacacgtgcattcagctagtaactactatagatctaatgggagcagagaattatgaaaaaacattatagaagcagtacaagccggtatgaatgaaagtcaaacgaacaagttcgtcacatatagcaaatccatgattaccgactagaactggtgtccatgggtcgtattggaatcccttgcacagatcatgttttcgcaaccaccgcttcctctaaaattggcaaagatggtctccaagtggttccgtcggggccatccatgagggcaattcctatggcagccagttctttccggatctcgtcggatttttcatactgctttgccttccttgctgcagtcctctcttcaatcttctgcaccacaagctcctcggtgatggaagctcgtctcagtgccttatcccgcagctgttgcaaagcctcatgataacttgaaggta

SEQ ID NO: 7836 - DNA, 537 bp, Zea mays
  Clone ID: LIB3061-077-Q1-N6-E4
agaaatgtactttcttatttctgggaagccacaaacatcagacaaaaaatttattattgaactataactcataagaaatctaaaagagggcaccaccaatgatgggttgttggtagaacgctgctgggtttgtcaaagcaagttggttgaatggcagcaattgttgcagttgtaagagggtgccagcgttaggcgcagcgtgctggtagaacggcaacaactgtggttgtatcaagaaggtagcagggctcacaccagctagctggctgaatggtagtagttgttgctgctgtaaataagcaggagagttcaatgctgccagttggttgaatggaagaaattgctgggggtaggcagcaggtagctggctgaatggtagttgttgttgttgcaaataagaagcagagttcaatgcagctagttggttgaatggaagaaactgctgttgctgagagtaggcagcaaggtttgctagcacaagttgttgtagttgttgtgccctgatgttttgtgccaataaatgcaccaaaggtaact

SEQ ID NO: 7837 - DNA, 525 bp, Zea mays
  Clone ID: LIB3061-077-Q1-N6-E5
ggaacaatacttttttcttttcatttcaattgttcattcaggtcattgctcacactgacactgccacccatggtgatgcgtgacacattattactcaatcatcgccgctaaatgactcaactagctagctagccagcggctatactacagcacatagtttcttcagtgggggacaccgccggcagcagcgtaggggcatggagtcggctgctgcaggccgcacatcgccgtcagttgctgcgctatctgcgccgccaacagccccgcgacctggccgctttgcggctgctgctgcaggatggactggaggaccaagccgaagatcgcctggtaccggtgctgcggctccacctgcctgagctgctggcaacactgctgccgcaacgactggcactgaggcgagcagtagggcgtcgccgtcgggctgcactgatgcctcagaaactcgacgcactggcccaggatcggggtgctgccaacgccgcaggttccctgcagctggcacgggcttggatgcggctgttg

SEQ ID NO: 7838 - DNA, 507 bp, Zea mays
  unsure (1)..(507): unsure at all n locations; Clone ID: LIB3061-077-Q1-N6-E6
aaaaccaaactttattatgatgcatatattattggtcataccacacatgataatgtgtgtcgtcttactgcattattacatatatagatagagagggatggatagaggagatttcccaaatatcatgaatcagtagtagggcggaatggcagcggagacgccacaggggttggtgcggtagctgggcagctggtactggtactggtagagtccacccatggccggcatgttctgcgccatcatcatggccatggggttgagaccctgggctgccagcagctgctgctgctgctgcatcagagctggctcgtacaggctgctgctggcggcagcggcacgctcaagctgcatcatcatctgcagctgctgcgcgacggactgcacgtccatcatcctcatctgctgctggcagcactgttgccggagcggctggtacatggncgctcgtctgcccacacccggcgtagtagggncgccgccgccagcgggctgcactgcggctgcctc

SEQ ID NO: 7839 - DNA, 445 bp, Zea mays
  Clone ID: LIB3061-077-Q1-N6-E7
gggaaagggaacctcttattttgggggggccccctccctcatccaaaaaatttttttttggattaccaccaaaaagccatctaaaagggggccccccccaagatgggttggggggagggggcccctcggtctgtcaaaacaaggtggacaaagggcaacaattgttgtagttgaaaaaggggtggggggttacccccaaaccgctgggaaaaagggaacaactgttgctgggtcaaaaaagaaacacgggttgctgcaactagctggctaaaagggagaagaatttgctgctgcaaaaaaacagcgggggtcaaggcggccaattggttaaaaggaaaaaattgtttttgcttaaagtaggcaaaacctacctggctgaaagggaaaaattgttgctgcaaaaaaaccacagggttcaaggtaaacagttggttgaaaggaaaaa

SEQ ID NO: 7840 - DNA, 416 bp, Zea mays
  Clone ID: LIB3061-077-Q1-N6-F1
ggggaaaaaagggaaagggtttgataaaaaattttaggggggggggggggagctgaaaaaaagggaactttaatggtaaaacaaccaggggggaaaccccaaaaaagtttaaaaaatttggggggaaaaaaattttttttggggggattttttttgggggggggaaaaaaaaattttttttataaaaaaaactgggggtttttattttaagggggggggttaatggggggggaaaggggaaacaaggggggggtgtattccaaattttgggggaaaaaaaaaaagagttttaaaaaatttgcgttaaagggaaaggaagttttaaaaaaaaaagaggtaaaactggttgtcccctgaaaaaagggggaaaaaagggttttttaaaaagaaaaaaaggagcctttgggggaaatttt

SEQ ID NO: 7841 - DNA, 536 bp, Zea mays
  Clone ID: LIB3061-077-Q1-N6-F10
caggcacaaaagtggagcatggtctccatggcttcgctcaaagcagcacagtatggtaattaaactgatcaatttacagcatgatgtatccccaaatccaggcccccaatgtcgattcaacatgtaactaacatttgctgctacaacattctaccctacaacattgaaggacacaaaagagcaaaaagaaagaaaaaatgccttggatgacacttttattgctccgatgatctccaacagactgatctgcagatcacgcatgtaaccaggtgctgatcattgtcgaatgtcgagacacacagctgcatgtcgcacgttcacttcatataactgttccactagggagtaaagcatccttgatcactgtgacaattccacctttgatgaagtacccgtctgtctcccttgcagcttcttgaacattgtcagcattgagtatcttaacattgtctccaattcgagcattcttgtcaatgattgctctcctgatgcatgaatttttcccaataccaataggaatgccacctttttcggca

SEQ ID NO: 7842 - DNA, 535 bp, Zea mays
  Clone ID: LIB3061-077-Q1-N6-F11
agaaaaaacgtaaaatttagtaatatataggatgacagatatagttgatccaaagcaggtaatggaaatacaaaggttcataaaaaggtttgctgcaacttctagggcagcttataacagtacatactagcagcacaaatggtcaaggaacagcatgccagacaacgcatcttgcgcccgaacgctcgacttcctgtcaagcggctcttaccataccaaggttacacgatccatcgatgcaataccattgtaggttcttgttttgtagacgcaaacgcagccgatctatatgacagacccatcgttgatggttgcattcttcaagatcaccacgattccagaccttatgtagtacccttcttccgggtgatcagcctcttggatgcccttactgtttgtgatcaccacgttcttcccaatcctagcattcatgtcaatgatacagttccttatctttgtgttccttcctattccaactgggaccttcccagctaacagtagctttgaagcttcttcttcagtttcataggtgtcc

SEQ ID NO: 7843 - DNA, 552 bp, Zea mays
  Clone ID: LIB3061-077-Q1-N6-F12
ggggggggtttttttttcaaataaaaaatttattattgaactataactcataagaaactaaagggggcaccaccaatgatgggttgttggtagaacactgctgggtttgtcaaagcaagttggttgaatggcagcaattgttgcagttgtgagagggtgccagcgttaggcgcaacgtgctggtagaacggcaacaactgtggttgtgtcaagaaggtagcagggctcacaccagctagctggctgaatggtagtagttgttgctgctgtaaataagcaggagagttcaatgctgctagttggttgaatggaagaaattgctgggggtaggcagcaggtagctggctgaatggtagttgttgttgttgcaaataagaagcagagttcaatgaacctagttggttgaatggaagaaactgctgttgctgagagtaggcagcaaggtttgctagcacaagttgttgtagttgttgtgccctgatgttttgtgccaataaatgcaccaaaggtaactgttgtaatagggctgatgattgttggaggaacaagggt

SEQ ID NO: 7844 - DNA, 517 bp, Zea mays
  Clone ID: LIB3061-077-Q1-N6-F2
aagaatctagaaagtactttcttatttctgggaagccacaaacatcagataaaaactttattattgaactataactcataagaaatctaaaagagggcaccaccaatgatgggttgttggtagaacactgctgggtttgtcaaagcaagttggttgaatggcagcaattgttgcagttgtaagagggtgccagcgttaggcgcaacgtgctggtagaacggcaacaactgtggttgtgtcaagaaggtagcagggctcacaccagctagctggctgaatggtagtagttgttgctgctgtaaataagcaggagagttcaatgctgctagttggttgaatggaagaaattgctgggggtaggcagcaggtagctggctgaatggtagttgttgttgttgcaaataagaagcagagttcaatgaacctagttggttgaatggaagaaactgctgttgctgagagtaggcagcaaggtttgctagcacaagttgttgtagttgttgtgccctgatgtttt

SEQ ID NO: 7845 - DNA, 517 bp, Zea mays
  unsure (1)..(517): unsure at all n locations; Clone ID: LIB3061-077-Q1-N6-F3
cagagcagggcaaagcgtcacaacctaaaaaaggatgacaggggaattccctagaataaacgctcctattccagaaaatatggtgaccagtggctgtggggtagcaccccgccccagtcctcaggccgccaccactcatcagattcgagatagaggacctcctggcgctgatcattattcatcgaggtaccattcccacgattatgggcctttgagcccaagcttagggagaagtccgcctcgttatgataatctcccagcagacgggggtgcctggactccagcaggctgcagtacccgggccactacagctggagcctaaaggcgaccgcagtcatagttggcatgccttaacgacttgctgcccaagagaatgagcacggcgacccaaaccagcttggtgaccggagacggcgagcgcacaagcagcgcccccatgacgaaggactcgagggacagcagcgccagccggggcctcctttccctgacgtactccgngatcgcctcgccgaccacc

SEQ ID NO: 7846 - DNA, 525 bp, Zea mays
  Clone ID: LIB3061-077-Q1-N6-F4
cagacaaaaaatttattattgaactataactcataagaaatctaaaagagggcaccaccaatgatgggttgttggtagaatgctgttgggtttgtcaaagcaagttggttgaatggcagcaattgttgcagttgtaagagggtgccagcgttaggcgcagcgtgctggtagaacggcaacaattgtggttgtgtcaagaaggtagcagggctcacaccagctagctggctgaatggtagtagttgttgctgctgtaaataagcaggagagttcaaagctgtcagttggttgaatggaaaaaattgctgggggtaggcagcaaatagctggctgaatggtagttgttgttgttgcaaataagaagcagagttcaatgcagctagttggttgaatggaaaaaactgttgttgctgagagtaggcagcaaggtttgctagcacaagttgttgtagttgttgtgccctgatgttttgtgccaataaatgcaccaaaggtaactgctgtaatagggctgatgattgttgg

SEQ ID NO: 7847 - DNA, 536 bp, Zea mays
  Clone ID: LIB3061-077-Q1-N6-F5
agaaagtactttcttatttctgggaagccacaaacatcagacaaaaaatttattattgaactataactcataagaaatctaaaagagggcaccaccaatgatgggttgttggtagaatgctgctgggtttgtcaaagcaagttggttgaatggcagcaattgttgcagttgtaagagggtgccagcgttaggcgcagcgtgctggtagaacggcaacaactgtggttgtgtcaagaaggtagcagggctcacaccagctagctggctgaatggtagtagttgttgctgctgtaaataagcaggagagttcaatgctgtcagttggttgaatggaagaaattgctgggggtaggcagcagatagctggctgaatggtagttgttgttgttgcaaataagaagcagagttcaatgcagctagttggttgaatggaagaaactgctgttgctgagagtaggcagcaaggtttgctagcacaagttgttgtagttgttgtgccctgatgttttgtgccaataaatgcaccaaaggtaact

SEQ ID NO: 7848 - DNA, 255 bp, Zea mays
  unsure (1)..(255): unsure at all n locations; Clone ID: LIB3061-077-Q1-N6-F6
gatgactagcgngagaaatggaatgaacaaagatatgtacacatcaagcacatacacgactatatgacataaatatgcactgcacacatgtatgcttgagcatgagctgatgctactgctagcgctacggagttgatccaaaagctgtgagctagacaaaaattcggcacacactcgactcgatcaaaagatgctgctgctactgatctatatatgtagtgtagcttctagcaagccacctgctccttgtagata

SEQ ID NO: 7849 - DNA, 534 bp, Zea mays
  Clone ID: LIB3061-077-Q1-N6-F7
agaaagtactttcttatttctgggaagccacaaacatcatccaaaaacttcattattgaactataactcataagcaatctaaaagagggcaccgccaatgatgggttgttggtagaacgttgttgggtttgtcaaagcaagttggttgaatggcagcaattgttgcagttgtaagagggtgccagcgttaggcgcagcgtgcaggtagaacggcaacaactgttgttgtgtcaagaaggcaacagggctcacatcagctagctggctgaatggtggtagctgttgctgttgtaaataagcagcagagttcaatgctgccagttggttgaatggaagaaattgctgggggtaggcagcagctagctgactgaatggtagttgttgttgcaaataagcagcagagttcaatgcagccagttggttgaatggaagaaactgctgttgctgagagtaggcagcaaggtttcctagcacaagttgttgtagttgttgtgccttgatgttttgtgccaacaaatgcaccaaaggtaactg

SEQ ID NO: 7850 - DNA, 547 bp, Zea mays
  Clone ID: LIB3061-077-Q1-N6-F8
tttttttttttttttttttttttttttttttttttttttttttttttttttttttttttttttttttttcccaaataaatcccaaccaaaatattgattatttctaggaaacacatcccggtttgagggccccattataaagtccatttaatatgaaatcaaaaaaaaggcccccccaacgaggggttgctcccacaaaaaggcagggttcataaaaaaaaactggttgtatggaaacaattgttgctgctgtaggaaggcaaccaccaagggattaccccctgccaggggataaagaaagggttgcccctgttgaaggcccccaccaaagttcaacacaaccagttggttaaatgaaaccacctgttgcaagaaggcaacagggtttcccacagctagctgagtcaaagctggaacaatctgttgcaacaactgttgttgcaggtatgtaggtccattaaccatagcgaggagggctaaaaaaaaccacttgttgctgttgaaggtaggcggcagggtccaccatggctagttgactaacccctgg

SEQ ID NO: 7851 - DNA, 525 bp, Zea mays
  Clone ID: LIB3061-077-Q1-N6-F9
agagcaaaataactatcaaccacatttggaggctagaagcacataagaatctagaaatgtactttcttatttctgggaagccacaaacatcatccaaaaaacttcattattgaactataactcataagcaatctaaaagagggcaccgccaatgatgggttgttggtagaacgttgttgggtttgtcaaagcaagttggttgaatggcagcaattgttgcagttgtaagagggtgccagcgttaggcgcagcgtgcaggtagaacggcaacaactgttgttgtgtcaagaaggcaacagggctcacatcagctagctggctgaatggtggtagctgttgctgttgtaaataagcagcagagttcaatgctgccagttggttgaatggaagaaattgctgggggtaggcagcagctagctgactgaatggtagttgttgttgcaaataagcagcagagttcaatgcagccagttggttgaatggaagaaactgctgttgctgagagtaggcagcaaggtttcctag

SEQ ID NO: 7852 - DNA, 384 bp, Zea mays
  Clone ID: LIB3061-077-Q1-N6-G10
ggggggggggtttttttttttttttttttttttggaaaaaaaaaaattttttggggaaaaaaaccaaaaaaaaaaaaaaagagagggggcccccccagggggggggggggggaaaaaccgggggggggggaaaaaaaaggggggggggggggggaaaaagggggggggggaaagggggggcccggggggggggccggggggggggaaaaaggaaaaaaaggggggggtaaaaaaaggggggggggggccaaaccccattgggggggaaggggggaaaggtggggggggggaaaaaaaggggggggggtaaaagcccccccggggggaaagggaaaaaaatgggggggggggggaaaaagaaacggggaaaagggggaatggggg

SEQ ID NO: 7853 - DNA, 542 bp, Zea mays
  Clone ID: LIB3061-077-Q1-N6-G12
gggggggggggttaaatctcaatcaatatattgattatttttaggaaacactgccgctatgagggcaccattatcgagtacatctcatatgtaatctaaaagaggcaccaccaacgatgggttgctgccacgacaaggcagggttcatcaggggggactggttgtatggcagcaattgttgctgctgtaggaaggcagcgaccaatgggttagccaccgctagtggattaagtaactgttgtcgctgttgtaggtacgcagcagagttcgacacagtcagttggttgaatggaagtagttgttgcaagtaggcagcagggtttgccacagctagctgagtaagagctggtacaatttgttgcagcaactgttgttgcaacaactgttgttgcaggtatgtaggtgcattgcccatagcgagcgggctagatgaaagaagttgttgctgttgtaggtaggcgatagggttcaccatggctagttgactgagcgctggcagaaactgttgcaactgttgttgttgttggtatgcagctacgttt

SEQ ID NO: 7854 - DNA, 507 bp, Zea mays
  Clone ID: LIB3061-077-Q1-N6-G2
tttttttttttttttttttttttttttttttttttttttttttttttttttttttttttttttttttttttttttttttttttttttttcaaccctaaaggggggattaaaggctggctccccaacctaggggaaaaaaatatggaacccccgggggggccaaaagcacattaaaattgggaaaggaaactttttatttggggggggccacaaccataacccaaaaaacttaattttggaataacaacaaaaaagcaatcaaaaaaagggcccccccaaggaggggtggggggaaaaaggctggggggtttgaaaaaaaaggggggaaaaagggcaaaaacgggggcatttgaaaaagggggggggggtaacccaaaaacggggggaaaaacgaaagaaatggtggtggttaaaaaaaggaaggggggcttgttgaaacaagcgggcaaaaggggaaaagaattggggggggaaaaaaagaaagggggttaaggggggccaatgggt

SEQ ID NO: 7855 - DNA, 542 bp, Zea mays
  unsure (1)..(542): unsure at all n locations; Clone ID: LIB3061-077-Q1-N6-G3
aaagcttgtntactcccaatcttaggaaaagtaattatcgaacacccttggnagaccaatatcacattagnnaatctggaaatgtaactnntcttatttctggtgtggccacataccatcatccaaaaaactttanttattgaattacaactaataatcaatctaaaagagggcaccaccaatgatgtgttgttggtaggaggctgctgggtttgtcaaagcaagttggacaaagggcaacaattgttgtagttgtaagagggttgcggggttagccgcaaactgcttgtagaaaggcagcaactgttgctgtgtcaagaaggaagcacgacttgctgcagctagctcgctaaatggcagtagtatttgctgctgcaaataagcagcggggttcagtgcggccaattggttaaatggaagaagttgttgttgctgagagtaggcagtagctagctggctaaatggtaatagttgttgctgcaaataagcagcagggttcagtgtagacagttggttgaatggaagaaattgttgttgctgac

SEQ ID NO: 7856 - DNA, 467 bp, Zea mays
  Clone ID: LIB3061-077-Q1-N6-G4
agggaaacaatcctttcttggaggaacacagtctcataccttttctacaccatgagctgcgggtactttaattccacaagtttgacataagtccagcaaaaatgtactaataagtttacatgccaaagagttaatcaatgctgataaatcagcaatatctaagtattatcatcagcattttcttcaatatcttgcaacaaagctcctcgtactcttgccctccgaggcaaaggggccacccccttcgtacctttagcaggaggaactttgctagggaaagccactggggtttgctgctgtacaacaacaatcatttgatcaaagcttggaggggccccccacacacttggaaacttatcagtcacaagctttggctttgtagcctttcttttgtccaggaaagaaagggcttcaagttgcttttgcattacttcgtttttttctctttcaaagtctaaattttccat

SEQ ID NO: 7857 - DNA, 308 bp, Zea mays
  Clone ID: LIB3061-077-Q1-N6-G5
ctggaaagtaacttcttatttctggttggccacatacatcatccaaaaaatttattattgaattacaactaataagcaatctaaaagagggcaccaccaatgatgtgttgttggtaggaggccgctgggtctgtcaaagcaagttggacaaagggcaacaattgttgtagttgtaagagggttgcggggttagccgcaaactgctggtagaaaggcagcaactgttgctgtgtcaagaaggaagcacggtttgctgcagctagctggctaaatggtagtagtatttgctgctgcaaataagcaacggg

SEQ ID NO: 7858 - DNA, 389 bp, Zea mays
  Clone ID: LIB3061-077-Q1-N6-G6
gggggggggggccccttttttttgggggggggcccccccccccccaaaaaaatttttttgggggcccccccaaaaagacccaaaaaaagggggccccccccagggggggggggggggaaagggggggggggttttaaaaaaagggggggaaaagggggccccccggggggggggaaaaagggggggggggggtcccccaaaaccgggggaaaaagggaaaaattttgtgtttttaaaaaaagggggggggggttgggggcccccccggcccaaagggggaaatttttggggggggaaaaaaaaaagggggggcccggggcccccttggttaaaagggaaaaaattttccctgtaaaaggggcccccccccccggggggaaaggggaaaa

SEQ ID NO: 7859 - DNA, 452 bp, Zea mays
  Clone ID: LIB3061-077-Q1-N6-G7
aaaaaaaaacaaacccggacccccttaaattatggtcccgggggaacgacccgaaaagagcatccatcttctggcggggcttataatccaaacataggagctagctacaagctaattcctaaggccctaggcttttcgcagttactgggggggaatcgtccccccgccgaaaatccaggggcattcggcaaccccggtgaggggggccaggttgcactcggcctccgggacaagggggggggaaaatcccctttgcacctcccgggggcagcccggcaggtccttaagggggccctcaagttgcgcgtccgggcccggggggatccccccccccatgaggatgctaagccccgggcaccggaagaaccccgggatgtcccccagctcccggaagaatttccttttaagctccggccacgggaggggcggcccaatgccaaaggtccgggtgg

SEQ ID NO: 7860 - DNA, 497 bp, Zea mays
  Clone ID: LIB3061-077-Q1-N6-G8
cagaaaatatcgagaaaaatctcaatcaatatattgattatttctaggaaacacacgtcggtatgagggcaccattatcgagtacatctcatatgtaatctaaaaaaggcacctccaacgatgggttgctgcctcgacaagacaggattcatcaaagagaactggttgtatggcagcaattgttgctgctgtaggaaggcggcaaccaatgggttagccactaccaatggattaagtaactgttgtcgctgttgtaggtacccagcaaagttcgacagaatcagttggttgaatggaagcagctgttgcaagtaggcaacagggtttgccacagctagttgagtcaaagctggtacaatctgttgcaacaattgttgttgcaggtatgtaggtgcattgcccacagcgagcgggctaaatgaaagcagttgttgttgttgtacgtaggcggcagggttcaccatggctagttgactgagcgttggcaaaaactgttg

SEQ ID NO: 7861 - DNA, 535 bp, Zea mays
  Clone ID: LIB3061-077-Q1-N6-H11
aatctaaaaagtactttcttatttctgggaagccacaaacatcagacaaaaactttattattgaactataactcataagaaatctaaaagagggcaccaccaatgatgggttgttggtagaacgctgctgggtttgtcaaagcaagttggttgaatggcagcaattgttgcagttgtaagagggtgccagcgttaggcgcagcgtgctggtagaacggcaacaactgtggttgtatcaagaaggtagcagggctcacaccagctagctggctgaatggtagtagttgttgctgctgtaaataagcaggagagttcaatgctgccagttggttgaatggaagaaattgctgggggtaggcagcaggtagctggctgaatggtagttgttgttgttgcaaataagaagcagagttcaatgcagctagttggttgaatggaagaaactgctgttgctgagagtaggcagcaaggtttgctagcacaagttgttgtagttgttgtgccctgatgttttgtgccaataaatgcaccaaag

SEQ ID NO: 7862 - DNA, 534 bp, Zea mays
  Clone ID: LIB3061-077-Q1-N6-H12
gttggtttttttatatcgagaaaaatctcaatcaatatattgattatttctaggaaaccatgccgctatgagggcaccattatcgagtacatctcatatgtaatctaaaagaggcacctccaacgatgggttgctgccacaacaaggcaggggtcatcaaagagaactggttgtatggcagcaattgttgctgctgtaggaaggcaacgaccaatgggttagccaccgctagtggattaagtaactgttgtcgctgttgtaggtacgcagcagagttcgacacagtcagttggttgaatggaagcagctgttgcaagtaggcagcagggtttgccacagctagctgagtcagagctggtacaatctgttgcagcaactgttgttgcaggtatgtaggtgcattaaccacagcgagagggctagatgaaatcagttgttgctgttgtaggtaggcggcagggttcaccatggctagttgactgagcgctggtagaaactgttgcaattgttgttgttgttggtatgcaactatgt

SEQ ID NO: 7863 - DNA, 468 bp, Zea mays
  Clone ID: LIB3061-077-Q1-N6-H3
agacccaaaaaacaacaacaattggctcggggggtaagagtacaaatcatggggggaaaggataaaaaaaataggtacctataagcacatctgaacctagggaagagatcaagccccggggggaggggggatacattgcatgaaggcaagaagggtataagctagtataagtaatctcagagacgaacagcatatgtacataacggagttacccattggcacaccgggtcttttccaggcgcctagggcgctctatcaaaagggattccttatagcaccacgggccgcctttcgcttaatttttggagcttttccacttccacggaaggacatgtatacttgctgaatgacaaccatgctgagcagggattcaagggaaaacattccaaatccaatgaagtaaaatatccccacaatagcactcctgcctatgaaatcaaaagccgggaaaatcccagccaaggattt

SEQ ID NO: 7864 - DNA, 490 bp, Zea mays
  Clone ID: LIB3061-077-Q1-N6-H4
aaataccaggtatcaccattttcctgaatgcctcgtaacgagttcatatgctataacacaaggacatcccattgttgctgcagccacaagagtccagagcaacagaaaggcaagatttaatccaactcatacccaaccgggcagttttttttattacaaaaagggaagcagcagcattcataggtgtggagcaccgatcaacttgaaaccaaaaccagaggggcgttgggcctcaaaaattatcgtcgatcaggcctacaggaagtttctgatgtccaatttcctgacatcaggcatttcctcatcttgaaactcctcccttttgagttgagtctccattgcttcaacgcattcctttttaagttcagtcagctcacttttggcaatttccaattcaagctcttcctcgatctttggaaaatcctccttccgaaagccaagctttttgttaatcttgtcaaactctgccaaaaggggggccatgttcttt

SEQ ID NO: 7865 - DNA, 459 bp, Zea mays
  Clone ID: LIB3061-077-Q1-N6-H5
cggggaaaaacccaaacaaaaaaagggatatttttaacccgggaaatcccggccgggccccggagggggccccactttccccaaaggggggccgaataaaaccggggggaaacaagggcaaaagcggtccccgggggaaaatggtaacccccccaaaatcccccaaaaaaaacaacccggaaccaaaaagggaaaacccggggggcccaaaggggggaccaaccccaaataaaggggggggccccaacggcccctttccaaacgggaaacccggcgggcccaccggaataaaaaaaccgcccaccccccggggaggggcggttggcgaatgggcccccaggggggtttttttttcacccagggaaacggcaaacagtgaatggccctaaccccccggccccgaaaaaagtggaaaaagggggcccccccgggttgcccccaccgggcaaaaacccggtt

SEQ ID NO: 7866 - DNA, 400 bp, Zea mays
  unsure (1)..(400): unsure at all n locations; Clone ID: LIB3061-077-Q1-N6-H7
gagcggggcaaataaaatcgtatagaaagtaacagagatgttttccaaccgtttacgtccgatcccttgttacaagccatgaacgttggtcacacaatgacggccaggcaagcctagaatacaatcccgattcagaaaatggagagcaaaggtacatcgtaaaaactaagagagccagcaagctagcattttatttagtaaaatcgttcacccgccggtacccaatcttctcagttttacacagttgccgtcttgaggctgttgcccttctcctgtaggctaagnaaaggggctctgaaaaanntnttntggaaggtgtggacttcttcaagaagagctttgacagnctacacagnttgccgtcttgaggctgttgcccttctcctgtaggcttcacgag

SEQ ID NO: 7867 - DNA, 469 bp, Zea mays
  Clone ID: LIB3061-077-Q1-N6-H9
tttttttttttttttttttatttttttttttttatttttttttttttttttttttttttttttttttttttttttttttttttttttttttaaaatttttttttttaaattattttttaaaattaaaaaaaaaaaaattaaaaaaaaaaggaaaaaaaagccgggaagggggccccaatttttgagggggggaaaaaaggaaaaaaaaaaggggggactttaaaaaaaaaaaaagggggggggggggacaaaatttataaaaaaaaaacggggggaagaaaaaaaggggccccccaagggggggggggccccctggggaaaagaggttgaaaaaaaaaaaacggggggggggggaaaaaggggggccccgaaaaagggggaaaaaaaaggggggaaaaacgggaaaagggaaaaaaagggggggggggggttgggccccccccaaaaaaagcgaactggacaatggggg

SEQ ID NO: 7868 - DNA, 492 bp, Zea mays
  Clone ID: LIB3061-078-Q1-K6-A1
caacagttgcttccattcaaccaactggctgtgtcaaactctgctgcgtacctacaacagcgacaacagttacttaatccattggcagtggctaacccattggtcgctaccttcctgcagcagcaacaacaattgctgccatacaaccagttctctttgatgaaccctgccttgcagcaacccatcgttggaggtgccatcttttagattacatatgagatgtactcgacaatggtgccctcataccgacatgtgttttctagaaataatcaatatattgattgagatttatctcgatgtattaaaaaaaaccgttcaataaaaaaaaataatgtaatcaaaaataaaaaaaaaaaaaaaaattaattttaaaaaaagtattatttctcttaaaaaaaaaaaaaaaacaaataaaaaaaaaaaaaaaaagtttaacaaaaaaattaaaaaaaaaaaatctttttaaaaaaaaaaaatatttttcctttaatc

SEQ ID NO: 7869 - DNA, 168 bp, Zea mays
  unsure (1)..(168): unsure at all n locations; Clone ID: LIB3061-078-Q1-K6-A10
ggcacgnaaccgccgccgatccccatcgtcacggtagccatgtccaaccccggctcgtcgcccgcctccgctcaccacgaccacgaacacacccctctctgccgctcctgcggggcgcccaccacggcgccgaccccggcaccctggtcaggnaccaccgacttcccg

SEQ ID NO: 7870 - DNA, 545 bp, Zea mays
  unsure (1)..(545): unsure at all n locations; Clone ID: LIB3061-078-Q1-K6-A11
catggcaacatagnaaagcacaatagtgtaccaacaatggcagctaaaatttttgcctccttatgctccttggtctttctgcaagtgctgctacggcgaccattttcccacaatgctcacaagctcctatagcttcccttcttcccccgtacctctcaccaacggtgtcttcggtatgtgaaaacccaattcttcaaccctacaggatccaacaggcaatcgcagctggcatcttacctttatcacccttgttcctccaacaatcatcagccctattacagcagttacctttggtgcatttattggcacaaaacatcagggcacaacaactacaacaacttgtgctagcaaaccttgctgcctactctcagcaacagcagtttcttccattcaaccaactagctgcattgaactctgcttcttatttgcaacaacaacaactaccattcagccagctatctgctgcctacccccagcaatttcttccattcaaccaactgacagcattgaactctcctgcttatttacagcagcaacaactacta

SEQ ID NO: 7871 - DNA, 556 bp, Zea mays
  Clone ID: LIB3061-078-Q1-K6-A12
ccaactagcagcattgaactctcctgcttatttacagcagcaacaactactaccattcagccagctagctggtgtgagccctgctaccttcttgacacaaccacagttgttgccgttctaccagcacgttgcgcctaacgctggcaccctcttacaactgcaacaattgctgccattcaaccaacttgctttgacaaacccagcagtgttctaccaacaacccatcattggtggtgccctcttttagattgcttatgagttatagttcaataatgaagttttttggatgatgtttgtggcttcccagaaataagaaagtacatttctagattcttaaaaaaaaaaaaaaaaaaaaaaaaaaaaaaaaaaaaaaaaaaaaaaaaaaaaaaaaaaaaaaaaaaaaaaaaaaaaaaaaaaaaaaaaaccccccaacaaaaaataaaaaaaaaaaaaataaaaaaaaaaaaaaaaaaaaaaaaagggggggcccctttttaaggaaaaaaattttttctccccgtggttatgaaaaaaaaaatttttttttttgggggcc

SEQ ID NO: 7872 - DNA, 577 bp, Zea mays
  unsure (1)..(577): unsure at all n locations; Clone ID: LIB3061-078-Q1-K6-A2
acaatagtgtaccaacaatggcagccaaaatttttgcctccttatgctccttggtatttctgcaagtgctgctacggcgaccattttcccgcaatgctcacaagctcctatagcttcccttcttcccccgtacctctcaccagcggtgtcttcggtttgtgaaaacccaattcttcaaccctacaggatccaacaggcaatcgcagctggcatcttacctttatcacccttgttcctccancantcatcagcccttttacagcagttacctttggtgcatttattggcacaaaacatcagggcacaacatctacaacaacttgtgctagcaaaccttgctgcctactctcagcaacagcagtttcttccattcaaccaactagctgcattgaactctgcttcttatttgcaacaacaacaactaccattcagccagctacctgttgcctacccccaacaatttcttccattcaaccaactggcagcattgaactctcctgcttatttacagcagcaacaactactaccattcagccagctagctggtgtgagccctgctaccttcttgacacaacca

SEQ ID NO: 7873 - DNA, 560 bp, Zea mays
  unsure (1)..(560): unsure at all n locations; Clone ID: LIB3061-078-Q1-K6-A4
caactagcaacatagnaaagcacaatagtgtaccaacaatggcagccaaaaattttgcttccttatgctccttggtctttctgcaagtgctgctaccgcaaccattttcccacaatgctcacaagctcctatagcttcctttcttcccccatacctctcaccagcggtgtcttcagtatgtgaaaacccaattcttcaaccctacaggatccaacaggcaatcgcagcaggcatcttacctttatcacccttgttcctccaacaaccgtcagccctattacagcagttacctttggtgcatttgttggcacaaaacatcaaggcacaacaactacaacaacttgtgctaggaaaccttgctgcctactctcagcaacagcagtttcttccattcaaccaactggctgcattgaactctgctgcttatttgcaacaacaactaccattcagtcagctagctgctgcctacccccagcaatttcttccattcaaccaactggcagcattgaactctgctgcttatttacaacagcaacagctaccaccattcagccagctag

SEQ ID NO: 7874 - DNA, 565 bp, Zea mays
  unsure (1)..(565): unsure at all n locations; Clone ID: LIB3061-078-Q1-K6-A6
cgcananaaggcgtcttcgtactcgcctacctccgcggctcaaacctttcccccttctcccaattccctccgtcggccgccgctccatcccgtacgacgacaccatgagggagtgcatttcgatccacatcggccaggccagtatccaggtcggaaacgcgtgctgggagctgtactgccttgagcatggcattcaggctgacggtcagatgcccggtgacaagaccattgggggaggtgatgatgctttcaacaccttcttcagtgagactggtgctgggaagcacgtgccccgtgctgtttttgttgaccttgaacccactgtcatcgatgaggtgaggactggcacctaccgccagctcttccaccctgagcagctcatcagtgggaaggaggatgccgccaacaactttgcccgtggtcactacaccattggcaaggagattgttgacctgtgccttgatcgcatcaggaagcttgccgacaactgcactggtctccagggcttcctcgtcttcaacgctgttggtggaggaacgggctctggccttggttccctcctcct

SEQ ID NO: 7875 - DNA, 580 bp, Zea mays
  unsure (1)..(580): unsure at all n locations; Clone ID: LIB3061-078-Q1-K6-B1
ccgggngnacattagctttatctactccagagcgcagnaannaacccgacgacaccatgagggtgttgctcgttgccctcgctctcctggctctcgctgcgagcgccacctccacgcatacaagcggcggctgcggctgccagccaccgccgccggttcatctaccgccgccggtgcatctgccacctccggttcacctgccacctccggtgcatctcccaccgccggtccacctgccgccgccggtccacctgccaccgccggtccatgtgccgccgccggttcatctgccgccgccaccatgccactaccctactcaaccgccccggcctcagcctcatccccagccacacccatgcccgtgccaacagccgcatccaagcccgtgccagctgcagggaacctgcggcgttggcagcaccccgatcctgggccagtgcgtcgagttcctgaggcatcagtgcagcccgacggcgacgccctactgctcgcctcagtgccagtcgttgcggcagcagtgttgccagcagctcaggcaggtggagccgcagcaccggtaccaggcgatcttcggcttggt

SEQ ID NO: 7876 - DNA, 555 bp, Zea mays
  unsure (1)..(555): unsure at all n locations; Clone ID: LIB3061-078-Q1-K6-B12
cggtttttccccgcgttttttgcccctagcctggtgccccctggcggctgcttgcgcagcnactgcttgcatccaaccccttgctctggctaacgtggttgctcaccagctacaacaacagctgcttcagtttctgccagcgctcagtcaactagccatggtgttaccctgccgcctacctacaacagcaacgtctggtgggatctaccccgctcgttctggccaatgcacctacttncatgcatcaacaattgttgctntagaatctaccagctctgactcatctagctatggcaaaccctgctgcctacttgcaacagctgcttccattcaaccaactgattgtgtcgaactctgttgcgtacctacaacaacgacaatggttacttaatccattagcagtggctaccccattggtcgcttcctttcctccacatctacaatttgctggcatacaaccagtattttttgttgaaccctttcttttctaggctgcaacccattctttggagttccattttttatattttattttcaaatgaacttgtataatag

SEQ ID NO: 7877 - DNA, 574 bp, Zea mays
  unsure (1)..(574): unsure at all n locations; Clone ID: LIB3061-078-Q1-K6-B2
gtccgaaaagccaaacagnacctctagctggctgactgctactacccagcaaccacctgggactgggagtcgagctcgctccagcgcccccttcaattccgtcctgatacgctcgagcacgctagcctagccaccgatcgacgacgacacatggcgaaggtccacccggaccgccaccccaacgtgctgccgccgtcgccggctgaggagaaggaggaggaggcgacgtcgctgacggtgtggcgcaagtcgctgctgttcaactgcagggggtacacggtgttcgacggcaggggcgacctggcctaccgcgtcgacagctacgacgacgccggggccgacgccggggccgtgctcatggaccccgccggccgcccggccttcacggtggcgcgccggagccgcctcctcggcctgctgtccggccagcagcggctcatctacgcgggcgaggacacgcggcggcccgcggtgtacgccgtcgtcaggcgccgcggcaaggcgacggcgcgcgtgacgccgtgcgctgctgcaggcgccgcgtacgaggtggaggggtcctacgcgcgccgcc

SEQ ID NO: 7878 - DNA, 587 bp, Zea mays
  Clone ID: LIB3061-078-Q1-K6-B3
ctattctgaaatgatactgttgtggtaaactatggacagctgcagtacaagttgaaggttcttgaactgaagcctgcctcaagtgtatctgtcctagagacagatgttgaagttgacatcgtgggatcagattcggttttggacaacgaagatgaccaacatgtgcttgtgcctcttgtaattggaaatatagaatccagtgttgtagtacctgaactttcagttgaaggaaatgtgagtgagaaagtagcttctgggcatgcaaatatcgagattaaaatagatacggacgcgagcggtggtgacactgatatctatgtttcaagacatcctttagtatttccaactcagcaccgacatgagtggtcttctcatgaaatgggatcgaaggttcttatactcaaaccacgggatgctacattggtcagtggtgtttacagtattggagtttatggtttcaaagggacttctaagtaccagctctctgtagctatcaaggatgttagtggccaaaggattggtgaatatgctagtgcctcgggaagtgttgattttgattctgtgctgtgtagaaactgtaagcgcca

SEQ ID NO: 7879 - DNA, 492 bp, Zea mays
  Clone ID: LIB3061-078-Q1-K6-B4
tccggccagctacctgttgcaaataacaagcagtttgttgccattcaaccaactgggcgtcgttggcaccctgctgcttctttacagcaggcacaactgctaccattcagcccggttggtggtgtgagccctgctgccttcttggcccagccgcagttggtggcgttcttccagcacgctgcgggggggggtggcgccctcttccatctgccacaattgctgccattcaaccaacttgctttgacaaacctagcagtgttctacctacaacccatcattggtggtgccctcttttagtatttcttatgagttattgttcaataataaagtttttatgtctgatgtttgtggcttcccacaaataagaacgtccatttctaaatccattggcagtggctaaaaaaaaaaaaaaaaaagggggctccatcttgaggatccaagtcgttattacgcgtgcttgcttacgataaatctttttttttgggggcccta

SEQ ID NO: 7880 - DNA, 556 bp, Zea mays
  Clone ID: LIB3061-078-Q1-K6-B6
ttgcccttttagtgagcgcaacaatgcgttcattattccacagtgctcacttgctcctagtgccagtattccacagttcctcccaccagttacttcaatgggcttcgaacatccagccgtgcaagcctacaggctacaactagcgcttgcggcgagcgccttacaacaaccaattgcccaattgcaacaacaatccttggcacatctaaccctacaaaccattgcaacgcaacaacaacaacaacagtttctgccatcactgagccacctagccgtggtgaaccctgtcacctacttgcaacagcagctgcttgcatccaacccacttgctctggcgaacgtagctgcataccagcaacaacaacagctgcaacagtttatgccagtgctcagtcaactagccatggtgaaccctgccgtctacctacaactactttcatctagcccgctcgcggtgggcaatgcacctacgtacctacaacaacagttgctgcaacaaattgtaccagctctgactcagctagctgtggcaaaccctgctgcctacttacaacag

SEQ ID NO: 7881 - DNA, 577 bp, Zea mays
  Clone ID: LIB3061-078-Q1-K6-B7
ctcgtttcaccccatttcgtccggccgtctaattcgttggccggcccgttctgttcgtggaagcgctcggatctgctctgtatatgcttgttctcgttcggttttgccggtcggagttgtctcgcgaggcgtagcttgagggagttttgagaagctcaaatggctcctaaagccgctcctgccaagaagggtgatgccaaggcccaggccttgaaggtggccaaggctgtgaagtctggggcaggcaagaagaagaccaagaagattcgcacatctgtaacatttcaccagcccaagaccctgaagaaggccagggacccgaagtacccaagaatcagcactactggaagaaacaagcttgatcagtaccaaattctcaagtaccccctcaccacagaatctgcaatgaagaagattgaagataacaacactctggtctttattgttgacctcaaggcagacaagaaaaagatcaaggctgcggtcaagaagatgtatgacattcaagcaaagaaggtcaacaccctgatcaggcctgatgggaagaagaaggcttatgtgaaactgacacccgact

SEQ ID NO: 7882 - DNA, 564 bp, Zea mays
  unsure (1)..(564): unsure at all n locations; Clone ID: LIB3061-078-Q1-K6-B8
atccagtagcaacaacanagcaacaatggcgaccaagatattttccctccttatgctccttgctctttctgcatgtgttgctaacgcgacaattttccctcaatgctcacaagctcctatagcttcccttcttcccccataccttccatcaatgatagcttcagtatgtgaaaacccagctcttcagccctataggctccaacaagcaatcgcagcaagcaacatacctttatcacccttgttgtttcaacaatcgccagccctatctttggtgcagtcattggtacaaaccatcagggcacagcagctgcagcaactcgtgctacctgtgatcaaccaagtagctctggcaaacctttctccctactctcagcaacaacaatttcttccattcaaccaactgtctacactgaaccctgctgcttatttgcagcaacaactattaccattcagccagctagctactgcctactctcagcaacaacaacttcttccatttaaccaattggccgcactgaaccccgctgcttatttgcagcagcaaatactactaccatttagcca

SEQ ID NO: 7883 - DNA, 560 bp, Zea mays
  Clone ID: LIB3061-078-Q1-K6-B9
caggcaatcgcagctggcatcttacctttatcacccttgttcctccaacaatcatcagccctattacaacagttacctttggtgcatttattggcacaaaacatcagggcacaacaactacaacaacttgtgctagcaaaccttgctgcctactctcagcaacagcagtttcttccattcaaccaactaggttcattgaactctgcttcttatttgcaacaacaacaactaccattcagccagctacctgctgcctacccccagcaatttcttccattcaaccaactagcagcattgaactctcctgcttatttacagcagcaacaactactaccattcagccagctagctggtgtgagccctgctaccttcttgacacaaccacagttgttgccgttctaccagcacgttgcgcctaacgctggcaccctcttacaactgcaacaattgctgccattcaaccaacttgctttgacaaacccagcagtgttctaccaacaacccatcattggtggtgccctcttttagatttcttatgagttatagttcaataataaagt

SEQ ID NO: 7884 - DNA, 567 bp, Zea mays
  unsure (1)..(567): unsure at all n locations; Clone ID: LIB3061-078-Q1-K6-C1
attatttagnacccaactagcaacatagnaaagcacaatagtgtaccaacaatggcagccaaaatattttgcctccttatgctccttggtatttctgcaagtgctgctacggcgaccattttcccgcaatgctcacaagctcctatagcttcccttcttcccccgtacctctcaccagcggtgtcttcggtatgtgaaaacccaattcttcaaccctacaggatccaacaggcaatcgcagctggcatcttacctttatcacccttgttcctccaacaatcatcagccctattacagcagttacctttggtgcatttattggcacaaaacatcagggcacaacaactacaacaacttgtgctagcaaaccttgctgcctactctcagcaacagcagtttcttccattcaaccaactagctgcattgaactctgcttcttatttgcaacaacaacaactaccattcagccagctacctgttgcctacccccaacaatttcttccattcaaccaactggcagcattgaactctcctgcttatttacagcagcaacaactactaccattc

SEQ ID NO: 7885 - DNA, 568 bp, Zea mays
  unsure (1)..(568): unsure at all n locations; Clone ID: LIB3061-078-Q1-K6-C10
gtttgttgtaacaggcgcctgtgaaaaagtcccaaagttgcatcagcacaattttatattgataatgtgcttccaaggatcaaggagaaaaantaatgtctatcaagccatttgttgataggttaggatatgataatgttccaatggagattaaccgactgaggtgccgagttaattatcatgctttgaagtttttacctgacattgaagaaatggctgacaagctagcaacaaggatgaggaatcgaacaggaagtttaaatccatacatggctcttcacttgcgatttgagaaaggaatggtgggcctttcattttgtgattttgctggaacccgggaggagaaagctatgatggctacttacagacaacagcaatggccaaggcggtacaagaatggatcacacttatggccactagcgcttcaaaagagaaaagaaggccgctgcccccttgagcctggggaaataggaatcattttgcgcgcaatggggtatacgaaggaaactcagatatatgttgcatcagggccaggtgtattggtgggaacaacagaatggcacccttg

SEQ ID NO: 7886 - DNA, 240 bp, Zea mays
  Clone ID: LIB3061-078-Q1-K6-C11
gttggagaccagctattactgttaagcagattctcgtcgggatccaggacttgctagatcagccaaatcctgctgatcctgctcaaacggatggctatcacctttttatccaggatcctacagaatataagagacgtgttaaactgcaggcgaagcagtaccccgcgttgctagtgtcttgaatggaagactaaagaacaaggtcaacatgaggaagactactataaagattgtgaggag

SEQ ID NO: 7887 - DNA, 575 bp, Zea mays
  Clone ID: LIB3061-078-Q1-K6-C12
accgtcgttgtcaagtcatttacacagttcctcccacattcttcatgggcttcgaacacccagctgtgcaagcctataggctacaacaagcaattgcggcgagcgtcttacaacaaccaatttcccagttgcaacaacaatccttggcacatctaacaatacaaaccatcgcaacgcaacagcaacaacaattcctaccagcactgagccacctagccatggtgaaccctgccgcctacttgcaacagcagttgcttgcatcaaacccacttgctctggcaaacgtagttgcaaaccagccacaacaacagctgcaacagtttctgccagcgctcagtcaactagccatggtgaaccctgccgcctacctacaacagcaacaactgctttcatctagcccgctcgctgtggccaatgcacctacatacctgcaacaacaattgttgcaacagattgtaccagctctgactcagctagttgtggcaaaccctgctgcctacttgcaacagctgcttccattcaaccaactgactatgtcgaactctgctgcgtacctacaacagcgacaacagtta

SEQ ID NO: 7888 - DNA, 563 bp, Zea mays
  Clone ID: LIB3061-078-Q1-K6-C2
ttgctccaaccattgctctggcaaacgtagctgcataccaacaacaacaacaattgcaacagtttctgccagcgctcagtcaactagccatggtgaaccctgccgcctacctacaacagcaacaactgctttcatctagccctctcgttgtgggtaatgcacctacatacctgcaacaacaattgctgcaacagattgtaccagctctgactcagctagctgtggcaaaccctgctgcctacttgcaacagctgcttccattcaaccaactgactgtgtcgaactctgctgcgtacctacaacagcgacaacagttacttaatccactagcagtgcctaacccattggtcactgccttcctacagcagcaacaattgctaccatacagccagttctctttgatgaaccctgccttgtcgtggcagcaacccatcgttggaggtgccatcttttagattacatatgagatgtaatcgataatggtgccctcataccggcatgtgtttcctagaaataatcaatatattgattgggaaaaaaaaaaaaaaaaaaaaaaagggcgg

SEQ ID NO: 7889 - DNA, 558 bp, Zea mays
  unsure (1)..(558): unsure at all n locations; Clone ID: LIB3061-078-Q1-K6-C3
gnaaacacaccaagcgaacgcactagcaacgacctaacaacaatggctaccaagatattagccctccttgcgcttcttgccctttttgtgagcgcaacaaatgcgttcattattccacaatgctcacttgctcctagtgccattattccacagttcctcccaccagttacttcaatgggcttcgaacacctagctgtgcaagccaacatgcaacaacaagcgcttgcggcgagcgtcttacaacaaccaattgcccaattgcaacaacaatccttgccacatctaacaatacaagccatcacaacgcaacagcaacaacagttcctaccagcactgagccacctagccatggtgaaccctgccgcctacttgcaagagcagctgcttgcatccaacccacttgctctggcgaacgtagttgcaaaccagcaacaacaacagctacaacagtttctgccaacgctcagtcaactagccatggtgaaccctgccgcctacgtacaacaacaacaactgctttcatctagcccgctcgctgtgggcaatgcacctacatac

SEQ ID NO: 7890 - DNA, 558 bp, Zea mays
  unsure (1)..(558): unsure at all n locations; Clone ID: LIB3061-078-Q1-K6-C4
gngcccaactagcaacatagnaaagcacaatagtgtaccaacaatggcagccaaaatattttgcctccttatgctccttggtctttctgcaagtgctgctacggcgaccattttcccgcaatgctcgcaagctcctatagcttcccttcttcccccgtacctctcaccagcggtgtcttcggtatgtgaaaacccaattcttcaaccctacaggatccaacaggcaatcgcagctggcatcttacctttatcacccttgttcctccaacaatcatcagccctattacaacagttacctttggtgcatttattggcacaaaacatcagggcacaacaactacaacaacttgtgctagcaaaccttgctgcctactctcagcaacagcagtttcttccattcaaccaactaggttcattgaactctgcttcttatttgcaacaacaacaactaccattcagccagctacctgctgcctacccccagcaatttcttccattcaaccaactagcagcattgaactctcctgcttatttacagcagcaacaactactaccatt

SEQ ID NO: 7891 - DNA, 572 bp, Zea mays
  unsure (1)..(572): unsure at all n locations; Clone ID: LIB3061-078-Q1-K6-C6
gngaaccaacaagcaacatagnaaagtggnaatccagtagcaacaatagagcaacaatggcgaccaagatattttccctccttatgctccttgctctttctacatgtgttgctaacgcgacaattttccctcaatgctcacaagctcctatagcttcccttcttcccccataccttccatcaattatagcttcaatatgtgaaaacccagctcttcaaccatataggcttcaacaagcaatcgcagcaagcaacatacctttatcgcccttgttgtttcaacaatcgccagccctatctttggtgcagtcattggtacaaaccatcagggcacaacagctgcagcaactcgtgctacctctgatcaaccaagtagctctggcaaacctttctccctactctcagcaacaacaatttcttccattcaaccaactgtctacactgaaccctgctgcttatttgcagcaacaactattaccatttagccagctagctactgcctactctcagcaacaacaacttcttccatttaaccaattggccgcactgaaccccgctgcttatttgcagcag

SEQ ID NO: 7892 - DNA, 533 bp, Zea mays
  unsure (1)..(533): unsure at all n locations; Clone ID: LIB3061-078-Q1-K6-C8
gtttagatcgcgagcgccgccctttttttttttttttttttttttctgcaaccttactcttttattatacatcaagaaaaaaagtttcgggggctaaacttgcataaccaatggtttggtaccattggttcggagctaacaatggtttggtaccatacaccatattgtggcgaggcaggtgggcgtgaacatccatccggagaacctgcatctgcagtcacctttggcgtcgctcggggaatttgaattgccccttcggtttccgtggaacataccgtgcccggaaggtaagtttcactggcctttgtacgtgcagttcaggagaaaatgatcgcaggaactggggtagcttgttttgcccccccacactctggtgtatggttccaaatccttgttggctccgaatctcggtccccaaccattgggtctgcatggtacgctccggctcatttgttgctgctgctttttncatgggtacggttgccgtctgtctactctcattaacaagggctggcgctcgcgatccaatccgg

SEQ ID NO: 7893 - DNA, 560 bp, Zea mays
  unsure (1)..(560): unsure at all n locations; Clone ID: LIB3061-078-Q1-K6-C9
gggttttcccagcgttttttctgcgncgcgcgctagcccacccttgcggcggtggctnccaagatattatttcttcttgcgcttcttgcgctttttgcgggcgcgtctgttgcgtccattnttccacattgctcacttgctcctagttccattgttccacagttcctcccaccagtttcttcattggccttcgtggcggggggtgtgcaagccttttggctccaacaagcgattgcggcgagcgtcttaccccatccnnttgcccnnttgcggcagcgctccttggcgcatcttacagttcataccatcgcgtcgcatcagcaacttcagttcctaccagctctgagctccctagccgtggtgaaccctgtcgcctacttgcaacagcagctgcttgcctccaacccacttgctctagcagacgtngttgcttaccagcttcatcaacaactgcaacagtttctgctcgcgcttagtcaactcgctctggtgaaccttgtcgcctaccttcaacagcaacaactgctttcatctagcccgctcgctgtggccaatgcacc

SEQ ID NO: 7894 - DNA, 559 bp, Zea mays
  unsure (1)..(559): unsure at all n locations; Clone ID: LIB3061-078-Q1-K6-D1
gcaacatanaagtagaatccattagcaacaatagagcaacaatggcgaccaagatattttccctccttatgctccttgctctttctacatgtgttgctaacgcgacaattttccctcaatgctcacaagctcctatagcttcccttcttcccccataccttccatcaatgatagcttcagtatgtgaaaacccagctcttcagccctataggctccaacaagcaatcgcagcaagcaacatacctttatcacccttgttgtttcaacaatcgccagccctatctttggtgcagtcattggtacaaaccatcagggcacagcagctgcagcaactcgtgctacctgtgatcaaccaagtagctctggcaaacctttctccctactctcagcaacaacaatttcttccattcaaccaactgtctacactgaaccctgctgcttatttgcagcaacaactattaccattcagccagctagctactgcctactctcagcaacaacaacttcttccatttaaccaattggccgcactgaaccccgctgcttatttgcagcaaca

SEQ ID NO: 7895 - DNA, 573 bp, Zea mays
  unsure (1)..(573): unsure at all n locations; Clone ID: LIB3061-078-Q1-K6-D10
aactagcaacatagnaaagcacaatagtgtaccaacaatggcagccaaaatttttgcctccttatgctccttggtctttctgcaagtgctgctacggcgaccattttcccgcaatgctcgcaagctcctatagcttcccttcttcccccgtacctctcaccagcggtgtcttcggtatgtgaaaacccaattcttcaaccctacaggatccaacaggcaatcgcagctggcatcttacctttatcacccttgttcctccaacaatcatcagccctattacaacagttacctttggtgcatttattggcacaaaacatcagggcacaacaactacaacaacttgtgctagcaaaccttgctgcctactctcagcaacagcagtttcttccattcaaccaactaggttcattgaactctgcttcttatttgcaacaacaacaactaccattcagccagctacctgctgcctacccccagcaatttcttccattcaaccaactagcagcattgaactctcctgcttatttacagcagcaacaactactaccattcagccagctagnctggtgtgag

SEQ ID NO: 7896 - DNA, 567 bp, Zea mays
  unsure (1)..(567): unsure at all n locations; Clone ID: LIB3061-078-Q1-K6-D11
gtaagcagcaatcgcagaaaccctagcgccgccgcacccgcagnaatgggtatcgacctcgtcgccggtgggaggaataagaagaccaagcgcactgcgcccaagtctgacgatgtctacctcaagctcctcgtcaagctctaccgtttcttggtcaggaggaccaagagcaatttcaacgctgtcattctcaagaggcttttcatgagtaaaaccaaccgaccaccaatctccatgcgccgccttgtcaagtttatggaaggaaaggagaagaacattgctgtcattgttggcacagtcacagatgacaaaaggatccaggaggttccagcaatgaaggttactgccctgaggttcacggagacagcaagggccaggattgtcaatgctggtggcgagtgcctcacatttgaccagcttgctcttcgtgctccacttggcgagaacacggtcctcttgaggggccccaagaatgcccgtgaggcagtgaggcactttggcaaggctcctggagtgccgcacagccacaccaagccgtatgtgcgctccaagggaaggaagttcgag

SEQ ID NO: 7897 - DNA, 99 bp, Zea mays
  Clone ID: LIB3061-078-Q1-K6-D3
tctcccagccgtctcacagcccactcaccgctccctccagccctcaacctcgccggccctagactgctgggttcgccgtcggaccgcggggcttctcca

SEQ ID NO: 7898 - DNA, 548 bp, Zea mays
  Clone ID: LIB3061-078-Q1-K6-D4
gccacctagcctggtgaaccctgtcgcctacttgcaacagcagctgcttgcatccaacccacttgctctagcaaacgtagttgcaaaccagcaacaacaacaactgcaacagtttctgccagcgcttagtcaactagccatggtgaaccctgccgcctacctacaacagcaacaactgctttcatctagcccgctcgctgtggccaatgcacctacatacctgcaacaagaattgttgcaacagattgtaccagctctaactcagctagctgtggcaaaccctgttgcctacttgcaacagctgcttccattcaaccaactaactatgtcgaactctgttgcgtacctacaacagcgacaacagttacttaatccattggcagtggctaacccattggtcgctgccttcctacagcagcaacaattgctgccatacaaccggttctctttgatgaatcctgtcttgtcgaggcagcaacccatcgttggaggtgccatcttttagattacatatgagatgtactcgataatggtgccctcataccggc

SEQ ID NO: 7899 - DNA, 563 bp, Zea mays
  unsure (1)..(563): unsure at all n locations; Clone ID: LIB3061-078-Q1-K6-D5
gccgatcaccagnactgcatgatgaatggtagacctgataaggaatatctacattggaagtggaaaccttatggatgtgatcttccaccatttgatgcagtaagatttctagattctatgagaaacaaagttggggactaattggtgactccatcctccgtaaccaagttcagtcattgctttgccttctgtctaaggctgaagaacctgttgaggtttaccatgataacgaattcaaaaacaggagatggcacttccaatcctacaacttcacagtgtccatcgtctgggctcctttcctcatcaaatctggtatttttgagaatgaggatggcgtgtctacctctgaaatacagctccaccttgatatactcgatgctaactggacaagtcagtatgagagctttgactatattattatttctggcggacaatggtttctgaggacagcggtctactgggagaacggtgcagtggttnggtggtcataattctcagaacaagaacctcgctgaacttggttttgagcacctgtatcggaaaactctacaaaacgttttcaa

SEQ ID NO: 7900 - DNA, 303 bp, Zea mays
  Clone ID: LIB3061-078-Q1-K6-D6
caaccatatagcttcaacaagcaatcgcagcaagcaacatacctttatcgcccttgttgtttcaacaatcaccagccctatctttggtgcagtcattggtacaaaccatcagggcacaacagctgcagcaactcgtgctacctgtgatcaaccaagtagctctggcaaacctttctccctactctcagcaacaacaatttcttccattcaaccaactgtctacactgaaccctgctgcttatttgcagcaacaactattaccatttagccagctagctactgcctactctcagcaacaacaac

SEQ ID NO: 7901 - DNA, 578 bp, Zea mays
  unsure (1)..(578): unsure at all n locations; Clone ID: LIB3061-078-Q1-K6-D7
tccgaatccccggtcgacccagcgtccgnaaagtcacactattatgatgctttattagcagctgaanacgcgctgagaaacaaanaaggcgtgcattctcagaaagaatctcctgtgatgcatataacagatttaacaactgtatctgcaaagaaggccaaagattttcttcccttcttgcagcggaacagaaggcattcggccatcgttgaatatgtttttagtggccatcggttcaaactaacaattcccaaggagacttgtagtatcgccttctcattatctggtgtccgttgtcctggtaaaggcgagccatactcagacgaagctattgctttgatgaggagaaggatacttcaacgagatgtggagatagaggttgaagcagttgataggacaggaacgttcataggttctttgtgggagtccaagaccaacatgggctctgtgcttctggaagctggacttgccaagctgagttcatttggcttggataggacctcagatgcttatatcctaacaagagctgaacagtctgcgaagcaacagaagattaagatatggngagaactatgtcg

SEQ ID NO: 7902 - DNA, 533 bp, Zea mays
  Clone ID: LIB3061-078-Q1-K6-D8
tcccactctgtcgccagcgtcgcccgtcgccgctgagatcctaggaagaaaggagctctctcgcaagctcttcacggccgtcctcctcgtcatgctgctgctgctgtccgcagaggtcgggccggtggcggtggcggaggcgcggacgtgccagtcgcagagccacaggttccggggcccctgcctccgccggtccaactgcgccaacgtctgcaggaccgaggggttccccggcggcaggtgccgcggcttccgccgccgctgcttctgcaccacgcactgccactgattcgctcgcccagcggccggctggcgtcgccgtcgatcgcgtcgcgaccagtccatggctccatgcatgaataacaagggtgtgcgcggtttgtgatgccaaattgtatcgtcgtcgtgtgttgaagcgttcgatcgtcggtctagtagtgtgcctgtgagcagcggcgtgctgttgtacgtacgtctgcctctgttgttccatgtttcgggattttccatagcaaatgcatgcgtcgagatct

SEQ ID NO: 7903 - DNA, 597 bp, Zea mays
  unsure (1)..(597): unsure at all n locations; Clone ID: LIB3061-078-Q1-K6-D9
ccggtcgacccagcgtccggcaacatagnaaagcacaatagtgtaccaacaatggcagccaaaatttttgcctccttatgctccttggtctttctgcaagtgctgctacggcgaccattttcccacaatgctcacaagctcctatagcttcccttcttcccccgtacctctcaccagcggtgtcttcggtatgtgaaaacccaattcttcaaccctataggatccaacaggcaatcgcagctggcatcttacctttatcacccttgttcctccaacaatcatcagccctattacagcagttacctttggtgcatttattggcacaaaacatcagggcacaacaactacaacaacttgtgctagcaaaccttgctgcctactctcagcaacaacagtttcttccattcaaccaactagctgcattgaactctgcttcttatttgcaacaacaacaactaccattcagccagctatctgctgcctacccccagcaatttcttccattcaaccaactgacagctttgaactctcctgcttatttacagcagcaacaactactaccattcagccagctagctggtgtgagccctgctacct

SEQ ID NO: 7904 - DNA, 552 bp, Zea mays
  unsure (1)..(552): unsure at all n locations; Clone ID: LIB3061-078-Q1-K6-E1
anagaagagagggatctcgtcgacacgccgtcgggaacgcgtcccccgttccctcgccgctgccccgcacggtgccgttctcgcccgaatcggcgaatccctcccaccgcttcgcctataaatctccccctctgtggccctgatcctcccgtacaacagtgcccagtgcccaccgcggcagatcttcgacgcctccgagggcgatggaggaggacggcggctccggcagcgatagcatggagttcgtcgcgggagcggagactagcgctggcgcaggcacaaacgccggcaggaaccgcggcgtgggtgcagggaccagcgtaggcggtggcggcggcacgaagctgccgcatgtgctgcaaaagagtttcggcgaggtgcaagggattctggagcacaaccgcgtcctgattcaggagatcagccagaaccaggagacgcgcgacgcggacggtctcagccgcaacgtggcgctaatccgggagctcaacactaatatcgcccgcgtcgtggacctctacggcgacatgtcagggtccttcgcccgcgccg

SEQ ID NO: 7905 - DNA, 584 bp, Zea mays
  Clone ID: LIB3061-078-Q1-K6-E10
ttaaaaaaaaaaaaaaaaaaaaaaaaaaaaaaaaaaaaaaaaaaaaaaaaaaaaaaaaaaaaaaaaaaaaaaaaaaaaaaaaaaaaaaaaaaaaaaaaaaaaaaaaaaaaaaaaaaaaaaaaaaaaaaaaaaaagggggggcccttttaagggatcaaattttacttccccttccttgcaactttatactttttttttggggccccctaaattaatttaatggcccgtctttttaaaacgttggaattggaaaaaccttgggttacccaaattaaatggctttgaaaaaaatcccctttttcccagttgggttaatagcaaaagggccccacccgttcccctttccaaaaatttgccaaccttaattggaaattggaaccccccttttagcggccatttaagcggggggggtggggggtttccccccaggggaccctttaaatttgcaagggccttagcccccgttttttaggtttttttcctttcttttttcccaatttttgccgtttttccccttaaagttttaaatggggggctccttttagggtcccattttatggttttagggacctttgccccaaaaa

SEQ ID NO: 7906 - DNA, 562 bp, Zea mays
  Clone ID: LIB3061-078-Q1-K6-E11
agcgaacacattagcaacaacctaacaacaatggctaccaagatattatccctccttgcgcttcttgcgctttttgcgagcgcaacaaatgcgttcattattccacaatgctcacttgctccaagttccattattacacagttcctcccaccagttacttcaatgggcttcgaacacccagctgtgcaagcctataggctacaacaagcaattgcggcgagcgtcttacaacaaccaatttcccagttgcaacaacaatccttggcacatctaacaatacaaaccatcgcaacgcaacagcaacaacaattcctaccagcactgagccacctagccatggtgaaccctgccgcctacttgcaacagcagttgcttgcatcaaacccacttgctctggcaaacgtagttgcaaaccagccacaacaacagctgcaacagtttctgccagcgctcagtcaactagccatggtgaaccctgccgcctacctacaacagcaacaactgctttcatctagcccgctcgctgtggccaatgcacctacatacctgcaacaacaattgt

SEQ ID NO: 7907 - DNA, 252 bp, Zea mays
  Clone ID: LIB3061-078-Q1-K6-E2
ggctgggtatcctggtttctttttttttgttggttttttccctttttgggtttgtttttttggtgtggccccccggtggccttttccctttgggcctttttgtgtggggccccccctttgcccttctttttcccgccggtttggtggtccccccgggttcctttcttttccgtgcccttggccccccttcttgggttttttctttctttttggcccttttccccgttttcccccctagggttttaattgggg

SEQ ID NO: 7908 - DNA, 560 bp, Zea mays
  Clone ID: LIB3061-078-Q1-K6-E3
cagctcccatatccgctcccctacctctccagcatcctcccgtctccgtcgtctcgtctccgctcctcacctcgccagccatgggcaagatcaagatcggaatcaacggtttcggaaggatcggcaggctcgtggccagggtcgccctgcagagcgaggatgtcgagctcgtcgccgtcaacgaccccttcatcaccacggattacatgacgtacatgttcaagtacgacaccgtgcacggccaatggaagcacagcgacatcgccctcaaggactccaagacgcttctcttcggcgagaagccggtcaccgtctttggcatcaggaaccccgaggagatcccgtggggtgaggctggtgctgagtatgtcgtggagtccaccggtgtcttcactgacaaggacaaggctgctgcacatctgaagggtggtgccaagaaggttgttatctctgccccaagcaaagatgcgcccatgtttgttgttggtgtcaatgaggacaagtacacctccgatgttaacattgtttccaatgctagctgcaccacaaactgccttgct

SEQ ID NO: 7909 - DNA, 512 bp, Zea mays
  unsure (1)..(512): unsure at all n locations; Clone ID: LIB3061-078-Q1-K6-E4
accaacctagcaacatagnaaagcacaatagtgtaccaacaatggcagccaaaatattttgcctccttatgctccttggtctttctgcaagtgctgctacggcgaccattttcccacaatgctcacaagctcctatagcttcccttcttcccccgtacctctcaccagcggtgtcttcggtatgtgaaaacccaattcttcaaccctataggatccaacaggcaatcgcagctggcatcttacctttatcacccttgttcctccaacaatcatcagccctattacagcagttacctttggtgcatttattggcacaaaacatcagggcacaacaactacaacaacttgtgctagcaaaccttgctgcctactctcagcaacaacagtttcttccattcaaccaactagctgcattgaactctgcttcttatttgcaacaacaacaactaccattcagccagctatctgctgcctacccccagcaatttcttccattcaaccattgttcttna

SEQ ID NO: 7910 - DNA, 601 bp, Zea mays
  Clone ID: LIB3061-078-Q1-K6-E5
tccgtccgaatccccggtcgacccagcgtccgggcactcctcttccccgtcagaagtccgcgccggcagagaagtgctggcctcctcgctcgtggaggtggtcgacatcatccgggaggccaaggacaggatggccgtcgagttctcccgcttcgctggggaggagacggaccaggacccgttccagatgaccttcaactacgagtccatctacgtctccgactggagcaagctcggcttctccgaggtcgactacggcttcggcccgcccatcttcgccggcccgctcgtcaacaacgacttcatcgcctccgtcgtcatcctcaaggcgccgctcccgctcgacggcaccaggatgctcgccagctgcgtcaccaaggaacactccgaggagttcgcccgtggcatgaaggaagacctgccctgaacttgttcttcctagcttattatatactgctgatgatcatcctgagtcctggctgcagggagatgatgaatggtgacgtaaacatgcatgcttctgtttcgttgacgacttgacgctgttgttacttttggttgtatttttttggggttcactttatcttggtcgatacgtacc

SEQ ID NO: 7911 - DNA, 404 bp, Zea mays
  Clone ID: LIB3061-078-Q1-K6-E6
caaccaacttgctttgacaaacccaacagcattctaccaacaacccatcattggtggtgccctcttttagatttcttatgagttatagttcaataataaagttttttgtctgatgtttgtggcttcccagaaataagaaagtacatttctagaaaaaaaaaaaaaaaaaaaaaaaaaaaaaaaaaaaaaaaaaaaaaaaaaattaaaaaaaaaaaaaaaaaaaaaaaaaaaaaaaaaaaaaaaaaaaaaaaaaaaaaaaaaaaaaaaaaaaaaaaaaaaaaaaaaaaaaaaagggggggccgctttttaaaagaaccaaattttcctccccggggtttgcaacgtaaaattttttttttggggcccccaaattaaattccctgggccgggttttaaaaacgggg

SEQ ID NO: 7912 - DNA, 462 bp, Zea mays
  Clone ID: LIB3061-078-Q1-K6-E7
gtaaaaaaaaaaaaaaaaaaaaaaaaaaaaaaatggaaaaatcaatctaacaacaatgtctaaaaagacataaaaacatacttgcgactaataagccaaaaaagtgagtgacaacaaatgcaaaaataaaaaaaaaaaagaaaaaactaggctacaagagccaattataaacacaaaaactccgggccgccccttttaggggctccaaactcccatccgcgcgagggcgccggcttcatcttgttttagcggcccagcactttaattacccgggccgcccttttacaacggcggtcctgggaaaatccttgccgtgcccaccatttataacgcttggagcgacatccacttttccccttgccgtttttaaccctatggcccactcgcatcgccttctccttgggtggaacccacttggtggggaaggggtcgccccctaccaggggcatcaacacggggggg

SEQ ID NO: 7913 - DNA, 584 bp, Zea mays
  unsure (1)..(584): unsure at all n locations; Clone ID: LIB3061-078-Q1-K6-E9
ccaagcgaagcgcactagcaacaacctaacaacaatggctaccaagnaattatccctccttgcgcttcttgcgctttttgcgagcgcaacaaatgcgtccattattccacaatgctcacttgctcctagttccattattccacagttcctcccaccagttacttcaatggccttcgaacacccagctgtgcaagcctataggctacaacaagcgattgcggcgagcgtcttacaacaaccaattgcccaattgcaacaacaatccttggcacatctaacaatacaaaccatcgcaacgcaacagcaacaacagttcctaccagcactgagccacctagccatggtgaaccctgtcgcctacttgcaacagcagctgcttgcatccaacccacttgctctagcaaacgtagttgcaaaccagcaacaacaacaactgcaacagtttctgccagcgcttagtcaactagccatggtgaaccctgccgcctacctacaacagcaacaactgctttcatctagcccgctcgctgtggccaatgcacctacatacctgcaacagnaattgttgcaacagattgtaccac

SEQ ID NO: 7914 - DNA, 255 bp, Zea mays
  unsure (1)..(255): unsure at all n locations; Clone ID: LIB3061-078-Q1-K6-F1
cngaanaagcctacagctttatgttgctaaagcaaaatctggctgcggagcacgaaattcttttatgccccaactacccccactaacgcgatgcgaggttggctccaagttattattcaagaaaaaggagaagccacaaaatctgcaggttcgtgtatcacaaaatggagcatcaaacggaaatgatcccttgggccttcctcaactctgtgtgcgcctgaatactcttcagtacatccgtgggtgaagtttgag

SEQ ID NO: 7915 - DNA, 483 bp, Zea mays
  Clone ID: LIB3061-078-Q1-K6-F10
ccaaacccaccccaagccgccgtcgccgccagcggcggcgccagcgttaacgccaacaccaccgccaatgccaccgccccgagcgcgccgccggccccggcgccggtcccgcgcaaggtgagcagcgcgccgtgctcccgtagcaactcccgcggggagtcctccgggcctgtgccgaccatccccaccgccactgcaactgcagcgccagaagcagcagccggagaagaagacgccgacgcggccacccaggttcaggcggcgccactgaccgccgccggcacatccagcgccacgtccatgttgaggaggtgggtgcccggacagggccgtaataacaacaacgcagcagggcccggcggcatccgcgtggggcggcccagcgccgtgtggaagctgaggcgcaacaagctgcagcaaaccgccgccgagcagaagcaggtgggcggcaagaagaaggcggccccggcccaggaacccgcc

SEQ ID NO: 7916 - DNA, 556 bp, Zea mays
  Clone ID: LIB3061-078-Q1-K6-F11
cttagcaacatacatagtgaagtacactagcaacatcttagcaccaatggcagccaagatttttgccatccttgccctccttgctctttcagcaagcgttgctaccgcgactattattccacaatgctcacaacaatacctctctccggtgacagccgcgagatttgaatacccaactatacaatcctacaggctacaagaggccatcgcagcaagcatcttacggtcgttagcattgaccgtccaacaaccatatgccctattgcaacaaccatccttaatgaatctatatctccaaagaatcgcagcacaacaactacaacaacagttgcttccaacaatcaatcaagtagttgcagcgaaccttgctgcttacctccagcaacaacaatttcttccattcaatcaactagctggggtgaaccctgctgcttacttgcaggcacaacagctactaccattcaaccaacttgtcaggagccctgctgccttcttactgcagcaacagttgcttccattccatctacaagttgtggcaaacattgctgctttcttg

SEQ ID NO: 7917 - DNA, 568 bp, Zea mays
  Clone ID: LIB3061-078-Q1-K6-F2
tgcaatcacaacgaacaaaactctcgatctcaccgacaccgaggaagaagagacaatggcgtccgagcagggagtcgtgatcgcgtgccacagcaaggctgagtttgacgcccacatgaccaaggcccaggaagccggcaagctggtggtcatcgacttcactgccgcctggtgcggtccatgccgcgccatcgccccactgttcgtcgaacacgccaagaagttcactcaggtcgtcttcctgaaggtggacgtggacgaagtgaaggaagtcaccgcggcctacgaggtcgaggcgatgccgaccttccacttcgtcaagaacggcaagacggtcgcgaccatcgtgggtgccaggaaggacgagctcctggccctgatcgagaagcatgccgcgcctgcgcctgcgactgcgtctgcctaaatgagatcagatcagtcgtcgccgtcaataagggccagcacgtatggctgtaaatgttgtcgttatcagttctggctttgtcgtttgtgggcgatttgtgaactagtagtatgtttgtttctatccgagccggaggcgatactt

SEQ ID NO: 7918 - DNA, 549 bp, Zea mays
  Clone ID: LIB3061-078-Q1-K6-F3
gccctcgtccggtccaggagaacccgctgacactgcaactgcagccgacacgggctgagctgacgctgtgtctatccattcgtgttgaggaaaaacaacgccaatcaatccagtccagggtaagggctatggccgaccgctaggatcgcctcctgcaccacctgcggcctcaccgacctggccattggcatactaccccgcgccggcgtcacgctggacgtggtgcgccggatgcgccagctactacgccgatccaaggccctgtgacttgcccccatcctcgaggagtccgacggtggcattcactctgccttcgacgtacactccttgggccgaagccagagccagggccagaccgtagtcacctcctcactgccagcgcgtgcctgaggatctgaaccatcaaatacgagaccttgagcttcttgccataggacatgctggggacttgttgttaaatgctaacattttagaacaaggcaacataaaaagtgctaagtgttaaagtccttgctgcttaaaaggattatataccttcgggaaataatg

SEQ ID NO: 7919 - DNA, 531 bp, Zea mays
  unsure (1)..(531): unsure at all n locations; Clone ID: LIB3061-078-Q1-K6-F4
tgattgtgttcgaaagggagatttggtatttgtgttcaacttccactgcaacaacagctattttgactaccgtattggttgtcgaaagcctggggtgtataaggtggtcttggactccgacgctggactatttggtggatttagcaggatccatcacgcagccgagcacttcaccgccgactgttcgcatgataataggccatattcgttctcggtttatacaccaagcagaacatgtgtcgtctatgctccagtggagtgatagcggggtactcgttgctgcgcggcatgtgtggggctgtcgatatgaggaaaaaccttcttcgaaaaccggcagatgcatgcatgcatgctacaataaggttctgatactttaatcgatgctggaaagcccatgcatctcgctgcgttgtcctctctatatatttaagaccttcaaggtgtcaattaaacatagagttttcgtttttcgctttcctaatgcttgatggctgattgtttgcaaaanaaaaaataccaacaaccntttct

SEQ ID NO: 7920 - DNA, 585 bp, Zea mays
  unsure (1)..(585): unsure at all n locations; Clone ID: LIB3061-078-Q1-K6-F6
cccggtcgacccagcgtccggtagnaacccgacgacaccatgagggtgttgctcgttgccctcgctctcctggctctcgctgcgagcgccacctccacgcatacaagcggcggctgcggctgccagccaccgccgccggttcatctaccgccgccggtgcatctgccacctccggttcacctgccacctccggtgcatctcccaccgccggtccacctgccgccgccggtccacctgccaccgccggtccatgtgccgccgccggttcatctgccgccgccaccatgccactaccctactcaaccgccccggcctcagcctcatccccagccacacccatgcccgtgccaacagccgcatccaagcccgtgccagctgcagggaacctgcggcgttggcagcaccccgatcctgggccagtgcgtcgagtttctgaggcatcagtgcagcccgacggcgacgccctactgctcgcctcagtgccagtcgttgcggcagcagtgttgccagcagctcaggcaggtggagccgcagcaccggtaccaggcgatcttcggcttggtcctccagtccatcctgcagcag

SEQ ID NO: 7921 - DNA, 590 bp, Zea mays
  unsure (1)..(590): unsure at all n locations; Clone ID: LIB3061-078-Q1-K6-F8
cccggtcgacccagcgtccgtttgagacaacagcaacatanaagtggaatacagtagcaacaatagagcaacaatggcggccaagatattttccatccttatgctccttgctctttctgcatgtgttgctaacgcgaccatttttcctcaatactcacaagctcctatagctgcccttcttcccccataccttccatcaatgaccgcttcagtttgtgaaaacccagcccttcaaccctacaggctccaacaagcaatcgcaacaagcaacttacctttatcacccctgttctttcaacaatcgccagccctatctttggtgcagtcattggtacaaaccatcagggcacaacagctgcaacaactcgtgctaccagtgatcagccaagtagctctggcaaacctttctccctactctcagcaacaacaatttcttccattcaaccaactgtctacactgaaccctgctgcttatttacaacaacaacaactactaccattcagccagctagctactgcctactctcagcagcaacaatttcttccatttaaccaattggccgcactgaacccctctgcttatttccagc

SEQ ID NO: 7922 - DNA, 611 bp, Zea mays
  unsure (1)..(611): unsure at all n locations; Clone ID: LIB3061-078-Q1-K6-F9
ccggtnccggaaatccccgggnagcaagcaacatacctttctataaacctagagtgttacaccttgtggaaaaccaaagtttggtaaccctatccgctccaacaagcaatcgcagcaagcaacatacctttatcacccttgtttcaacaatcgccagccctatctttggtgcagtcattggtacaaaccatcaaggcacagcagctgcagcaactcgtgctacctgtgatcaaccaagtagctctggcaaacctttctccctactatcagcaacaacaatttcttccattcaaccaactatctacactgaaccctgctgcttatttgcagcaacaactattaccattcagccagctagctactgcctactctcatcaacaacaacttcttccatttaaccaattggccgcactgaacctcgctgcttatttgcagcagcaaatattactaccatttagccagctagctgcagcaagccgtgcttccttcttgacacagcaacagttgctgcctttctaccagcagtttgcggctaaccccgcaaccctcttacaactacaacaattgttgccctttgtccaacttgctttgacaaacccagcagcctccta

SEQ ID NO: 7923 - DNA, 483 bp, Zea mays
  Clone ID: LIB3061-078-Q1-K6-G1
ggcaaacctttccccctactctcagcaacaacaatttcttccattcaaccaactgtctatactgaaccctgctgcttatttgcagcaacaacaactactaccattcagccagctagctactgcctactctcagcagcaacaatttcttccatttaaccaattggccgcactgaacccctctgcttatttgcagcagcaaatactactaccatttggccagctagctacaacaagccccgcttccttcttgacacaacaacaagtgcttccgttctaccagcagtttgtggctaaccccgcaaccctcttacaactgcaacagttgctgacctttgtccaacttgctttgacaaacccagcagccttctaccaacaacacatcattggcggtgccctcttttagattgcttattagttgtaattcaataatgaagttttttggctgatgtatgtggcctcctagaaataagaagttatatttcc

SEQ ID NO: 7924 - DNA, 601 bp, Zea mays
  unsure (1)..(601): unsure at all n locations; Clone ID: LIB3061-078-Q1-K6-G12
gggggggggggggggnngnngnngggggggggggggggggggggggggggggggggggggggggggggggggggggggggggggggggggggggggggggggggggggggggggggggggggggggtggggtgggggggggggtgggtggtgttgtgggggggggggggggggtntttnttntttgggtggggggggggggggggtggggggggggggggtgggggggggggggggtggggggggggggggggggggggggggggggggggttgggggtgggggggggggggggggggggggggggggggtgggggggggggggggggggggggggggggggggggggggggggggggggggggggggggggggtggggggtgggtgggggggggtgggtgggggtgggggggggggggggggtggggtgggggggggggtggtgggggggggggggtggtggggtgggggggtgggggggggggggggggngggggggggggggtggggggggggtggggggtgggggngggggggngtgggggggggggggggggggtgggtgtggtgggtgggggggggggggggggggggagggtgg

SEQ ID NO: 7925 - DNA, 571 bp, Zea mays
  Clone ID: LIB3061-078-Q1-K6-G2
ctcgaggccaagttcatctccggccgagcatacccgtgagccccaacgctccaggtggtcagcttcacttccgagcgcccctctcccgacagccgtctcctcctcaccgctgcttcatcacctagccgtcgccacccatcgcctacagcgacagccgtcttccgtcacagcggagcgcccctcagatccaagggacgctgcacgagcgcaagagcaggttgttgagaaggggaatataatcatggatatcatgcagactagtgactcttcacatcatggaattgtagaaaatagcccgtacagaattccatatgacagacatgcagaaggtggtcaacttggtgcttcatggtattttagtagaaaagaaatagaggagaattccctttcgaggagagacggcattgatctgaagaaagagtcttatcttcgcaagtcatattgcacatttctgcaggatttggggatgagacttaaagtacctcaagtgacaattgctactgctatagtgttctgtcatcggttctttcttcgtcaatcgcatgccaaaaatgacagacggacaattgca

SEQ ID NO: 7926 - DNA, 121 bp, Zea mays
  unsure (1)..(121): unsure at all n locations; Clone ID: LIB3061-078-Q1-K6-G3
cccgcgtccgcccgtgcgcagggnctggnaaccgtgggcaacagntacttnattacggatgacaacgtcggcgtgctcaagctcgccgggtgcccgtcgcgcgctgttcgtgttcgtcccc

SEQ ID NO: 7927 - DNA, 564 bp, Zea mays
  unsure (1)..(564): unsure at all n locations; Clone ID: LIB3061-078-Q1-K6-G4
ccgcaacttagcaacatagnaaagcacaatagtgtaccaacaatggcagccaaaaattttgcttccttatgctccttggtctttctgcaagtgttgctaccgcaaccattttcccacaatgctcacaagctcctatagcttcccttcttcccccatacctctcaccagcggtgtcttcaatgtgtgaaaacccaattgttcaaccctacaggatccaacaggcaatcgcaacaggcatcttaccattatcacccttgttcctccaacaaccgtcagccctattacagcagttacctttggtccatttggtggcacaaaacatcagggcacaacaactacaacaacttgtgctagcaaaccttgctgcatactctcagcaacatcagtttcttccattcaaccaactggctgcattgaactctgctgcttatttgcaacaacaattaccattcagccagctagttgctgcctacccccagcaatttcttccattcaaccaactagcagcattgaactctgctgcttatttacagcagcaacaactactaccattcagccagctag

SEQ ID NO: 7928 - DNA, 580 bp, Zea mays
  unsure (1)..(580): unsure at all n locations; Clone ID: LIB3061-078-Q1-K6-G6
ccggtcgacccagcgtccggcaacatanaagtggaatccagtagcaacaatagagcaacaatggcgaccaagatactttccctccttatgctccttgctctttctgcatgtgttgctaacgcgacaattttccctcaatgctcacaagctcctatagcttcccttcttcccccataccttccatcaatgatagcttcagtatgtgaaaacccagctcttcaaccctataggctccaacaagcaatcgcagcaagcaacatacctttatcacccttgtttcaacaatcgccagccctatctttggtgcagtcattggtacaaaccatcaaggcacagcagctgcagcaactcgtgctacctgtgatcaaccaagtagctctggcaaacctttctccctactatcagcaacaacaatttcttccattcaaccaactatctacactgaaccctgctgcttatttgcagcaacaactattaccattcagccagctagctactgcctactctcatcaacaacaacttcttccatttaaccaattggccgcactgaacctcgctgcttatttgcagcagcaaatat

SEQ ID NO: 7929 - DNA, 557 bp, Zea mays
  Clone ID: LIB3061-078-Q1-K6-H12
gtctgcaacttctcctggccagcatgcttaccaggggctgtaacaagctggcccttgtcgagatctgcttctttcattgcaagtccaaggtggccaggtcattcaagttatgcacaagtgattgttcctcccgggcttgttcaggtcccagggtggagtccttatactgcgcaaattggttcttcatcctcggaggaccaacaacggacacctggagctgctcaatactatactggctcacgccaaagtggtactagtataggcgatcaaggaatgttttcatcctaccaagcaggttctgttcctgttggactttatgcagtacagagggagaatttatttccagagagacctgaccaacctgaatgtcagttctatatgaagaccggagactgtaagtttggtgctgtatgcaagttccatcatcccagggagcgaataattcctactcccaattgtgcactgagtccattaggcctacctttgcgcccgggagagccaatatgcagtttctacaatcgctacggcatgtgcaagttcggtccaaattgcaaatt

SEQ ID NO: 7930 - DNA, 554 bp, Zea mays
  Clone ID: LIB3061-078-Q1-K6-H2
aaacacaatagtgtaccaacaatggcagccaaaaattttgcctccttatgctccttggtctttctgcaagtgctgctacggcgaccattttcccgcaatgctcgcaagctcctatagcttcccttcttcccccgtacctctcaccagcggtgtcttcggtatgtgaaaacccaattcttcaaccctacaggatccaacaggcaatcacagctggcatcttacctttatcacccttgttcctccaacaatcatcagccctattacatcagttacctttggtgcatttattggcacaaaacatcagggcacaacaactacaacaacttgtgctagcaaaccttgctgcctactctcagcaacagcagtttcttccattcaaccaactagctgcattgaactctgcttcttatttgcaacaacaacaactaccattcagccagctacctgctgcctacccccagcaatttcttccattcaaccaactggcagcattgaactctcctgcttatttacagcagcaacaactactaccattcagccagctagctggtgtg

SEQ ID NO: 7931 - DNA, 197 bp, Zea mays
  unsure (1)..(197): unsure at all n locations; Clone ID: LIB3061-078-Q1-K6-H3
ccgggtcgaccagcgtccgctagcatcagcgtgcgcgcgtcgaccaanaacagnaaataaacgaccgaggctgtgtatgttgcccgccgtgtgctcaactggagcaaaaataaagccaacaaaacaagcacgtgtgatctctatgtcaccaactctatcaccttaattaatggggcattatgaagttgtttctttac

SEQ ID NO: 7932 - DNA, 567 bp, Zea mays
  unsure (1)..(567): unsure at all n locations; Clone ID: LIB3061-078-Q1-K6-H5
caactagcaacatagnaaagcacaatagtgtaccaacaatggcagccaaaatttttgcctccttatgctccttggtctttctgcaagtgctgctacggcgaccattttcccgcaatgctcgcaagctcctatagcttcccttcttcccccgtacctctcaccagcggtgtcttcggtatgtgaaaacccaattcttcaaccctacaggatccaacaggcaatcacagctggcatcttacctttatcacccttgttcctccaacaatcatcagccctattacatcagttacctttggtgcatttattggcacaaaacatcagggcacaacaactacaacaacttgtgctagcaaaccttgctgcctactctcagcaacagcagtttcttccattcaaccaactagctgcattgaactctgcttcttatttgcaacaacaacaactaccattcagccagctacctgctgcctacccccagcaatttcttccattcaaccaactggcagcattgaactctcctgcttatttacagcagcaacaactactaccattcagccagctagctgg

SEQ ID NO: 7933 - DNA, 568 bp, Zea mays
  Clone ID: LIB3061-078-Q1-K6-H6
tggccgtcagcctagcaattagctcatcgactccagatggagaactcgacaccatgaaggtgctgatcgttgcccttgctctcctggcgctcgctgcgagcgccgcctccagtacaagcggcggctgtggctgccagacaccaccgtttcatctaccgcctccgttctatatgccgcctccgttctatctgccgccgcagcagcagccgcagccatggcaataccccactcaaccaccgcagctaagcccgtgccagcagttcggatcctgcggcgtcggcagcgtcggcagcccgttcctgggccagtgcgtcgagttcctgaggcaccagtgcagcccggcggcgacgccctacggctcgccacagtgccaggcgctgcagcagcagtgctgccaccagatcaggcaggtggagccgctgcaccggtaccaggcgacatacggtgtggtcctgcagtccttcctgcagcagcagccgcagggcgagctcgcggcgctgatggcggcccaggtagcgcagcagctgacggcgatgtgcggcctgcagctgcagcagccaggtccctg

SEQ ID NO: 7934 - DNA, 181 bp, Zea mays
  unsure (1)..(181): unsure at all n locations; Clone ID: LIB3061-078-Q1-K6-H8
gttatcatttctaccaccaacactttctacaggagggtccatgggcagctatggccaaaataggcatcttccttgctgccgcagtcactaattggctangaggttatattgctagaaaagagcagctaggaacaccttttggtgatttcttgatcctgtggccgacaagcttatggtagca

SEQ ID NO: 7935 - DNA, 553 bp, Zea mays
  unsure (1)..(553): unsure at all n locations; Clone ID: LIB3061-078-Q1-K6-H9
aaccccttgctctggcgaacgtagctgcataccagcaacaacaacagctgcaacagtttatgccagtgctcagtcaactagccatggtgaaccctgccgtctacctacaactactttcatctagcccgctcgcggtgggcaatgcacctacgtacctacaacaacagttgctgcaacaaattgtaccagctctgactcagctagctgtggcaaaccctgctgcctacttacaacagttgcttccattcaaccaactggctgtgtcaaactctgctgcgtacctacaacagcgacaacagttacttaatccattggcagtggctaacccattggtcgctaccttcctgcagcagcaacaacaattgctgccatacaaccagttctctttgatgaaccctgccttgcagcaacccatcgttggaggtgccatcttttagattacatatgagatgtactcgacaatggtgccctcataccgacatgtgtttcctagaaataatcaatatattgattgagatttatctcgnnnnnaaaaannnntnnnnnaannnaa

SEQ ID NO: 7936 - DNA, 568 bp, Zea mays
  Clone ID: LIB3061-079-Q1-N6-B6
gaaaacttaattcttgcctcaaaccattaaaaattataattagcgcctcttgtagcatttcacaacattgagcgtatttagttctgcaaacacttgtgcagataccaaaatcacagtacctttgggaagcactgaaagccacctctggtgacattaagcaatgccagcgaacatagcctgtgaggtgccatcacatctagcttgcaagcaatcatggcacccatggagtggccgaagacgtgagccttcttccaccccaaatgatccatcaaggccaaggcatccgtcgccatgattgccgtcgagtagtaggatttgttggggagcacggagctgtggccgacaccgcgattgtcgaagcagcagacctcgatgccatcgtccgcttccgccggcgcggcctccgccgcgtcgacgccggcctcctcatccggccacagggcctcgtcgtaggagggctccagcgacccggtcggcccctttatctgcgagccccaggagctcgaataaggcgaagagggtcgatcccgatctggctgccgtctccgcgaactcccgctcggtgtcg

SEQ ID NO: 7937 - DNA, 515 bp, Zea mays
  Clone ID: LIB3061-079-Q1-N6-C2
ctctattacggacgcccttttttttttttttttcaataaaaaatttattattgaactataactcataagaaactaaaaggggcaccaccaatgatgggttgttggtagaacactgctgggtttgtcaaagcaagttggttgaatggcagcaattgttgcagttgtaagagggtgccagcgttaggcgcaacgtgctggtagaacggcaacaactgtggttgtgtcaagaaggtagcagggctcacaccagctagctggctgaatggtagtagttgttgctgctgtaaataagcaggagagttcaatgctgctagttggttgaatggaagaaattgctgggggtaggcagcaggtagctggctgaatggtagttgttgttgttgcaaataagaagcagagttcaatgaacctagttggttgaatggaagaaactgctgttgctgagagtaggcagcaaggtttgctagcacaagttgttgtagttgttgtgccctgatgttttgtgccaataaatg

SEQ ID NO: 7938 - DNA, 555 bp, Zea mays
  Clone ID: LIB3061-079-Q1-N6-C3
agaaatgtactttcttatttctgggaagccacaaacatcatccaaaaacttcattattgaagtataactcataagcaatctaaaagaggcaccaccaatgatgggttgttggtagaacgctgttgggtttgtcaaagcaagttggttgaatggcagcaattgttgcagttgtaagagggtgccagcgttaggcgcagcgtgcaggtagaacggcaacaactgttgttgtgtcaagaaggcaacagggctcacatcagctagctggctgaatggtggtagctgttgctgttgtaaataagcagcagagttcaatgctgccagttggttgaatggaagaaattgctgggggtaggcagcagctagctgactgaatggtagttgttgttgcaaataagcagcagagttcaatgcagccagttggttgaatggaagaaactgctgttgctgagagtaggcagcaaggtttcctagcacaagttgttgtagttgttgtgccttgatgttttgtgccaacaaatgcacccaaagtaactgctgtaataaggctgacggttg

SEQ ID NO: 7939 - DNA, 522 bp, Zea mays
  Clone ID: LIB3061-079-Q1-N6-D8
ctctatgcggccgcccttttttttttttttttgcagcaccaagaagcaccattttttccttaggattaacttagaacaaatcctgacaggagtaacagcatccatcgatccacagtccatgctggttgatgcatgggtctgctggagccgaggatgaacacagcactaacaactgacacagagcgaccttgcaatcaaaaacacagatgggcaacaacaaacgagacgaacgaagataaaccctctggactagggtaaacatcacggtagcgaacaggataacttggccgcgcgggccccaccgctcagttcctccagttcccgtcggagttgccgtagccgccgccacggttgccaccgccgtagccgtcaccaccaccaccgtagccaccgccggcaccgtagccgccgtcggcaccgtcgtagccgccgccgccatcacggcgcccgccaccgccgtagccgccgcctccacggtcaccaccgtagtcgtcgtcgccgcctccacgggcgccgggggac

SEQ ID NO: 7940 - DNA, 549 bp, Zea mays
  unsure (1)..(549): unsure at all n locations; Clone ID: LIB3061-079-Q1-N6-D9
aacgaaaactctatgtttaattgacaccttngaggtcttaaatatatagagaggacaacgcagcgaggtgcatgggctttccagcatcgattaaagtatcagaaccttattgtagcatgcatgcatgcatctgccggttttggaagaaggtttttcctcacattgacagccccacacatgccgcgcagcaaccagtaccccgctatcactccactggagcatagaccacacatgttctgcttggtgtataaaccgagaatgaatatggcctattatcatgcgaacagtcggcggtgaagtgctcggctgcgtgatggatcctgctaaatccaccaaatagtccagcgtcggagtccaagaccaccttatacaccccaggctttcgacaaccaatacggtagtcaaaatagctgttgttgcagtggaagttgaacacaaataccaaatctcccttttcgaacacaatcaccttatcctcctcatgtttccgggaaatatactggtgatcagatgtcatgaattcatatttttgctcaagatttgcattgc

SEQ ID NO: 7941 - DNA, 428 bp, Zea mays
  Clone ID: LIB3061-079-Q1-N6-E7
cgagataaatctcaatcaatatattgattatttctaggaaacacatgccgctatgagggcaccattatcgagtacatctcatatgtaatctaaaagatggcacctccaacgatgggttgctgccacaacaaggcagggttcatcaaagagaactggttgtatggcagcaattgttgctgctgtaggaaggcagcgaccaatgggttagccaccgctagtggattaagtaactgttgtcgctgttgtaggtacgcagcagagttcgacacagtcagttggttgaatggaagcagctgttgcaagtaggcagcagggtttgccacagctagctgagtcagagctggtacaatctgttgcagcaactgttgttgcaggtatgtagggtgcattaaccacagcgagagggctagatgaaatcagttgttgct

SEQ ID NO: 7942 - DNA, 552 bp, Zea mays
  Clone ID: LIB3061-080-Q1-N6-B10
acttgcagtttctgcaattggacaatgtattgatgacctgactgcgctgtttcctactcagactaaggatcaggattgccaagtatagcttcatccccggagtcgttgtcgtcgtcgtcatcatcatcatcgctaagctcttcatcactggacttgtcttccggggtgatgccagcgtcctctggtttagcatacttttcacaatattctttcactttctgttcataaacaggccgatcacgcatcatcagtgctgcagcctccccatttaatggatcagaaggatttgggtacagcaacagctgtggaaggaatacttcaaaaacatttactagatcaaacattgggctccatgtctggtttatgacatccaaacagacagagccagacatctcatcgacattcgggtgataaatcttgttgatgaagccgatggacggggatttgtaagggtatgcatcaggcagttctacccgaaccttccagacaccaccttggtagatactttcggccgggcccttgaattcgacgaagaattcctgcatcccgtcg

SEQ ID NO: 7943 - DNA, 247 bp, Zea mays
  unsure (1)..(247): unsure at all n locations; Clone ID: LIB3061-080-Q1-N6-B3
ttgggtgggggtttttttttttttttttttttttttttttttttttttttttttttttttgtttttttttgtgttgttctttgtttgggttgtgcctgttttncgcctgaggttctgtttttttgctcttccggtcagccagttttttgggggggggtggggtgnatcgtggngaatctccccgccggatcgccgggggtgattcagtttctgggggggcgggctgtggcgttgatgccttcgggct

SEQ ID NO: 7944 - DNA, 567 bp, Zea mays
  Clone ID: LIB3061-080-Q1-N6-C10
aagaatctagaaatgtactttcttatttctgggacgccacaaacatcatccaaaaaacttcattattgaactataactcataagcaatctaaaagagggcaccaccaatgatgggttgttggtagaacactgttgagtttgtcaaagcaagttggttgaatggcagcaattgttgcagttgtaagagggtgccagcgttaggcatagcgtgcaggtagaacggcaacaactgttgttgtgtcaagaaggcagcagggctcacatcagctagctggctgaatggtagtagttgttgctgctgtaaataagcagcagagttcaatgctgctagttggttgaatggaagaaattgctgggggtaggcagcaactagctggctgaatggtaattgttgttgcaaataagcagcagagttcaatgcagccagttggttgaatggaagaaactgatgttgctgagagtatgcagcaaggtttgctagcacaagttgttgtagttgttgtgccctgatgttttgtgccaccaaatggaccaaaggtaactgctgtaatagggctgacggttgtt

SEQ ID NO: 7945 - DNA, 355 bp, Zea mays
  Clone ID: LIB3061-080-Q1-N6-D8
gtaaatgttacttttttttttttggtgggctgattcattagccaaaaaaaatatttttgattgacaaccaataagcaattctaaaaaaaggcaccccccatgaattgttggtggtagaaagcaggcgggttggtcaaagcaaggtgggcaaagggcaggaaccgtcggagttgtaaaaaggaggggggggtagccacaaaccgctggttgaacggaagcacttgctggtgggtcaaaaaagaagcggggcttgctggacctagctggccaaacaaaaggaggaattgctggcggaaataaacaaagggggtcagtgcggccaatcggttaaatggaaaaaaaaaatggtggttag

SEQ ID NO: 7946 - DNA, 516 bp, Zea mays
  Clone ID: LIB3061-080-Q1-N6-D9
atcgagaaaaatctcaatcaatattttgattttttttaggaaacacatgtcggtttgagggccccattgtcgagtccatttcatttgtaatctaaaaaaggcccctccaacgatgggttgctgcaaggcagggttcatcaaaaagaactggttgtttggcaccaattgttgttgctgctgcaggaaggtagcgaccaatgggttagccactgccaatggattaagtaactgttgtcgctgttgtaggtccccaccaaagtttgacacaaccagttggttgaatggaagcaactgttgtaagtaggcaccagggtttgccacacctagctgagtcaaagctggtccaatttgttgcaccaactgttgttgtaggtacgcaggtgcattgcccaccgcgagcgggctaaataaaagaagttgtaggtagacggcagggttcaccatggctagttgactgagcactggcataaactgttgcagctgttgttgttgctggtatgcagctactttcgccaa

SEQ ID NO: 7947 - DNA, 486 bp, Zea mays
  Clone ID: LIB3061-080-Q1-N6-E6
cagaaattatcgagataaatctcaatcaatatattgattatttctaggaaacacatgtcggtatgagggcaccattgtcgagtacatctcatatgtaatctaaaagaggcacctccaacgatgggttgctgcaaggcagggttcatcaaagagaactggttgtatggcagcaattgttgttgctgctgcaggaaggtagcgaccaatgggttagccactgccaatggattaagtaactgttgtcgctgttgtaggtacgcagcagagtttgacacagccagttggttgaatggaagcaactgttgtaagtaggcagcagggtttgccacagctagctgagtcagagctggtacaatttgttgcagcaactgttgttgtaggtacgtaggtgcattgcccaccgcgagcgggctagatgaaagtagttgtaggtagacggcagggttcaccatggctagttgactgagcactggcataaactgttgc

SEQ ID NO: 7948 - DNA, 552 bp, Zea mays
  Clone ID: LIB3061-080-Q1-N6-E7
agaaatgtactttcttatttctgggacgccacaaacatcatccaaaaaacttcattattgaactataactcataagcaatctaaagggggcaccaccaatgatgggttgttggtagaacactgttgggtttgtcaaagcaagttggttgaatggcagcaattgttgcagttgtaagagggtgccagcgttaggcatagcgtgcaggtagaacggcaacaactgttgttgtgtcaagaaggcagcagggctcacatcagctagctggctgaatggtagtagttgttgctgctgtaaataagcagcagagttcaatgctgctagttggttgaatggaagaaattgctgggggtaggcagcaactagctggctgaatggtaattgttgttgcaaataagcagcagagttcaatgcagccagttggttgaatggaagaaactgatgttgctgagagtatgcagcaaggtttgctagcacaagttgttgtagttgttgtgccctgatgtttttggcccccaaatggaccaaaggtaactgctgtaatagggctgacg

SEQ ID NO: 7949 - DNA, 617 bp, Zea mays
  Clone ID: LIB3061-080-Q1-N6-F10
tgcacgcgtacgtatttttggttcctctattatcggccgccccttttttttttttttttcgagataaatctcaatcaatatattgattatttttaggaaacacatgccgctatgagggcaccattatcgagtacatctcatatgtaatctaaaagatggcaccaccaacgatgggttgctgccacgacaaggcatggttcatcaaagagaactggttgtatggcagcaattgttgctgctgtaggaaggcagcgaccaatgggttagccaccgctagtggattaagtaactgttgtcgctgttgtaggtacgcagcagagttcgacacagtcagttggttgaatggaagtagttgttgcaagtaggcagcagggtttgccacagctagctgagtaagagctggtacaatttgttgcagcaactgttgttgcaacaactgttgttgcaggtatgtaggtgcattgcccatagcgagcgggctagatgaaagaagttgttgctgttgtaggtaggcgatagggttcaccatggctagttgactgagcgctggtagaaactgttgcaacttgtgtttgttgttgtatgcaactacctttgccaaaacaagtgggtttgga

SEQ ID NO: 7950 - DNA, 583 bp, Zea mays
  unsure (1)..(583): unsure at all n locations; Clone ID: LIB3061-080-Q1-N6-F3
ctctaggaggccgccctcttttttttttttttttttttttttttttttttttttttttttttttttttttttttttttttttttttttttttttttttttttttgttttttgcgggggggggccccccttatgggggggggggccccacccccgggaaaaaaccttttgtgggggcgcggcccccagagggaacccaagggggggcccccccacgggggggggggggggggaccccggggggggggggcaaagcagggggggggaaggggcccattgggggccgggggaggggggggcccggggtgggggccccgggcgggtggaccgggcccaccggggggggggccaagaggggtccggggcccccccccgccgncgggcggaaggggaagggtgggggcggcggtaaataggcgggggagcccccggcggccgggtggggggggggggaaaaatgggggggggggggccccggggggccggcgggcggggcggggggggggggggcatttaaggccggggtcaggggccctggggggggggggggggaaaacccgctgggggcggcgggggggcgggggg

SEQ ID NO: 7951 - DNA, 558 bp, Zea mays
  Clone ID: LIB3061-080-Q1-N6-F5
aatctagaaagtactttcttatttctgggacgccacaaacatcatccaaaaaacttcattattgaactataactcataagcaatctaaaagagggcaccaccaatgatgggttgttggtagaacactgttgagtttgtcaaagcaagttggttgaatggcagcaattgttgcagttgtaagagggtgccagcgttaggcatagcgtgcaggtagaacggcaacaactgttgttgtgtcaagaaggcagcagggctcacatcagctagctggctgaatggtagtagttgttgctgctgtaaataagcagcagagttcaatgctgctagttggttgaatggaagaaattgctgggggtaggcagcaactagctggctgaatggtaattgttgttgcaaataagcagcagagttcaatgcagccagttggttgaatggaagaaactgatgttgctgagagtatgcagcaaggtttgctagcacaagttgttgtagttgttgtgccctgatgttttgtgccaccaaatggaccaagggtgataatggtaagatgcctgttgc

SEQ ID NO: 7952 - DNA, 546 bp, Zea mays
  Clone ID: LIB3061-080-Q1-N6-F8
atcgagataaatctcaatcaatatattgattatttctaggaaacacatgtcggtatgagggcaccattgtcgagtacatctcatatgtaatctaaaagaggcacctccaacgatgggttgctgcaaggcagggttcatcaaagagaactggttgtatggcagcaattgttgttgctgctgcaggaaggtagcgaccaatgggttagccactgccaatggattaagtaactgttgtcgctgttgtaggtacgcagcagagtttgacacagccagttggttgaatggaagcaactgttgtaagtaggcagcagggtttgccacagctagctgagtcagagctggtacaatttgttgcagcaactgttgttgtaggtacgtaggtgcattgcccaccgcgagcgggctagatgaaagtagttgtaggtagacggcagggttcaccatggctagttgactgagcactggcataaactgttgcagctgttgttgttgctggtatgcagctacgttcgccagagcaagtgggttggatgcaagcagctgctg

SEQ ID NO: 7953 - DNA, 561 bp, Zea mays
  Clone ID: LIB3061-080-Q1-N6-F9
ggaaatgtaacttcttatttctaggaggccacatacatcagccaaaaaacttcattattgaattacaactaataagcaatctaaaagatggcaccgccaatgatgtgttgttggtagaaggctgctgggtttgtcaaagcaagttggacaaagggcagcaactgttgcagttgtaagagggttgcggggttagccacaaactgctggtagaacggaagcaattgttgttgtttcaaaaaggaagtggggcttgttgtagctagctggccaaatggtagtagtatttgctgctggaaataagcagaggggttcagtgcggccaattggttaaatggaagaaattgttgctgctgagagtaggcagtagctagctggctgaatggtagtagttgttgttgttgtaaataagcagcagggttcagtgtagacagttggttgaatggaagaaattgttgttgctgagagtagggagaaaggtttgccagagctacttggctgatcactggtagcacgagttgttgcagctgttgtgccctgatggtttgtaccaatgactgcacc

SEQ ID NO: 7954 - DNA, 110 bp, Zea mays
  Clone ID: LIB3061-080-Q1-N6-G5
ctctatacggccgccctttttttttttttttttttttttttttttttttttttttttttttttttttttttttttttttttttttttttttgggggaatttttttttttt

SEQ ID NO: 7955 - DNA, 413 bp, Zea mays
  Clone ID: LIB3061-081-Q1-N6-A10
ttgtggggggggggagtaaaatgtcaatcaatatattgattatttctaggaaacacatgccggtatgagggcaccattatcgattacatctcatatgtaatctaaagcaggcacctccaacgatgggttgctgccacgacaaggcatggtggggcgagagagaactggctgtatggtagcaattgttgctgctgtaagaaggcagtgaccaatgggttaggcactgctagtggattaagtaactgttgtcgcgtgttgtgggtacgccgcagcgttcgacacagtcattttgttgaatggaatcagccgttgcaagtcggccgcacggtttgccacagttggctgagtgagacctggtgcaatctggtgcagcacattgttagcgcaggtgttccggtgctttccccgctacg

SEQ ID NO: 7956 - DNA, 524 bp, Zea mays
  Clone ID: LIB3061-081-Q1-N6-B11
tttttgggtgtagaaatgaacataacttatttctgggaagccacaaacatcatccaaaaaacttcattattgaactataactcataagcaatctaaaagaggcaccgccaatgatgggttgttggtagaacgttgttgggtttgtcaaagcagggtgggggaatggcagcaattgttgcagttgtaagagggtaccaaaaataagcgcagcgtgcaggtagaacggcaacaactgttgttgtgtcaagaaggcaacagggctcacatcagctagctggctgaatggtggtagctgttgctgttgtaaataagcagcagagttcaatgctgccagttggttgaatggaagaaattgctgggggtaggcagcagctagctgactgaatggtagttgttgttgcaaataagcagcagagtttcaatgcaaccagttgggtgaatggaagaaactgctgttgctgagagtaggcagcaaggtttcctagcacaagttgttgtagttgttgcgcctttgtgtttttgtg

SEQ ID NO: 7957 - DNA, 191 bp, Zea mays
  Clone ID: LIB3061-081-Q1-N6-B8
aaaaaaaatttttttttttttttttttttttttttttttttttttttttttttttttttttttttattttaaatttaaaaaaaaaaaaaaatataaaaaaaaaaaaaaaaaaaaaaaaaaaaaaaaaaaggggggggggggggaaaaaaaaaaaaaaaaaaaaaacatcaaaaaaaaaaaaaaaaaaacaa

SEQ ID NO: 7958 - DNA, 553 bp, Zea mays
  Clone ID: LIB3061-081-Q1-N6-C2
ggaacagatggagtactttttttcttttcatttcaattgttcattcaggtcattgctcacactgacactgccacccatggtgatgcgtgacacattattactcaatcatcgccgctaaatgactcaactagctagctagccagcggctatactacagcacatagtttcttcagtgggggacaccgccggcagcagcgtaggggcatggagtcggctgctgcaggccgcacatcgccgtcagttgctgcgctatctgcgccgccaacagccccgcgacctggccgctttgcggctgctgctgcaggatggactggaggaccaagccgaagatcgcctggtaccggtgctgcggctccacctgcctgagctgctggcaacactgctgccgcaacgactggcactgaggcgagcagtagggcgtcgccgtcgggctgcactgatgcctcaagaactcgacgcactggcccaggatcggggtgctgccaacgccgcaagttccctgcagctggcacgggcttggatgcggctgttggcacgggcatgggtgtggctg

SEQ ID NO: 7959 - DNA, 298 bp, Zea mays
  unsure (1)..(298): unsure at all n locations; Clone ID: LIB3061-081-Q1-N6-E4
gggggggaaaaaaagttttttttggggggggggccccccaaaccaaaaaaaaattttgttgggggggaacaaaaaaaaaaaaaaaaaaagaaggggccccccaaaaaggggtnggggggggggggggggggccccaacgggggagggggggccggcggagaaaaaaaggtcaaggggggggggccgggggntacaaaaagcccccccgaaaagggggggggggggaaaaagaacgtcccttttaagggggggggggagaacccaacaaaggggggggggacaaaagggggggggccgg

SEQ ID NO: 7960 - DNA, 54 bp, Zea mays
  Clone ID: LIB3061-081-Q1-N6-E5
cagataaagcaaacaatgccaaattttgttatcttattcagattatgagtatgc

SEQ ID NO: 7961 - DNA, 312 bp, Zea mays
  Clone ID: LIB3061-081-Q1-N6-F2
ttcggaacgcccccttttgtttggtgttacttccaagatataacagggaatcgttaattatatcacaagaacaaatccggatcccctttaattattgttccggatgaacgatccgagaaatgcattcatcttcttgctgtgcttattattcagacatatgagcttttttctgggggttcctcatgcactatgctcttcgcagttacttggagggcattgttccgcccccgagaatccaggggcattcggcgacgccgttgttggtggcccggttgctctcggcctccgtggcgggggtggcgtgcggtcccc

SEQ ID NO: 7962 - DNA, 371 bp, Zea mays
  Clone ID: LIB3061-081-Q1-N6-F4
gggggggggggggggttttttgttggggggtttttgggttgttttttttgggtgttttttggggttgttgggggggggttggtggggggttgggggggggggggggggcggtcggtggaaagggggggaaagggcgtgtggtggggggggggcgccgccggctgagagagctggcgggagggggggaaggggggggggggggaatgggggggggggccccataagggggggggggggggggggggagggggtgggccgcggggggggggggggggggcccgcctaaggggtattgggggggggggggggggggcgccccgcccgcggggggggggggggggcgctcgtgggggaagaggagaagagagggg

SEQ ID NO: 7963 - DNA, 537 bp, Zea mays
  Clone ID: LIB3061-081-Q1-N6-G3
ctctattacggacgcccttttttttttttttttttttttttttttagcattataattacaattagtattcttattcaaattcatagtacaaacatcataatgtatggtactttattgcttaacaccgttataggagtataacggctaggtagacacaattcttcaattgcgagagcaccactaatgtcattgctgctgcatggattattttggtagtatgagtggtacaagccgcacattgatggtaggtattgtgctgctgtcaagattgccaccgcactttgagtagcttgttgagatccacataactcacatggttgttgttgttgctcctcctggattatggattgaaccatgttgtagattgcttggtgaatgtattggggctcaatctgcctaagatcatgacaacattgttgcttgcatacctggcagctacttgggtgtatcaaacgtgattgggagaaaaggcatttcccaaaggctgcacttgctgcctttaggaattcatgaccatttttttagatttgagctact

SEQ ID NO: 7964 - DNA, 235 bp, Zea mays
  Clone ID: LIB3061-081-Q1-N6-G5
tttttttttttattttttttttttttttttttttttttttttttttttttttttttttttttttttttttttttttttttttttttttttttttttttttttttttttttttttttttttttttttttttttttttttttttttttttggggggaaaaaaaaaaaaaaaaaagtggttatcccccacaaaaaaagggcccccctttttttttgggggggggagcaaccccccctc

SEQ ID NO: 7965 - DNA, 348 bp, Zea mays
  unsure (1)..(348): unsure at all n locations; Clone ID: LIB3061-082-Q1-N6-B2
acacaacaaacttaacagagcgtatcattgttgaatcctcacatgtttctatagcatttccaaaacaaatagaaacatctaccagtgctaaatctcggcataagccaaccgtgcttcacacaaacaatccctactgtctatccgtgtagatgtccggaaaaacaaaaaagaacagtagaattctcctccaggaactgcccactacaggctcaatgatatgataggaggtcacagccatcacccggccagttgccaggcccatgttttcgttgactgtgtngatgaatagcntctaatactaattgatnatcgttggaacttggaatcgtctgcagcggacgcgtgggt

SEQ ID NO: 7966 - DNA, 343 bp, Zea mays
  Clone ID: LIB3061-082-Q1-N6-B3
aaaaccaaaactttattatgatgcatatattattggtcataccacacatgataatgtgtgtcgtcttactgcattattacatatatagatagagagggatggatagaggagatttcccaaatatcatgaatcagtagtagggcggaatggcagcggagacgccacaggggttggtgcggtagctgggcagctggtactggtactggtagagtccacccatggccggcatgttctgcgccatcatcatggccatggggttgagaccctgggctgccagcagctgctgctgctgctgcatcagagctggctcgtacaggctgctgctggcggcagcggcacgctc

SEQ ID NO: 7967 - DNA, 543 bp, Zea mays
  Clone ID: LIB3061-082-Q1-N6-B5
ctaaaaatgtactttcttatttctgggaagccacaaacatcagataaaaaactttattattgaactataactcataagaaatctaaaagagggcaccaccaatgatgggttgttggtagaacactgctgggtttgtcaaagcaagttggttgaatggcagcaattgttgcagttgtaagagggtgccagcgttaggcgcaacgtgctggtagaacggcaacaactgtggttgtgtcaagaaggtagcagggctcacaccagctagctggctgaatggtagtagttgttgctgctgtaaataagcaggagagttcaatgctgctagttggttgaatggaagaaattgctgggggtaggcagcaggtagctggctgaatggtagttgttgttgttgcaaataagaagcagagttcaatgaacctagttggttgaatggaagaaactgctgttgctgagagtaggcagcaaggtttgctagcacaagttgttgtagttgttgtgccctgatgttttgtgccaataaatgcaccaaaggtaactgtt

SEQ ID NO: 7968 - DNA, 533 bp, Zea mays
  Clone ID: LIB3061-082-Q1-N6-C3
agaactggaaagtaacttcttatttctggttggccacatacatcatccaaaaaactttattattgaattacaactaataagcaatctaaaagaggcaccaccaatgatgtgttgttggtaggaggctgctgggtttgtcaaagcaagttggacaaagggcaacaattgttgtagttgtaagagggttgcggggttagccgcaaactgctggtagaaaggcagcaactgttgctgtgtcaagaaggaagcacggcttgctgcagctagctggctaaatggtagtaatatttgctgctgcaaataagcagcgaggttcagtgcggccaattggttaaatggaagaagttgttgttgatgagagtaggcagtagctagctggctgaatggtaatagttgttgctgcaaataagcagcagggttcagtgtagatagttggttgaatggaagaaattgttgttgctgatagtagggagaaaggtttgccagagctacttggttgatcacaggtagcacgagttgctgcagctgctgtg

SEQ ID NO: 7969 - DNA, 504 bp, Zea mays
  Clone ID: LIB3061-082-Q1-N6-D10
aagaatctagaaatgtactttcttatttctgggaagccacaaacatcagacaaaaaactttattattgaactataactcataagaaatctaaaagagggcaccaccaatgatgggttgttggtagaatgctgttgggtttgtcaaagcaagttggttgaatggcagcaattgttgcagttgtaagagggtgccagcgttaggcgcagcgtgctggtagaacggcaacaattgtggttgtgtcaagaaggtagcagggctcacaccagctagctggctgaatggtagtagttgttgctgctgtaaataagcaggagagttcaaagctgtcagttggttgaatggaagaaattgctgggggtaggcagcagatagctggctgaatggtagttgttgttgttgcaaataagaagcagagttcaatgcagctagttggttgaatggaagaaactgttgttgctgagagtaggcagcaaggtttgctagcacaagttgttgtagttgtt

SEQ ID NO: 7970 - DNA, 503 bp, Zea mays
  unsure (1)..(503): unsure at all n locations; Clone ID: LIB3061-082-Q1-N6-D11
ggcgcccnnntttttttttttnnagaaatttcgagaaaatccaacaattattgatatttctaggaacacatgccgcttgagggcaccatttcgagtcatctcatatgtaatctaaaagaggcacctccaacgatgggttgctgccacaacaaggcagggttcatcaaagagaactggttgtatggcagcaattgttgctgctgtnggaaggcagcgaccaatgggttagccaccgcttgtggattaagtaactgttgtcgctgttgtnggtacgcagcagagttcgacacagtcagttggttgaatggaagcagctgttgcaagtaggcagcagggtttgccacagctagctgagtcagagctggtacaatctgttgcagcaactgttgttgcaggtatgtaggtgcattaaccacagcgagagggctagatgaaatcagttgttgctgttgttggtaggcgggagggttcaccatggcttgttgactgagcgctggttgaaa

SEQ ID NO: 7971 - DNA, 330 bp, Zea mays
  Clone ID: LIB3061-082-Q1-N6-D2
aaaacccaaaaaattttttggttttttttggggaaaccaaccccgtttggggggcccctttttggggccccttttttttttttttaaaaagggggcccccccacggggggggggggccccccaagggggggggttttaaaaaaaaactggtgttttgggacaaatttttttttttttggggagggccccccccctgggtttcccccccgtggggggttaaaaaaccgggggcccttttggggggcccccccaatttttccccccaatagtttgttttattgaaaaccttttttcaaggggggcccagggttttcccccctttggtttttt

SEQ ID NO: 7972 - DNA, 431 bp, Zea mays
  Clone ID: LIB3061-082-Q1-N6-E11
agaaatgtactttcttatttctgggacgccacaaacatcatccaaaaaacttcattattgaactataactcataagcaatctaaaagaggcaccaccaatgatgggttgttggtagaacactgttgggtttgtcaaagcaagttggttgaatggcagcaattgttgcagttgtaagagggtgccagcgttaggcatagcgtgcaggtagaacggcaacaactgttgttgtgtcaagaaggcagcagggctcacatcagctagctggctgaatggtagtagttgttgctgctgtaaataagcagcagagttcaatgctgctagttggttgaatggaagaaattgctgggggtaggcagcaactagctggctgaatggtaattgttgttgcaaataagcagcagagttcaatgcagccagttggttgaatgga

SEQ ID NO: 7973 - DNA, 209 bp, Zea mays
  Clone ID: LIB3061-082-Q1-N6-E7
tttttttttttgcagcttactgaagataaccaactaatccattgtgtcggcgcaatacatctgagttttgaaacatgaattatttcaaactagctgagctagcctcggcacttcatcttacagggcaaccaacaacaaatatgcaaataacgaagccaacaaaaacccaccccaccgtaaaaaaaagacccttttaacaatctggaccc

SEQ ID NO: 7974 - DNA, 389 bp, Zea mays
  unsure (1)..(389): unsure at all n locations; Clone ID: LIB3061-082-Q1-N6-F11
tctaaacggacgccctttttttttttttttctttnnnttttnnnnnnnnnannntttnncgagataaatctcaatcaatatattgattatttctaggaaacacatgtcggtttgagggcaccattgtcgagtacatctcatttgtaatctaaaaaaggcacctccaacgatgggttgctgcaaggcagggttcatcaaagagaactggttgtttggcagcaattgttgttgctgctgcaggaaggtagcgaccaatgggttagccactgccaatggattaagtaactgttgtcgctgttgtaggtccccagcagagtttgacacagccagttggttgaatggaagcaactgttgtaagtaggcagcagggtttgccacatctagctgag

SEQ ID NO: 7975 - DNA, 125 bp, Zea mays
  Clone ID: LIB3061-082-Q1-N6-F3
cacataagaatctagaaatgtactttcttatttctgggacgccacaaacatcatccaaaaaacttcattattgaactataactcataagcaatctaaaagaggcaccaccaatgatgggttgttg

SEQ ID NO: 7976 - DNA, 533 bp, Zea mays
  Clone ID: LIB3061-082-Q1-N6-F5
aagaactaaaaatgtactttcttatttctgggacgccacaaacatcatccaaaaaacttcattattgaactataactcataagcaatctaaaagaggcaccaccaatgatgggttgttggtagaacactgttgggtttgtcaaagcaagttggttgaatggcagcaattgttgcagttgtaagagggtgccagcgttaggcatagcgtgcaggtagaacggcaacaactgttgttgtgtcaagaaggcagcagggctcacatcagctagctggctgaatggtagtagttgttgctgctgtaaataagcagcagagttcaatgctgctagttggttgaatggaagaaattgctgggggtaggcagcaactagctggctgaatggtaattgttgttgcaaataagcagcagagttcaatgcagccagttggttgaatggaagaaactgatgttgctgagagtatgcagcaaggtttgctagcacaagttgttgtagttgttgtgccctgatgttttgtgccaccaaatggaccaa

SEQ ID NO: 7977 - DNA, 353 bp, Zea mays
  Clone ID: LIB3061-082-Q1-N6-G11
ggggaaagggaccttttttttgggggggggccccccccctaaccaaaaaaatttttttggggttccccccaaaaaggcactaaaaaagggggccccccaaaaatttttttggggggggggggcccctgggttttaaaaaaagggggggaaaaggggaaaaaattggggttttttaaaaggggggggggggttcccccaaaaccgggggaaaaaagggaaaactggtggttggtaaaaaaaaaagaaaccggtttgttcaacttcgggggcaaaaggggaaaaatttttgggggggaaaaaaaacgggggggttaaggggcccaaattgttaaaaaaaaaaaattttttttttt

SEQ ID NO: 7978 - DNA, 360 bp, Zea mays
  unsure (1)..(360): unsure at all n locations; Clone ID: LIB3061-082-Q1-N6-H7
ataaatgtcttttcttatttttgggacgcctcatacatcattccaaaaacttcatttttgaactattactcataagcaatctaaaatgggcaccaccaatgatgggttgttgggggaacactgttgggtttgtcaaagcccgtcggttgaatggctgcaattgttgccggtgttagagggtgccagcggttggcatagcgtgcaggtggaacggcaacaactgttgttgtgtcaagaaggcagccgggctcacataagctagctggctgaatggaagtagttgaaaaagctgtncttgggccccaaagttcaatgctgctagttgggtgcatggcagaaattgctgggggttggccgcaa

SEQ ID NO: 7979 - DNA, 538 bp, Zea mays
  unsure (1)..(538): unsure at all n locations; Clone ID: LIB3061-083-Q1-N6-A10
caacaaaagaatcattattcgtccattgcctngagataccgagtccaacacagcatgaaggtgtgctttgtttgtatttagtacggtagtttgaccaggtccgtctaacagaacaggactgctacatctcattttttgaagttgctactagtttgctacatccttgagctgacaatacaagatggtaggtagatacacgtcccaaactcaattcagtacatcccaagatggtagatacacagagcatcccaaagtacattacattatctaaataagataatgacgtctgctcgagggaccaaccagcatgagtcactggtcacttatacaggtcggtcaatcttgagattcctccaaggcttccttctccctctgctgttccaatgcaatctcagccaacgctttctgcgtgcgcctttccagtttatcaattctcttctgcacatcacgtttcagatcccaatttggattctttggtgctatgtttccaaaaaggttctccacttcctttggctctgcagtttcggcactaattggg

SEQ ID NO: 7980 - DNA, 552 bp, Zea mays
  Clone ID: LIB3061-083-Q1-N6-B2
gtgataatgaagtcgctctatgaatattcaactgcagtgttctctgacaaataatagcaactagtctgtctgcgatgtctaaatcagcaggtgtgctcttttacacgcaacagtgagtttgaactttgaatacactccttgtgactgactctgagggaacggccttgcgtcctcattaaccaccacctctttatgcatcaatccaagactgctgtccaaacgccatgtgaagccctgcaactgcaataaccaagaacatggtccagtggtccactgagcagttgaaattttgtgcaactttacttggcatggcttttttttttccttcacttgtattcaagcagccatgtctggcacagcaagctttctcaacaagaagcatcagcctaccacgttaaacaggcgattaacagaagaacacaacatcgccatcagtcagaaccacacgacctgggcaacagaacatcgcattgcactctggaagacaggtgaacgagcaggcatttttattcgaagcaaaaggtgcagccaattcccaccatactaggaacc

SEQ ID NO: 7981 - DNA, 451 bp, Zea mays
  Clone ID: LIB3061-083-Q1-N6-B5
cgtaaagaccaacatgaacttttcattgaacttagtggagcatctactgcaatatcaaagaacaccatacaattctgaccctcactttgattaaggcaactaaacaatggtttaaagtgacaggatccgcaatacttgttgtaatcacaactatacagtctgcaagtttaaacttcaattgaaaacaaatattgttcttttgtaaatgttaaaactaatgacgacctatatcgctaaatgtcttgtccaaaaacatgttgtcgatatttgcagtcagaccatggatggcttcattcttttggatcagcagcctcttgaagcatttacgcagcaaggagacccaatttatgtccatatatataatcgtcctcctcctccgcgtggtttagtgatttcgtcgatctcaagatccgtcggctcattcttccatagagaggatttaaactataat

SEQ ID NO: 7982 - DNA, 513 bp, Zea mays
  Clone ID: LIB3061-083-Q1-N6-B6
agcacataagatctagaaatgtctttcttatttctgggaagccacaaactcagataaaaaactttattattgaactataactcataagaaatctaaagggggcaccaccaatgatgggttgttggtagaacactgctgggtttgtcaaagcaagttggttgaatggcagcaattgttgcagttgtaagagggtgccagcgttaggcgcaacgtgctggtagaacggcaacaactgtggttgtgtcaagaaggtagcagggctcacaccagctagctggctgaatggtagtagttgttgctgctgtaaataagcaggagagttcaatgctgctagttggttgaatggaagaaattgctgggggtaggcagcaggtagctggctgaatggtagttgttgttgttgcaaataagaagcagagttcaatgaacctagttggttgaatggaagaaactgctgttgcttaaagttggcagcaaggtttgctagcacaagttgttgcagttgctgtgccc

SEQ ID NO: 7983 - DNA, 513 bp, Zea mays
  Clone ID: LIB3061-083-Q1-N6-C12
caattgttcattcaggtcattgctcacactgacactgccacccatggtgatgcgtgacacattattactcaatcatcgccgctaaatgactcaactagctagctagccagcggctatactacagcacatagtttcttcagtgggggacaccgccggcagcagcgtaggggcatggagtcggctgctgcaggccgcacatcgccgtcagttgctgcgctatctgcgccgccaacagccccgcgacctggccgctttgcggctgctgctgcaggatggactggaggaccaagccgaagatcgcctggtaccggtgctgcggctccacctgcctgagctgctggcaacactgctgccgcaacgactggcactgaggcgagcagtagggcgtcgccgtcgggctgcactgatgcctcagaaactcgacgcactggcccaggatcggggtgctgccaacgccgcaggttccctgcagctggcacgggcttggatgcggctgttggcacgggcatgggt

SEQ ID NO: 7984 - DNA, 506 bp, Zea mays
  Clone ID: LIB3061-083-Q1-N6-C2
aagaagcatgaaacgggaatttcagttctcatagcattatcatgaatctcagaacataacaggtgaaacacgaatcaagcagaggcgccatggggttcacagatccacacctaaaccgctaaattaaactgcgagcgatacatgataaactaagaccaccactcagatcaccaccatcttattcagatccaaaggaacggacgcagggggagtcgacgatgacggagggagggcggccgaacagaccagatcagagagatctaggagagctgtccgcagtcagcgaccttgaccaccttggaggtggagccgttgcgggtgcccaccttctcgatggccttgacgacgtccatgccctcgacgacctggccgaagacgacgtgcttgccgtcgagccaaggggtcgcgacggtgcagatgaagaactgggagccgttggtgttgggcccggcgttggccatggagagcacaccgggggcggtgtgcttgcgcacgaacttctcgtc

SEQ ID NO: 7985 - DNA, 550 bp, Zea mays
  Clone ID: LIB3061-083-Q1-N6-C4
aagaatctagaaatgtactttcttatttctgggaagccacaaacatcagacaaaaaactttattattgaactataactcataagaaatctaaaagagggcaccaccaatgatgggttgttggtagaacgctgctgggtttgtcaaagcaagttggttgaatggcagcaattgttgcagttgtaagagggtgccagcgttaggcgcagcgtgctggtagaacggcaacaactgtggttgtatcaagaaggtagcagggctcacaccagctagctggctgaatggtagtagttgttgctgctgtaaataagcaggagagttcaatgctgccagttggttgaatggaagaaattgctgggggtaggcagcaggtagctggctgaatggtagttgttgttgttgcaaataagaagcagagttcaatgcagctagttggttgaatggaagaaactgctgttgctgagagtaggcagcaaggtttgctagcacaagttgttgtagttgttgtgccctgatgttttgtgccaaataaagcaccaaaggtaactgatg

SEQ ID NO: 7986 - DNA, 534 bp, Zea mays
  unsure (1)..(534): unsure at all n locations; Clone ID: LIB3061-083-Q1-N6-C6
gatcacaaanaaaacaagtacataatataacaagttcatcataaagttcaagagccacaagtccacaagtcccaagtttgcaaggtcacaaaacattatggagcaagtacaataagaaacattcatagcattcatggtacattatcatcatctagatcttcatcaacaagcttacaacgatgcctcaggtccatcatcattatcatcatctaggtcttcatcctcaaatgaaggatttcttgcaagagcctcaagttcatccatttcataaaccatattaggaatagcaacactcttagccttggaaccttttcttgctctagctatccaatctttggtgtagaccatcttctttgtgtgctttccaccatgctaatatgtcaaaagtgtgttgattacttttaccaacctttagtattggatctgccaaatatttttcttgtagtactcctcacagcctcataggtcgagttcttggtagcgaagggcggcgctgcttgaagtggccctgcttgaagtggcggcacggccctg

SEQ ID NO: 7987 - DNA, 530 bp, Zea mays
  Clone ID: LIB3061-083-Q1-N6-E11
gactccaagcgacatagcatttccatggctccgaaacgtcttattgaaatgagcctcagcgaaggttatccaagtgaagaaggccaggacatcttccaaagataagacaagtacgaaaagaaaacctcagtagttttgtttgtggccagggagaaggatctaccgaggaattgctcgcgattgcccgcaagcatcaaaaagcggtttctcaatgtctctctactgtaccactgtgtctattctaccattccacgctgtttgaagatttcaaacatggtagaaccaatcttcgctggtgactcgacaacggtaacaccagcctctctgagtgccttgattttgtcctgggcagtaccctttcctcctgccacgatagctccagcatgacccatgcgacggcctgggggtgccgtaagtccagcaatgaatgcaacaacaggcttttgtgttttgctttcctggatgaacgttgcagcatcctcctcagccgtacctccaatttcaccgatgagaacaatgccttctgtctg

SEQ ID NO: 7988 - DNA, 487 bp, Zea mays
  Clone ID: LIB3061-083-Q1-N6-E2
agaaatgtactttcttatttctgggaagccacaaacatcagataaaaaactttattattgaactataactcataagaaatctaaaagagggcaccaccaatgatgggttgttggtagaacactgctgggtttgtcaaagcaagttggttgaatggcagcaattgttgcagttgtaagagggtgccagcgttaggcgcaacgtgctggtagaacggcaacaactgtggttgtgtcaagaaggtagcagggctcacaccagctagctggctgaatggtagtagttgttgctgctgtaaataagcaggagagttcaatgctgctagttggttgaatggaagaaattgctgggggtaggcagcacgtagctggctgaatggtagttgttgttgttgcaaattagaagcagagttcaatgaacctagttggttgaatggaagaaactgctgttgccgacaataggcaccagggtttgctaccacaagttgtt

SEQ ID NO: 7989 - DNA, 68 bp, Zea mays
  Clone ID: LIB3061-083-Q1-N6-E7
cccaccgccggcaccggccgggttggacgcttacgaggcggagaccgtcgccaggctgagctcgctcc

SEQ ID NO: 7990 - DNA, 516 bp, Zea mays
  unsure (1)..(516): unsure at all n locations; Clone ID: LIB3061-083-Q1-N6-E9
aagaactagaaagtactttcttatttctgggaagccacaaacatcagnacaaaaaactttattattgaactataactcataagaaactaaagggggcaccaccaatgatgggttgttggtagaatgctgctgggtttgtcaaagcaagttggttgaatggcagcaattgttgcagttgtaagagggtgccagcgttaggcgcagcgtgctggtagaacggcaacaactgtggttgtgtcaagaaggtagcagggctcacaccagctagctggctgaatggtagtagttgttgctgctgtaaataagcaggagagttcaatgctgtcagttggttgaatggaagaaattgctgggggtaggcagcagatagctggctgaatggtagttgttgttgttgcaaataagaagcagagttcaatgcagctagttggttgaatggaagaaactgctgttgctgagagtaggcagcaaggtttgctagcacaagttgttgtagttgttgtgccctgatgtttt

SEQ ID NO: 7991 - DNA, 523 bp, Zea mays
  Clone ID: LIB3061-083-Q1-N6-F1
agaaatgtactttcttatttctgggacgccacaaacatcatccaaaaacttcattattgaactataactcataagcaatctaaaagaggcaccaccaatgatgggttgttggtagaacactgttgagtttgtcaaagcaagttggttgaatggcagcaattgttgcagttgtaagagggtgccagcgttaggcatagcgtgcaggtagaacggcaacaactgttgttgtgtcaagaaggcagcagggctcacatcagctagctggctgaatggtagtagttgttgctgctgtaaataagcagcagagttcaatgctgctagttggttgaatggaagaaattgctgggggtaggcagcaactagctggctgaatggtaattgttgttgcaaataagcagcagagttcaatgcagccagttggttgaatggaagaaactgatgttgctgagagtatgcaacaaggttttgctagcacaagttgttgtagttgttgtgccctgattttttgtgcccccaaatggac

SEQ ID NO: 7992 - DNA, 528 bp, Zea mays
  Clone ID: LIB3061-083-Q1-N6-F10
atcctgaattgttagcattcaaattatgaatttcaatgctaatcctgaaagtttgaatgacaaagtaaaatgactctttctccagatgacatccgatgtggtttgacgacgccaccaactgaatcattacattgggaacgccgataagcatgttcgcctcaattattcggttgcctccgctcacagtccattcaagcatcaagcagccctaacaaactcctttacttacagggtcctaaccttttagctacagtacagactgcggcagaaccttgtagggattaaggatcgacttggggtccagcaacttcttgatggaggccattagttgtactgcttcaggtgatttactgtagtgaatcttctcagctttcattagccccaaaccatgctctgcgctgatgcttcctctttgtgctgatgtccactcatagacgaatggttcaatttgtgcgagaatattgtcgtcatatttgcttgatacaatgttcaaatgcagattcccatctccaaggtggccatagccca

SEQ ID NO: 7993 - DNA, 512 bp, Zea mays
  Clone ID: LIB3061-083-Q1-N6-F8
agaaatgtactttcttatttctgggaagccacaaacatcagacaaaaaactttattattgaactataactcataagaaatctaaagggggcaccaccaatgatgggttgttggtagaacgctgctgggtttgtcaaagcaagttggttgaatggcagcaattgttgcagttgtaagagggtgccagcgttaggcgcagcgtgctggtagaacggcaacaactgtggttgtatcaagaaggtagcagggctcacaccagctagctggctgaatggtagtagttgttgctgctgtaaataagcaggagagttcaatgctgccagttggttgaatggaagaaattgctgggggtaggcagcaggtagctggctgaatggtagttgttgttgttgcaaataagaagcagagttcaatgcagctagttggttgaatggaagaaactgctgttgctgagagtaggcagcaaggtttgctagcacaagttgttgtagttgttgtgccctgatgttttgt

SEQ ID NO: 7994 - DNA, 549 bp, Zea mays
  Clone ID: LIB3061-083-Q1-N6-G3
caatctagaaaagtactttcttatttctgggaagccacaaacatcagacaaaaaactttattattgaactataactcataagaaatctaaaagagggcaccaccaatgatgggttgttggtagaacactgctaggtttgtcaaagcaagttggttgaatggcagcaattgttgcagttgtaagagggtgccagcgttaggcgcagcgtgctggtagaacggcaacaactgtggttgtgtcaagaaggtagcagggctcacaccagctagctggctgaatggtagtagttgttgctgctgtaaataagcaggagagttcaatgctgccagttggttgaatggaagaaattgttgggggtaggcaacaggtagctggctgaatggtagttgttgttgttgcaaataagaagcagagttcaatgcagctagttggttgaatggaagaaactgctgttgctgagagtaggcagcaaggtttgctagcacaagttgttgtagttgttgtgccctgatgttttgtgccaataaatgccaccaaggtaactgctgt

SEQ ID NO: 7995 - DNA, 462 bp, Zea mays
  Clone ID: LIB3061-083-Q1-N6-H1
agaaatgtactttcttatttctgggaagccacaaacatcagacaaaaaactttattattgaactataactcataagaaatctaaaagagggcaccaccaatgatgggttgttggtagaacgctgctgggtttgtcaaagcaagttggttgaatggcagcaattgttgcagttgtaagagggtgccagcgttaggcgcagcgtgctggtagaacggcaacaactgtggttgtatcaagaaggtagcagggctcacaccagctagctggctgaatggtagtagttgttgctgctgtaaataagcaggagagttcaatgctgccagttggttgaatggaagaaattgctgggggtaggcagcaggtagctggctgaatggtagttgttgttgttgccaataagaagcagagttcaatgcagctagttggttgaatggaagaaactgctgttgctgagagtaggca

SEQ ID NO: 7996 - DNA, 399 bp, Zea mays
  Clone ID: LIB3061-083-Q1-N6-H3
gattcattaaaaccaaaactttattatgaccatgcatatattattggtcataccacacatgataatgtgtgtcgtcttactgcattattacatatatagatagagagagatggatagaggagatttcccaaatatcatgaatcagtagtagggcggaatggcagcggagacgccacaggggttggtgcggtagctgggcagctggtactggtagagtccacccatggccggcatgttctgcgccatcatcatggccatggggttgagaccctgggctgccagcagctgctgctgctgctgcatcagagctggctcgtacaggctgctgctggcggcagcggcacgctcaagctgcataatcatttgcagctgctgcgcgacggactgcacgttcatcat

SEQ ID NO: 7997 - DNA, 586 bp, Zea mays
  unsure (1)..(586): unsure at all n locations; Clone ID: LIB3061-083-Q1-N6-H8
gggtgggggggttttttctttttttttttttttttttttttttttttttttttttctttttttttttcgtctttttttcttctcttcccccccccccccccccgccccccccccccctttttctcctccccccgctctccccccctttctgggggggggggccccctctccccccgggccctctcccccccttccccccccctacctccccccttcttgctccccgcctccctctcccctccccccctctccccgccccctccccccccctcccccctccccccccccccctcttcccctctcccccctgtccccttttgcccgttcccccctctccctcctccctttcccccctcttctcccccctctcccccccttccccccccctccccccgctgtccctcttcccccgccgtccccctcccccctcctcgccgcctccccgcctcccctcccccccttcttcccccccccgtcttttttctctcccccctctttcctctcctcccctcctccctcccccccccccccttcccctctcccccnccctccccccccccccttccccctcccccccccccccccc

SEQ ID NO: 7998 - DNA, 536 bp, Zea mays
  Clone ID: LIB3061-083-Q1-N6-H9
tttttttttttttttttttttttttttttttttttttttttttttttttttttttttttttttttttttttttttttttttttttttccggccccccccggggaaccagatccgtttgcccaccgccggggccaacataccccaggtctaaaaaaatcccaaaagggccggggccccaatttaagatttcaatcaacaaaacacaaaaagggacccaaccgggggaaaaaaacatggccaaagtcggtcaaaaaaaagggccctccacaaatcaagggccaaggaaacacgccgccccccccaaaggcttcccaacaaccggtttaaacaaaaacagtaggcccattgcccaacccccggtcaacccggattttctaaacccggtagttgggggtgggcaacccccccacatcatccccaaaaagcttcccccaacccccagggccaaacggggaaaaacaaaaacaacccccaatggggggataacggaaagggcccccaaaaaaacccccgggcgccaaaatcggcgggatacc

SEQ ID NO: 7999 - DNA, 626 bp, Zea mays
  Clone ID: LIB3061-084-Q1-K6-A1
attatttagaccaactagcaacataggaaagcacaatagtgtaccaacaatggcagccaaaatttttgcctccttatgctccttggtatttctgcaagtgctgctacggcgaccattttcccgcaatgctcacaagctcctatagcttcccttcttcccccgtacctctcaccagcggtgtcttcggtatgtgaaaacccaattcttcaaccctacaggatccaacaggcaatcgcagctggcatcttacctttatcacccttgttcctccaacaatcatcagccctattacagcagttacctttggtgcatttattggcacaaaacatcagggcacaacaactacaacaacttgtgctagcaaaccttgctgcctactctcagcaacagcagtttcttccattcaaccaactagctgcattgaactctgcttcttatttgcaacaacaacaactaccattcagccagctacctgttgcctacccccaacaatttcttccattcaaccaactggcagcattgaactctcctgcttatttacagcagcaacaactactaccattcagccagctagctggtgtgagccctgctaccttcttgacacaaccacagttgttgccgttcta

SEQ ID NO: 8000 - DNA, 655 bp, Zea mays
  unsure (1)..(655): unsure at all n locations; Clone ID: LIB3061-084-Q1-K6-A10
nttttgagcttcanaaacacaccagcgaagcacattagcaacaacctaacaacaatggctaccaagatattatccctccttgcgcttcttgcgctttttgcgagcgcaacaaatgcgttcattattccacaatgctcacttgctccaagttccattattacacagttcctcccaccagttacttcaatgggcttcgaacacccagctgtgcaagcctataggctacaacaagcaattgcggcgagcgtcttacaacaaccaatttcccagttgcaacaacaatccttggcacatctaacaatacaaaccatcgcaacgcaacagcaacaacaattcctaccagcactgagccacctagccatggtgaaccctgccgcctacttgcaacagcagttgcttgcatcaaacccacttgctctggcaaacgtagttgcaaaccagccacaacaacagctgcaacagtttctgccagcgctcagtcaactagccatggtgaaccctgccgcctacctacaacagcaacaactgctttcatctagcccgctcgctgtggccaatgcacctacatacctgcaacaacaattgttgcaacagattgtaccagctctgactcagctagttgtggcaaaccctgctgcctacttgcaacagctgc

SEQ ID NO: 8001 - DNA, 642 bp, Zea mays
  unsure (1)..(642): unsure at all n locations; Clone ID: LIB3061-084-Q1-K6-A11
gccaaacttgttgaggtcaccaaangttgagcgagttgacacaaaagtaagcgagagtgttgaattggagaggaaggtgcaggaccttgagcagaagctgcagctagcttattccaagtgtgacgaacaggcagtggatactgtggagtcgagatcccgtgaattcagcctggattcatcaacgacttcaggcaagcagcaagacaaaactcaggctgtctcaccaaacccaaccctgcaaggagtgcaagaaccttccggcatcatggccttcaagttcatcctgggagttgccctgctgtctgtcctaatcggcgtgtttcttgggaagcggtactagcgctcaggtcgtgctgaaagggctcagccagcggcaagtttgaaaggattggtggccttgatggtaatggttcgacgactttctgggagaagggctcatcggcgtgtttctttttgccgtaattttcacttttcgggtaagggggggccaaggaatttgatttttgatcattcctaccctttcatgcaaatggccaactgcatgcgactggttttgcctacagcaagtttccgtatacatttcttgtccgtaaagatcacaagtccagcgacgaaacatgaagcatttgctactatatgtct

SEQ ID NO: 8002 - DNA, 523 bp, Zea mays
  unsure (1)..(523): unsure at all n locations; Clone ID: LIB3061-084-Q1-K6-A2
gcaggctgcaagcctgtgttaacagtctacgagagtcccaggcgatgcaggacaggatgctggctgattcagctggcaccgatgggggtgatttcatgactgaattggaggagctatgccgggatgatggcgatgccccgatgtcgactatttcttgacatggagcttactatagatcagttaggcagtgacatgttctttaccagactagatgtaaattgttgttactaaatggtctctactcaccgttgaacaccataatataatgatataacagctaatacatggacttctacagattaaaaaaaaaaaaaaaaaaaaaaaaaaaaaaaaanaaaaaaaaaaaaaaaaaaaaaaaaaaaaaggacnnacgcgtgaaggcaacaggctatctctcctatggtgccacctaaatacaatttatatgggcgccactttacaaccataaattcggcgaatttcttggcgttccccaactgaataacctgggaacacatccaattaaccccctttggcgaaaaac

SEQ ID NO: 8003 - DNA, 618 bp, Zea mays
  unsure (1)..(618): unsure at all n locations; Clone ID: LIB3061-084-Q1-K6-A3
gngnaccaatagcaacatagnaagcacaatagtgtaccaacaatggcagccaaaaattttgcctccttatgctccttggtctttctgcaagtgctgctacggcgaccattttcccgcaatgctcgcaagctcctatagcttcccttcttcccccgtacctctcaccagcggtgtcttcggtatgtgaaaacccaattcttcaaccctacaggatccaacaggcaatcacagctggcatcttacctttatcacccttgttcctccaacaatcatcagccctattacatcagttacctttggtgcatttattggcacaaaacatcagggcacaacaactacaacaacttgtgctagcaaaccttgctgcctactctcagcaacagcagtttcttccattcaaccaactagctgcattgaactctgcttcttatttgcaacaacaacaactaccattcagccagctacctgctgcctacccccagcaatttcttccattcaaccaactggcagcattgaactctcctgcttatttacagcagcaacaactactaccattcagccagctagctggtgtgagccctgctaccttcttgatacaaccacagttgttgccgttct

SEQ ID NO: 8004 - DNA, 585 bp, Zea mays
  unsure (1)..(585): unsure at all n locations; Clone ID: LIB3061-084-Q1-K6-A4
caacatanaaagccaatagtgtaccaacaatggcagccaaaatattttgcctccttatgctccttggtctttctgcaagtgctgctacggcgaccattttcccgcaatgctcgcaagctcctatagcttcccttcttcccccgtacctctcaccagcggtgtcttcggtatgtgaaaacccaattcttcaaccctacaggatccaacaggcaatcgcagctggcatcttacctttatcacccttgttcctccaacaatcatcagccctattacaacagttacctttggtgcatttattggcacaaaacatcagggcacaacaactacaacaacttgtgctagcaaaccttgctgtctactctcagcaacagcagtttcttccattcaaccaactaggttcattgaactctgcttcttatttgcaacaacaacaactaccattcagccagctacctgctgcctacccccagcaatttcttacattcaaccaactagcagcattgaactctcctgcttatttacagcagcaacaactactaccattcagccagctagctggtgtgagccctgctacctggttgacac

SEQ ID NO: 8005 - DNA, 313 bp, Zea mays
  Clone ID: LIB3061-084-Q1-K6-A5
ggcgatcttcggcttggtcctccagtccatcctgcagcagcagccgcaaagcggccaggtcgcggggctgttggcggcgcagatagcgcagcaactgacggcgatgtgcggcctgcagcagccgactccatgcccctacgctgctgccggcggtgtcccccactgaagaaactatgtgctgtagtatagccgctggctagctagctagttgagtcatttagcggcgatgattgagtaataatgtgtcacgcatcaccatgggtggcagtgtcagtgtgagcaatgacctgaatgaacaattgaaatgaatttt

SEQ ID NO: 8006 - DNA, 632 bp, Zea mays
  Clone ID: LIB3061-084-Q1-K6-A6
ggccatgtcggcgcagttcacaagaataaccttcagcaacctgtttgtccgtcgggctggcccaggcagcacggagctgaccgtggagggaaggccatccgaccagctgggcaggagaaacctcactgacagccccgtatttgacggccgtggccctgacgccagcctcgtggctcgcgtacagggagtcgctacccagatgggcgacgtgcgccagttgtacaccgtcgtgttccaggagaggccgctcaagggctccacgctcgtcaccgaaggcgcgatgacagaagggtcagacgagtgggcgatctacggtggaactggagtgttcgcgatggcgagaggcgtcataaggagaacgtttcttgccgacacgagcggcgggaactccgacgagcttgccgtggaggttctctgcccggtgttccgcccggcggcgtttggctcatcgtcgtcacagccagcagcaaaggacatcagctccaccgtcgtcgtcaccaaggtcggagtgtggggtggagagggagggtcggcgcaggacatcgcgacgacggagccgccgaggcgtctgcagagcctgaccgtccgcgccggcgttgccgtggactccatcgagttcacctacagtaccg

SEQ ID NO: 8007 - DNA, 309 bp, Zea mays
  unsure (1)..(309): unsure at all n locations; Clone ID: LIB3061-084-Q1-K6-A7
ggatgacccatggcagcttgatatgtcgngattatgtctaagtgaaggcctctctcgtaacatgccagacaatggtgcagaaaatggcaccgagggaggaggctctagagttaaatatgctgtgatggatgttcccatcaccttaccttcgttngaaaccatgcttttgnnacaagcctaaccccaaacaaggcattggtatgctgtcatggagcagcgacagccactatttcttcaccaggaatgacaacatgccaactgttctttggatatgggatatattgccgcctttgagcttgcccgcttgtg

SEQ ID NO: 8008 - DNA, 465 bp, Zea mays
  Clone ID: LIB3061-084-Q1-K6-B1
gttggatgcaagcaactgctgttgcaagtaggcgacagggttcaccacagctcagtcaactagccatggtgaaccctgccgcctacctacaacagcaacaactgatttcatctagccctctcgctgtggttaatgcacctacatacctgcaacaacagttgctgcaacagattgtaccagctctgactcagctagctgtggcaaaccctgctgcctacttgcaacagctgcttccattcaaccaactgactgtgtcgaactctgctgcgtacctacaacagcgacaacagttacttaatccactagcggtggctaacccattggtcgctgccttcctacagcagcaacaattgctgccatacaaccagttctctttgatgaaccctgccttgttgtggcagcaacccatcgttggaggtgccttctgttagattacatatgagatgtactcgataatggtgccct

SEQ ID NO: 8009 - DNA, 634 bp, Zea mays
  Clone ID: LIB3061-084-Q1-K6-B10
tttttcagcattcaaaaacacaccaagcgaagcgcactagcaacgacctaacaccaatggctaccaagatattagccctccttgcgcttcttgcccttttagtgagcgcaacaaatgcgttcattattccacagtgctcacttgctcctagtgccagtattccacagttcctcccaccagttacttcaatgggcttcgaacatccagccgtgcaagcctacaggctacaactagcgcttgcggcgagcgccttacaacaaccaattgcccaattgcaacaacaatccttggcacatctaaccctacaaaccattgcaacgcaacaacaacaacaacagtttctgccatcactgagccacctagccgtggtgaaccctgtcacctacttgcaacagcagctgcttgcatccaacccacttgctctggcgaacgtagctgcataccagcaacaacaacagctgcaacagtttatgccagtgctcagtcaactagccatggtgaaccctgccgtctacctacaactactttcatctagcccgctcgcggtgggcaatgcacctacgtacctacaacaacagttgctgcaacaaattgtaccagctctgactcagctagctgtggcaaacactgctgc

SEQ ID NO: 8010 - DNA, 653 bp, Zea mays
  unsure (1)..(653): unsure at all n locations; Clone ID: LIB3061-084-Q1-K6-B11
tccgaatccccggtcgacccagcgtccgccaanaactttccctccttatgctccttgctctttctgcatgtgttgctaacgcgacaattttccctcaatgctcacaagctcctatagcttcccttcttcccccataccttccatcaatgatagcttcagtatgtgaaaacccagctcttcaaccctataggctccaacaagcaatcgcagcaagcaacatacctttatcacccttgtttcaacaatcgccagccctatctttggtgcagtcattggtacaaaccatcaaggcacagcagctgcagcaactcgtgctacctgtgatcaaccaagtagctctggcaaacctttctccctactatcagcaacaacaatttcttccattcaaccaactatctacactgaaccctgctgcttatttgcagcaacaactattaccattcagccagctagctactgcctactctcatcaacaacaacttcttccatttaaccaattggccgcactgaacctcgctgcttatttgcagcagcaaatattactaccatttagccagctagctgcagcaagccgtgcttccttcttgacacagcaacagttgctgcctttctaccagcagtttgcggctaaccccgcaaccctcttacaacta

SEQ ID NO: 8011 - DNA, 616 bp, Zea mays
  unsure (1)..(616): unsure at all n locations; Clone ID: LIB3061-084-Q1-K6-B2
caactagcaacatagnaaagcacaatagtgtaccaacaatggcagccaaaatattttgcttccttatgctccttggtctttctgcaagtgctgctaccganaccattttcccacaatgctcacaagctcctatagcttcctttcttcccccatacctctcaccagcggtgtcttcagtatgtgaaaacccaattcttcaaccctacaggatccaacaggcaatcgcagcaggcatcttacctttatcacccttgttcctccaacaaccgtcagccctattacagcagttacctttggtgcatttgttggcacaaaacatcaaggcacaacaactacaacaacttgtgctaggaaaccttgctgcctactctcagcaacagcagtttcttccattcaaccaactggctgcattgaactctgctgcttatttgcaacaacaactaccattcagtcagctagctgctgcctacccccagcaatttcttccattcaaccaactggcagcattgaactctgctgcttatttacaacagcaacagctaccaccattcagccagctagctgatgtgagccctgttgccttcttgacacaacaacagttgttgccgttctacct

SEQ ID NO: 8012 - DNA, 613 bp, Zea mays
  unsure (1)..(613): unsure at all n locations; Clone ID: LIB3061-084-Q1-K6-B4
atccaatccagnatcagcaagcggcagtgcgtagagaggatcgtcgaacagaacagcatgaagatggtcatcgttctcgtcgtgtgcctggctctgtcagctgccagcgcctctgcaatgcagatgccctgcccctgcgcggggctgcagggcttgtacggcgctggcgccggcctgacgacgatgatgggcgccggcgggctgtacccctacgcggagtacctgaggcagccgcagtgcagcccgctggcggcggcgccctactacgccgggtgtgggcagccgagcgccatgttccagccgctccggcaacagtgctgccagcagcagatgaggatgatggacgtgcagtccgtcgcgcagcagctgcagatgatgatgcagcttgagcgtgccgctgccgccagcagcagcctgtacgagccagctctgatgcagcagcagcagcagctgctggcagcccagggtctcaaccccatggccatgatgatggcgcagaacatgccggccatgggtggactctaccagtaccagctgcccagctaccgcaccaacccctgtggcgtctccgctgccattccgccctactactgattcatgatatttgggaaat

SEQ ID NO: 8013 - DNA, 553 bp, Zea mays
  unsure (1)..(553): unsure at all n locations; Clone ID: LIB3061-084-Q1-K6-B5
ggcaaacgtactgcataccaacaacaacaacagttgcaacagtttctaccagcgctcagtcaactagccatggtgaaccctatcgcctacctacaacagcaacaacttctttcatctagcccgctcgctatgggcaatgcacctacatacctgcaacaacagttgttgcaacaacagttgctgcaacaaattgtaccagctcttactcagctagctgtggcaaaccctgctgcctacttgcaacaactacttccattcaaccaactgactgtgtcgaactctgctgcgtacctacaacagcgacaacagttacttaatccactagcggtggctaacccattggtcgctgccttcctacagcagcaacaattgctgccatacaaccagttctctttgatgaaccctgccttgtcgtggcagcaacccatcgttggtggtgccatcttttagattacatatgagatgtactcgataatggtgccctcatagcggcatgtgtttcctaaaaataatcaatatattgattgagatttatctcgatataaaaaaaana

SEQ ID NO: 8014 - DNA, 295 bp, Zea mays
  unsure (1)..(295): unsure at all n locations; Clone ID: LIB3061-084-Q1-K6-B6
ngacaactactaccattcagccagctagctggtgtgagccctgctaccttcttgacacaaccacagttgttgccgttctaccagcacgttgcgcctaacgctggcaccctcttacaactgcaacaattgctgccattcaaccaacttgctttgacaaacccagcagtgttctaccaacaacccatcattggtggtgccctcttttagatttcttatgagttatagttcaataataaagttttttatctgatgtttgtggcttcccagaaataagaaagtacatttctagattctt

SEQ ID NO: 8015 - DNA, 332 bp, Zea mays
  unsure (1)..(332): unsure at all n locations; Clone ID: LIB3061-084-Q1-K6-B7
atcagaaaacggcggcgcgggcggccaagnagcaggcggaggaggagttgtgccaagccacaatgggtatctcgcgtgactcgatgcacaagcgccgagccaccggtggaaagcagaaggcctggaggaagaacgaaagttgagcttggtcgccagccagccaacaccaagttgtcaagcaataagacggtgaggagggtccgtgttcggggaggtaatgtgaaatggagggctcttcgccttgatactggtaactactcatgggggaagtgaagctgntacccgcaagacccgtatcctcgacgtggtctacaatgcatcaaacattgagc

SEQ ID NO: 8016 - DNA, 358 bp, Zea mays
  unsure (1)..(358): unsure at all n locations; Clone ID: LIB3061-084-Q1-K6-B8
gggggggggggggnnacagagagaggggagagtgggagacggtcggtgtcagaggcctncctcctccacactctcagtcgtcttctcgtcccagcgctttcttggctcgcgaggaaacctcttcgtgtgtttgcnnttgcatataactgtgtgggggggggtggttgctcggtgtgttggccttggccctgcgcctcggcnggatcatcgcctagctgcnggcaggcctcnctggtggcgctcattgaccctgctctcgctgtnnngatagtcccgcggtgctttcctgtttccgcttgatccaactctcgacctgaacgccccactcggcactnctccctccctgtctgctatgccc

SEQ ID NO: 8017 - DNA, 611 bp, Zea mays
  unsure (1)..(611): unsure at all n locations; Clone ID: LIB3061-084-Q1-K6-B9
ctcacnatccactcgagcaccaagccgagggaaggtgaggagcgatggcgcgcggcgtggtgtcggcgaagggcggcgcggtcgcgggcaagaagaagggtcggtttccttcacgatcgactgcaccaagccagtggaggacaagatcatggaggtcgcctcgctcgagaagttcctgcaggagcgcatcaaggtcgccggcggcaaggctggcaacctcggcgactccgtcaccatctctcgcgagaagaccaaggtcaccgtcacctctgacggacccttctccaagaggtacctgaagtacttgaccaagaagtacttgaagaagcacaacgtgcgggattggctacgcgtggttgctgccaacaaggaccgaaacgtctatgagctccgctacttcaacattgctgagaacgagggcgaggaagaagattagattgcactacgcttatattttagtattgaactcgttgcattttgatacctgtacccgtagtttcgcaaatgtcccatgttatggtgtggtatggttaatttgaagaatccttatgtactgaatctctgcaaaaagctatgttgtggacagaagtgtaacgtgccggatttcttgc

SEQ ID NO: 8018 - DNA, 601 bp, Zea mays
  unsure (1)..(601): unsure at all n locations; Clone ID: LIB3061-084-Q1-K6-C1
gctgaaagtatgatcaagcattagtcggcgacaagactattgcgttttggttgatggacaaggatatgtatgatttcatggccctcgatagaccttcaactcctaccattgatcgtgggatagcattacataagatgattagacttatcacaatgggtttaggaggagagggctatcttaatttcatgggaaatgagtttggacatcctgaatggatagattttccaagaggtccgcaaagacttccaagtggtaagtttattccagggaataacaacagttatgacaaatgtcgtcgaagatttgacctgggtgatgcagactatcttaggtatcatggtatgcaagagtttgatcaggcaatgcaacatcttgagcaaaaatatgaattcatgacatctgatcaccagtatatttcccggaaacatgaggaggataaggtgattgtgttcgaaaagggagatttggtatttgtgttcaacttccactgcaacaacagctattttgactaccgtattggttgtcgaaagcctgnggtgtataaggtggtcttggactccgacgctggactatttggtggatttagcaggatccatcacgc

SEQ ID NO: 8019 - DNA, 610 bp, Zea mays
  unsure (1)..(610): unsure at all n locations; Clone ID: LIB3061-084-Q1-K6-C10
cgtcgcacagcaacatanaagtagaatccattagcaacaatagagcaacaatggcgaccaagatattttccctccttatgctccttgctctttctacatgtgttgctaacgcgacaattttccctcaatgctcacaagctcctatagcttcccttcttcccccataccttccatcaattatagcttcagtatgtgaaaacccagctcttcaaccatataggcttcaacaagcaatcgcagcaagcaacatacctttatcgcccttgttgtttcaacaatcaccagccctatctttggtgcagtcattggtacaaaccatcagggcacaacagctgcagcaactcgtgctacctgtgatcaaccaagtagctctggcaaacctttctccctactctcagcaacaacaatttcttccattcaaccaactgtctacactgaaccctgctgcttatttgcagcaacaactattaccatttagccagctagctactgcctactctcagcaacaacaacttcttccatttaaccaattggccgcactgaaccccgctgcttatttgcagcagcaaatactactgccatttagcgagctagctgcagcaagtcgtgc

SEQ ID NO: 8020 - DNA, 642 bp, Zea mays
  unsure (1)..(642): unsure at all n locations; Clone ID: LIB3061-084-Q1-K6-C12
gnaacacaccaagcgaagcacattagcaacaacctaacaacaatggctaccaagatattatccctccttgcgcttcttgcgctttttgcgagcgcaacaaatgcgttcattattccacaatgctcacttgctccaagttccattattacacagttcctcccaccagttacttcaatgggcttcgaacacccagctgtgcaagcctataggctacaacaagcaattgcggcgagcgtcttacaacaaccaatttcccagttgcaacaacaatccttggcacatctaacaatacaaaccatcgcaacgcaacagcaacaacaattcctaccagcactgagccacctagccatggtgaaccctgccgcctacttgcaacagcagttgcttgcatcaaacccacttgctctggcaaacgtagttgcaaaccagccacaacaacagctgcaacagtttctgccagcgctcagtcaactagccatggtgaaccctgccgcctacctacaacagcaacaactgctttcatctagcccgctcgctgtggccaatgcacctacatacctgcaacaacaattgttgcaacagattgtaccagctctgactcagctagttgtggcaaaccctgctgcctacttgcaacagctg

SEQ ID NO: 8021 - DNA, 126 bp, Zea mays
  unsure (1)..(126): unsure at all n locations; Clone ID: LIB3061-084-Q1-K6-C2
naaaaaaaaaaaaaaaaaaaaaaaaaaaaaaaaaaaaaaaaaaaaaaaaagaaaaaaaaaaaaaaaaaaaaaaaaaatgggcgggcccttttaagaggaaccaagctttactgtacctcttgcatg

SEQ ID NO: 8022 - DNA, 342 bp, Zea mays
  unsure (1)..(342): unsure at all n locations; Clone ID: LIB3061-084-Q1-K6-C3
gngaaccaactagcaacatagnaaagcacaatagtgtaccaacaatggcagccaaaatttttgcctccttatgctccttggtctttctgcaagtgctgctacggcgaccattttcccgcaatgctcgcaagctcctatagcttcccttnncttncccccgtacctctcaccagcggtgtcttcggtatgtgaaaacccaattcttcaaccctacaggatccaacaggcaatcacagctggcatcttacctttatcacccttgttcctccaacaatcatnncagccctattacatcagttacctttggtgcatttaattggcacaanaacatcagggcacaaa

SEQ ID NO: 8023 - DNA, 621 bp, Zea mays
  Clone ID: LIB3061-084-Q1-K6-C4
accatcacaacgcaacagcaacaacagttcctaccagcactgagccacctagccatggtgaaccctgccgcctacttgcaagagcagctgcttgcatccaacccacttgctctggcgaacgtagttgcaaaccagcaacaacaacagctacaacagtttctgccaacgctcagtcaactagccatggtgaaccctgccgcctacgtacaacaacaacaactgctttcatctagcccgctcgctgtgggcaatgcacctacatacctgcaacaacaattgttgcaacagattgtaccagctctgactcaactagctgtggcaaaccctgttgcctacttgcaacagctgcttccattcaaccaactgactctgtcgaactctgctgcgtacctacaacagcgacaacagttacttaatccattggtagtggctaacccattggtcgccgccttcctacagcagcaacaattgctgccatacaaccagttctctttgatgaatcctgtcttgtcgaggcagcaacccatcgttggaggtgccatcttttagattacatatgagatgtactcgataatggtgccctcataccgacgtgtgtttcctagaaatatcaatatattg

SEQ ID NO: 8024 - DNA, 415 bp, Zea mays
  Clone ID: LIB3061-084-Q1-K6-C6
agcaggcaacaagcaagattacctgcccatcgatcatatcgtcaactggtccggcagttcgcgacaccatgagctccacggagtgcggcggcggcggcggcggcgccaagacgtcgtggcctgaggtggtcgggctgagcgtggaggacgccaagaaggtgatcctcaaggacaagccggacgccgacatcgtggtgctgcccgtcggctccgtggtgaccgcggattatcgccctaaccgtgtccgcatcttcgtcgacatcgtcgcccagacgccccacatcggctgataatatataagctagccgctatttcctttccttgccccagaacttgaaataaatatatatacgatgaaataacgcgggcatgccgaataatggatgtgtgaattctcactaattaagtaatgcat

SEQ ID NO: 8025 - DNA, 193 bp, Zea mays
  Clone ID: LIB3061-084-Q1-K6-C7
tggcttctctcttccccttcccgttcgggtctcgggcttcgtgtaggttcttccggggcttcgcgtttcgtgggtgagtcgggtcgcgtatggcggcgtcgcgttgtttgagtaccgtctggcttcgtgcggcgtgcctcgctcttgggcctcgggtcgactcatctcccttccacaagtcgccttcagctac

SEQ ID NO: 8026 - DNA, 649 bp, Zea mays
  unsure (1)..(649): unsure at all n locations; Clone ID: LIB3061-084-Q1-K6-C9
cggccacgtcgcactcgtcgcacgcgcgccggcctgggcgtcccggccgcgtccacgttccgccgcggcgccgcgcagggcctgaggggggcccgggcgtcggcggcggcggacacgctcagcatgcggaccagcgcgcgcgcggcgcccaggcaccagcagcaggcgcgccgcgggggcaggttcccgtcgctcgtggtgtgcgccagcgccggcatgaacgtcgtcttcgtcggcgccgagatggcgccgtggagcaagaccggcggcctcggcgacgtcctcggcggcctgccgccggccatggccgcgaacgggcaccgtgtcatggtcgtctctccccgctacgaccagtacaaggacgcctgggacaccagcgtcgtgtccgagatcaagatgggagacgggtacgagacggtcaggttcttccactgctacaagcgcggagtggaccgcgtgttcgttgaccacccactgttcctggagagggtttggggaaagaccgtngagaagatctacgggcctgtcgctggaacggactacagggacaaccagctgcggttcatcctgctatgccaggcagcacttgaagctcctaggatcctgagccttgacaacaacccatacttcttcggaccatacggggagg

SEQ ID NO: 8027 - DNA, 610 bp, Zea mays
  unsure (1)..(610): unsure at all n locations; Clone ID: LIB3061-084-Q1-K6-D1
ctagcaacatagnaaagcacaatagtgtaccaacaatggcagccaaaaattttgcctccttatgctccttggtctttctgcaagtgctgctacggcgaccattttcccgcaatgctcgcaagctcctatagcttcccttcttcccccgtacctctcaccagcggtgtcttcggtatgtgaaaacccaattcttcaaccctacaggatccaacaggcaatcgcagctggcatcttacctttatcacccttgttcctccaacaatcatcagccctattacaacagttacctttggtgcatttattggcacaaaacatcagggcacaacaactacaacaacttgtgctagcaaaccttgctgcctactctcagcaacagcagtttcttccattcaaccaactaggttcattgaactctgcttcttatttgcaacaacaacaactaccattcagccagctacctgctgcctacccccagcaatttcttccattcaaccaactagcagcattgaactctcctgcttatttacagcagcaacaactactaccattcagccagctagctggtgtgagccctgctaccttcttgacacaaccacagttgttgccgttc

SEQ ID NO: 8028 - DNA, 607 bp, Zea mays
  Clone ID: LIB3061-084-Q1-K6-D10
aacgtttctgccatcactgagccacctagccgtggtgaaccctgtcacctacttgcaacagcagctgcttgcatccaacccacttgctctggcgaacgtagctgcataccagcaacaacaacagctgcaacagtttatgccagtgctcagtcaactagccatggtgaaccctgccgtctacctacaactactttcatctagcccgctcgcggtgggcaatgcacctacgtacctacaacaacagttgctgcaacaaattgtaccagctctgactcagctagctgtggcaaaccctgctgcctacttacaacagttgcttccattcaaccaactggctgtgtcaaactctgctgcgtacctacaacagcgacaacagttacttaatccattggcagtggctaacccattggtcgctaccttcctgcagcagcaacaacaattgctgccatacaaccagttctctttgatgaaccctgccttgcagcaacccatcgttggaggtgccatcttttagattacatatgagatgtactcgacaatggtgccctcataccgacatgtgtttcctagaaataatcaatatattgattgagatttatctcgatat

SEQ ID NO: 8029 - DNA, 462 bp, Zea mays
  unsure (1)..(462): unsure at all n locations; Clone ID: LIB3061-084-Q1-K6-D11
gtttgcagctggaactgaggcgattgccaanaagctagctgagcttacaaccacgaagggtgtcactaccatcatcggcggcggcgactctgtcgctgctgtcgagaaggctgggctggcggacaagatgagccacatttcgaccggcggcggtgcgagcttggaactcttggaaggcaagactctacctggtgtccttgccctcgatgacgcctagatccgctgctgctgctgctgctgctactcaggttctgccagctttgcgtgtcatcttgtttcggaccttggtgtaacgctgcaaggttaaggtttactcctccacacatggacttttggggataggcttgccatcgtgttttgctagatgagtcgtgaaataagcttttacttcctcgctgctgtgggtgaagtaactggaattcggaaatttggaactaacaaaaccccccgtggatttgtatg

SEQ ID NO: 8030 - DNA, 524 bp, Zea mays
  unsure (1)..(524): unsure at all n locations; Clone ID: LIB3061-084-Q1-K6-D2
ngattaatcaagtagttgcagcgaaccttgctgcttaccttcagcaacaacaatttcttccattcaatcaactagctggggtgaaccctgctgcttacttgcaggcacaacagctactaccattcaaccaacttgtcgggagccctgctgccatcttattgcagcaacagttgctgccattccgtctacaagttgttgcaaacattgctgctttcttgcaacaacaacaattgctgccattttacccacaggttgtgggaaacattaacgccttcttgcaacaacaacaattgctgccattctacccacaggatgtggcaaacattgtcgccttcttacaacaacagcaattgctgccatttagccaactcgctttgacgaatcctaccaccttattgcatcagcccaccattggtggtaccatcttctagattttttatgctttatactgtaataataaatntctcatactgatatgtgcaacttctcagtaataaaagattagagatctatattttaagttc

SEQ ID NO: 8031 - DNA, 168 bp, Zea mays
  unsure (1)..(168): unsure at all n locations; Clone ID: LIB3061-084-Q1-K6-D3
ctcgcggcgctgatggcggcccaggtagcgcagcagctgacggcgatgtgcggcctgcagctgcagcagccaggtccctgcccttgcaacgcagctgccggcggtgtctactactgaggaaactatgtactgtagtaataatgtaatggagccgctgactagctncct

SEQ ID NO: 8032 - DNA, 624 bp, Zea mays
  unsure (1)..(624): unsure at all n locations; Clone ID: LIB3061-084-Q1-K6-D4
caactagcaacatagnaaagcacaatagtgtaccaacaatggcagccaaaatattttgcttccttatgctccttggtctttctgcaagtgctgctaccganaccattttcccacaatgctcacaagctcctatagcttcctttcttcccccatacctctcaccagcggtgtcttcagtatgtgaaaacccaattcttcaaccctacaggatccaacaggcaatcgcagcaggcatcttacctttatcacccttgttcctccaacaaccgtcagccctattacagcagttacctttggtgcatttgttggcacaaaacatcaaggcacaacaactacaacaacttgtgctaggaaaccttgctgcctactctcagcaacagcagtttcttccattcaaccaactggctgcattgaactctgctgcttatttgcaacaacaactaccattcagtcagctagctgctgcctacccccagcaatttcttccattcaaccaactggcagcattgaactctgctgcttatttacaacagcaacagctaccaccattcagccagctagctgatgtgagccctgttgccttcttgacacacaacagttgttgccgttctacctgcacgctgc

SEQ ID NO: 8033 - DNA, 639 bp, Zea mays
  unsure (1)..(639): unsure at all n locations; Clone ID: LIB3061-084-Q1-K6-D5
nttgnaaaccaactagcaacatagnaaagcacaatagtgtaccaacaatggcagccaaaatattttgcctccttatgctccttggtctttctgcaagtgctgctacggcgaccattttcccgcaatgctcgcaagctcctatagcttcccttcttcccccgtacctctcaccagcggtgtcttcggtatgtgaaaacccaattcttcaaccctacaggatccaacaggcaatcgcagctggcatcttacctttatcacccttgttcctccaacaatcatcagccctattacaacagttacctttggtgcatttattggcacaaaacatcagggcacaacaactacaacaacttgtgctagcaaaccttgctgcctactctcagcaacagcagtttcttccattcaaccaactaggttcattgaactctgcttcttatttgcaacaacaacaactaccattcagccagctacctgctgcctacccccagcaatttcttccattcaaccaactagcagcattgaactctcctgcttatttacagcagcaacaactactaccattcagccagctagcctggtgtgaagccctgctaccttcttgacacaaccacagttgttgccgttctaccagcacgttgc

SEQ ID NO: 8034 - DNA, 210 bp, Zea mays
  Clone ID: LIB3061-084-Q1-K6-D6
gtgccagcgttaggcgcagcgtgctggtaccctcttacaactgcaacaattgctgccattcaaccaacttgctttgacaaacccaacagcattctaccaacaacccatcattggtggtgccctcttttagatttcttatgagttatagttcaataataaagttttttgtctgatgtttgtggcttcccagaaataagaaagtacatttct

SEQ ID NO: 8035 - DNA, 480 bp, Zea mays
  unsure (1)..(480): unsure at all n locations; Clone ID: LIB3061-084-Q1-K6-D7
nattgaaaccaactagcaacatagnaaagcacaatagtgtaccaacaatggcagccaaaatttttgcttccttatgctccttggtctttctgcaagtgttgctaccgcaaccattttcccacaatgctcacaagctcctatagcttcccttcttcccccatacctctcaccagcggtgtcttcaatgtgtgaaaccccaattgttcaaccctacaggatccaacaggcaatcgcaacaggcatcttaccattatcacccttgttcctccaacaaccgtcagccctattacagcagttacctttggtccatttggtggcacaaaacatcagggcacaacaactacaacaacttgtgctagcaaaccttgctgcatactctcagcaacatcagtttcttccattcaaccaactggctgcattgaactctgctgcttatttgcaacaacaattaccattncaccagctagttgctgcctaccc

SEQ ID NO: 8036 - DNA, 614 bp, Zea mays
  unsure (1)..(614): unsure at all n locations; Clone ID: LIB3061-084-Q1-K6-D8
gcatgctgagagcaaacccanaagggaaaaaggaaaaaagtaaaacanatagaggggagagtgggagacggtcggagacagaggcctcactcctccacactctcagtcgtcttccagtcccagcgctttcttggatcgcgaggaaaccactcggggagtttgcagttgcagagaactgtatcggccgaagtggttgcacggtgtgttggccttggccatgcgccacggcagggaacagagacgagcagcagggaggcagcaatggaggcgctcattgaccctgctctcgctgtaaagatagtcccgcggtgccctccgaattccacttgatccaactctcgacatgaagcggccacgcggcgctactccctccctgtctgcgatgcccaatcatcaggaagatgacggctacggcgtggtcgggatggaggcggacgtggacgtggacgtggacgaggagatgatggcgttcggcggcggcggcggcggggagaagaagcggcgcctgagcgccgagcaggtgcgcgcgctggagcggagcttcgaggtggagaacaagctggagccggagcgcaaggcgcggctggcgcgcgacctcggcctgcagcccgcca

SEQ ID NO: 8037 - DNA, 626 bp, Zea mays
  unsure (1)..(626): unsure at all n locations; Clone ID: LIB3061-084-Q1-K6-E1
caggaagtccaatgtgctgggnaaacctcacttttgggtgaacgctgatgggaacttaccaagaggaaggccaaaaaactgttaaaggaaagatctgggataagcctatagtgaagcttcttagtcctgttctgtcattgccaacacccaacaaagcagctaatcaatccagcgaagatgctgttgacatagtaaacagagccatccctgactacctggaacaaagaacaacacagaagcttttgttggttgggtcaggggcaagcaccatactcaagcaggcaaagttcttgtacaagactggcaagccattttcagtggatgagcgtgaagatctgaaacttatcatacaaagcaacatatacaactaccttggcatattgcttgaagggcgtgagcggtttgaagaggaatctttagctgatagaagaaaaaccagtcagtgtgacccttctagctctgggtgttgtgaacctggattatctgacgaagtcactgagtactcccttattccacgtttgaaagcattctcagattggattcttaaagcaatggctttaggtaatcttgaagactatttcctgcagcaagccgtgaatatgcaccacttgttgatgaatttatgg

SEQ ID NO: 8038 - DNA, 208 bp, Zea mays
  unsure (1)..(208): unsure at all n locations; Clone ID: LIB3061-084-Q1-K6-E10
cccgggtcgcccagcgtnccgnacgtttctgcctcactgaccactagcctggtgaacctgtcacctattgcaacagncagnctgcttgcatccaacccacttgctctggcgaacgtagctgcataccagcaacaacaacagctgcaacagtttatgccagtgctcagtcaactagccatggtgaaccctgccgtctacctacaactac

SEQ ID NO: 8039 - DNA, 564 bp, Zea mays
  unsure (1)..(564): unsure at all n locations; Clone ID: LIB3061-084-Q1-K6-E11
ggncggggtatctggcctgcacattgacccttaccacagcgacaaggccgcggatatcctggtcaacttctttgacaaatgcaaggcagatccgagctactgggacaagatctcacagggcggcctgcagagaatttatgagaagtacacctggaagctctactccgagaggctgatgaccctgaccggcgtgtacgggttctggaagtacgtgagcaacctggagaggcgcgagacccgccgctacatcgagatgttctacgccctgaagtaccgtagcctggcaagccaggttccgctgtccttcgattagtacggggaaagaagaagaagaagaagcccaggccggagaaccatcgcctgcatttcgatctgtttcaccgcaattcgcattgttagtcgtgtattggagttatgtgtacttggtttccaagaactttggttccttgtttttttttctttcttgtttgagcgtttttgggcagcgctggcctggttcctagtatggtgagaattggctgcaccttttgcttcgaataaaaatgcctgctcgttcacctgtaa

SEQ ID NO: 8040 - DNA, 642 bp, Zea mays
  Clone ID: LIB3061-084-Q1-K6-E12
ccgctcgcgcatcctattgccctcgcgccaccgtcgccgccgctgcagcgagccaccgccctgccgtcgcctgaggtagacaccaagccaccgccatggggcgtatgcacagccgcgggaagggtatctcttcatcggcgctgccgtacaagaggactcctccgatctggctcaagacagctaccaccgaggtggaggagatgattaccaaggctgcgaagaagggccagatgccgtcgcagattggtgttctgctccgtgaccagcacggcatcccgcttgtcaagagcgtgactggtagcaagatcctccgcatcctcaaggcccatgggttggcgccggagatcccggaggatctctacttcctcattaagaaggccgtggcgattaggaagcatctggagaggaacaggaaggacaaggactccaaattcagactcattcttgttgagagcaggatccaccgccttgcccgctactacaagcgtaccaagaagctcccacccacctggaagtacgagtcaaccacggcgagcactctggtggcctaagtgatatcctctgatggcttggtctttagcacctatgagcttgttctagatatgaatttatgtaattcttgttatgtctggagctggttag

SEQ ID NO: 8041 - DNA, 185 bp, Zea mays
  Clone ID: LIB3061-084-Q1-K6-E2
ctcttacaactacaacaattgttgccctttgtccaacttgctttgacagacccagcggcctcctaccaacaacacatcattggtggtgccctcttttagattgcttattagttgtaattcaataataaagttttttggatgatgtatgtggccaaccagaaataagaagttacatttccagattc

SEQ ID NO: 8042 - DNA, 622 bp, Zea mays
  unsure (1)..(622): unsure at all n locations; Clone ID: LIB3061-084-Q1-K6-E3
gaccaacagcacatanaagtggaatccagtagcaacaacagagcaacaatggcgaccaagatattttccctccttatgctccttgctctttctgcatgtgttgctaacgcgacaattttccctcaatgctcacaagctcctatagcttcccttcttcccccataccttccatcaatgatagcttcagtatgtgaaaacccagctcttcagccctataggctccaacaagcaatcgcagcaagcaacatacctttatcacccttgttgtttcaacaatcgccagccctatctttggtgcagtcattggtacaaaccatcagggcacagcagctgcagcaactcgtgctacctgtgatcaaccaagtagctctggcaaacctttctccctactctcagcaacaacaatttcttccattcaaccaactgtctacactgaaccctgctgcttatttgcagcaacaactattaccattcagccagctagctactgcctactctcagcaacaacaacttcttccatttaaccaattggccgcactgaaccccgctgcttatttgcagcagcaaatactactaccatttagccagctagctgcagcaaaccgtgcttccttcttgacac

SEQ ID NO: 8043 - DNA, 604 bp, Zea mays
  unsure (1)..(604): unsure at all n locations; Clone ID: LIB3061-084-Q1-K6-E4
taacaaactccacaacaatgaaccctacttagaatcgaattttcttgtgaggttgatggaagaaatggaagaggaagaagaagagttggagttggcgaggcacatgctcaataggaggcggcgtgcacgcaacactttgcaacaattcaagagtctgctcngaaaagatattgtacgagatttcggtgtactccagaagcgatggggtgtggttcgtggccctgcttacggttggagtcctgaacacattggggacatcatgaaaacttgcataatattgcacaacatgatagtagaagacgaaggtccattggctttgaacacaacctttgaaaacatcggagtgctcgctgacacaagtcaaggttcaatggaagagcgtaacaatttcgtcaatcaaaggtacaaccaactcaaagaccgcaacaaatatactcagcttcagattgatcttatacaccatcactgggcgcgacatggatccggagttgcatagtctgttcttgtgtcatgtctgttcttgtctcatgtttgttagtttaccttgttctagtgtcgaactgtctgtactgtctgccgtagtgtcgcatgtaagtgctctttc

SEQ ID NO: 8044 - DNA, 626 bp, Zea mays
  unsure (1)..(626): unsure at all n locations; Clone ID: LIB3061-084-Q1-K6-E6
ttgagaccacagcacatanaagtggaatacagtagcaacaatagagcaacaatggcggccaagatattttccatccttatgctccttgctctttctgcatgtgttgctaacgcgaccatttttcctcaatactcacaagctcctatagctgcccttcttcccccataccttccatcaatgaccgcttcagtttgtgaaaacccagcccttcaaccctacaggctccaacaagcaatcgcaacaagcaacttacctttatcacccctgttctttcaacaatcgccagccctatctttggtgcagtcattggtacaaaccatcagggcacaacagctgcaacaactcgtgctaccagtgatcagccaagtagctctggcaaacctttctccctactctcagcaacaacaatttcttccattcaaccaactgtctacactgaaccctgctgcttatttacaacaacaacaactactaccattcagccagctagctactgcctactctcagcagcaacaatttcttccatttaaccaattggccgcactgaacccctctgcttatttccagcagcaaatactactaccatttggccagctagctacaacaagccccacttcctttttgaa

SEQ ID NO: 8045 - DNA, 257 bp, Zea mays
  unsure (1)..(257): unsure at all n locations; Clone ID: LIB3061-084-Q1-K6-E7
gggttggcttctcctccccctccggttcgggttcgggttcgtgaggttctccggggttcggtttcgtgggtgagcggatcgagatggcggcgtcggatgttgagtaccgctgcttcgtcggcggcctcgcctgggccacggaccgaccacttcccttccacnaacgnnccttcagcaccttacccggcgaggtcctcgagtccaagatcatcctcgatcgggagacgcagaggtcccgcggcttcggcttcgtcacc

SEQ ID NO: 8046 - DNA, 333 bp, Zea mays
  Clone ID: LIB3061-084-Q1-K6-E8
cggtccggaatccggtcgcccacgcgtccgccgccctttttttttttttttggaaagtaattttttttggttggcacatacatatcaaaaaacttattattgaatacaactaataagcaatctaaaaaggcaccaccaatgtggtgtggtaggaggccgtcggctgcaaacaagtggcaaaggcaacaattgtgtattgtaagagggtggggttgccgcaaacgtggtgaaagcacactgtgctggtcaagaagaacacgttgtgcactgctggctaaatgtagagatttgtgtgaaataacacgggttcatgcggcattgttccattaacca

SEQ ID NO: 8047 - DNA, 625 bp, Zea mays
  unsure (1)..(625): unsure at all n locations; Clone ID: LIB3061-084-Q1-K6-E9
ccagtcgcagctcgtcgcacgcgcgccggcctgggcgtcccggccgcgtccacgttccgccgcggcgccgcgcagggcctgaggggggcccgggcgtcggcggcggcggacacgctcagcatgcggaccagcgcgcgcgcggcgcccaggcaccagcagcaggcgcgccgcgggggcaggttcccgtcgctcgtcgtgtgcgccagcgccggcatgaacgtcgtcttcgtcggcgccgagatggcgccgtggagcaagaccggcggcctcggcgacgtcctcggcggcctgccgccggccatggccgcgaacgggcaccgtgtcatggtcgtctctccccgctacgaccagtacaaggacgcctgggacaccagcgtcgtgtccgagatcaagatgggagacgggtacgagacggtcaggttcttccactgctacaagcgcggagtggaccgcgtgttcgttgaccacccactgttcctggagagggtttggggaaagaccgaggagaagatctacgggcctgtcgctggaacggactacagggacaaccagctgcggttcagcctgctatgccaggcagcacttgaagctccaagnatcctgagcctcaacaacaacccatact

SEQ ID NO: 8048 - DNA, 638 bp, Zea mays
  Clone ID: LIB3061-084-Q1-K6-F1
attcagaaacacaccaagcgaagcgcactagcaacgacctaacaacaatggctaccaaggtattagccctccttgcgcttcttgccctttttgtgagcgcaacaaatgcgttcattattccacaatgctcacttgctcctagtgccattattccacagttcctcccaccagttacttcaatgggcttcgaacacctagctgtgcaagccaacatgcaacaacaagcgcttgcggcgagcgtcttacaacaaccaattgcccaattgcaacaacaatccttgccacatctaacaatacaagccatcacaacgcaacagcaacaacagttcctaccagcactgagccacctagccatggtgaaccctgccgcctacttgcaagagcagctgcttgcatccaacccacttgctctggcgaacgtagttgcaaaccagcaacaacaacagctacaacagtttctgccaacgctcagtcaactagccatggtgaaccctgccgcctacgtacaacaacaacaactgctttcatctagcccgctcgctgtgggcaatgcacctacatacctgcaacaacaattgttgcaacagattgtaccagctctgactcaactagctgtggcaaaccctgttgcctacttg

SEQ ID NO: 8049 - DNA, 402 bp, Zea mays
  unsure (1)..(402): unsure at all n locations; Clone ID: LIB3061-084-Q1-K6-F10
acccgnatcgacaccatgaaggagtagttgctcgtnntgccctcgctctcctggnctctcgctgcngagccgccacctccacgcatacatagcggcggctgcggctgccagccaccgccgccggttcatctaccgccgccggtgcatctgccacctgcggggcacctgccacctccggtgcatctcccaccgccggtccacctgccgccgccggtccacctgccaccgtcggtccatgtgccgccgtcggttcatctgccgccgccaccatgccactaccctactcaaccgacccggcctcagcctcattcccagccacacccatgcccgtgccaacagccgcatccaagcccgtgccagctgcagggaacctgcggcgttggcagcacccccatcctgggc

SEQ ID NO: 8050 - DNA, 605 bp, Zea mays
  unsure (1)..(605): unsure at all n locations; Clone ID: LIB3061-084-Q1-K6-F11
aatcgatctcccttccccaccaaaccggnacacttcggaggccggacccggcgagaagcgaccgaccgcagccagctcacgtctccctcttcatccaccatgctgagggtcgcgggcaggcgcctctcgtccgctctcgcctggcgccccgccgccgccgcctcaggctcccggggccctctcgccggtacactacccggccgcgacgacgacgacacacgcgactgcagggcgcgtttcgccatcgaatctcccttcttcgccgctgccagagggttttcagcagagactcttgctccaagaaaccaggatgtgggcttatctgagctcccagcaactgtggcagctgtgaagaatccaagtggaaaaatcgtgtatgatgagtataaccatgagcgctacccacctggagaccccagcaagcgtgcatttgcctactttgtgctgagtggtgggaggttcatttacgcatctttgctgcgacttctcgtcttaaaatttgtcctaagcatgtcagcaagtaaggatgttctcgcgcttgcctcacttgaggttgacctctcaagcattgagcctggaaccacggtgacggtgaagtggcgtgg

SEQ ID NO: 8051 - DNA, 614 bp, Zea mays
  Clone ID: LIB3061-084-Q1-K6-F12
gcggcagtgcgtagagaggacgtcgacagaacacatgaagaggtcatcgttctcgtcgtgtgcctggctctgtcagctgccagcgcctctgcaatgcagatgccctgcccctgcgcggggctgcagggcttgtacggcgctggcgccggcctgacgacgatgatgggcgccggcgggctgtacccctacgcggagtacctgaggcagccgcagtgcagcccgctggcggcggcgccctactacgccgggtgtgggcagacgagcgccatgtaccagccgctccggcaacagtgctgccagcagcagatgaggatgatggacgtgcagtccgtcgcgcagcagctgcagatgatgatgcagcttgagcgtgccgctgccgccagcagcagcctgtacgagccagctctgatgcagcagcagcagcagctgctggcagcccagggtctcaaccccatggccatgatgatggcgcagaacatgccggccatgggtggactctaccagtaccagtaccagctgcccagctaccgcaccaacccctgtggcgtctccgctgccattccgccctactactgattcatgatatttgggaaatctcctctatccatccctct

SEQ ID NO: 8052 - DNA, 580 bp, Zea mays
  Clone ID: LIB3061-084-Q1-K6-F2
cccggttgctcccccttggatccttgtttgcttcctgctgcctggccttctctcctccccaaaatcaatcgcccacaaaggagagccagccaaatcttccacctcctccatttccagccccgtccccacaccagctcgcgtaacctcctgcccatggctggaggcggcggcgcaggcgcgggctcgtcgtccggcggcggcggagggggcggcagggagggcgactgggactgcggcagctgcggcaaccgcaactacgccttccgctcgctctgcaaccgctgcaagcagccgcgcctcctcgtcgaccccaacaccccgcgcgactccaagtggctaccccgcgccggggactggatctgcaccggttgcagtaacaataattatgcatccagaaagaactgcaaaaagtgtggcttgcccaaggaggaagcagcaatgccagcattgcaaatggcagggatgactatgccagcttatgcaacttatattgcaagactacaaagccttgctgcttctgcttctgcctataagatgaactttgggatggctgccaattcacctttgcagcagcaactac

SEQ ID NO: 8053 - DNA, 486 bp, Zea mays
  unsure (1)..(486): unsure at all n locations; Clone ID: LIB3061-084-Q1-K6-F3
gctggtacgtgaccagccggncctgcggcatcgggccgcgcctcccgtggccggagctgaagaggagatgctgccgggagctggcggacatcccggcgtactgccggtgcacggcgctgagcatcctcatggacggcgcgatcccgccgggcccggacgcgcagctggagggccgcctagaggacctgccgggctgcccgcgggaggtgcagaggggattcgccgccaccctcgtcacggaggccgagtgcaacctggccaccatcagcggcgtcgccgaatgcccctggattctcggcggcggaacgatgccctccaagtaactgcgaagagcatagtgcatgaggaatgagcttgtagctagctcatatgtctgaataataagcacagcaagaagatgaatgcatttctcggatcgttcatccggaacaataattaaaggggatccggatttgttcttgtgatataattaacgattcctgttaa

SEQ ID NO: 8054 - DNA, 596 bp, Zea mays
  unsure (1)..(596): unsure at all n locations; Clone ID: LIB3061-084-Q1-K6-F4
gcccaactagcaacatagnaaagcacaatagtgtaccaacaatggcagccaaaatttttgcctccttatgctccttggtctttctgcaagtgctgctacggcgaccattttcccgcaatgctcgcaagctcctatagcttcccttcttcccccgtacctctcaccagcggtgtcttcggtatgtgaaaacccaattcttcaaccctacaggatccaacaggcaatcacagctggcatcttacctttatcacccttgttcctccaacaatcatcagccctattacatcagttacctttggtgcatttattggcacaaaacatcagggcacaacaactacaacaacttgtgctagcaaaccttgctgcctactctcagcaacagcagtttcttccattcaaccaactagctgcattgaactctgcttcttatttgcaacaacaacaactaccattcagccagctacctgctgcctacccccagcaatttcttccattcaaccaactggcagcattgaactctcctgcttatttacagcagcaacaactactaccattcagccagctagctggtgtgagccctgctaccttcttgatac

SEQ ID NO: 8055 - DNA, 520 bp, Zea mays
  unsure (1)..(520): unsure at all n locations; Clone ID: LIB3061-084-Q1-K6-F6
tattgagaccaatngcaacatagaaagccaatagtgtgccaacaatggcagccaaaatttttgcttccttatgctccttggtctttctgcaagtgttgctaccgcaaccattttcccacaatgctcacaagctcctatagcttcctttttttccccatacctctcaccagcggtgtcttcagtgtgtgaaaccccaattgttgaaccctgcaggatccaacaggcattggcaacaggcatcttaccattttcacccttgttcctccaacaaccgtctgtcctattacagcagtttcctttggtccatttggtggctcataacatcagggctcagcaactacatcaacttgtgctagcataccttgctgcatactgttagcttcttcattttctttccttcaaccaactggctgcgttgnactctgttgtttatttgctacaacaattaccgtttcatccagctaggttgctgcctcccccccgttgtttcttccatttngcctacttgcagcttttaact

SEQ ID NO: 8056 - DNA, 611 bp, Zea mays
  Clone ID: LIB3061-084-Q1-K6-F8
ctcgctcgctctccttgcactccatgctgctcactgccactgccagcagatcgagctgctccgtctcacaaaccctcttgctttgctgctgcacctgcaagtctgcaaccgcgcacacagagatgtcgacgacggtgagccgtgcgtccctcgaccagaagctcgccctcgccaagcgttgctcccgagaggcgaccctcgccggagccaaggcggcagcggtggcgactatcgcctccgcgatccccaccctggccagcgtgcggatgctgccatgggccaaggccaacatcaaccccaccggccaggcgctcatcgtctccacggtggctgggatggcctacttcatcgccgccgacaagaagatcctgtcgctggcgaggcgccactcgttcgaccaagcccctgaccacctcaagaacacctccttccagggcaccggccgtccccacccggccttcttcaggccgtgagacgagacctccgtctccagagctagctacttacctcttttttcagtttgccaatgcaagcaccaaatgcccaccgatgcatgcctgaataaactactgtaattgcgaggctgctgaacatcgatgcgctagtataac

SEQ ID NO: 8057 - DNA, 562 bp, Zea mays
  unsure (1)..(562): unsure at all n locations; Clone ID: LIB3061-084-Q1-K6-F9
ttttgagcttcanaaacacaccaagcgaacacattagcaacaacctaacaacaatggctaccaagatattatccctccttgcgcttcttgcgctttttgcgagcgcaacaaatgcgttcattattccacaatgctcacttgctccaagttccattattacacagttcctcccaccagttacttcaatgggcttcgaacacccagctgtgcaagcctataggctacaacaagcaattgcggcgagcgtcttacaacaaccaatttcccagttgcaacaacaatccttggcacatctaacaatacaaaccatcgcaacgcaacagcaacaacaattcctaccagcactgagccacctagccatggtgaaccctgccgcctacttgcaacaacagttgcttgcatcaaacccacttgctctggcaaacgtagttgcaaaccagccacaacaacagctgcaacagtttctgccagcgctcagtcaactagccatggtgaaccctgccgcctacctacaacagcaacaactgctttcatctagcccgctcgctgtggccaatgcacc

SEQ ID NO: 8058 - DNA, 156 bp, Zea mays
  unsure (1)..(156): unsure at all n locations; Clone ID: LIB3061-084-Q1-K6-G1
gngcccaactagcaacatagnaagcacaatagtgtaccaacaatggcagccaaaatattttgcttccttatgctccttggtctttctgcaagtgttgctaccgcaaccattttcccacaatgctcacaagctcctatagcttcccttcttccccca

SEQ ID NO: 8059 - DNA, 623 bp, Zea mays
  unsure (1)..(623): unsure at all n locations; Clone ID: LIB3061-084-Q1-K6-G11
gcgacgccaanaatccaanaagccaanaccgtgcccggcactgcgaaggcaaccgtggacgacgaggtgacgctccgtcggttcgagctgaccgacgtggacgccatgatggagtgggcgtcggaccctcaggtggcggccttctgccggtgggagccgtacgcgtcggcggagccgctgctggagttcctgcgcgacgccgtgctcccgcacccgtggtaccgcgccatctgcgtctccggcgcggtggtgggcgcggtgtccctggcgcccacgccggagcgctgccgctgggagctcggctacgtgctggcccgcgcgcactgggggaaaggcttggcgacggcggccgtgcggcgcgcgctgcgggacgcgttcgcggacctggagccggagggcctgcggcgcgtggaggcgatggtggacgtgggcaacccggcgtcgcagcgcgtggcggagaaggccgggttccgccgcgagggcgtgctgcggcgccactactggcacaaggggcgcgccagggacatggtcatgtacagcttcctctcctccgaccccctccccgagtgagaacgatccccatggcgggtggattccccatgcagttaacgttcgtttacctg

SEQ ID NO: 8060 - DNA, 622 bp, Zea mays
  unsure (1)..(622): unsure at all n locations; Clone ID: LIB3061-084-Q1-K6-G2
ngattattgaaaccaactagcaacatagnaagcacaatagtgtaccaacaatggcagccaaaatttttgcttccttatgctccttggtctttctgcaagtgttgctaccganaccattttcccacaatgctcacaagctcctatagcttcccttcttcccccatacctctcaccagcggtgtcttcaatgtgtgaaaccccaattgttcaaccctacaggatccaacaggcaatcgcaacaggcatcttaccattatcacccttgttcctccaacaaccgtcagccctattacagcagttacctttggtccatttggtggcacaaaacatcagggcacaacaactacaacaacttgtgctagcaaaccttgctgcatactctcagcaacatcagtttcttccattcaaccaactggctgcattgaactctgctgcttatttgcaacaacaattaccattcagccagctagttgctgcctacccccagcaatttcttccattcaaccaactagcagcattgaactctgctgcttatttacagcagcaacaactactaccattcagccagctagctgatgtgagccctgctgccttcttgacacaacaacagttgttgccgttc

SEQ ID NO: 8061 - DNA, 630 bp, Zea mays
  unsure (1)..(630): unsure at all n locations; Clone ID: LIB3061-084-Q1-K6-G3
tggacgtcagcctagcaattagctcatcgactccagattggagaactcgacaccatgaaggtgctgatcgttgcccttgctctcctggcgctcgctgcgagcgccgcctccagtacaagcggcggctgtggctgccagacaccaccgtttcatctaccgcctccgttctatatgccgcctccgttctatctgccgccgcagcagcagccgcagccatggcaataccccactcaaccaccgcagctaagcccgtgccagcagttcggatcctgcggcgtcggcagcgtcggcagcccgttcctgggccagtgcgtcgagttcctgaggcaccagtgcagcccggcggcgacgccctacggctcgccacagtgccaggcgctgcagcagcagtgctgccaccagatcaggcaggtggagccgctgcaccggtaccaggcgacatacggtgtggtcctgcagtccttcctgcagcagcagccgcagggcgagctcgcggcgctgatggcggcccaggtagcgcagcagctgacggcgatgtgcggcctgcagctgcagcagccaggtccctgcccttgcaacgcagctgccggcggtgtctactactngaganactatgtactgtagtaataa

SEQ ID NO: 8062 - DNA, 629 bp, Zea mays
  unsure (1)..(629): unsure at all n locations; Clone ID: LIB3061-084-Q1-K6-G4
cgtcagcctagcaattagctcatcgactccanattggagaactcgacaccatgaaggtgctgatcgttgcccttgctctcctggcgctcgctgcgagcgccgcctccagtacaagcggcggctgtggctgccagacaccaccgtttcatctaccgcctccgttctatatgccgcctccgttctatctgccgccgcagcagcagccgcagccatggcaataccccactcaaccaccgcagctaagcccgtgccagcagttcggatcctgcggcgtcggcagcgtcggcagcccgttcctgggccagtgcgtcgagttcctgaggcaccagtgcagcccggcggcgacgccctacggctcgccacagtgccaggcgctgcagcagcagtgctgccaccagatcaggcaggtggagccgctgcaccggtaccaggcgacatacggtgtggtcctgcagtccttcctgcagcagcagccgcagggcgagctcgcggcgctgatggcggcccaagtagcgcagcagctgacggcgatgtgcggtctgcagctgcagcagccaggtccctgcccttgcaacgcagctgccggcggtgtctactactgaggaaactatgtactgtagtaataatgt

SEQ ID NO: 8063 - DNA, 627 bp, Zea mays
  Clone ID: LIB3061-084-Q1-K6-G5
attttgagcattcagaacacaccaagcgaagcgcactagcaacgacctaacaacaatggctaccaagatattagccctccttgcgcttcttgccctttttgtgagcgcaacaaatgcgttcattattccacaatgctcacttgctcctagtgccattattccacagttcctcccaccagttacttcaatgggcttcgaacacctagctgtgcaagccaacatgcaacaacaagcgcttgcggcgagcgtcttacaacaaccaattgcccaattgcaacaacaatccttgccacatctaacaatacaagccatcacaacgcaacagcaacaacagttcctaccagcactgagccacctagccatggtgaaccctgccgcctacttgcaagagcagctgcttgcatccaacccacttgctctggcgaacgtagttgcaaaccagcaacaacaacagctacaacagtttctgccaacgctcagtcaactagccatggtgaaccctgccgcctacgtacaacaacaacaactgctttcatctagcccgctcgctgtgggcaatgcacctacatacctgcaacaacaattgttgcaacagattgtaccagctctgactcaactagctgtggc

SEQ ID NO: 8064 - DNA, 638 bp, Zea mays
  unsure (1)..(638): unsure at all n locations; Clone ID: LIB3061-084-Q1-K6-G6
actgggtcttcanaccattagctttatctactccagagcgcagaagaacccgatcgacaccatgagggtgttgctcgttgccctcgctctcctggctctcgctgcgagcgccacctccacgcatacaagcggcggctgcggctgccagccaccgccgccggttcatctaccgccgccggtgcatctgccacctccggttcacctgccacctccggtgcatctcccaccgccggtccacctgccgccgccggtccacctgccaccgccggtccatgtgccgccgccggttcatctgccgccgccaccatgccactaccctactcaaccgccccggcctcagcctcatccccagccacacccatgcccgtgccaacagccgcatccaagcccgtgccagctgcagggaacctgcggcgttggcagcaccccgatcctgggccagtgcgtcgagttcctgaggcatcagtgcagcccgacggcgacgccctactgctcgcctcagtgccagtcgttgcggcagcagtgttgccagcagctcaggcaggtggagccgcagcaccggtaccaggcgatcttcggcttggtcctncagtccatcctgcagcagcagccgcaaagcggccaggtcgcggggctgt

SEQ ID NO: 8065 - DNA, 554 bp, Zea mays
  unsure (1)..(554): unsure at all n locations; Clone ID: LIB3061-084-Q1-K6-G7
ccggngtcgnacccacgcccgtccgcaaaaagtctctctcactggnaaactctctattggaatgtgnngcagttgctatttttgctgaaaggaactggncctcttnnnctggatcattggtgtcagtnttttaccaggtcagacacatataaagccatatctagnagacacnnatggtcccagctgctgngaattttgtgaagaacgaccgatccacagttantccaactacgacgacgaaggtgcctggccctacctcatagacgaatttgtggaatatctgactgagaacggactcgtccagcgtaaaagatgaacaacggggagatgcatctccaaacaatggttgggctgtacaaacatgatttatctcggtcagctcgacgcccagggcctgatattggcactcctgctcaattcattcaccaaactgttggcatatcattgaatttgcttataaacgtggggaaacataacttgcctgggaagtggtggctgtcagcctgcgatcgtgaactgtaccttatcgaaaatgcaacggagtttgggactct

SEQ ID NO: 8066 - DNA, 490 bp, Zea mays
  unsure (1)..(490): unsure at all n locations; Clone ID: LIB3061-084-Q1-K6-G8
gttgggnactaggnaaatcttgaggcaaccttcgagaccttggttgatgcgtttgtcttcttggataagaataaagatgggtatgtgagcaaggatgagatgatccaagcaataaacgagaccacgacaggagagcgctcttctgggcctatagcncatgaaaagatttgaggaaatggactgggacaagaacggaatggtgacattcaaggagttcctgtttgccttcactcgctgggtaggaattgatgaaaatgaggatgaagatgacgatgaataaggactgtgaaggctggttattcttcaagggttagggccagatcagccttggagaagctggaaatggatggcggataaaagcagttgacgtttattggttgcttgttgatcgtaatattcatgccattgctaatagaatgtctcgacattatactcctagtagggtgacttgcatgtctgaacactggtatcaatgttacagttgctgtct

SEQ ID NO: 8067 - DNA, 622 bp, Zea mays
  Clone ID: LIB3061-084-Q1-K6-G9
cgctgaggccctgcaggcctacctcctcgtctcctccctcttcgtcgcccccgcccccgcccccgcccccgccccactttccaagccgccccagcagcagcgcgagggggagaaggcacaggaggaggaggaggaagaaccgatgcctttcgtgtatccggaccccgtggaggtgggcgagctcacgctcgagcagctcagtgcgtatgacggcaaggacccagccaagcagatcctcattgccatccggggccaggtctacgacgtctcccgcgggaggctcttttatggccctcagggaccatattccttgtttgccgggagggatgcaacccgggccctggcattgatgtcatttgacccaaacgacctcaccggggatctggacggcctaagcgccgatgagctggaggtgttgcaagattgggaggaaaaattcaaggagaggtatccgagggtgggccaccttgcctgtcaagacgcgacagacagtggtcagaccaccgctgggcttcatcacgaggaaggggacgcctaaaactccactggtttgcctcgtcggcctctcctctgtgttttttttttttacttgctggatttcaccctgtagatctgatgtgcg

SEQ ID NO: 8068 - DNA, 607 bp, Zea mays
  Clone ID: LIB3061-084-Q1-K6-H1
gcaagacgtatcgattcttcacgcagctggaggccctgcacggcaccggggcggctcccgcgtcggtggcggcgtcgcaggtgccccctgcgatctctggcggggtgtccggggcagcggggccgttagccgtgcgcttgcctgccgagccaccgcctgcggtgtcgggcggcgtggggatgccgatgacgaccgtgggctacccgagcttctcgacgtccaacacggaggactacacggacgaggacgactccgacgacgagggcacagaggagctggtgggtggcggcgggaacgagcgcgggaagaggaagagggtgtcagagggcggcgcctcggtcgccggcggaggcagcgggaagatgatgaggttcttcgagggcctgatgaagcaggtgatggagcggcaggaggcgatgcaacagaggttcttggaggccatcgagaagcgtgagcaggaccgcatgatccgcgaggaggcgtggcggcggcaggagatgacccgcctcgcgcgcgtagcaggagatcctggcgcaggagcccgccatggccgcctcacgcgacgcttgcgtcctctcctttatacagaagatcaccggacagacca

SEQ ID NO: 8069 - DNA, 626 bp, Zea mays
  Clone ID: LIB3061-084-Q1-K6-H11
cagaacacaccaagcgaagcacattagcaacaacctaacaacaatggctaccaagatattatccctccttgcgcttcttgcgctttttgcgagcgcaacaaatgcgttcattattccacaatgctcacttgctccaagttccattattacacagttcctcccaccagttacttcaatgggcttcgaacacccagctgtgcaagcctataggctacaacaagcaattgcggcgagcgtcttacaacaaccaatttcccagttgcaacaacaatccttggcacatctaacaatacaaaccatcgcaacgcaacagcaacaacaattcctaccagcactgagccacctagccatggtgaaccctgccgcctacttgcaacagcagttgcttgcatcaaacccacttgctctggcaaacgtagttgcaaaccagccacaacaacagctgcaacagtttctgccagcgctcagtcaactagccatggtgaaccctgccgcctacctacaacagcaacaactgctttcatctagcccgctcgctgtggccaatgcacctacatacctgcaacaacaattgttgcaacagattgtaccagctctgactcagctagttgtggcaaaccctgctc

SEQ ID NO: 8070 - DNA, 611 bp, Zea mays
  Clone ID: LIB3061-084-Q1-K6-H12
gggttggcttctcctccccctccggttcgggttcgggttcgtgaggttctccggggttcggtttcgtgggtgagcggatcgagatggcggcgtcggatgttgagtaccgctgcttcgtcggcggcctcgcctgggccacggacgaccactccctccacaacgccttcagcacctacggcgaggtcctcgagtccaagatcatcctcgatcgggagacgcagaggtcccgcggcttcggcttcgtcaccttctccacggaggaggcgatgcggaacgccatcgagggcatgaacggcaaggagctggacggccgcaacatcaccgtcaacgaggcccagtcccgcggcggccgtggaggcggcggcggcggcgggtacggtggtggccgtggaggcggcggctacggcggtggcgggcgccgtgatggcggcggcggctacggcggtggcggcggctacggtggtggcggcggcggctacggtggtggtggcggcggctacggcggtggcaaccgtggcggcggctacggcaactccgacgggaactggaggaactgagcggtggggcccgcgcggccaagttatcctgttcgctaccgtgttgtttaccct

SEQ ID NO: 8071 - DNA, 528 bp, Zea mays
  unsure (1)..(528): unsure at all n locations; Clone ID: LIB3061-084-Q1-K6-H2
ggcacaacaactacaacaacttgtgctagcaaaccttgctgcctactctcagcaacagcagtttcttccattcaaccaactaggttcattgaactctgcttcttatttgcaacaacaacaactaccattcagccagctacctgctgcctacccccagcaatttcttccattcaaccaactagcagcattgaactctcctgcttatttacagcagcaacaactactaccattcagccagctagctggtgtgagccctgctaccttcttgacacaaccacagttgttgccgttctaccagcacgttgcgcctaacgctggcaccctcttacaactgcaacaattgctgccattcaaccaacttgctttgacaaacccagcagtgttctaccaacaacccatcattggtggtgccctcttttagatttcttatgagttatagttcaataataaagttttttatctgatgtttgtggcttcccagaaataagaaagtacatttctaaannaaaaaaaaaaaaaaannaaaaa

SEQ ID NO: 8072 - DNA, 195 bp, Zea mays
  unsure (1)..(195): unsure at all n locations; Clone ID: LIB3061-084-Q1-K6-H4
cgggcgtcccggcggggcgcgacccgcgggagcccgatcccaagtcgtacgggccgccgacaactgcgacatcgcgcgccagcttggcgccgccgttcccgggcagcaggccgcctgggaggcggaggaagaggcagcgaagaggaggaagcanaaggccgcggcagcaagaagcagcagcagctgggcgatctg

SEQ ID NO: 8073 - DNA, 584 bp, Zea mays
  unsure (1)..(584): unsure at all n locations; Clone ID: LIB3061-084-Q1-K6-H5
gtaactagctagcagatcaaacaagtagcgacagctcgacaaattttgtgagagtgatccggcgctgagaagagatggctaagatcgccgcagccgccgcggcggcggcggcgctgtgcttcgcggccctggtggccgtggccgtctgccaaggcgaggtcgagcggcagaggctcagggacctgcagtgctggcaggaggtccaggagagcccgctcgacgcgtgccgccaggtcctcgaccggcagctaaccggcggcggcgtcggcggcccgttccggtggggcaccgggctccggatgcggtgctgccagcagctccaggacgtgagccgcgagtgccgctgcgccgccatccggagcatggtcaggggctacgaggaggccatgccgcctctggagaaaggctggtggccatgggtggcggcagcagcagccgccgccncatggaggaggaggaggacaggggggctactactacccctgcagccgggcaggagagggataccaaacgcagatgtatccaccgtgtcagcccggcaccaccgggccaaggatcgggcgggtgaggcttacgaaggcccg

SEQ ID NO: 8074 - DNA, 607 bp, Zea mays
  unsure (1)..(607): unsure at all n locations; Clone ID: LIB3061-084-Q1-K6-H6
ggtacgcctccggttccatagcggagagattgcgccgcctgattggcgattgctgatagtctgccgccagtgccctcgcccgatttgctccgccgagaacaacatggggagaagctataatcacagtccatcgccaccaagaggctacaggagaagaactcgcagcccaagtcctcgtggtcggtatggaggccgtgatactgatagggacctcccaactagtcttttggtgaggaatcttcgtcgggattgtaggcctgatgaccttcgtagaccatttggaaaatttggccccgttaaagacatatatctgccaaaggattactacactcgggaacctagaggatttgggttcatccaatactttgatcctgaggatgcttctgatgcaaagtactatatggatgggaagatgctgcttggaagggaaattgctgttgtttttgcagaggaaaacaggaagaagccttctgacatgagggccagggaaaaaataagtggcagaggccgttcttatgatgggaggttgcgctcaaagtcacctgggttgaacggntctcctaggggtagatcacggtcccaaagccgaagctactcgccagcacct

SEQ ID NO: 8075 - DNA, 623 bp, Zea mays
  unsure (1)..(623): unsure at all n locations; Clone ID: LIB3061-084-Q1-K6-H7
attgtcgttgngagttatatgcacgaacagagatgaaaggatcgccaaccataatcgtggtagtggtgaacgatgtccacacttgtacttctagtggtaggaagaagactaccactccttctagtgcttgggtggctgcaaaagctcttcctatccttatgaagaaaccccaaatgggtgctaaggagttgcagactattttgcaggacagattcacatgtgctatttcatatgacactatttggaaggggaaggagaaagcattgagagagttgttcgagagttgggaggagagctttcagctcttgttttcctggaaggaagcagtcttgcagaagtcacctgacagtgtaatagagattgacctccgagttgaagatgacaaacttttttttcagcaagttcttctgtgcatttggtccatgcatttctgggtttaaagaaggttgtagaccgtatcttagtgtcgactctactgctttaaatggtatatgggacggtcacttggcttctgctacaagtgtagatggcctgaattggatgtacccagtggcatttggtttttttagttctgaaactgaagagaactggacttggtttatgactaaattgcaccaagcagt

SEQ ID NO: 8076 - DNA, 379 bp, Zea mays
  Clone ID: LIB3061-084-Q1-K6-H8
taccattcagccagctatctgctgcctacccccagcaatttcttccattcaaccaactgacagctttgaactctcctgcttatttacagcagcaacaactactaccattcagccagctagctggtgtgagccctgctaccttcttgacacaaccacaattgttgccgttctaccagcacgctgcgcctaacgctggcaccctcttacaactgcaacaattgctgccattcaaccaacttgctttgacaaacccaacagcattctaccaacaacccatcattggtggtgccctcttttagatttcttatgagttatagttcaataataaagttttttgtctgatgtttgtggcttcccagaaataagaaagtacatttct

SEQ ID NO: 8077 - DNA, 625 bp, Zea mays
  unsure (1)..(625): unsure at all n locations; Clone ID: LIB3061-084-Q1-K6-H9
ctgcgacgcgtccgtgctcctggncggctcagccaccggcccgggcgagcagcaggcgccgcccaacctcacgctgcgccccaccgcgttcaaggccatcaacgacatccacgaccgcctccagaaggagtgcggtggcgcagtcgtgtcctgctccgacgtcctcgcgctcgccgccagggactcagtcgtcgtgtccggaggtcccagctacaaggtgccgctgggtcggcgcgacagcgcgagcttcgcgacgcgagaggacgtcctgagcgggctcccgccgccgacggccgccgtgccggcgcttctcgccgtgctgtccaagatcaacctggacgcgacggacctggtggcgctgtcgggcggccacaccatcgggctgggccactgcgcgtccttcgagagccgcctgttcccgcgccaggacccgacgctgaacgccaccttcgccggccacctgcgccggacctgcccggccaagggcaccgaccgccggacgccgctggacgtgcgcacgcccgacgcgttcgacaacaagtactacgtcaacctggtgaaccgtgaggggctcttcacctccgaccaggacctcttcagcaaccccggcaccaggcccctcgtc

SEQ ID NO: 8078 - DNA, 468 bp, Zea mays
  Clone ID: LIB3061-084-Q1-N6-A10
attgagataaatctcaatcaatatattgattatttctaggaaacacatgccggaatgagggcaccattatcgagtacatctcatatgtaatctaaaagatggcacctccaacgatgggttgctgcctcgacaagacagggtttatcaaagagaactggttgtatggcagcaattgttgctgctgtaggaaggcatcgaccaatgggttagccactgctagtggattaagtaactgttgtcgctgttgtaggtacgcagcagagttcgacatagtcatttggttgaatggaagcagctgttgcaagtaggcagcagggtttgccacaactagctgagtcagagctggtacaatctgttgcaacaattgttgttgcaggtatgtaggtgcattggccacagcgagcgggctagatgaaagcagttgttgctgttgtaggtaggcggcagggttcaccatggctagttgac

SEQ ID NO: 8079 - DNA, 198 bp, Zea mays
  unsure (1)..(198): unsure at all n locations; Clone ID: LIB3061-084-Q1-N6-A2
tttttttttttttttttttttttttttttttttttttgtttttgtttttgttttttttttgtttttttaatttggtggggtgtagggggggggtggggggggggggggttaatgggggtaagggaggggggggaaaaaaaagttaggggggggggggggaaaaaaaaggtnaaggagaaaaaaagaaaaagaaggggg

SEQ ID NO: 8080 - DNA, 392 bp, Zea mays
  unsure (1)..(392): unsure at all n locations; Clone ID: LIB3061-084-Q1-N6-A4
aacaaatattgattatttgtaggaaacacacgttggtatgagggcaccattatcgagtacatctcatatgtaatctaaaagatggcacctccttatatgggttgctgcctcgacaagcacaggattctttatggagagctggttgtatggcagcaattgttgctgctgtaggaaggcggcgaccaatgggttagccactaccaatggattaagtaactgttggcgctgtngtaggtacgcagcaaagttcgacagagtcagttggttgaatggaagcagctgttgcaagtangcaacagggtttgccacagctagttgagtcagagctggtacaatctgntgcaacaattgatgttgcaggtatgtaggtgcattgcccacagcgagcgggc

SEQ ID NO: 8081 - DNA, 419 bp, Zea mays
  unsure (1)..(419): unsure at all n locations; Clone ID: LIB3061-084-Q1-N6-A7
ggggggggggggggggggggnngnnnggggnnnggggggggggnnnggggggggggnggggggggggggggggggggnggggnggggggggggngggggggggggggggggggggggggggggggggggnggggggggggggggggggggggggnggggggggggggggggggggggggggggggggggnggggggggggggggnggggggggggggggggggggngggggggggggggggggggnggggggggngggggggggggggngggggggggggggggggggggggggggngggggggggngggggngnngggggggggggggggggnnngggnggggngggggggggnnngggggggggggggggggnnggggggggggggggggggggggggggggggggngggggggggg

SEQ ID NO: 8082 - DNA, 324 bp, Zea mays
  unsure (1)..(324): unsure at all n locations; Clone ID: LIB3061-084-Q1-N6-A8
agaaaanancgaggaaaatttcaatcaatatattgattatttctaggaaacacatgtcggtatgagggcaccattgtcgagtacatctcatatgtaatttaaaagatggtcctccaacgatgggttgctgcaagggagggtgggtcaaagagaactggttgtatggcagcaattgttgttgctgctgcaggaaggtngcgaccaatgggttagccactgccaatggattaagtaactgttgtcgctgttgtaggttcgcagcagagtttgacacacccagctggttgaatggaagcaactgttgtaagtaggcagcagggtttg

SEQ ID NO: 8083 - DNA, 477 bp, Zea mays
  Clone ID: LIB3061-084-Q1-N6-B10
cgagataaatctcaatcaatatattgattatttctaggaaacacatgtcggtttgagggccccattgtcgagtccatctcatatgtaatctaaaagatggcccctccaacgatgggttgctgcaaggcagggttcatcaaagagaactggttgtatggcagcaattgttgttgctgctgcaggaaggtagcgaccaatgggttagccactgccaatggattaagtaactgttgtcgctgttgtaggtacccagcaaagtttgacacagccagttggttgaatggaagcaactgttgtaagtaggcagcagggtttgccacagctagctgagtcagagctggtacaatttgttgcagcaactgttgttgtaggtacctaggtgcattgcccaccgcgagcgggctaaatgaaagtagttgtaggtagacggcagggttcaccatggctagttgactgagcactggcataaactgttgc

SEQ ID NO: 8084 - DNA, 233 bp, Zea mays
  Clone ID: LIB3061-084-Q1-N6-B11
gggggggggggggggggggggggggtttttttttttggggggggggggctcttttccttaaaaaattttttttgtgggtttgcccctctggggcgttttaaggggggggccccccaattttttttttttggggggggggtttgttttttcttaaatggggggggggggggggacaaattttttgtttttggggggggggggggggggtcccttcctcgttggtgaaagggggg

SEQ ID NO: 8085 - DNA, 454 bp, Zea mays
  unsure (1)..(454): unsure at all n locations; Clone ID: LIB3061-084-Q1-N6-B2
aagaatctagaatgtactttcttatttctgggaagccacaaacatcatccaaaaacttcattattgaactataactcataagcaatctaaaagaggcaccgccaatgatgggttgntggtagaacgttgttgggtttgtcaaagcaagttggttgaatggcagcaattgttgcagttgtaagagggtgccagcgttaggcgcagcgtgcaggtagaacggcaacaactgttgttgtgtcaagaaggcaacagggctcacatcagctagctggctgaatggtggtagctgttgctgttgtcaataagcagcagagttcaatgctgccagttggttgaatggaagaaattgctgggggtaggcagcagctagctgactgaatggtagttgttgttgcnaataagccgcagagttcaatgcacccagttggttgaatggaagaaactgctgcttctg

SEQ ID NO: 8086 - DNA, 424 bp, Zea mays
  unsure (1)..(424): unsure at all n locations; Clone ID: LIB3061-084-Q1-N6-B4
cattaaaaccaaaactttattatgaccatgcatttattattggtcataccacacatgataatgtgtgtcgtcttactgcattattacatatatagatagagagagatggatagaggagatttcccaaatttcatgaatcagtagtggggcggaatggcagcggaaaccccacaggggttggtgcggtagctgggcagctggtactggtagagtccacccatggccggcatgttctgcgccatcatcatggccatggggttgaaaccctgggctgccagcagctgctgctgctgctgcatcaaagctggctcntacaggctgctgctggcggcagcggcacgctcaagctgcataatcatctgcagctgctgcgcaacggactgcacgtccatcatcctcatctgctgntggcagcactgttgcc

SEQ ID NO: 8087 - DNA, 544 bp, Zea mays
  unsure (1)..(544): unsure at all n locations; Clone ID: LIB3061-084-Q1-N6-B5
atatcgagaaaaatctcaatcaatatattgattatttttaggaaacacatgccgctatgagggcaccattatcgagtacatctcatatgtaatctaaaagaggcaccaccaacgatgggttgctgccacgacaaggcagggttcatcaaagagaactggttgtatggcagcaattgttgctgctgtaggaaggcagcgaccaatgggttagccaccgctagtggattaagtaactgttgtcgctgttgtaggtacgcagcagagttcgacacagtcagttggttgaatggaagtagttgttgcaagtaggcagcagggtttgccacagctagctgagtaagagctggtacaatttgttgcagcaactgttgttgcaacaactgntgttgcaggtatgtaggtgcattgcccatagcgagcgggctagatgaaagaagttgttgctgttgtaggtaggcgatagggttcaccatggctangttgactgagcgcttgtagaaactgttgcaactgtggntgttggtggtatgcagnctactttggc

SEQ ID NO: 8088 - DNA, 294 bp, Zea mays
  Clone ID: LIB3061-084-Q1-N6-B6
aagaatctagaaatgtactttcttatttctgggaagccacaaacatcagataaaaaactttattattgaactataactcataagaaatctaaaagagggcaccaccaatgatgggttgttggtagaacactgctgggtttgtcaaagcaagttggttgaatggcagcaattgttgcagttgtaagagggtgccagcgttaggcgcaacgtgctggtagaacggcaacaactgtggttgtgtcaagaaggtagcagggctcacaccagctagctggctgaatggtagtagttgtt

SEQ ID NO: 8089 - DNA, 543 bp, Zea mays
  Clone ID: LIB3061-084-Q1-N6-B7
catcaacaaataatcataccctgctcaaattggactagagctcaatcgcttttagaaaacagtgtacaaatcaggtctgaaaattggcataacgctctgaacttgagacgactaaccaaaaagtgtactcatcaggacacacatttcggtgcaagacaatccatgagaatgctctaagctacagcgctcttgcccttcttcctctgtagcttcttcatgtagaattcaagctctttaccctcaaggatgtacccatcagctcggccacactgtccaggacgggaagaaatgcatgccagcaaccgtccactgccaaattgctcctcaatgtgtgggtcaagggtacgtccctccttgcgcttctcaagcttcctcgtgacatggttgctctttttcgtttcctcagctgctgcctcaacctcttgtccctcagcattatccttctttgcagcaggggttttcttcttcctaccaatgtcaactccatagtgagtgaggtaccactgcttgaatggggcagcatcaacttgcacaatggcactc

SEQ ID NO: 8090 - DNA, 433 bp, Zea mays
  Clone ID: LIB3061-084-Q1-N6-B9
gcaagaaatccggcacgttacacttttgtccacaacatagctttttgcagagattcagtacataagggttcttcaaattaaccataccacaccataacatgggacatttgcgaaactacgggtcccggtttcaaaatgcaacggggtcaatactaaaatataagcgtagggcaatctaatcttcttcctcgccctcgttctcagcaatgttgaagtagcggagctcataaacctttcggtccttgttggcagcaaccaccctttgccaatcccgcacgttgggcttttttaaggacttcttgggcaagtacttcaggcacctcttggaaaagggtcccccagaggggacggtgaccttggtcttctcgcgagagatggtgaccgagtccccgaggttgccagccttgccgccggggaccttgatgcgctcctg

SEQ ID NO: 8091 - DNA, 561 bp, Zea mays
  Clone ID: LIB3061-084-Q1-N6-C10
agaatctggaaatgtaacttcttatttctggttggccacatacatcatccaaaaaactttattattgaattacaactaataatcaatctaaaagagggcaccaccaatgatgtgttgttggtaggaggctgctgggtttgtcaaagcaagttggacaaagggcaacaattgttgtagttgtaagagggttgcggggttagccgcaaactgcttgtagaaaggcagcaactgttgctgtgtcaagaaggaagcacgacttgctgcagctagctcgctaaatggcagtagtatttgctgctgcaaataagcagcggggttcagtgcggccaattggttaaatggaagaagttgttgttgctgagagtaggcagtagctagctggctaaatggtaatagttgttgctgcaaataagcagcagggttcagtgtagacagttggttgaatggaagaaattgttgttgctgagagtagggagaaaggtttgccagagctacttggttgatcacaggtagcacgagttgctgcagctgttgtgccctgatggtttgtaccaatgactg

SEQ ID NO: 8092 - DNA, 333 bp, Zea mays
  unsure (1)..(333): unsure at all n locations; Clone ID: LIB3061-084-Q1-N6-C12
atattgagataaatctcaatcaatatanttgattattttctagggaaacactatgccgggaatgagggccaccatatccgagtcccatctcatatgtagatctaaaagatggcacctccaacgatgggttcgctgcctcgtcaagatatggtttatcaaaaagaactggttgcttggcagcaattgttgctgctgtttgaaggcacccaccaatgggtcagccactgctcgtggcttaagctactgttgtcgctgctgtcggttccccactcagtccgacatactcagttggccgaattgaaccaattgctgcaagtcggcatcacggttcgc

SEQ ID NO: 8093 - DNA, 507 bp, Zea mays
  unsure (1)..(507): unsure at all n locations; Clone ID: LIB3061-084-Q1-N6-C4
aaatctcaatcaatatattgattatttctaggaaacacacgtcggtatgagggcaccattatcgagtacatctcatatgtaatctaaaagaggcacctccaacgatgggttgctgcctcgacaagacaggattcatcaaagagaactggttgtatggcagcaattgttgctgctgtaggaaggcggcgaccaatgggttagccactaccaatggattaagtaactgttgtcgctgttgtaggtacgcagcagagttcgacagagtcagttggttgaatggaagcagctgttgcaagtaggcaacagggtttgccacagctagttgagtcagagctggtacaatctgttgcaacaattgttgttgcaggtatgtaggtgcattgcccacagcgagcgggctagatgaaagcagttgttgttgttgtacgtaggcggcagggttcaccatggctagntgactgaacgttggcagaaactgttgtanctgttgntgttgcctggtttgca

SEQ ID NO: 8094 - DNA, 418 bp, Zea mays
  unsure (1)..(418): unsure at all n locations; Clone ID: LIB3061-084-Q1-N6-C6
atgcattacttaattagtgagaattcacacatccattattcggcatgcccgcgttatttcatcgtatatatatttatttcaagttctggggcaaggaaaggaaatagcggctagcttatatattatcagccgatgtggggcgtctgggcgacgatgtcgacgaagatgcggacacggttagggcgataatccgcggtcaccacggagccgacgggcagcaccacgatgtcggcgtccggcttgtccttgaggatcaccttcttggcgtcctccacgctcagcccgaccacctcaggccacgacgttttggcgccgccgccgncgccgccgcactccgtggagctcatggtgtcgcgaactgccggaccagttgacgatatgatcgatgggcaggtaaatcttgcttgttgcactgctg

SEQ ID NO: 8095 - DNA, 188 bp, Zea mays
  Clone ID: LIB3061-084-Q1-N6-D1
ctaaaaaggcccttcttatttcgggggaagccacaaacatcaaataaaaaactttatttttgaactttaacccataaaaaatctaaaaggagggcccccccaatgatgggttgttggtaaaacactgctgggtttgtaaaaacaagttggttgaatggcaacaattgttccagttgaaaaagggggcc

SEQ ID NO: 8096 - DNA, 476 bp, Zea mays
  Clone ID: LIB3061-084-Q1-N6-D11
catacaaatccacggggggtttttgttagttccaaatttccgaattccagttacttcacccacagcagcgaggaagtaaaagcttatttcacgactcatctagcaaaacacgatggcaagcctatccccaaaagtccatgtgtggaggagtaaaccttaaccttgcagcgttacaccaaggtccgaaacaagatgacacgcaaagctggcagaacctgagtagcagcagcagcagcagcagcggatctaggcgtcatcgagggcaaggacaccaggtagagtcttgccttccaagagttccaagctcgcaccgccgccggtcgaaatgtggctcattttgtccgccagcccagcctttttgacagcagcgacagagtcgccgccgccgatgatggtagtgacacccttcgtggttgtaagctcagctagcttcttggcaatcgccttagttccagctgcaaaccggacgcgtgggt

SEQ ID NO: 8097 - DNA, 415 bp, Zea mays
  unsure (1)..(415): unsure at all n locations; Clone ID: LIB3061-084-Q1-N6-D12
gggggttgattttttttttttttttttttttttttttttttttttttttttttttttttttttttttttttatttttggggtttttttttttttttttttttggggggtttttttttttttttttnnnnnnnnnnnntnttttttgggggggggggggttttttttttttttntttnaaaaacccctcggggggggggggtttttttggggncccccccggtgggggtttttccgggggggggccaaattttttatatggtcccccccccactaaatattgtgtgcgggtggggttttttttgggggggggggggggcccccccctcccttgtggggggtttgggctcttctctcttcctttcccccccctcttttgtttttgtaaagggtctcccccttaaaaaaaaggggggg

SEQ ID NO: 8098 - DNA, 512 bp, Zea mays
  unsure (1)..(512): unsure at all n locations; Clone ID: LIB3061-084-Q1-N6-D2
gaacttaaaatatagatctctaatcttttattactgagaagttgcacatatcagtatgagaaatttattattacagtataaagcataaaaaatctagaagatggtaccaccaatggtgggctgatgcaataaggtggtaggattcgtcaaagcgagttggctaaatggcagcaattgctgttgttgtaagaaggcgacaatgtttgccacatcctgtgggtagaatggcagcaattgttgttgttgcaagaaggcgttaatgtttcccacaacctgtgggtaaaatggcagcaattgttgttgttgcaagaaagcagcaatgtttgcaacaacttgtagacggaatggcagcaactgttgctgcaataagatggcagcagggctcccgacaagttggttgaatggtagtagctgttgtgcctgcaagtaagcagcanggttcaccccagctagttgattggatggaagaaattgttgttgctgaaggtaagcagcaaggttcgctgcaacta

SEQ ID NO: 8099 - DNA, 181 bp, Zea mays
  unsure (1)..(181): unsure at all n locations; Clone ID: LIB3061-084-Q1-N6-D3
agggggtgggagggggtttttttgggtgggatcttcggggggggggttccgggggcgggggcccgggcggggntggggntggggggggggnggccgggggggggggggggggaggggggacttgggggggggagggggnccggggggcggggnncgggggtcccggggggggagggggggg

SEQ ID NO: 8100 - DNA, 472 bp, Zea mays
  Clone ID: LIB3061-084-Q1-N6-D4
agaaatgtactttcttatttctgggaagccacaaacatcatccaaaaaacttcattattgaagtataactcataagcaatctaaaagaggcaccaccaatgatgggttgttggtagaacgctgttgggtttgtcaaagcaagttggttgaatggcagcaattgttgcagttgtaagagggtgccagcgttaggcgcagcgtgcaggtagaacggcaacaactgttgttgtgtcaagaaggcaacagggctcacatcagctagctggctgaatggtggtagctgttgctgttgtaaataagcagcagagttcaatgctgccagttggttgaatggaagaaattgctgggggtaggcagcagctagctgactgaatggtagttgttgttgcaaataagcagcagagttcaatgcagccagttggttgaatggaagaaactgctgttgctgaaagtaggcagcaaggtttcctag

SEQ ID NO: 8101 - DNA, 556 bp, Zea mays
  Clone ID: LIB3061-084-Q1-N6-D5
agaaatgtactttcttatttctgggaagccacaaacatcagataaaaaactttattattgaactataactcataagaaatctaaaagagggcaccaccaatgatgggttgttggtagaacactgctgggtttgtcaaagcaagttggttgaatggcagcaattgttgcagttgtaagagggtgccagcgttaggcgcaacgtgctggtagaacggcaacaactgtggttgtgtcaagaaggtagcagggctcacaccagctagctggctgaatggtagtagttgttgctgctgtaaataagcaggagagttcaatgctgctagttggttgaatggaagaaattgctgggggtaggcagcaggtagctggctgaatggtagttgttgttgttgcaaataagaagcagagttcaatgaacctagttggttgaatggaagaaactgctgttgctgagagtaggcagcaaggtttgctagcacaagttgttgtagttgttgtgccctgatgttttgtgccaataaatgcaccaagagtaactgttgtaatagggctgatg

SEQ ID NO: 8102 - DNA, 210 bp, Zea mays
  Clone ID: LIB3061-084-Q1-N6-D6
agaaatgtactttcttatttctgggaagccacaaacatcagacaaaaaactttattattgaactataactcataagaaatctaaaagagggcaccaccaatgatgggttgttggtagaatgctgttgggtttgtcaaagcaagttggttgaatggcagcaattgttgcagttgtaagagggtaccagcacgctgcgcctaacgctggcac

SEQ ID NO: 8103 - DNA, 554 bp, Zea mays
  unsure (1)..(554): unsure at all n locations; Clone ID: LIB3061-084-Q1-N6-D7
aagaactanaaatgtactttcttatttctgggacgccacaaacatcatccaaaaaacttcattattgaactataactcataagcaatctaaaagaggcaccaccaatgatgggttgttggtagaacactgttgggtttgtcaaagcaagttggttgaatggcagcaattgttgcagttgtaagagggtgccagcgttaggcatagcgtgcaggtagaacggcaacaactgttgttgtgtcaagaaggcagcagggctcacatcagctagctggctgaatggtagtagttgttgctgctgtaaataagcagcagagttcaatgctgctagttggttgaatggaagaaattgctgggggtaggcagcaactagctggctgaatggtaattgttgttgcaaataagcagcagagttcaatgcagccagttggttgaatggaagaaactgatgttgctgagagtatgcagcaaggtttgctagcacaagttgttgtagttgttgtgccctgatgttttgtgccaccaaatggaccaaaggtaactgctgtaatagggc

SEQ ID NO: 8104 - DNA, 553 bp, Zea mays
  Clone ID: LIB3061-084-Q1-N6-D8
gacaaaagtagggctaggtaaaaccccgttttacaaaatttgcagaaaagccccttctttatcgctccgaattcctctattcggttattcctccaccgctcgtccgagatcccgattctactacgctgcactgccgcgtccacctcggttcagttccagtgttccgcgggctcgttccaccacgccatcgccggcggctgctccacggcgaagaacccgccgcacggcccgtcgtcgtctaaaaggcccgtctcgtcctcctccaccttcaggaaactcccgtggaagaacaccccgccatggttcgccgccgctgcgccggcaacggggccagccggcgcgacaagaagggtgccctgcacctcgggcgccggcgccggcgcctccgccacgggcgggtccgcgtcgttcagcaccgcgctggagtcactgatctcggacgaccccacccccgcgggggccggcccgtccgaggccgccggctccgccttgaccgacgtgaagctcgccgctgcgtcctcgtcgtcccctagcttcgccttgagctccctga

SEQ ID NO: 8105 - DNA, 521 bp, Zea mays
  Clone ID: LIB3061-084-Q1-N6-D9
gctcaatgggccaaagagtaaggctagaaatatccggcccaataataatagcccgaaaacaagaaccaacagacagtcacggacgcacctgaacaaccagccttcaggatgcagctcagccaccctgtacagggtgcaccatgactcgctatatgctattatgctcctccatccaacacacaaattacacaagcatagcaatgctactgagttcaacggaagaaagcggcactatgttccagcagtttatctccccaatacaggtcttgcaaagatgatcttgactctggttttgcagcgctaacgagatcttctaagccaggtaaagcttccaccagctgatgtggagtcggacggataccaagtaacagcttcccttcggcccaccgtagaagatccttcttctattcgttctcatctatccagtctccatagatcctgctgatcttgtcagggcccttccatttctggatgggcctttgcagctgtccagacctctggctggcgatggccgagcgctg

SEQ ID NO: 8106 - DNA, 555 bp, Zea mays
  Clone ID: LIB3061-084-Q1-N6-E1
gctgccgccgttgaggaggttgcggctgatcaggggagtgaagtcgctgaaccagtcgcacgaggtcagcggggaactgctgatcttctgctctaggagatcgaacttggtgaggagcagaaggaagtctgcttgctcgaatgtcggatggagggtgatgctctcgaacagctgcctgctctctaccatcttgttgacaatggtaccgtttgcatcttcgtagaactcatcgtagtcgctagcagcaacacagaagataacaagccttacgtcatcaaacatttgcagccatttgcagttcccatgcaaacctctactgtttatcctgatcaattggtaccttagcaaagtgtcttgtgcatcgggctcatcaacacccagtccacccaaagacagctgagggaaagagaattcagttgatgctaccccatctgaggatgtaatcccatcagcatacagtatatccatatctgacagctcatattccgttcgagatatatcaacagccttgtcaagaaaataacttgcagccagtggaaagaatggcagttcact

SEQ ID NO: 8107 - DNA, 508 bp, Zea mays
  Clone ID: LIB3061-084-Q1-N6-E10
atatcgagataaatctcaatcaatatattgattatttctaggaaacacatgtcggtttgagggcaccattgtcgagtacatctcatatgtaatctaaaagatggcacctccaacgatgggttgctgcaaggcagggttcatcaaaaagaactggttgtatggcaacaattgttgttgctgctgcaggaaggtagccaccaatgggttagccactgccaatggattaagtaactgttgtcgctgttgtaggtacccaacaaagtttgacacaaccagttggttgaatggaagcaactgttgtaagtaggcaacagggtttgccacaactagctgagtcaaagctggtacaatttgttgcaacaactgttgttgtaggtacctaggtgcattgcccaccgcgagcgggctaaatgaaagtagttgtaggtagaccgcagggttcaccatggctagttgactgagcactggcataaactgttgcaactgttgttgttgctggtatgcaact

SEQ ID NO: 8108 - DNA, 364 bp, Zea mays
  Clone ID: LIB3061-084-Q1-N6-E11
aaagggggaacgggcggggtttttttttaaaaaaaaagggggggccatttttaacaattttgggaaccgggccggggttgccaaaaacccctaaaccaggaaaaaaaaaaaacgggggcccaaggttttgggaaacaaagtcaaaaaaattccaaaaaccaataaaaaagggaaatggggggaaaaaaaaaaaaaagggggggaagggtttccgggccggggtttttttttttttttttttccccgcctaaataaaaggaaagggaaccctgtttggcaaggttcgggtctttaagggggaaaaaaattttaatttaggggggggtttcccccctttcaagggggttaaatattttcaaaaacc

SEQ ID NO: 8109 - DNA, 259 bp, Zea mays
  unsure (1)..(259): unsure at all n locations; Clone ID: LIB3061-084-Q1-N6-E12
gggggggggngaaacaaaaagggtgaggggatntncaagtnaaatagaaaaggtgagggtnctggncatntaacaggtncagaataacaggaatacataaattcatatctagaacaagctctaggtgctaaagaggggggggggggggaactattagggcacagagtgctcccgtggttgactcgtactccaggggggggggagcttcttggtacgcctgttgtagcgggcaaggggggggatcccgcccccaacaaga

SEQ ID NO: 8110 - DNA, 184 bp, Zea mays
  Clone ID: LIB3061-084-Q1-N6-E2
gaatctggaaatgtaacttcttatttctggttggccacatacatcatccaaaaaactttattattgaattacaactaataagcaatctaaaaggggcaccaccaatgatgtgttgttggtaggaggccgctgggtctgtcaaagcaagttggacaaagggcaacaattgttgtagttgtaagag

SEQ ID NO: 8111 - DNA, 480 bp, Zea mays
  Clone ID: LIB3061-084-Q1-N6-E3
aaagcttgttactcccaatcttaggaaaagtaattatcgaacacccttggagaccaatatcacattaaaatctggaaatgtaacttcttatttctggttggccacatacatcatccaaaaaactttattattgaattacaactaataagcaatctaaaagagggcaccaccaatgatgtgttgttggtaggaggccgctcggtctgtcaaagcaagttggacaaagggcaacaattgttgtagttgtaagagggttgcggggttagccgcaaactgctggtagaaaggcagcaactgttgctgtgtcaagaaggaagcacggtttgctgcagctagctggctaaatggtagtagtatttgctgctgcaaataagcagcggggttcagtgcggccaattggttaaatggaagaagttgttgttgctgagaataagcagtagctagctggctgaatggtaataagttgttgctgcaaataag

SEQ ID NO: 8112 - DNA, 417 bp, Zea mays
  Clone ID: LIB3061-084-Q1-N6-E4
gcatgacagtagaacttcatgttattgaattgaaagagcacttacatgcgacactacggcagacagtacagacagttcgacacttgaacaagggaaactaacaaacatgagacaagaacagacatgacacaagaacagactatgcaactccggatccatgtcgcgcccagtgatggggtttaagatcaatctgaagctgggtatatttgttgcggtctttgagttggttgtacctttgattgacgaaattgttaccctcttccattgaaccttgacttgtgtcagcgagcactccgatgttttcaaaggttgtgttcaaagccaaaggaccttcgtcttctactatcatgttgggcaatattatgcaagttttcatgatgtccccaatgtgttcaggactccaaccgtaagcagggc

SEQ ID NO: 8113 - DNA, 460 bp, Zea mays
  Clone ID: LIB3061-084-Q1-N6-E6
ggaaagtaacttcttatttctaggaggccacatacatcagccaaaaaacttcattattgaattacaactaataagcaatctaaaagatggcaccgccaatgatgtgttgttggtagaaggctgctgggtttgtcaaagcaagttggacaaagggcagcaactgttgcagttgtaagagggttgcggggttagccacaaactgctggtagaacggaagcaattgttgttgtttcaaaaaggaagtggggcttgttgtagctagctggccaaatggtagtagtatttgctgctggaaataagcagaggggttcagtgcggccaattggttaaatggaagaaattgttgctgctgagagtaggcagtagctagctggctgaatggtagtagttgttgttgttgtaaataagcagcagggttcagtgtagacagttggttgaatggaagaaattgttgttgctg

SEQ ID NO: 8114 - DNA, 541 bp, Zea mays
  unsure (1)..(541): unsure at all n locations; Clone ID: LIB3061-084-Q1-N6-E7
gcagcaccaanaagcaccatttttttccttaggatttaacttagaataaagcctgacgggggtaacagcacccatcgatccgcagtccatgctggttgatgcatgggtctgctggagccgaggatgaacacagcactaacaactgacacagagcgaccttcaatcaaaaacacagatgggcaacaacaaacacgagacgaacgaagataaacactctggactagggtaaacaacacggtagcgaacaggataacttggccgcgcgggccccaccgctcagttcctccagttcccgtcggagttgccgtagccgccgccacggttgccaccgccgtagccgccgccaccaccaccgtagccgccgccgccaccaccgtagccgccgccaccgccgtagccgccgccgccatcacggcgcccgccaccgncgtagccgccgcctccacggccaccaccgtacccgccgccgccgccgcctccacggccgccgcgggactgggcctcgttgacggtgatgttgcggccgtccagctccttgccg

SEQ ID NO: 8115 - DNA, 114 bp, Zea mays
  unsure (1)..(114): unsure at all n locations; Clone ID: LIB3061-084-Q1-N6-E8
attnaaaggtgggtttagggggagatttggtgtgggtggaagaggggggggggggaagggggaaaaggggggggggaagggggggggtggtggggtgtaaggaggggggggggg

SEQ ID NO: 8116 - DNA, 581 bp, Zea mays
  Clone ID: LIB3061-084-Q1-N6-E9
atgacgtcggggcccttctgctcttccagcctgccgatgaacgccaccagcgggatgttccggtccaccgggagcccgacctccgcctgcagcgcctccttgttcagcgccttggcctccacggccgtcgacacgtcgtacttcacggcgatgtacttgtccctgctggggtcccactcgctgacgtccatgccgttgacgatgccggtgatgccggtgaggcgcatgatgttgtcgagctcgcagcccctggcgatgccggagatgagctcctcggcgtagtaggggctgacggtgaggaccctgtcggcctcgaggatcccggccttcatccagttgatcttccggccttccacgggcttctcgtagccgtcgatgaaatcgaaggacgacttgaatctctccgggaggttcagctccgggtagtcggagaaggcgaaccggccctggtaggagatgttgtggatgcagaaagcggtctttgcgtccctgtagatgccgtgggactggtagttgctcttgaggtagcacgagaagaggccggtgtgccagtcgttgcagacgaacacgacgtcctcccc

SEQ ID NO: 8117 - DNA, 410 bp, Zea mays
  unsure (1)..(410): unsure at all n locations; Clone ID: LIB3061-084-Q1-N6-F1
gcagcacgcgtacgnatgggggatcctctttacaaaagctctttttttttttttttcgagataaatctcaatcaatatattgattatttctaggaaacacacgtcggtatgagggcaccattatcgagtacatctcatatgtaatctaaaagaggtacctccaacgatgggttgctgcctcgacaagacaggattcatcaaagagaactggttgtatggcagcaattgttgctgctgtaggaaggcggcgaccaatgggttagccactaccaatggattaagnaactgtngtcgctgttgtaggtacgcagcagagttcgacagagtcagttggttgaatggaagcagctgttgcaagtaggcaacanggtttgccacagctngttgagtcagagctggtccaatctgtt

SEQ ID NO: 8118 - DNA, 549 bp, Zea mays
  Clone ID: LIB3061-084-Q1-N6-F10
ggaacagatggagtactttttttcttttcatttcaattgttcattcaggtcattgctcacactgacactgccacccatggtgatgcgtgacacattattactcaatcatcgccgctaaatgactcaactagctagctagccagcggctatactacagcacatagtttcttcagtgggggacaccgccggcagcagcgtaggggcatggagtcggctgctgcaggccgcacatcgccgtcagttgctgcgctatctgcgccgccaacagccccgcgacctggccgctttgcggctgctgctgcaggatggactggaggaccaagccgaagatcgcctggtaccggtgctgcggctccacctgcctgagctgctggcaacactgctgccgcaacgactggcactgaggcgagcagtagggcgtcgccgtcgggctgcactgatgcctcaggaactcgacgcactggcccaggatcggggtgctgccaacgccgcaggttccctgcagctggcacgggcttggatgcggctgttggcacgggcatgggtgtg

SEQ ID NO: 8119 - DNA, 454 bp, Zea mays
  Clone ID: LIB3061-084-Q1-N6-F11
gacaacaattaacagtttcctttatgtagcatcaggttattcattagtgtcaggtgctagcaacaacactgcactcagaaacagcccacaaaggtttgccctaacccaggcaagagaaaaggtgaagttgttgatcaaacaaaaacgacagggccacacgatgacacgaacaacactaacagcaatctcagccgatgagaagcttgttcttttccaaaaagctgtatgtcggcacttccaggttgaagggtgccgggcccttgcggatcctaccagaaatgtcgtagtgcgagccgtggcacgggcagaaccagccaccaaagtctcctgcattagggagcgggatgcagcccaggtgagtgcagaccccaatgacgaccagccattcggggttcttgacgcgctctgcatctttctcttggtggcggagggatgccacctcaacactgttggc

SEQ ID NO: 8120 - DNA, 474 bp, Zea mays
  unsure (1)..(474): unsure at all n locations; Clone ID: LIB3061-084-Q1-N6-F2
ggagtctcaggaaaaaaaataatctgtactgaaattacattgtatagttccccctttcaacccgacgagtgataatactccagagttcataaagtacaacgtaagacaatttgcttcattgtacaactaattcaattattttgccaaaatccagattgtaggccggtactttccagaaacattttattcaagcgcttataccataaacaaatggggaacttcaacaagcactaatgaaatatcgagacaaacatttgagagcagcaaaaacactgcagaatcgaaaaaactcaaaccgcagccttgaggaaggagctagaacaggcagcaacatatcctggaacaaaataatccaacagcaagctataacacaccagggtgaactgcagattctttctgagttttgcacccttttcccataagaccagacattccctgcccanatggtaatgccattgagctcccattgtcaaa

SEQ ID NO: 8121 - DNA, 455 bp, Zea mays
  unsure (1)..(455): unsure at all n locations; Clone ID: LIB3061-084-Q1-N6-F3
aacaggaatcgttaattatttcacaagaacaaatccggatcccctttaattattgttccggatgaacgatccgagaaaatgcattcatcttcttgctgggcttattattcagacatatgagctagctacaagctcattcctcatgcactatgctcttcgcagttacttggagggcatcgttccgccgccgagaatccaggggcattcggcgaccccgctgatggtggccaggttgcactcggcctccgtgacgagggtggcggcaaatcccctctgcacctcccgcgggcagcccggcaggtcctttaggcggccctccagctgcgcgtccgggcccggcgggatcgcgccgtccatgaggatgctcagcgccgtgcaccggcagtacgccgggatgtccgccagctcccggcagcatttccttttcanctccggccacgggaggcgcggcccga

SEQ ID NO: 8122 - DNA, 568 bp, Zea mays
  unsure (1)..(568): unsure at all n locations; Clone ID: LIB3061-084-Q1-N6-F4
agaaatgtactttcttatttctgggaagccacaaacatcagacaaaaaactttattattgaactataactcataagaaatctaaaagagggcaccaccaatgatgggttgttggtagaacgctgctgggtttgtcaaagcaagttggttgaatggcagcaattgttgcagttgtaagagggtgccagcgttaggcgcagcgtgctggtagaacggcaacaactgtggttgtatcaagaaggtagcagggctcacaccagctagctggctgaatggtagtagttgttgctgctgtaaataagcaggagagttcaatgctgccagttggttgaatggaagaaattgctgggggtaggcagcaggtagctggctgaatggtagttgttgttgttgcaaataagaagcagagttcaatgcagctaggttggttgaatggaagaaactgctgttgctgagagtaggcagcaaggtttgctagcacaagattgttgtagtttgttgtgccctggatgttttgtgccnataaatgcaccaaaaggtaacttgatgtaaataggggctgatggatt

SEQ ID NO: 8123 - DNA, 557 bp, Zea mays
  Clone ID: LIB3061-084-Q1-N6-F8
ggttaactggtaataacataaattaaacgtacacattctggatctagcaccaacaccactttacagcgctgtgttgagcgcgcagctagcctcgtagtagtagtagttatactagcgcatcgatgttcagcagcctcgcaattacagtagtttattcaggcatgcatcggtgggcatttggtgcttgcattggcaaactgaaaaaagaggtaagtagctagctctggagacggaggtctcgtctcacggcctgaagaaggccgggtggggacggccggtgccctggaaggaggtgttcttgaggtggtcaggggcttggtcgaacgagtggcgcctcgccagcgacaggatcttcttgtcggcggcgatgaagtaggccatcccagccaccgtggagacgatgagcgcctggccggtggggttgatgttggccttggcccatggcagcatccgcacgctggccagggtggggatcgcggaggcgatagtcgccaccgctgccgccttggctccggcgagggtcgcctctcgggagcaacgcttggcgagggcgagct

SEQ ID NO: 8124 - DNA, 547 bp, Zea mays
  Clone ID: LIB3061-084-Q1-N6-F9
gagataaatctcaatcaatatattgattatttctaggaaacacatgccggaatgagggcaccattatcgagtacatctcatatgtaatctaaaaaaggcacctccaacgatgggttgctgcctcgacaagacagggtttatcaaagagaactggttgtatggcagcaattgttgctgctgtaggaaggcagcgaccaatgggttagccactgctagtggattaagtaactgttgtcgctgttgtaggtacgcagcagagttcgacatagtcagttggttgaatggaagcagctgttgcaagtaggcagcagggtttgccacaactagctgagtcagagctggtacaatctgttgcaacaattgttgttgcaggtatgtaggtgcattggccacagcgagcgggctagatgaaagcagttgttgctgttgtaggtaggcggcagggttcaccatggctagttgactgagcgctggcagaaactgttgcagctgttgttgtggctggtttgcaactacgtttgccagagcaagtgggtttgatgcaagc

SEQ ID NO: 8125 - DNA, 455 bp, Zea mays
  Clone ID: LIB3061-084-Q1-N6-G1
ttttttttttttttttttttttttttttttttttagaaagtctttcttattttggggcgcccaaacatatccaaaaaattcttattgaacttaactcataacatctaaaaggggcaccaccaatgatgggttgttggtagaacactgttgggtttgtcaaagcaagttggttgaatggcagcaattgttgcagttgtaagagggtgccagcgttaggcatagcgtgcaggtagaacggcaacaactgttgttgtgtcaaaaaggcagcagggctcacatcaactagctggctgaatggtagtagttgttgctgctgtaaataagcagcaaagttcaatgctgctagttggttgaatggaaaaaattgctgggggtaggcagcaactagctggctgaatggtaattgttgttgcaaataagcagcagagttcaatgcaaccagttggttgaatggg

SEQ ID NO: 8126 - DNA, 549 bp, Zea mays
  Clone ID: LIB3061-084-Q1-N6-G10
gactcccaaaaacctatttgccattatgtcttataatttgtgtcaatactcatgcaacatgtcatacaggacaggaaccgctttgacaaaaaccaacacattccctatcttccaaggttcttttcttctacctcatcaaatagtaaaacaatataattcattcatgctatattggaggcaaaacccaactcccgacaacacctgcgacttcatgcctaccaccagaggcggtgggagcaagagcccaaatgatccaaccggctgaccttgaagactgaccacttccatgcagcaccactggtgatgcagcacaaggactgaccctgctgactgggactgacatgacaaacacctgagaccagaccaatgggaccgaaccaaggttttggaggacgacgccactaccccaactctgactagccccaaccactaggccaaggcacaatggcacagccgccattccaaatgggcatcttcagccgaagttgaatccacctgatggaacagagggctggttcccaaatttgaagccattctgggggattgtcg

SEQ ID NO: 8127 - DNA, 306 bp, Zea mays
  unsure (1)..(306): unsure at all n locations; Clone ID: LIB3061-084-Q1-N6-G2
gggtgggggttgggggtggggtaggggggggagggggaggcgaaccccgnattcgggagggggggggggcccggtggggggggggggcccccgaccccnccccgaacgcgccggggggggggcccccccggagggggnagggggggggggcccccccaagggggggggggggaggggcccgggggggggggcaagggaggggtgggggggggccggggtagggggccggggggaggggggnccgggggaggggggnnggggggggggggggggcccccgccggggngggggaaggggggggggggg

SEQ ID NO: 8128 - DNA, 511 bp, Zea mays
  unsure (1)..(511): unsure at all n locations; Clone ID: LIB3061-084-Q1-N6-G3
cagaaccaactatcagtttccaatcatcttttttccttatatattattcctttccatttcaatggttcattcaggtcattgctcacactgccacccatggtgatgggtgacactacgttactcatcgccgctaaatgagtaaactagcgagctaggtagctagtcagcggctccattacattattactacagtacatagtttcctcagtagtagacaccgccggcagctgcgttgcaagggcagggacctggctgctgcagctgcaggccgcacatcgccgtcagctgctgcgctacctgggccgccatcagcgccgcgagctcgccctgcggctgctgctgcangaaggactgcaggaccacaccgtatgtcgcctggtaccggtgcagcggctccacctgcctgatctggtggcagcactgctgctgcagcgcctggcactgtggcgagccgtagggcgtcgccgccgggctgcactggtgcctcaggaactcgacgcactggcccagg

SEQ ID NO: 8129 - DNA, 439 bp, Zea mays
  unsure (1)..(439): unsure at all n locations; Clone ID: LIB3061-084-Q1-N6-G4
cccaaacctcttttttccttttattttnccccttcccttttaagggggtcttgggggggttgggtcccccggccccccggggggggggggaacctcccgttcccttgggcggttaagggggggaactggttttgcccctttgggggggggggggggggcccctttccttttttccccgcgcccatttttccctcggggggaacccccccggggagttgttttgaggggggggggccctggttgttgggtttgcaacccccacattcccttgggttgggggtttcctgggggccccttagggcccgggggtcccccctggggttttttttgggggggggactgcgggccccccccctttgtccccgggccccggggcaggggtccccccggcctgttgtgggggggaacatggtttttggggcgccgggccttggggggg

SEQ ID NO: 8130 - DNA, 324 bp, Zea mays
  unsure (1)..(324): unsure at all n locations; Clone ID: LIB3061-084-Q1-N6-G5
cagaaaatatcggggataaatctcaatcaatatttggattatttctgggaaacacacgtgggtttgggggccccattttcgggtccatctcatatgtaatctaaaagagggcccctccaacgaggggttgctgcctcnacaagacaggattcatcaaagagaactggttgtatggcagcaattgttgctgctgtaggaaggcggccaccaatgggttagccactaccaagggattaagtaactgtnggcgctgttgtagggacccagcaaagttcgacagagtcagttggttgaatggaagcagctgttgcaggtaggcaacag

SEQ ID NO: 8131 - DNA, 128 bp, Zea mays
  unsure (1)..(128): unsure at all n locations; Clone ID: LIB3061-084-Q1-N6-G6
attgggnaggggggggggggggggtttttttttttttttaaaaaggggtataaaggggggtggggatataggggtccgggccccgggggggggggggaaaaatttttttgtaaatttgcgggggtaaa

SEQ ID NO: 8132 - DNA, 508 bp, Zea mays
  Clone ID: LIB3061-084-Q1-N6-G7
agagtcccaaactccgttgcattttcgataaggtacagttcacgatcgcaggctgacagccaccacttcccaggcaagttatgtttccccacgtttataagcaaattcaatgatatgccaacagtttggtgaatgaattgagcaggagtgccaatatcaggccctgggcgtcgagctgaccgagataaatcatgtttgtacagcccaaccattgtttggagatgcatctccccgttgttcatcttttacgctggacgagtccgttctcagtcagatattccacaaattcgtctatgaggtagggccaggcaccttcgtcgtcgtagttggataactgtggatcggtcgtcttcacaaattccagcagctgggaccatgtgtctctagatatggctttattgtgtctgacctgtaaaaactgacaccaatgatccagaagaggccagttcctttcagcaaatagcaactgccacattccaatagaagtctccagtgagagagacttttg

SEQ ID NO: 8133 - DNA, 487 bp, Zea mays
  Clone ID: LIB3061-084-Q1-N6-G8
agacagcaactgtaacattgataccagtgttcagacatgcaagtcaccctactaggagtataatgtcgagacattctattagcaatggcatgaatattacgatcaacaagcaaccaataaacgtcaactgcttttatccgccatccatttccagcttctccaaggctgatctggccctaacccttgaagaataaccagccttcacagtccttattcatcgtcatcttcatcctcattttcatcaattcctacccagcgagtgaaggcaaacaggaactccttgaatgtcaccattccgttcttgtcccagtccatttcctcaaatcttttcatggctataggcccagaagagcgctctcctgtcgtggtctcgtttattgcttggatcatctcatccttgctcacatacccatctttattcttatccaagaagacaaacgcatcaaccaaggtctcgaaggttgcctcaagatttcctagtcccatc

SEQ ID NO: 8134 - DNA, 492 bp, Zea mays
  Clone ID: LIB3061-084-Q1-N6-G9
gttcctaaagcctccagttttttttaggctcaaaatttccttatagccgcttcagatccaaaagaaagggacagcaggtgcgtgcattagtcagtaggcacacgttcattcatatacagcaaacgacgacgacagcagcgtcacccacaagtgcgcacatcagatctacaggggtgaaatccagcaagtaaaaaaaaaaaacacagaggagaggacgacgaggcaaaccagtggagttttaggcgtccccttcctcgtgatgaagcccagcggtggtctgaccactgtctgtcgcgtcttgacaggcaaggtggcccaccctcggatacctctccttgaatttttcctcccaatcttgcaacacctccagctcatcggcgcttaggccgtccagatccccggtgaggtcgtttgggtcaaatgacatcaatgccagggcccgggttgcatccctcccggcaaacaaggaatatggtccctgagggccataaa

SEQ ID NO: 8135 - DNA, 489 bp, Zea mays
  Clone ID: LIB3061-084-Q1-N6-H11
gagataaatctcaatcaatatattgattatttctaggaaacacatgccggaatgagggcaccattatcgagtacatctcatatgtaatctaaaagaggcacctccaacgatgggttgctgcctcgacaagacagggtttatcaaagagaactggttgtatggcagcaattgttgctgctgtaggaaggcagcgaccaatgggttagccactgctagtggattaagtaactgttgtcgctgttgtaggtacgcagcagagttcgacatagtcagttggttgaatggaagcagctgttgcaagtaggcagcagggtttgccacaactagctgagtcagagctggtacaatctgttgcaacaattgttgttgcaggtatgtaggtgcattggccacagcgagcgggctagatgaaagcagttgttgctgttgttggtaggcggcagggttcaccatggctagttgactgagcgctggcagaaactgttgcaa

SEQ ID NO: 8136 - DNA, 360 bp, Zea mays
  Clone ID: LIB3061-084-Q1-N6-H2
agaaatgtactttcttatttctgggaagccacaaacatcagataaaaaactttattattgaactataactcataagaaatctaaaagagggcaccaccaatgatgggttgttggtagaacactgctgggtttgtcaaagcaagttggttgaatggcagcaattgttgcagttgtaagagggtgccagcgttaggcgcaacgtgctggtagaacggcaacaactgtggttgtgtcaagaaggtagcagggctcacaccagctagctggctgaatggtagtagttgttgctgctgtaaataagcaggagagttcaatgctgctagttggttgaaaggaaaaaaatgctgggggtaggcaaca

SEQ ID NO: 8137 - DNA, 448 bp, Zea mays
  Clone ID: LIB3061-084-Q1-N6-H7
gcacgccatcaaggcatcaactatatatttcagataatgcacccaatagctgatgacattaccagttttgcagataaatgcacccaatagctgatgacattactagttttgcagataactgggcaaactgacaatcaaataagctgacatacattaaactaaccttagcagttttgcagataactgtcctaactaacatacaccctaagaatacatatatgtctagctcttcctaggtgtattttaacgaacaaccttcttcacgcgtcttttggaggagagattggttctgtagtaggcacaacctctcttggaggagacattggttgcactatctgtgaagatgcaagcacatcctctcctggcggaggaggcattgtgagcacaatctctgaagatgcaggcacatcatcacttggagggataatattgggtgctgcctgtgatg

SEQ ID NO: 8138 - DNA, 494 bp, Zea mays
  unsure (1)..(494): unsure at all n locations; Clone ID: LIB3061-085-Q1-N6-A6
ggggggnggggggngggggggggggggggggggggggggggggggggggggggggggggggggggnnggggggggggggggggggggggggggggggnnggggggggnngggggggggggggggnggnnnggggggggggggggggnggnggggggnggggggggngggggggggggggggggggggggggnggngggggggggggggggggggggggggggggggggggggggggggggggggggnnngggggggggggggnnggggggggggnggggggggggggnggggggggggngggggggggggggnggggggggnnngggggggggggggggggggggggggggggggggnnnngggggggggggnggggggggngggggggggggggnngggggggggggggggggggggggggggggggggggggggnnnggggggggggggggggggnnggggggggggggggggggggggggggnnngggggg

SEQ ID NO: 8139 - DNA, 258 bp, Zea mays
  Clone ID: LIB3061-085-Q1-N6-A8
cgagataaatctcaatcaatatattgattatttctaggaaaacatgtcggtttgagggcaccattgtcgggtccatctgatatgtaatttaattttggtacctccaacgatgggttgctggggggggggggtcatcaaagagaactggttgtctggccgcaattgttgttgcttttgctggaaggttgtgaccaatgggttggccactgccaatgggttaagttactgttgtttttgttgctggtccctttctttttt

SEQ ID NO: 8140 - DNA, 431 bp, Zea mays
  Clone ID: LIB3061-085-Q1-N6-A9
ctagaaatgtactttcttatttctgggacgccacaaacatcatccaaaaaacttcattattgaactataactcataagcaatctaaaagagggcaccaccaatgatgggttgttggtagaacactgttgggtttgtcaaagcaagttggttgaatggcagcaattgttgcagttgtaagagggtgccagcgttaggcatagcgtgcaggtagaacggcaacaactgttgttgtgtcaagaaggcagcagggctcacatcagctagctggctgaatggtagtagttgttgctgctgtaaataagcagcagagttcaatgctgctagttggttgaatggaagaaattgctgggggtaggcagcaactagctggctgaatggcaattggtgttgcaaataagctgcagagttcaatgcatccaattggttgaat

SEQ ID NO: 8141 - DNA, 559 bp, Zea mays
  Clone ID: LIB3061-085-Q1-N6-B10
agggaaaataattatcgaacacccttggagaccaatatcacattaaaatctggaaatgtaacttcttatttctggttggccacatacatcatccaaaaaactttattattgaattacaactaataagcaatctaaaagagggcaccaccaatgatgtgttgttggtaggaggccgctcggtctgtcaaagcaagttggacaaagggcaacaattgttgtagttgtaagagggttgcggggttagccgcaaactgctggtagaaaggcagcaactgttgctgtgtcaagaaggaagcacggtttgctgcagctagctggctaaatggtagtagtatttgctgctgcaaataagcagcggggttcagtgcggccaattggttaaatggaagaagttgttgttgctgagagtaggcagtagctagctggctgaatggtaatagttgttgctgcaaataagcagcagggttcagtgtagacagttggttgaatggaagaaattgttgttgctgagagtagggagaaaggtttgccagagctacttggttgatcacaggtagca

SEQ ID NO: 8142 - DNA, 398 bp, Zea mays
  unsure (1)..(398): unsure at all n locations; Clone ID: LIB3061-085-Q1-N6-B12
gggggggtggggcggngcggcgcgggggggggggggggtgggcgggggggggggtcgggggggggggggggggggggggggcggggggggggggggggggggggggggggggggggggggggggggggggggggtgggggcggggggtgcgggcggcgggggggggcggggggggggcgtgggggggggggggggcgggcgggggggggggggggggggggggggcgggggggggggggaggggggggggggggggggggggagggggggggggggggggggggggggggggggggggaggggggcgggggaggggggcgggggaggaggggggggggggggggggggggggggggggggtggggggggggggggggggggggggggggggggggggg

SEQ ID NO: 8143 - DNA, 661 bp, Zea mays
  unsure (1)..(661): unsure at all n locations; Clone ID: LIB3061-085-Q1-N6-B2
gggggggggggggggggggggggggggnngggggggggggggggggnnggggggnngggggggnnngnnnnnnnnnnnnnnnnnnnnnnngggggggggggggggggggggggggnnnnngnnnnggggggnngggngnnnngggnggnggggggggggngggggggngggggggggngnggggggngggggggggggggggggggggggggggggggggggggggggggnnnnggggngnggggggggggnggggggggnggggggggngggggggggggggggggggggggggggggggggggggggggggggngggggggggggggggggngggggggnnggggggggggggggggggggggggggggggggggggggggggggggggggggnngggggggggggggggggggggngggggggggggggggggggnngggggggggggggngggggggnnngggggggggggggggggggggngggggggnnnggggggggnnggggggggggggggggggggggggnnnggggggggggggnngggggggggggggggggggggggnggggggggggggggggggnnnggggggggggggggggggggggggggnggggggggggggggnnggggggggggggggnngggggggggg

SEQ ID NO: 8144 - DNA, 295 bp, Zea mays
  unsure (1)..(295): unsure at all n locations; Clone ID: LIB3061-085-Q1-N6-B6
atcgagataaatctcaatcaatatattgattatttctaggaaacacatgtcggtntgagggcaccattgtcgggtacatctcatatgtaatctaaaagaggcaccttcaacttgggttgctgcaaggcagggtttattaaagagaactggttgtatggcagcaattgttgttcttgctgcaggaaggttgcgaccaatgggttagccactgccaatgggttatgtaactgttgtggctgttgttggtgcgcatcagtgtttgtcacagcctgtttgtttgaatggtagcaactgc

SEQ ID NO: 8145 - DNA, 491 bp, Zea mays
  Clone ID: LIB3061-085-Q1-N6-B7
gaagttgcatttaaaattgctgttattgagaaattgttgtccatagttctcaactttcacgtccaatgattaaacgaacacgacggctttatttttttttcatggcagcaaacaccaaaacatttttttggagccgcctgaaggctttgccctcggcatcacgcccaccctgcgagtagaaagcgcggcgcctgatgctctcttcaatcggggcactgccacccttatctgttccaaatatgctcttcttttcatcttccaagaagttcttccctttgaactggtttgcattcacagttgttgcctttttagcattgtcgtctgcagctttcttgagcctcttccatctctgctcctcgtggacctcaccgtcagcctgcctttggtgcagacgagctaacctttcctcttttgacatatggtggacaccaccgcctttttggttcattgtaagaccactattactgtcatgttcgtctctttgccttgtc

SEQ ID NO: 8146 - DNA, 133 bp, Zea mays
  Clone ID: LIB3061-085-Q1-N6-B8
gggggggggggaaaaggttgtatgggggggttttttttatatatatttttttaaaaaattaaatttaaaatttatttttttttttttatgtgaaaattttaaatttcatttttatatgtattaaaaaatatta

SEQ ID NO: 8147 - DNA, 318 bp, Zea mays
  Clone ID: LIB3061-085-Q1-N6-B9
cgagataaatctcaatcaatatattgattatttttaggaaacacatgccgctatgagggcaccattatcgagtccatctcatatgtaatctaaaagatggcaccaccaacgatgggttgctgccacgacaaggcagggttcatcaaagagaactggttgtatggcagcaattgttgctgctgtaggaaggcagcgaccaatgggttagccaccgctagtggattaagtaactgttgtcgctgttgtaggtacgcagcaaagttcgacacagtcagttggttgaatggaagcctcctcccttcttcttcttcttctctt

SEQ ID NO: 8148 - DNA, 256 bp, Zea mays
  unsure (1)..(256): unsure at all n locations; Clone ID: LIB3061-085-Q1-N6-C10
gtggtgtgtggggggggggtgggagtgtggggggggggagggttgggttgggtgtttttttnnnntttgggggggggggggggggttttttaggaattgggggggggggtntggtgtaaaaaaaggggggggggggggggttgggggggggggggggggggggggggggattcgggtttgggtttggggggggggccggggttttgtttgggggggggggggggaggtggggggggggcgggggttggggggttcc

SEQ ID NO: 8149 - DNA, 456 bp, Zea mays
  unsure (1)..(456): unsure at all n locations; Clone ID: LIB3061-085-Q1-N6-C3
aagaaaactctgcaacaataaatgtgaaaacaatacatctcactgtcgtcatagtcttggtgactctttctgaacctccgtgtttgcacggtatctcttacgacttttatatttctcaagaccaccttaatgatagaaacctaatcttttccagaaggaaccgagtcggcagaggaaggtgacaatgggacagcaataaaacactgtgaagcaccaggtgactgttgagatactcttacttctgccaggcttaaagtaagatggagtgatgggaccaggtctgttgcactgctaggcacagacaatggtaggattatctagcagatgcataatccgctaagntcagtgaacagtccccagaacaagttttctctttgacattttacttgattcaaattcgaaaagatgctggtgacccacgccggnataagtggnntttcctagccaacaaaatgt

SEQ ID NO: 8150 - DNA, 530 bp, Zea mays
  unsure (1)..(530): unsure at all n locations; Clone ID: LIB3061-085-Q1-N6-C4
ggtgacaaatgaatttcacgcttaatataagaacaacagtagactgggcaacatctgatcagatcatagttgctgaatgcagcgaccaaactggttacaaagagtgtcagcaaacaaactttaaccacaactctgaactcaacactttgataagagcatatatacaaacaaaagccaaaggttctcagaagaaacagcaccctaccaagtaaatttactgccaggcccgtctaaacaaccctcccctatcacggtggcagcagtcaacagctctacaatagatctacctgtacacatatgcaagcaactcccatggtatctgagacatcaatctccacacctgcagacccatntcacaatctcctggcactgccagactccacatcgtttagagtatctcttagggtgatgatcccaccgtgcccaggaatatcgactgtttcgatttcggttggtctcacgctgtatgagttcgcatttctgctgttcccctcctcggctaaccggaacgcgtatgcgtgaggccccaa

SEQ ID NO: 8151 - DNA, 479 bp, Zea mays
  Clone ID: LIB3061-085-Q1-N6-C6
cgtgggaagccacaaacatcagacaaaaaactttattattgaactataactcataagaaatgtaaaagagggcaccaccaatgatgggttgttggtagaacactgctaggtttgtcaaagcaagttggttgaatggcagcaatggttgcagttgtcagagggtgccagcgttaggcgcaacgtgctggtagaacggcaacaactgtggttgggtcaagaaggtagcagggctcacaccagctagctggctgaatggtagtagttgttgctgctgtaaataagcaggagagttcaatgctgccagttggttgaatggaagaaattgttgggggtaggcaacatgtagctggctgaatggtagttgttgttgttgcaaataagaagcacagttcaatgcacctagttggttgaatggaagaaactgctagtgctgagagtaggcagcaaggtttgctagcccaacaactacaacaacttgt

SEQ ID NO: 8152 - DNA, 538 bp, Zea mays
  Clone ID: LIB3061-085-Q1-N6-C7
cacattagaatctggaaatgtaacttcttatttctggttggccacatacatcatccaaaaactttattattgaattacaactaataagcaatctaaaagagggcaccaccaatgatgtgttgttggtaggaggctgctgggtttgtcaaagcaagttggacaaagggcaacaattgttgtagttgtaagagggttgcggggttagccgcaaactgctggtagaaaggcagcaactgttgctgtgtcaagaaggaagcacggcttgctgcagctagctggctaaatggtagtaatatttgctgctgcaaataagcagcgaggttcagtgcggccaattggttaaatggaagaagttgttgttgatgagagtaggcagtagctagctggctgaatggtaatagttgttgctgcaaataagcagcagggttcagtgtagatagttggttgaatggaagaaattgttgttgctgatagtagggagaaaggtttgccagagctacttggttgatcacaggtagcacgagttgctgcagctgct

SEQ ID NO: 8153 - DNA, 457 bp, Zea mays
  Clone ID: LIB3061-085-Q1-N6-C8
agaatctagaaatgtactttcttatttctgggaagccacaaacatcagacaaaaaactttattattgaactataactcataagaaatctaaaagagggcaccaccaatgatgggttgttggtagaacgctgctgggtttgtcaaagcaagttggttgaatggcagcaattgttgcagttgtaagagggtgccagcgttaggcgcagcgtgctggtagaacggcaacaactgtggttgtatcaagaaggtagcagggctcacaccaactagctggctgaatggtagtagttgttgctgctgtaaataagcaggagagttcaatgctgccagttggttgaatggaagaaattgctgggggtaggcagcaggtagctggctgaatggtagttgttgttgttgcaaataaaaagcagagttcaatgcacctagttggttgaatggaagaaactgctgttgc

SEQ ID NO: 8154 - DNA, 512 bp, Zea mays
  Clone ID: LIB3061-085-Q1-N6-C9
gatcaaaattttcctcaattgccattaaaggcgccaacagagtacattgttcgtccattcagagatcagttcacacacacccccagacacagagaggggggggagctttattttgtttcggtctacacgggggtactcagccactgtaacagttcagtcacggtactcagccatgaacgccttatggaaagccttgaagcgggtgatcaccgcggggattttattttcctgcggcaggatcgtgcatttgacgtgccatgttccaggaacttggccaaatccagatccaggaaccacaacaattccagttgattcaaggagacggagcgcataaaatgcatcaggtgctttcttggcagctttagcagcctcaattgccttatgtggcaaatggatctgagggaaaaggtacattgctccttcagccttgttacatgaaaatccctcaagcgtgttgaatgcattttccagtgcctttgcacggcgagctaaagactgaaggattccatctt

SEQ ID NO: 8155 - DNA, 490 bp, Zea mays
  unsure (1)..(490): unsure at all n locations; Clone ID: LIB3061-085-Q1-N6-D10
ataattacgatttgatgttttcaattatttatatgatgaacatagttcagaaatatatcgagataaatctcaatcaatatattgattatttctaggaaacacacgtcggtatgagggcaccattatcgagtacatctcatatgtaatctaaaagatggcacctccaacgatgggttgctgcctcgacaagacaggattcatcaaagagaactggttgtatggcagcaattgttgctgctgtnggaaggcggcgaccaatgggttagccactaccaatggattaagtaactgttgtcgctgttgtaggtacgcagcagagttcgacagagtcagttggttgaatggaagcagctgttgcaagtaggcaacagggtttgccacagctagttgagtcagagctggtacaatctgttgcaacaattgttgttgcaggtttgtaggtgcattgcccacagcgagcgggcttgatgaaagcagttgttgctggtgc

SEQ ID NO: 8156 - DNA, 494 bp, Zea mays
  unsure (1)..(494): unsure at all n locations; Clone ID: LIB3061-085-Q1-N6-D11
gggggggggggggnnggggnnnggggggggggggngggggggggnggngggggggggggggggggggggggggggggggggggggggggggggggggggggggggggggggggggggggggggggggggggggggggggggggggggggggggggggggggggggggngnggggggggggggggggggggggggggggnnngggggggggggnngggggggggggggggggggggggggggggggggggggggggggggggggggggggggggggggggggggggggggggggggggggggggggggnggggggggggggggggggggggngggggggggggggggggggggngggggggggggggggggggggngggggggggggggggggggggggggggggggggggggggggggggggggggggggggngggggggggnnngggggggggggggggggggggggggnnggggggggnnnggggggggggg

SEQ ID NO: 8157 - DNA, 352 bp, Zea mays
  Clone ID: LIB3061-085-Q1-N6-D4
gcagcaccaagaagcaccatttttttccttaggatttaacttagaataaagcctgacgggggtaacagcacccatcgatccgcagtccatgctggttgatgcatgggtttggtggggccgaggatgaacacagcacttacaactgacacagagcgacctttaatcaaaaacacagatgggcaacaacaaacacgatgaatgatgccacggtgaggtggtaggtcggctaggcgaccggcggccagtgtgcggggtccttggtcgtgtcgagggacgtcggcggtttccactgccagaacgcaacccgcggcgggtagctggggtacgggacgaacttttcagcctgagcaaa

SEQ ID NO: 8158 - DNA, 351 bp, Zea mays
  unsure (1)..(351): unsure at all n locations; Clone ID: LIB3061-085-Q1-N6-D6
gggggggggggggggcccggggattggggggggggggggggggggggtcccaggttccctttgggggggggggataaagggggggggtaatagggggaaaggggttttcggggggaaaatggttttccgctaaaatttcgaaaaaaaaaggggggggggggtaaaaggggaaaagggggggggggtaaaggggggggaaaaaaaaaaaaaaagggggggggtgaagggggggttttcgaaggggaaaaggggggggccccgtgtttttaaagaatcgggaaacgggggggggggggggtttggtttttggggggccgggggggttttttttttctccgngggggcgggaaa

SEQ ID NO: 8159 - DNA, 124 bp, Zea mays
  Clone ID: LIB3061-085-Q1-N6-D8
ggaaaggggctttttttttttgggggggccccaaaccttagacaaaaaactttttttttggacttttactcataagaaatttaaaaggggggccccccaatggtggggtgttgggccgggcccc

SEQ ID NO: 8160 - DNA, 522 bp, Zea mays
  Clone ID: LIB3061-085-Q1-N6-D9
ggcggaacagattacttgcattgccattgggtctctaatatattacagattaataataacaattatttatcaaaattgatctgatacgaaccgtctttgctgcacctttccactgattgggtggcttaataaaaacttggaccctgctatgtcaatagcctgacttaatgaactggcaagggtcatactcaattactcatagctaaaccaagggcgctacatcacatgatgtacataagaaactcaaaaaccttgacacggggagggtatatcggagcgtcacgacccttttcttgatagatgctaccgcagcagccctccaaactggagatgacgggccgacaaaaatcagaagtgctatcccacgacgaaaatcagctagccgttaatttgggggaagatttgtgatatcttcatgaaaacatccatgacctccttggcattttggtattttacaatgttaagagggttctgcgagcagtccatgatggctgtctgtatttttggattctggaatgcaac

SEQ ID NO: 8161 - DNA, 627 bp, Zea mays
  unsure (1)..(627): unsure at all n locations; Clone ID: LIB3061-085-Q1-N6-E12
ggggggcccccgccccccggggggggggggggggggggcgggggggggggcggcggngncgcggggggtgtttttgttttgttcctccccccccncccccccccccttgggggggcccgccgggggggcccccccggggggggggggcgctccggcccccccccctcttctttccccgggggggggggggggggggngggggggggngccggggggggggggggggggggggggggggggggggggggggggggggggggggggggggggggggggggtgggcggggggggggggggggggcgggggggcggggggcgggcgggcggggggggggtgcgcggggcggggtggcggggggggggcggggggggggggggggggggcgggggcgggggggcgggtcggggggtgggtggggggggggggggggggggggggggggggggggggggggggggggggggggggcgggggtgggggcgggggggggggggngggcgggggggggggcgggggcggcgggggggggggnggggggggggggggcggggggggggggggggggggggggggcggggggcgggggggggggtgcggggggcgggggcggggcgggggggggggcg

SEQ ID NO: 8162 - DNA, 203 bp, Zea mays
  Clone ID: LIB3061-085-Q1-N6-E8
ggaaatgtgcttttttatttctggggagccacaaacctcggacaaaaaactttttttttggactgttactttttttttatattttaaagagggcaccaccaatgttgggggggtggttgaatgctggtgggtttgttaaagcaagctggttgaatgggaaaaattgttgcctgtggcagagggtgcccgcggtagggccaccg

SEQ ID NO: 8163 - DNA, 248 bp, Zea mays
  unsure (1)..(248): unsure at all n locations; Clone ID: LIB3061-085-Q1-N6-F5
aactagggacatgttggnacaagaccagcggtttgaattacacccgaaaattttttttttcatttccgaagggcnnatatcactttttttgtgggggagggggntggtcccagnaaaacactncgacacatgcctcggcaggggacacaccattccccagagatgtattctctccgaagatcggcggcgggggagatnacttanggagcttgcttttggtgaggtcccctagctggaacatgatgggg

SEQ ID NO: 8164 - DNA, 127 bp, Zea mays
  Clone ID: LIB3061-085-Q1-N6-F9
tttttttttttttaattttttttttttttttttttttttttttttttttttttttttttttttttttttttttttaattttttttttttttttttttttttttttttgggttttttttttttttttt

SEQ ID NO: 8165 - DNA, 450 bp, Zea mays
  unsure (1)..(450): unsure at all n locations; Clone ID: LIB3061-085-Q1-N6-G8
gggggggggnnggggggggnnggggggggggggggggggggggngggggggggggggggggnggggggggggggggggggggggggnngggggggggggggggggggggggggggggggggggggggggggggggggggggggggggggggggggggggnggggggggggggggggggggggggngngggggngggngggggggggggggggggggggggggggggggnggggggggggggggggggggggggggggggggggggnggggggggggggggggggggggggggggggggngnnggggggggggnnggggggggggggggggggggggngggggggggggggggggggggggggggggngggggggggggggggggggggggggggggggggggggnngggggggggggggggggggngggggggggggggggggggggggg

SEQ ID NO: 8166 - DNA, 383 bp, Zea mays
  unsure (1)..(383): unsure at all n locations; Clone ID: LIB3061-085-Q1-N6-G9
ggggggggggggggggggngggggggggggggggggggggggggggggggggggggggggggggggggggnggggggggngggggggggggggggggggggggggggggggggggggngggggggggggggggggggnnggggggggnggggggggggggggggggggggggggggggggggggggggggggggggaggngngggggggggggggggggggggggagggggggggnggggggggggggggggggggggnggggggggngggggggggggggggggggggngggggnggggggnggggggggggggggggggggggggggggggggggggnggggggggggggggggggggggggggggggggggggggggggg

SEQ ID NO: 8167 - DNA, 436 bp, Zea mays
  unsure (1)..(436): unsure at all n locations; Clone ID: LIB3061-085-Q1-N6-H10
gggggggggggcgggggggggggggggggggnggggggggggggggggggggggggggggggggggcgnnggggggggggggggggcgggggggggggcgggggggggggggggcggggggggggggggtggtggtggggggggggggggggggggggggggggngggggggggggggggggggggggggggggggggggggggggggggggggggggggggggggggggggctggggggggggtncggggggggggggggggctggtggggggggggggggggggggggggggggggggggggggggggggcggggggggggggggggggggggggngggggggggggggggtggggggggggggggggggcgggtgggggggggggggcggggtgcgggggggggnggngggggtggggggggcgggtgggggg

SEQ ID NO: 8168 - DNA, 306 bp, Zea mays
  unsure (1)..(306): unsure at all n locations; Clone ID: LIB3061-085-Q1-N6-H3
gggggggggggggggggggnggggggggggggggggggnggggggggggggggggggggggggnnggggggggggngggggggggggggggggggggggggggggggggggggggggggggggggggggggggggggggggtgggggngggggggggggtgggggggggggggtgggggggggggggggggggggggggggngggggggtgggggggngggggggggnggggggggggggggggggggggggggggggggggggggggggggggggggggggggnggggggggggggggggggggg

SEQ ID NO: 8169 - DNA, 467 bp, Zea mays
  unsure (1)..(467): unsure at all n locations; Clone ID: LIB3061-085-Q1-N6-H7
gggggnngggggggggggggggggggggggggggggnggggggggggggggggggggggggggggggggggggggggggggggggggggggggggggggggggggggggggggggggggggggggnggggngggggggggngnggggggggggggggggggggggggggggnggggggggggggggggggggggggggggggggggggggggggggggnggggggnngggggggggggggggggggggggnggngggggggggggggggnnggggggggggggggggggggggggggggggggggggggggggggggaggnnggnnggggggggggggggggggggngggggggggagggggggggggggggggggggggggggggggggggggggggggnggggggaggggggggggnnggggggggggggggggggaggaggggggggggggggggggggggggg

SEQ ID NO: 8170 - DNA, 553 bp, Zea mays
  unsure (1)..(553): unsure at all n locations; Clone ID: LIB3061-087-Q1-K6-A1
gcaacatagnaaagcacaatagtgtaccaacaatggcagccaaaaattttgcctccttatgctccttggtctttctgcaagtgctgctacggcgaccattttcccgcaatgctcgcaagctcctatagcttcccttcttcccccgtacctctcaccagcggtgtcttcggtntgtgaaaacccaattcttcaaccctacaggatccaacaggcaatcgcagctggcatcttacctttatcacccttgttcctccaacaatcatcagccctattacaacagttncctttggtgcatttattggcacaaaacattagggcacaacaactacaacaacttgtgctagataaccttgctgcctactctcagcaacagcagtttcttccattcaaccaactaggttcattgaactctgcttcttatttgcaacaacaacaactaccattcagccagctacctgctgcctacccccagcaatttcttccattcaaccaactagcagcattgaactctcctgcttatttacagcagcaacaactactaccattcagccag

SEQ ID NO: 8171 - DNA, 541 bp, Zea mays
  unsure (1)..(541): unsure at all n locations; Clone ID: LIB3061-087-Q1-K6-A10
cacgccgtccggngacattcagnaaacacaccaagcgaacacattagcaacaacctaacaacaatggctaccaagatattatccctccttgcgcttcttgcgctttttgcgagcgcaacaaatgcgttcattattccacaatgctcacttgctccaagttccattattacacagttcctcccaccagttacttcaatgggcttcgaacacccagctgtgcaagcctataggctacaacaagcaattgcggcgagcgtcttacaacaaccaatttcccagttgcaacaacaatccttggcacatctaacaatacaaaccatcgcaacgcaacagcaacaacaattcctaccagcactgagccacctagccatggtgaaccctgccgcctacttgcaacagcagttgcttgcatcaaacccacttgctctggcaaacgtagttgcaaaccagccacaacaacagctgcaacagtttctgccagcgctcagtcaactagccatggtgaaccctgcccnctacctacaacagcaacaactgcttt

SEQ ID NO: 8172 - DNA, 545 bp, Zea mays
  unsure (1)..(545): unsure at all n locations; Clone ID: LIB3061-087-Q1-K6-A11
ctctgatcaaccaatagctctggcaaacctttctccctactctcagcaacaacaatttcttccattcaaccaactgtctacactgaaccctgctgcttatttgcagcaacaactattaccatttagccagctagctactgcctactctcagcaacaacaacttcttccatttaaccaattggccgcactgaaccccgctgcttatttgcagcagcaaatactactaccatttagccagctagctgcagcaaaccgtgcttccttcttgacacagcaacagttgctgcctttctaccagcagtttgcggctaaccccgcaaccctcttacaactacaacaattgttgccctttgtccaacttgctttgacagacccagcggcctcctaccaacaacacatcattnggtggtgnccctcttttagattgcttattagttgtaattcaataataaagttttttggatgatgtatgtggccaaccagaaataagaagttacatttccagattctaatgtgatattggtctccaagggagttcgataaaa

SEQ ID NO: 8173 - DNA, 563 bp, Zea mays
  unsure (1)..(563): unsure at all n locations; Clone ID: LIB3061-087-Q1-K6-A2
anaagatgtggtcatggctgtaatgggttagcaggtacatcatccacacttatcatttcctttgttttttgtttgatcaatttttaaaatttctttatcagtttgattggtatccacttgcatccgctcacagtttgattcgtgttcgttggatggcgacgtctcaggtttcgtacagttcactaaatttattttgctcaattgtaagggaattgtgtcctatataagctcgcgctcgtgtcgcacccggatcaccccttcttcctgcaagtctggttcaattaaattttttttgttttgtcatgttgcaaagtacttggcgagctatgatatgtcattaccttagtgaaaaaacggtttctaatatatcagtattttttagctgtgcagatcatgtcatcatatagatgttgcaaacattataaaatagaggatccatttgaactcttgagattgtggagtgcatgcctagcctaaatataaaacttagcgttggcattagtaatttcaagtgttatctgaataaattgtttcatacttgaattgttttccctgtgttattt

SEQ ID NO: 8174 - DNA, 575 bp, Zea mays
  unsure (1)..(575): unsure at all n locations; Clone ID: LIB3061-087-Q1-K6-A3
cggtccggcctcccgggtcgcccagcgtccggcaccatcatcttcattggtaagatagattcgggttgcgtactgcatacataatattgcctatcaaggtagatttgccagagcagtactcaggatcgtcttaatctaccttgaagttaccttaccatcatttgcatggtattcgatggtcatgttaagcctgttctagggagaaagattaactggatgaagacagggatcgttgagagtgatctggttctaccagctgggccacattatgttaaggaactcacttatggcccatataaaggggttgagttggatggtgtccttcgcgcaaaagcctttctntaattggaattggatacggcatgggtgtctacgaatgggatccttcaacagattacttcaccaggccgtgtaatatggatgcaacgaacggttctctgcaaacaaacgctctcaataaagagaggcttgcaaggctgaagttcggattgcctgtggactcgagctccctgttatagtttttgtcgggcgttttgaagaacaaaaaggtctgacattcttattgcagccattcc

SEQ ID NO: 8175 - DNA, 550 bp, Zea mays
  unsure (1)..(550): unsure at all n locations; Clone ID: LIB3061-087-Q1-K6-A4
gcaacatacctttatcgcccttgttgtttcaacaatcgccagccctatctttggtgcagtcattggtacaaaccatcagggcacaacagctgcagcaactcgtgctacctctgatcaaccaagtagctctggcaaacctttctccctactctcagcaacaacaatttcttccattcaaccaactgtctacactgaaccctgctgcttatttgcagcaacaactattaccatttagccagctagctactgcctactctcagcaacaacaacttcttccatttaaccaattggccgcactgaaccccgctgcttatttgcagcagcaaatactactaccatttagccagctagctgcagcaaaccgtgcttccttcttgacacagcaacagttgctgcctttctaccagcagtttgcggctaaccccgcaaccctcttacaactacaacaattgttgccctttgtccaacttgctttgacagacccagcggcctcctaccaacaacacatcattnggtggtgccctcttttagattgcttattagttgtaat

SEQ ID NO: 8176 - DNA, 569 bp, Zea mays
  Clone ID: LIB3061-087-Q1-K6-A5
gcacaatagtgtaccaacaatggcagccaaaatattttgcttccttatgctccttggtctttctgcaagtgttgctaccgcaaccattttcccacaatgctcacaagctcctatagcttcccttcttcccccatacctctcaccagcggtgtcttcaatgtgtgaaacccataattgttcaaccctacaggatccaacaggcaatcgcaacaggcatcttaccattatcacccttgttcctccaacaaccgtcagccctattacagcagttacctttggtccatttggtggcacaaaacatcagggcacaacaactacaacaacttgtgctagcaaaccttgctgcatactctcagcaacatcagtttcttccattcaaccaactggctgcattgaactatgctgcttatttgcaacaacaattaccattcagccagctagttgctgcctacccccagcaatttcttccattcaaccaactagcagcattgaactctgctgcttatttacagcagcaacaactactaccattcagccagctagctgatgtgagccctgctgccttcttg

SEQ ID NO: 8177 - DNA, 568 bp, Zea mays
  Clone ID: LIB3061-087-Q1-K6-A7
gcgccgccgtcaccgtcgtcgctcgcgctctccgcccggatcggagcgagagtaggggcgtgtcggcggtgaaagcgactgcgtcagccatggcggacgaggagcattcggagaggagagaggaggcctccgagcttgcccccttcgacccgaccaagaagaagaaaaagaagaaggttgtcatccaagaaccttctgatgaagtggacaagcttgcagagaagacagaaacactggcagtcgcagaacccgctgaacttaacttcactggaatgaagaagaaaaagaagaagccggtggatcttgattcaactcttgatgagcttggagatggggaggacactcaagatgatcaagctgtagaggaacaaggggaaggcattgtgctgggaagtgtccctacatacccttgggagggaactgatcgggattataaatatgaagagctgctggacagggtgttcaacattctacgtgagaacaacccagatcttgctggggataggcgtaggaccgttatgaggccaccacaagttcttagggagggaacaaagaagacagtttttgt

SEQ ID NO: 8178 - DNA, 480 bp, Zea mays
  unsure (1)..(480): unsure at all n locations; Clone ID: LIB3061-087-Q1-K6-A8
aaccatanaggcggcaacaagcaancgcagctagcaacanaccnnnancgcccnggggggggcgacaancaccagccctatcgngggggcaggcattggtacaaaccatcagggcacaacagctgcagcaactcgtgctacctgtgatcaaccaagtagctctggcaaacctttctccctactctcagcaacaacaatttcttccattcaaccaactgtctacactgaaccctgctgcttatttgcagcaacaactattaccatttagccagctagctactgcctactctcagcaacaacaacttcttccatttaaccaattggccgcactgaaccccgctgcttatttgcagcagcaaatactactgccatttagcgagctagctgcagcaagtcgtgcttccttcttgacacagcaacagttgctgcctttctacaagcaggttgcggctaaccccgcaaccctcttacaactacaac

SEQ ID NO: 8179 - DNA, 306 bp, Zea mays
  unsure (1)..(306): unsure at all n locations; Clone ID: LIB3061-087-Q1-K6-A9
tttttatttttttttttttttnnnnntttttttttttttttttttttttttttttggggaaaaaactttttttttggacctttacccctaagaaatataaaagaggggcccccccatgttgtggttggtcattgaactctgcttttttttgggggcaacancggcttccgttcagccaggtgcctgctgccttcccctcccaatttctttcgttctccccccttgccgccttcaactttcctgcttgtttcccgggggtcggctcctcccacttccgcagcttgttggggtgggccctgctccctt

SEQ ID NO: 8180 - DNA, 570 bp, Zea mays
  Clone ID: LIB3061-087-Q1-K6-B10
attttgagcattcagaacacaccaagcgaagcgcactagcaacgacctaacaacaatggctaccaagatattagccctccttgcgcttcttgccctttttgtgagcgcaacaaatgcgttcattattccacaatgctcacttgctcctagtgccattattccacagttcctcccaccagttacttcaatgggcttcgaacacctagctgtgcaagccaacatgcaacaacaagcgcttgcggcgagcgtcttacaacaaccaattgcccaattgcaacaacaatccttgccacatctaacaatacaagccatcacaacgcaacagcaacaacagttcctaccagcactgagccacctagccatggtgaaccctgccgcctacttgcaagagcagctgcttgcatccaacccacttgctctggcgaacgtagttgcaaaccagcaacaacaacagctacaacagtttctgccaacgctcagtcaactagccatggtaacccttgccgcttacttcaacaaccaccacttgttttatttaacccggttgcttggggcaattgaactaccttc

SEQ ID NO: 8181 - DNA, 586 bp, Zea mays
  unsure (1)..(586): unsure at all n locations; Clone ID: LIB3061-087-Q1-K6-B11
accccggtcgacccagcgtcctttcanaaacatatttagcgaacgcactagcaacgacctaacaacaatggctaccaagatattatccctctttgcgcttcttgccctttttgtgagcgcaacaaatgcgttcattattccacaatgctcacttgctcctagtgccattattccacagttcctccctccagttacttcaatgggcttcgaacacccagctgtgcaagcctacaggctacaacaagcgcttgcggcgagcgtcttacaacaaccaattgcccaattacaacaacaatccttggcacatctaaccatacaaaccatcgcaacgcaacagcaacaacaatttctaccagcactgagccaactagctgtggtgaaccctgtcgcctacttttattatttgttgcttgcatccaacccacttgctctggcaaacatagttgcataccaacaacaacaacaattgcaacagtttctaccagcgctcagtcaactagccatggtgaaccctgccgcctacctacaacagcaacaactgatttcatctagccctctcgctgtggttaatgcacctacatacctg

SEQ ID NO: 8182 - DNA, 570 bp, Zea mays
  unsure (1)..(570): unsure at all n locations; Clone ID: LIB3061-087-Q1-K6-B2
ccgcaactagncaacatagnaaagcacaatagtgtaccaacaatggcagccaaaatattttgcttccttatgctccttggtctttctgcaagtgctgctaccgcaaccattttcccacaatgctcacaagctcctatagcttcctttcttcccccatacctctcaccagcggtgtcttcagtatgtgaaaacccaattcttcaaccctacaggatccaacaggcaatcgcagcaggcatcttacctttatcacccttgttcctccaacaaccgtcagccctattacagcagttacctttggtgcatttgttggcacaaaacatcaaggcacaacaactacaacaacttgtgctaggaaaccttgctgcctactctcagcaacagcagtttcttccattcaaccaactggctgcattgaactctgctgcttatttgcaacaacaactaccattcagtcagctagctgctgcctacccccagcaatttcttccattcaaccaactggcagcattgaactctgctgcttatttacaacagcaacagctaccaccattcagccagctagctgat

SEQ ID NO: 8183 - DNA, 549 bp, Zea mays
  unsure (1)..(549): unsure at all n locations; Clone ID: LIB3061-087-Q1-K6-B4
cacgcgtccgcgcggnggacttaagattgaagggatctttaggattaatgcagaaaaagccaggaagtctatgtgagggaccaattaaacagtggagtggttccaaatgaagttgacttgcactgccttgccgggttgataaaggcatggtttcgggagcttccttcaggtgtattggatgcactgacaccagaacaagtaatgcactgcaacacggaaggggggtgcgctctccttgcttctatgctaccaccagtggaagcagcattacttgactgggccattaatctgatggccgatgttgtagagcaagaaaactacaacaagatgaacgcccggaacatcgcgatggtttttgcgcccaatatgactcagatggccgatccgttaactgctctgatacatgcggttcaggtgatgaatttcctcaagaccttaatcttgaagactctaaaggaacgaaacaaaaaggatgcggcacttcaggcattgcaaccatgctccagctctccaaatgaccaagacgaacatcaggtgtccgagcattcg

SEQ ID NO: 8184 - DNA, 562 bp, Zea mays
  unsure (1)..(562): unsure at all n locations; Clone ID: LIB3061-087-Q1-K6-B5
ccaactagcaacatagnaaagcacaatagtgtaccaacaatggcagccaaaatttttgcctccttatgctccttggtatttctgcaagtgctgctacggcgaccattttcccgcaatgctcacaagctcctatagcttcccttcttcccccgtacctctcaccagcggtgtcttcggtatgtgaaaacccaattcttcaaccctacaggatccaacaggcaatcgcagctggcatcttacctttatcacccttgttcctccaacaatcatcagccctattacagcagttacctttggtgcatttattggcacaaaacatcagggcacaacaactacaacaacttgtgctagcaaaccttgctgcctactctcagcaacagcagtttcttccattcaaccaactagctgcattgaactctgcttcttatttgcaacaacaacaactaccattcagccagctacctgttgcctacccccaacaatttcttccattcaaccaactggcagcattgaactctcctgcttatttacagcagcaacaactactaccattcagccagct

SEQ ID NO: 8185 - DNA, 572 bp, Zea mays
  Clone ID: LIB3061-087-Q1-K6-B7
atggtattcagctcatggacatatcatcgcagattttattcaacagagtcatggcccagttagggctgtgtgctttcagggctggtttgataaatgaagcccatggttgcttgactgagctctattctactgggagggtgaaagaattgcttgcacaaggtgtgcaacaaagccgataccatgaaaaaactcccgaacaggaaagacttgagaggagaaggcaaatgccttaccatatgcatataaacctggagcttttggaagccacacacttgatctgtgcgatgctgattgaagtccccaatatggctgccagcacctatgacaagcgaagacctatgagcaaaacattccgaaggcttcttgaagtgagtgaaaggcagacatttgttgggccgcccgagaatgtgagggaccatgtaatggctgccacaagagccctcaacaagggtgatcaccaaaaggctttcagtgtcataaattcgttggagatttggaagcttttgaggaacagagagcatgttcttgagatgttggagcttaagatcaaggaggaagctcttagaacctat

SEQ ID NO: 8186 - DNA, 567 bp, Zea mays
  unsure (1)..(567): unsure at all n locations; Clone ID: LIB3061-087-Q1-K6-B9
tattgaaaccaactagtcaacatagnaaagcacaatattgtaccaataatggcagccaaaatttttgcctcattatgctccttggtctttctgcaagtgctgctacggcgagcattttcccgcaatgctcacaagctcctatagcttcccttcttcccccatacctctcaccagcgatgtcttcagtatgtgaaaatccaattcttctaccctacaggatccaacaggcaatcgcagcaggcatcttacctttatcacccttgttcctccaacaatcatcagccctattacagcagttacctttggtgcatttattggcacaaaacatcagggcacaacaactacaacaactcgtgctagcaaaccttgctgcctactctcagcaacagcagttacctttggtgcatttgttggcacaaaacatcagggcacaacaactacaacaactcgtgctagcaaaccttgctgcctactctcagcaacaacagtttctgccattcaaccaactagctgcattgaactctgctgcttatttgcagcaacaacaactactaccattcagccagc

SEQ ID NO: 8187 - DNA, 559 bp, Zea mays
  Clone ID: LIB3061-087-Q1-K6-C1
ccagtggcccatatccctggtgctttgttctttgatgttgatggaatatccgacagaacatctagtttaccacacatgctgccatctgaaaggcattttcagctgctgtatctgctcttggcatctacaacaaagacgggatagtagtttatgatggaaaggggctgttcagtgctgctcgtgtttggtggatgttccgtgtatttggacatgataaagtttgggtgttggatggaggtttgccccaatggcgcgcttctgggtatgatgttgaatcaagtgcctctagtgatgccatcctaaaggccagtgcagctggtgaagcaattgagaaagtttaccagggtcaattggttggtccaaccacatttgaagcaaagttgcagcctcatcttctttggagtcttgatcaggtgaaagagaacatcaacacccagacacatcaacttatagatgctcgatcaaaacctagatttgatggtgcagttcccgagccacgaaaggggattagaagtgggcatgtgcctgggagcaaatgtgttccgtttcctcaggttct

SEQ ID NO: 8188 - DNA, 573 bp, Zea mays
  Clone ID: LIB3061-087-Q1-K6-C10
tccgcaaaaaacaccaagcgaagcgcactagcaacgacctaacaccaatggctaccaagatattagccctccttgcgcttcttgcccttttagtgagcgcaacaaatgcgttcattattccacagtgctcacttgctcctagtgccagtattccacagttcctcccaccagttacttcaatgggcttcgaacatccagccgtgcaagcctacaggctacaactagcgcttgcggcgagcgccttacaacaaccaattgcccaattgcaacaacaatccttggcacatctaaccctacaaaccattgcaacgcaacaacaacaacaacagtttctgccatcactgagccacctagccgtggtgaaccctgtcacctacttgcaacagcagctgcttgcatccaacccacttgctctggcgaacgtagctgcataccagcaacaacaacagctgcaacagtttatgccagtgctcagtcaactagccatggtgaaccctgccgtctacctacaactactttcatctagcccgctcgcggtgggcaatgcacctacgtacctacaacaacagttgc

SEQ ID NO: 8189 - DNA, 572 bp, Zea mays
  Clone ID: LIB3061-087-Q1-K6-C11
acacaccaagcgaagcgcactagcaacgacctaacaacaatggctaccaagatttagccctccttgcgcttcttgccctttttgtgagcgcaacaaatgcgttcattattccacaatgctcacttgctcctagtgccattattccacagttcctcccaccagttacttcaatgggcttcgaacacctagctgtgcaagccaacatgcaacaacaagcgcttgcggcgagcgtcttacaacaaccaattgcccaattgcaacaacaatccttgccacatctaacaatacaagccatcacaacgcaacagcaacaacagttcctaccagcactgagccacctagccatggtgaaccctgccgcctacttgcaagagcagctgcttgcatccaacccacttgctctggcgaacgtagttgcaaaccagcaacaacaacagctacaacagtttctgccaacgctcagtcaactagccatggtgaaccctgccgcctacgtacaacaacaacaactgctttcatctagcccgctcgctgtgggcaatgcacctacatacctgcaacaacaattgttg

SEQ ID NO: 8190 - DNA, 114 bp, Zea mays
  Clone ID: LIB3061-087-Q1-K6-C12
gctcgcagctcctatagcttcccttcttcccccgtacctctcaccagcggtgtcttcggtatgtgaaaacccattcttcaaccctacagatccaacaggcaatcgcagctggca

SEQ ID NO: 8191 - DNA, 569 bp, Zea mays
  unsure (1)..(569): unsure at all n locations; Clone ID: LIB3061-087-Q1-K6-C2
gcacaatagtgtaccaacaatggcagccaaaatattttgcttccttatgctccttggtctttctgcaagtgttgctaccganaccattttcccacaatgctcacaagctcctatagcttcccttcttcccccatacctctcaccagcggtgtcttcaatgtgtgaaaccccaattgttcaaccctacaggatccaacaggcaatcgcaacaggcatcttaccattatcacccttgttcctccaacaaccgtcagccctattacagcagttacctttggtccatttggtggcacaaaacatcagggcacaacaactacaacaacttgtgctagcaaaccttgctgcatactctcagcaacatcagtttcttccattcaaccaactggctgcattgaactctgctgcttatttgcaacaacaattaccattcagccagctagttgctgcctacccccagcaatttcttccattcaaccaactagcagcattgaactctgctgcttatttacagcagcaacaactactaccattcagccagctagctgatgtgagccctgctgccttcttga

SEQ ID NO: 8192 - DNA, 556 bp, Zea mays
  unsure (1)..(556): unsure at all n locations; Clone ID: LIB3061-087-Q1-K6-C3
gccttcaaggntgcaatctactttcttcagccactgaaagaaatgtcataatgcttctatctgacatgtctgggagatgcccactttacaggaaggcatacatcttcttcagctcaccgattcctaaagacttggttacttacataaagaatgacagtagtgtaataccacgcatcggtgcactaagagagatgaatttggaattcttcactattgacatgcagggctttgtaactgaccatgatactgccctgattgatttatacggtccaagtgaacaaaattccaaaaagttcaacgatactataagcacaatggctactcgcattgcgactacatttgcatcattgaaggaatttccatgtgtgcggtatcgggcgccaaaaggagatgcttccacaacaactaaattcgatatggttccaaagtggcttgctactgctgtttgggaaattgtgtcaaaatataaatcaactattcctgaatttccccagaaggagacatgtgaactgctaattgtcgacaggcccatagatcagatagcacctgttattca

SEQ ID NO: 8193 - DNA, 500 bp, Zea mays
  unsure (1)..(500): unsure at all n locations; Clone ID: LIB3061-087-Q1-K6-C5
caggcgtgcatgggatggtacatgtacgagcatctcactattatcacttggatgggnagcaaggaaggcagtgcgtgaactccccttacctggctgaagattttttagaggggctgcgtggtcctgttttggttgtggccagtggtgattttgctgttggtcacctcaatgagtttgcgggccagaagcttgtctcggccaccaggagggtttcacgcttgttgagcaccgcgttgagcaacaacaggaaggaggagctcacggcagaagtttgaggttctcttgcaagatcatcaaggaggttctggtcgacaaggctgacaaggctgtggtgtctgaccgtgttgttgactcaccgtgcttccttgtcactggcgagtttggctggacagccaacatggcttaggatcatgaaggcgcccgccctgagggactctggcatgtcggggttcatttccgcgcaaaaagactatggaaattaacccggcataacccaatca

SEQ ID NO: 8194 - DNA, 518 bp, Zea mays
  unsure (1)..(518): unsure at all n locations; Clone ID: LIB3061-087-Q1-K6-C6
ccgggggggggggggctgtggacaacttgcttgggtggcacggcttgcccctaccaccctacagcatcatgcttgttgaggctcctgtccgtgggtgcttatgatgtgcgcgtgcgcatgaaagctgtgtggattttcggtggcgccgtgcacttttttgtggggaggcgcatcgcgccctttgtggtgtaggagccgatggtgatcgggcacgagtgcgcgggcgtggtcgaggaggtgggcgccggcgtgacgcacctgtccgtgggcgaccgcgtggcgctggagccgggcgtcagctgctggcgctgccgccactgcaagggcgggcggtacaacctgtgcgaggacatgaagttcttctccaccccggcggtgcacggttcgctggcgaaccaggtggtgcacccggccgacctgtgcttnaagcttcccgacggggtgagcctggaggagggcgccttgtgcgagccgttgttcgtgggtgtgcacgcgtgccgccctgcgggggtggggcc

SEQ ID NO: 8195 - DNA, 547 bp, Zea mays
  unsure (1)..(547): unsure at all n locations; Clone ID: LIB3061-087-Q1-K6-C7
cgaaaaactattctcatttcaaacaagggnanacaaggtacccatctctgagcttgaggggaagtatgttggtctttgctttgtggtggatggctttccaccactcgctgaattcactgaggtgcttgctaagatctatgagaaactcaaagaagtgggagagaaatttgaagttgtagctgtatccttggacagtgaagagtcatcatttaatgagagttttgcaaagatgccttggcttgcaattcctcaaggtgacattaagtgtcagacgctggttcgttactttgagcttagttctcttccaacactagttctgattggccctgatgggaagacactgaacaacaatgtcgccgacataattgacgaccatggttttgaggcatgggagggcttccccttcagtgctgagaagctggaaattcttgctgagaaggcaaagattaaagctgcatcacangaccttggagtccattctaatcagtggtcatttagactttgtcattggaaaagatggtgcaaaggttcctgtatcagaacttgt

SEQ ID NO: 8196 - DNA, 551 bp, Zea mays
  Clone ID: LIB3061-087-Q1-K6-C8
cccataccttccatcaattattagcttcagtatgtgaaaacccagctcttcaaccatataggcttcaacaagcaatcgcagcaagcaacatacctttatcgcccttgttgtttcgacaatcaccagccctatctttggtgcagtcattggtacaaaccatcagggcacaacagctgcagcaactcgtgctacctgtgatcaaccaagtagctctggcaaacctttctccctactctcagcaacaacaatttcttccattcaaccaactgtctacactgaaccctgctgcttatttgcagcaacaactattaccatttagccagctagctactgcctactctcagcaacaacaacttcttccatttaaccaattggccgcactgaaccccgctgcttatttgcagcagcaaatactactgccatttagcgagctagctgcagcaagtcgtgcttccttcttgacacagcaacagttgctgcctttctacaagcagtttgcggctaaccccgcaaccctcttacaactacaacaattgttgcattttgtccaa

SEQ ID NO: 8197 - DNA, 262 bp, Zea mays
  Clone ID: LIB3061-087-Q1-K6-C9
ttctcagtgctgtcgcgacatttccatgtaagttttattcttttcccgtcttacaggggttgttgtgaaaccaatttaactcggaccacacgctgactgatttccttatacctgtctcacatatatctttcagcattcctgggcattttgccaaaaataggccacactcaaactgtgctacaaactgtgctattagacaaagtcttcttcaccaatactaatgactctgttttttgcacaacacactaccattaccgctcct

SEQ ID NO: 8198 - DNA, 523 bp, Zea mays
  unsure (1)..(523): unsure at all n locations; Clone ID: LIB3061-087-Q1-K6-D10
ccaaanaatcgcagcacaacaactacaacaacagttgcttccaacaatcaatcaagtagttgcagcgaaccttgctgcttacctccagcaacaacaatttcttccattcaatcaactagctggggtgaaccctgctgcttacttgcaggcacaacagctactaccattcaaccaacttgtcaggagccctgctgccttcttactgcagcaacagttgcttccattccatctacaagttgtggcaaacattgctgctttcttgcaacaacaacaacaattgctgccattttacccacaggttgtgggaaacattaacgccttcttgcaacagcaacagttgctaccattctacccacaggatgtggcaaacaatgtcgccttcttacaacaacaacaattgctgccatttaaccaacttgctttgacgaatcctaccaccttattgcagcagcccaccattggtggtgccatcttctagatttttttatgctttatactgtaataataaagttctcatactgat

SEQ ID NO: 8199 - DNA, 559 bp, Zea mays
  unsure (1)..(559): unsure at all n locations; Clone ID: LIB3061-087-Q1-K6-D11
atcagnaaacacacctagcgaacgcactagcaacgacctaacaacaatggctaccaagatattatccctctttgcgcttcttgccctttttgtgagcgcaacaaatgcgttcattattccacaatgctcacttgctcctagtgccattattccacagttcctccctccagttacttcaatgggcttcgaacacccagctgtgcaagcctacaggctacaacaagcgcttgcggcgagcgtcttacaacaaccaattgcccaattacaacaacaatccttggcacatctaaccatacaaaccatcgcaacgcaacagcaacaacaatttctaccagcactgagccaactagctgtggtgaaccctgtcgcctacttgcaacagcagttgcttgcatccaacccacttgctctggcaaacatagttgcataccaacaacaacaacaattgcaacagtttctaccagcgctcagtcaactagccatggtgaaccctgccgcctacctacaacagcaacaactgatttcatctagccctctcgctgtggttaatgcacctaca

SEQ ID NO: 8200 - DNA, 565 bp, Zea mays
  unsure (1)..(565): unsure at all n locations; Clone ID: LIB3061-087-Q1-K6-D2
gcaacatagnaaagcacaatagtgtaccaacaatggcagccaaaatattttgcctccttatgctccttggtctttctgcaagtgctgctacggcgaccattttcccacaatgctcacaagctcctatagcttcccttcttcccccgtacctctcaccagcggtgtcttcggtatgtgaaaacccaattcttcaaccctataggatccaacaggcaatcgcagctggcatcttacctttatcacccttgttcctccaacaatcatcagccctattacagcagttacctttggtgcatttattggcacaaaacatcagggcacaacaactacaacaacttgtgctagcaaaccttgctgcctactctcagcaacaacagtttcttccattcaaccaactagctgcattgaactctgcttcttatttgcaacaacaacaactaccattcagccagctatctgctgcctacccccagcaatttcttccattcaaccaactgacagctttgaactctcctgcttatttacagcagcaacaactactaccattcagccagctagctggtgt

SEQ ID NO: 8201 - DNA, 512 bp, Zea mays
  Clone ID: LIB3061-087-Q1-K6-D5
gcgaccaagattttgccccttcttatgctcctcgctctttctacatgcgttgctaacgcgactatcttccctcattgctcacatgctcccatctgcttgccttcttcccccgtaccttccatacattatcgccaccgtctgccaaaaccccggtttgcagccgtgtgcgcctgctgcaatgcttggcacacacagcaacatgccgccgatcgtaccttgctcgctttaacattaacctggcccatttttgcagctgccactaggtgcagaccttcaacccactagctttgacaaaccctacagctacctgccaacaaccaattatctgtggcgccctcttctaccttcgtctcatgagcaacagttcattccataaaaccaactgattacactggacgctgctgattatttgcaaaaacatctattaccttcttaccagaatagactactggctactctcatctacagcatccaagtttcatttacaccaatcttgccgacactgaaacctc

SEQ ID NO: 8202 - DNA, 278 bp, Zea mays
  Clone ID: LIB3061-087-Q1-K6-D6
cattatctaactccaaaaccatgaagctggtgcttgtggttcttgctttcattgctttagtatcaagtgtttcttgtacacagacaggcggctgcagctgtggtcaacaacaaagccatgagcagcaacatcatccacaacaacatcatccacaaaaacaacaacatcaaccaccaccacaacatcaccagcagcagcaacaccaacaacaacaagttcacatgccaccacaaaaacatcagcaacaacaagaagttcatgttcaacaacaacacaac

SEQ ID NO: 8203 - DNA, 548 bp, Zea mays
  unsure (1)..(548): unsure at all n locations; Clone ID: LIB3061-087-Q1-K6-D7
gnccaactagcaacatagnaaagcacaatagtgtaccaacaatggcagccaaaatttttgcctccttatgctccttggtctttctgcaagtgctgctacggcgaccattttcccacaatgctcacaagctcctatagcttcccttcttcccccgtacctctcaccagcggtgtcttcggtatgtgaaaacccaattcttcaaccctataggatccaacaggcaatcgcagctggcatcttacctttatcacccttgttcctccaacaatcatcagccctattacagcagttacctttggtgcatttattggcacaaaacatcagggcacaacaactacaacaacttgtgctagcaaaccttgctgcctactctcagcaacaacagtttcttccattcaaccaactagctgcattgaactctgcttcttatttgcaacaacaacaactaccattcagccagctatctgctgcctacccccagcaatttcttccattcaaccaactgacagctttgaactctcctgcttatttacagcagcaacaactac

SEQ ID NO: 8204 - DNA, 576 bp, Zea mays
  unsure (1)..(576): unsure at all n locations; Clone ID: LIB3061-087-Q1-K6-D8
gcaactagcaacatagnaaagcacaatagtgtaccaacaatggcagccaaaatattttgcttccttatgctccttggtctttctgcaagtgctgctaccgcaaccattttcccacaatgctcacaagctcctatagcttcctttcttcccccatacctctcaccagcggtgtcttcagtatgtgaaaacccaattcttcaaccctacaggatccaacaggcaatcgcagcaggcatcttacctttatcacccttgttcctccaacaaccgtcagccctattacagcagttacctttggtgcatttgttggcacaaaacatcaaggcacaacaactacaacaacttgtgctaggaaaccttgctgcctactctcagcaacagcagtttcttccattcaaccaactggctgcattgaactctgctgcttatttgcaacaacaactaccattcagtcagctagctgctgcctacccccagcaatttcttccattcaaccaactggcagcattgaactctgctgcttatttacaacagcaacagctaccaccattcagccagctagctgatgtgagccct

SEQ ID NO: 8205 - DNA, 562 bp, Zea mays
  Clone ID: LIB3061-087-Q1-K6-D9
acaatagtgtaccaacaatggcagccaaaatttttgcttccttatgctccttggtctttctgcaagtgttgctaccgcaaccattttcccacaatgctcacaagctcctatagcttcccttcttcccccatacctctcaccagcggtgtcttcaatgtgtgaaaccccaattgttcaaccctacaggatccaacaggcaatcgcaacaggcatcttaccattatcacccttgttcctccaacaaccgtcagccctattacagcagttacctttggtccatttggtggcacaaaacatcagggcacaacaactacaacaacttgtgctagcaaaccttgctgcatactctcagcaacatcagtttcttccattcaaccaactggctgcattgaactctgctgcttatttgcaacaacaattaccattcagccagctagttgctgcctacccccagcaatttcttccattcaaccaactagcagcattgaactctgctgcttatttacagcagcaacaactactaccattcagccagctagctgatgtgagccctgctgccttc

SEQ ID NO: 8206 - DNA, 552 bp, Zea mays
  unsure (1)..(552): unsure at all n locations; Clone ID: LIB3061-087-Q1-K6-E1
caactagcaacatagnaaagcacaatagtgtaccaacaatggcagccaaaaattttgcctccttatgctccttggtctttctgcaagtgctgctacggcgaccattttcccgcaatgctcgcaagctcctatagcttcccttcttcccccgtacctctcaccagcggtgtcttcggtatgtgaaaacccaattcttcaaccctacaggatccaacaggcaatcgcagctggcatcttacctttatcacccttgttcctccaacaatcatcagccctattacaacagttacctttggtgcatttattggcacaaaacatcagggcacaacaactacaacaacttgtgctagcaaaccttgctgcctactctcagcaacagcagtttcttccattcaaccaactaggttcattgaactctgcttcttatttgcaacaacaacaactaccattcagccagctacctgctgcctacccccagcaatttcttccattcaaccaactagcagcattgaactctcctgcttatttacagcagcaacaactactaccatt

SEQ ID NO: 8207 - DNA, 570 bp, Zea mays
  Clone ID: LIB3061-087-Q1-K6-E10
cgcccgtccccgatctccgatcccctcgtcgatccaaagagcagatcttcgtcaagacccctcactggaaagactatcaccctcgaggtggagtcttctgacaccattgacaacgtcaaggccaagatccaggacaaggagggcatccccccggaccagcagcggctcatctttgctggcaagcagctcgaggacgggcgcacacttgccgactacaacatccagaaggagagcaccctccaccttgttctccgcctcaggggaggcatgcagatcttcgtcaagaccctcactggaaagactatcaccctcgaggtggagtcttctgacaccatcgacaacgtcaaggccaagatccaggacaaggagggcatccctccagaccagcagcggctcatttttgccggcaagcagctcgaggacgggcgcacgctggccgactacaacattcagaaggagagcaccctccacttggtgctgcgtctcaggggcggcatgcagatcttcgtgaagactctgaccggcaagactatcacccttgaggtcgagtcttctgataccattgataat

SEQ ID NO: 8208 - DNA, 568 bp, Zea mays
  unsure (1)..(568): unsure at all n locations; Clone ID: LIB3061-087-Q1-K6-E11
atgagacgcagcacatanaaagtgaatccattagcaacaatagagcaacaatggcgaccaagatattttccctccttatgctccttgctctttctacatgtgttgctaacgcgacaattttccctcaatgctcacaagctcctatagcttcccttcttcccccataccttccatcaattatagcttcagtatgtgaaaacccagctcttcaaccatataggcttcaacaagcaatcgcagcaagcaacatacctttatcgcccttgttgtttcaacaatcaccagccctatctttggtgcagtcattggtacaaaccatcagggcacaacagctgcagcaactcgtgctacctgtgatcaaccaagtagctctggcaaacctttctccctactctcagcaacaacaatttcttccattcaaccaactgtctacactgaaccctgctgcttatttgcagcaacaactattaccatttagccagctagctactgcctactctcagcaacaacaacttcttccatttaaccaattggccgcactgaaccccgctgcttatttgcagcagca

SEQ ID NO: 8209 - DNA, 541 bp, Zea mays
  unsure (1)..(541): unsure at all n locations; Clone ID: LIB3061-087-Q1-K6-E12
ggttgacccagcgttttgttcaggngcgttcacatttaggctgtggtgcgggcgntgtgaacctcaacaccttggtgaacatgttcagtgggcttggtgctggtggtggtctatgtgttgcaagtgctcctaatgtgccaccagaagaactgtgtgcatcacatttagttcagtttcaagaatgggtttttttgtctgcacaggagaacatccgtgccttggccgccactgctggaaatgttcatgctggagtggagcgacttcttggaaacatgggccaatagaatatgatgacgaacataactgtgttctgatccatgcgatctgtggttggcattgtgagattatgtntggttgattggttttagacctgtgattgagaggcgggttttatattctgtgtttaagggttaataacgagtgtaccggtggaaccttacatataaatgtgggctggtgtcatgggtaaaattgttgttgttggtacattgacttgctgtgcatatggatcttttgctatcttatttgcattcgacatgga

SEQ ID NO: 8210 - DNA, 540 bp, Zea mays
  Clone ID: LIB3061-087-Q1-K6-E3
agctaagcccgtgccagcagttcggatcctgcggcgtcggcagcgtcggcagcccgttcctgggccagtgcgtcgagttcctgaggcaccagtgcagcccggcggcgacgccctacggctcgccacagtgccaggcgctgcagcagcagtgctgccaccagatcaggcaggtggagccgctgcaccggtaccaggcgacatacggtgtggtcctgcagtccttcctgcagcagcagccgcagggcgagctcgcggcgctgatggcggcccaggtagcgcagcagctgacggcgatgtgcggcctgcagctgcagcagccaggtccctgcccttgcaacgcagctgccggcggtgtctactactgaggaaactatgtactgtagtaataatgtaatggagccgctgactagctacctagctcgctagtttactcatttagcggcgatgagtaacgtagtgtcacccatcaccatgggtggcagtgtgagcaatgacctgaatgaaccattgaaatggaaaggaataatatataaggaaaaa

SEQ ID NO: 8211 - DNA, 228 bp, Zea mays
  unsure (1)..(228): unsure at all n locations; Clone ID: LIB3061-087-Q1-K6-E4
tgccattctacccacagnagtggcaaacttgtcgccttcttacaacaacagcaattgctgccatttagccaactcgctttgacgaatcctaccaccttattgcatcagcccaccattggtggtaccatcttctagattttttatgctttatactgtaataataaatttctcatactgatatgtgcaacttctcagtaataaaagattagagatctatattttaagttc

SEQ ID NO: 8212 - DNA, 523 bp, Zea mays
  unsure (1)..(523): unsure at all n locations; Clone ID: LIB3061-087-Q1-K6-E6
naccccgcaaccctcttacaactacaacaattgttgccctttgtccaacttgctttgacaaacccagcagcctcctaccaacaacacatcattggtggtgccctcttttagattgcttattagttgtaattcaataataaagttttttggatgatgtatgtggccaaccagaaataagaagttacatttccagattctaatgtgatattggtctccaagggtgttcgataaaaaaaaaaaaaaaaaaaaaaaaaaaaaaaaaaaaaaaaaaaaaaaaaaaaaaaaaaaaaaaaaaaaaaaaaaaaaaaaaaaaaaaaaaaaaaaaaaaaaaaaaaaaaaaaaaaaaaaaaaaaaaaaaaaaaaaaaaaaaaaaaaaaaaaaaaaaaaaaaaaaaaaaaaaaaaaaaaaaaannngggggccccnnnaaaaaaaaaaaaaaaaaaaannannnnnnaaaagaagaaaaaaaaattttttttttggtggnacaaaaaaaaaaaaaaaatgggcgggtttttaaaa

SEQ ID NO: 8213 - DNA, 556 bp, Zea mays
  Clone ID: LIB3061-087-Q1-K6-E8
cccgcgtccggttggcttctcctccccctccggttcgggttcgggttcgtgaggttctccggggttcggtttcgtgggtgagcggatcgagatggcggcgtcggatgttgagtaccgctgcttcgtcggcggcctcgcctgggccacggacgaccactccctccacaacgccttcagcacctacggcgaggtcctcgagtccaagatcatcctcgatcgggagacgcagaggtcccgcggcttcggcttcgtcaccttctccacggaggaggcgatgcggaacgccatcgagggcatgaacggcaaggagctggacggccgcaacatcaccgtcaacgaggcccagtcccgcggcggccgtggaggcggcggcggcggcgggtacggtggtggccgtggaggcggcggctacggcggtggcgggcgccgtgatggcggcggcggctacggcggtggcggcggctacggtggtggcggcggcggctaccgtggtggtggcggcggctacggcggtggcaaccgtggcggcggctacggcaactccgacgggaactgg

SEQ ID NO: 8214 - DNA, 546 bp, Zea mays
  Clone ID: LIB3061-087-Q1-K6-E9
gtcgacccagcgtccgttgctagcgccgtgtccgtacatgcggcgggtggggctgccagacaccaccggctcatgctaccgcctgcggtctgatatgccggctccgttctatctgccgccgcagcaacagtcgtaggcatggcaataccccactcaaccaccgtatttttgcccgtgccagcaggtcggatcctggggggggggcagtgttagcagcccgttcctgggccagtgcgttgagttactgaggcaccagtgcagcccggcggcgacgccctacggttcgccacagtgccaggcgctgcagcagcagtgctgtcaccagatcaggcaggtggagccgttgcaccggtaccaggcgacatacggtgtggttctgcaatccttcctgcagcatcagccgcagggcgagcttgaagcgctggatggctgaccatggcgcgcaacatgtgacggctgatgtgcggtctgcagctgcaggatgcaggtctctgccacttgcaacgtatctggcggcggtgtctactactgaggaaactatgttct

SEQ ID NO: 8215 - DNA, 163 bp, Zea mays
  unsure (1)..(163): unsure at all n locations; Clone ID: LIB3061-087-Q1-K6-F1
gcgctagcggcggccgtacaccaatggctaccaggatattagccctccttgcgcttcttgcccttttagtgggcgctncgngtgcgttgcttgttccacagtgctcacttgctccttgtgcctgttttctccngttgctgcctcctgttgcttgtgtggggtt

SEQ ID NO: 8216 - DNA, 569 bp, Zea mays
  unsure (1)..(569): unsure at all n locations; Clone ID: LIB3061-087-Q1-K6-F10
nannaccaactagcaacatagnaaagcacaatagtgtaccaacaatggcagccaaaatttttgcttccttatgctccttggtctttctgcaagtgctgctaccgcaaccattttcccacaatgctcacaagctcctatagcttcctttcttcccccatacctctcaccagcggtgtcttcagtatgtgaaaacccaattcttcaaccctacaggatccaacaggcaatcgcagcaggcatcttacctttatcacccttgttcctccaacaaccgtcagccctattacagcagttacctttggtgcatttgttggcacaaaacatcaaggcacaacaactacaacaacttgtgctaggaaaccttgctgcctactctcagcaacagcagtttcttccattcaaccaactggctgcattgaactctgctgcttatttgcaacaacaactaccattcagtcagctagctgctgcctacccccagcaatttcttccattcaaccaactggcagcattgaactctgctgcttatttacaacagcaacagctaccaccattcagccagctagctg

SEQ ID NO: 8217 - DNA, 543 bp, Zea mays
  Clone ID: LIB3061-087-Q1-K6-F11
acctccgcacagactgcttgctccaaccattgctctggcgaacgtagctgcataccagcaacaacaacagctgcaacagtttatgccagtgctcagtcaactagccatggtgaaccctgccgtctacctacaactactttcatctagcccgctcgcggtgggcaatgcacctacgtacctacaacaacagttgctgcaacaaattgtaccagctctgactcagctagctgtggcaaaccctgctgcctacttacaacagttgcttccattcaaccaactggctgtgtcaaactctgctgcgtacctacaacagcgacaacagttacttaatccattggcagtggctaacccattggtcgctaccttcctgcagcagcaacaacaattgctgccatacaaccagttctctttgatgaaccctgccttgcagcaacccatcgttggaggtgccatcttttagattacatatgagatgtactcgacaatggtgccctcataccgacatgtgtttcctagaaataatcaatatattgattgagattt

SEQ ID NO: 8218 - DNA, 560 bp, Zea mays
  unsure (1)..(560): unsure at all n locations; Clone ID: LIB3061-087-Q1-K6-F12
atccagnatcagcaagcggcagtgcgtagagaggatcgtcgaacagaacagcatgaagatggtcatcgttctcgtcgtgtgcctggctctgtcagctgccagcgcctctgcaatgcagatgccctgcccctgcgcggggctgcagggcttgtacggcgctggcgccggcctgacgacgatgatgggcgccggcgggctgtacccctacgcggagtacctgaggcagccgcagtgcagcccgctggcggcggcgccctactacgccgggtgtgggcagccgagcgccatgttccagccgctccggcaacagtgctgccagcagcagatgaggatgatggacgtgcagtccgtcgcgcagcagctgcagatgatgatgcagcttgagcgtgccgctgccgccagcagcagcctgtacgagccagctctgatgcagcagcagcagcagctgctggcagcccagggtctcaaccccatggccatgatgatggcgcagaacatgccggccatgggtggactctaccagtaccagctgcccagctaccgcaccaacccctgtggcg

SEQ ID NO: 8219 - DNA, 574 bp, Zea mays
  Clone ID: LIB3061-087-Q1-K6-F2
cccacgccgtccgcttagcaacatagtaagcacaatagtgtaccaacaatggcagctaaaatattttgcctccttatgctccttggtctttctgcaagtgctgctacggcgaccattttcccacaatgctcacaagctcctatagcttcccttcttcccccgtacctctcaccaacggtgtcttcggtatgtgaaaacccaattcttcaaccctacaggatccaacaggcaatcgcagctggcatcttacctttatcacccttgttcctccaacaatcatcagccctattacagcagttacctttggtgcatttattggcacaaaacatcagggcacaacaactacaacaacttgtgctagcaaaccttgctgcctactctcagcaacagcagtttcttccattcaaccaactagctgcattgaactctgcttcttatttgcaacaacaacaactaccattcagccagctatctgctgcctacccccagcaatttcttccattcaaccaactgacagcattgaactctcctgcttatttacagcagcaacaactactaccattcagccagctag

SEQ ID NO: 8220 - DNA, 554 bp, Zea mays
  unsure (1)..(554): unsure at all n locations; Clone ID: LIB3061-087-Q1-K6-F3
ccccgcgtccgctccggtgcatctcccaccgccggtccacctgccgccgccggtccacctgccaccgccggtccatgtgccgccgccggttcatctgccgccgccaccatgccactaccctactcaaccgccccggcctcagcctcatccccagccacacccatgcccgtgccaacagccgcatccaagcccgtgccagctgcagggaacctgcggcgttggcagcaccccgatcctgggccagtgcgtcgagttcctgaggcatcagtgcagcccgacggcgacgccctactgctcgcctcagtgccagtcgttgcggcagcagtgttgccagcagctcaggcaggtggagccgcagcaccggtaccaggcgatcttcggcttggtcctccagtccatcctgcagcagcagccgcaaagcggccaggtcgcgggggctgttggcggcgcagatagcgcagcaactgacggcgatgtgcggcctgcagcagccgactccatgcccctacgctgctgccgggcggtgtcccccactgaagaaactatngtgctgt

SEQ ID NO: 8221 - DNA, 327 bp, Zea mays
  unsure (1)..(327): unsure at all n locations; Clone ID: LIB3061-087-Q1-K6-F4
gtgngaaacagtagcaacaatagagcaacaatggcggccaagatattttccatccttatgctccttgctctttctgcatgtgttgctaacgcgaccatttttcctcaatactcacaagctcctatagctgcccttcttcccccataccttccatcaatgaccgcttcagtttgtgaaaacccagcccttcaaccctacaggctccaacaagcaatcgcaacaagcaacttacctttatcacccctgttctttcaacaatcgccagccctatctttggtgcagtcattggtacaaaccatcagggcacaacagctgcaacaactcgtg

SEQ ID NO: 8222 - DNA, 359 bp, Zea mays
  Clone ID: LIB3061-087-Q1-K6-F6
gcaacagttgcttccattccatctacaagttgtggcaaacattgctgctttcttgcaacaacaacaacaattgctgccattttacccacaggttgtgggaaacattaacgccttcttgcaacagcaacagttgctaccattctacccacaggatgtggcaaacaatgtcgccttcttacaacaacaacaattgctgccatttaaccaacttgctttgacgaatcctaccaccttattgcagcagcccaccattggtggtgccatcttctagatttttttatgctttatactgtaataataaagttctcatactgatatgtgcaacttctcagtaataaaagattagagatctatatttt

SEQ ID NO: 8223 - DNA, 567 bp, Zea mays
  unsure (1)..(567): unsure at all n locations; Clone ID: LIB3061-087-Q1-K6-F7
gtcagcctagcaattagctcatcgactccagatggagaactcgacaccatgaaggtgctgatcgttgcccttgctctcctggcgctcgctgcgagcgccgcctccagtacaagcggcggctgtggctgccagacaccaccgtttcatctaccgcctccgttctatatgccgcctccgttctatctgccgccgcagcagcagccgcagccatggcaataccccactcaaccaccgcagctaagcccgtgccagcagttcggatcctgcggcgtcggcagcgtcggcagcccgttcctgggccagtgcgtcgagttcctgaggcaccagtgcagcccggcggcgacgccctacggctcgccacagtgccaggcgctgcagcagcagtgctgccaccagatcaggcaggtggagccgctgcaccggtaccaggcgacatacggtngtggtcctgcagtccttcctgcagcagcagccgcagggcgagctcgcggcgctgatggcggcccaggtagcgcagcagctgacggcgatgtgcggcctgcagctgcagcagccaggtccctgccc

SEQ ID NO: 8224 - DNA, 586 bp, Zea mays
  unsure (1)..(586): unsure at all n locations; Clone ID: LIB3061-087-Q1-K6-F8
ccgggcactagcacatanaaacacaatatgtaccaacaatggcagccaaaaattttgcttccttatgctccttggtctttctgcaagtgctgctaccgcaaccattttcccacaatgctcacaagctcctatagcttcctttcttcccccatacctctcaccagcggtgtcttcagtatgtgaaaacccaattcttcaaccctacaggatccaacaggcaatcgcagcaggcatcttacctttatcacccttgttcctccaacaaccgtcagccctattacagcagttacctttggtgcatttgttggcacaaaacatcaaggcacaacaactacaacaacttgtgctaggaaaccttgctgcctactctcagcaacagcagtttcttccattcaaccaactggctgcattgaactctgctgcttatttgcaacaacaactaccattcagtcagctagctgctgcctacccccagcaatttcttccattcaaccaactggcagcattgaactctgctgcttatttacaacagcaacagctaccaccattcagccagctagctgatgtgagccctgttgccttcttg

SEQ ID NO: 8225 - DNA, 566 bp, Zea mays
  unsure (1)..(566): unsure at all n locations; Clone ID: LIB3061-087-Q1-K6-G1
aacatagnaaagtggnaatccagtagcaacaatagnagcaacaatggcgaccaagaactttccctccttatgctccttgctctttctgcatgtgttgctaacgcgacaattttccctcaatgctcacaagctcctatagcttcccttcttcccccataccttccatcaatgatagcttcagtatgtgaaaacccagctcttcaaccctataggctccaacaagcaatcgcagcaagcaacatacctttatcacccttgtttcaacaatcgccagccctatctttggtgcagtcattggtacaaaccatcaaggcacagcagctgcagcaactcgtgctacctgtgatcaaccaagtagctctggcaaacctttctccctactatcagcaacaacaatttcttccattcaaccaactatctacactgaaccctgctgcttatttgcagcaacaactattaccattcagccagctagctactgcctactctcatcaacaacaacttcttccatttaaccaattggccgcactgaacctcgctgcttatttgcagcagcaaatattact

SEQ ID NO: 8226 - DNA, 568 bp, Zea mays
  Clone ID: LIB3061-087-Q1-K6-G10
tccgcttcaatagcaccatcaggtggcatgccaatcaaacttacagaagcaccactaactgcttcgaagaagaaccctgttagtcgtccatcaaagcctgttggaccacctccaggatttaatcatgtaaccccaaagcgtcaagatgattctattccggttgaaaaactgcagaacccacaggtcgatgattacagctggctagatagctatcagcaatcgattgatcatgttcacagcttaagaactatttatcctggtgtcagtgatactagcactgcatttgccactccattctctttccctgggaggatacacacacaagggaccaatgaaaagacttggcaagatttccacctttttgagccttcaaaacagaacatgttccaaacttaccaccaaagaaatctgcaaagtggtcaaatggatgaacaagagccagcaaattctatctggtctagcagttaccatgtgtgatttggtaacttttaccaggatgattgctggagtttctggggacagactattggattaagtggcacgacctgatctattgagcttagcccat

SEQ ID NO: 8227 - DNA, 565 bp, Zea mays
  unsure (1)..(565): unsure at all n locations; Clone ID: LIB3061-087-Q1-K6-G11
gtcgacccagcgtccttggngccgtggctttttgcngactcagcactcaccgaccgcggntatggccccgtcgccatggcctctccttgcgacttccctcctcctcatcctattccaccactcgcctcgcgccgcggcggcgtttccgccgtctcttggcgacggcctcctgggcgccgcccgcgcgccgggtttcgcggcgtggctgcgcggcttgcggcgccgcatccacgagcgccccgagctcgccttccaggagcaccgcaccagcgagctcgtccgcgacgagctcgacgcgatcggggtgccgtacgcgtggcccgtcgcgcagacgggcgtcgtggcgaccatcgccggcggcagcgatggccccgtcgtcgcgctccgagccgactttttctctctacccttgcaggaattggtagactgggaacacaagagccaggagaatggaaagcatgcatgcttgtggacatgatgctcacacaacggagcttcttggggcagcttaattgcttcatgctcggaaggatgatctggaaggtaccgtgaagcttgtcttcca

SEQ ID NO: 8228 - DNA, 566 bp, Zea mays
  unsure (1)..(566): unsure at all n locations; Clone ID: LIB3061-087-Q1-K6-G12
gngaaccaacaagcaacatagnaaagtggatacagtagcaacaatagagcaacaatggcggccaagatattttccatccttatgctccttgctctttctgcatgtgttgctaacgcgaccatttttcctcaatactcacaagctcctatagctgcccttcttcccccataccttccatcaatgaccgcttcagtttgtgaaaacccagcccttcaaccctacaggctccaacaagcaatcgcaacaagcaacttacctttatcacccctgttctttcaacaatcgccagccctatctttggtgcagtcattggtacaaaccatcagggcacaacagctgcaacaactcgtgctaccagtgatcagccaagtagctctggcaaacctttctccctactctcagcaacaacaatttcttccattcaaccaactgtctacactgaaccctgctgcttatttacaacaacaacaactactaccattcagccagctagctactgcctactctcagcagcaacaatttcttccatttaaccaattggccgcactgaacccctctgcttattt

SEQ ID NO: 8229 - DNA, 218 bp, Zea mays
  unsure (1)..(218): unsure at all n locations; Clone ID: LIB3061-087-Q1-K6-G2
taaaacagnagatacaagnagttggagtgcttttgtgaaggcttttgcgaanacttgaagcgttagtacttttgtgaatgattttgtaaagtgtttgcaaatatgtgcaaaacataataacatgtgtaggttttgcgaatgattttgttgtgatgcttgttgatggtttatgtgatgtggatctatcattgtgcaatactaattaaatttgtatatct

SEQ ID NO: 8230 - DNA, 567 bp, Zea mays
  unsure (1)..(567): unsure at all n locations; Clone ID: LIB3061-087-Q1-K6-G3
nttgganaacaactagcaacatagnaaagcacaatagtgtaccaacaatggcagccaaaatattttgcttccttatgctccttggtctttctgcaagtgttgctaccgcaaccattttcccacaatgctcacaagctcctatagcttcccttcttcccccatacctctcaccagcggtgtcttcaatgtgtgaaaacccaattgttcaaccctacaggatccaacaggcaatcgcaacaggcatcttaccattatcacccttgttcctccaacaaccgtcagccctattacagcagttacctttggtccatttggtggcacaaaacatcagggcacaacaactacaacaacttgtgctagcaaaccttgctgcatactctcagcaacatcagtttcttccattcaaccaactggctgcattgaactctgctgcttatttgcaacaacaattaccattcagccagctagttgctgcctacccccagcaatttcttccattcaaccaactagcagcattgaactctgctgcttatttacagcagcaacaactactaccattcagccagc

SEQ ID NO: 8231 - DNA, 555 bp, Zea mays
  unsure (1)..(555): unsure at all n locations; Clone ID: LIB3061-087-Q1-K6-G4
gttctagnacgcgacggccgcccttttttttttttttttttttttttttttttttttttttttttttagaaatgtactttcttatttctgggaagccacaaacatcagacaaaaaactttattattgaactataactcataagaaatctaaaagagggcaccaccaatgatgggttgttggtagaatgctgctgggtttgtcaaagcaagttggttgaatggcagcaattgttgcagttgtaagagggtgccagcgttaggcgcagcgtgctggtagaacggcaacaactgtggttgtgtcaagaaggtagcagggctcacaccagctagctggctgaatggtagtagttgttgctgctgtaaataagcaggagagttcaatgctgtcagttggttgaatggaaaaaattgctgggggtaggcagcaaatagctggctgaatggtagttgttgttgttgcaaataagaagcagagttcaatgcagctagttggttgaatggaaaaaactgctgttgctgaaagtaggcagcaaggtttgctagcacaagttgttg

SEQ ID NO: 8232 - DNA, 529 bp, Zea mays
  Clone ID: LIB3061-087-Q1-K6-G5
gcaacaatagagcaacaatggcgaccaagtatattttccctccttatgctccttgctctttctacatgtgttgctaacgcgacaattttccctcaatgctcacaagctcctatagctttttttcttcccccgtgccttccatcatttgtggctgcgggctgtgcaaacccagctcttcaaccctgtgggcttcaacaagctatcgccgcctgcttctttcctttatcgcccttgttgtttcaacaatcaccagccctatctttggtgcagtcattggttcaaaccatcagggcacaactgctgcggcaactcgtgctacctgtgatcaaccaagtagctctggcaaacctttctccctactctcagcagcaacaatttcttccattcaaccaactgtctacactgaaccctgctgcttatttatagcaacaactattaccatttagccagctagctactgcctactctcagcaacaacaaacttcttccatttaaccaattggccgcactgaacccaactgattttttg

SEQ ID NO: 8233 - DNA, 567 bp, Zea mays
  Clone ID: LIB3061-087-Q1-K6-G6
gccatggtgaaccctgccgcctacttgcaacagcagttgcttgcatcaaacccacttgctctggcaaacgtagttgcaaaccagccacaacaacagctgcaacagtttctgccagcgctcagtcaactagccatggtgaaccctgccgcctacctacaacagcaacaactgctttcatctagcccgctcgctgtggccaatgcacctacatacctgcaacaacaattgttgcaacagattgtaccagctctgactcagctagttgtggcaaaccctgctgcctacttgcaacagctgcttccattcaaccaactgactatgtcgaactctgctgcgtacctacaacagcgacaacagttacttaatccactagcagtggctaacccattggtcgctgccttcctacagcagcaacaattgctgccatacaaccagttctctttgataaaccctgtcttgtcgaggcagcaacccatcgttggaggtgccatcttttagattacatatgagatgtactcgataatggtgccctcattccggcatgtgtttcctagaaataatcaatat

SEQ ID NO: 8234 - DNA, 567 bp, Zea mays
  Clone ID: LIB3061-087-Q1-K6-G7
aactagcaacatacatagtgaagtacactagcaacatcttagcaccaatggcagccaagatttttgccatccttgccctccttgctctttcagcaagcgttgctaccgcgactattattccacaatgctcacaacaatacctctctccggtgacagccgcgagatttgaatacccaactatacaatcctacaggctacaagaggccatcgcagcaagcatcttacggtcgttagcattgaccgtccaacaaccacatgccctattgcaacaaccatccttaatgaatctatatctccaaagaatcgcagcacaacaactacaacaacagttgcttccaacaatcaatcaagtagttgcagcgaaccttgctgcttacctccagcaacaacaatttcttccattcaatcaactagctggggtgaaccctgctgcttacttgcaggcacaacagctactaccattcaaccaacttgtcaggagccctgctgccttcttactgcagcaacagttgcttccattccatctacaagttgtggcaaacattgctgctttcttgcaacaacaac

SEQ ID NO: 8235 - DNA, 575 bp, Zea mays
  unsure (1)..(575): unsure at all n locations; Clone ID: LIB3061-087-Q1-K6-G8
gngcgggcggcggcttgcactccatcccatcgcttgggtgcgtcgccccgaatccaatcgcctggtcaagtctgttgctgccggaggtagacggacgccttatcgtgctcgtggccgcagctagcgcgccggagccacagctggagcgctcgccggcgacgagtcgccgccccgcaaggagcctacgcaggcacgcaccgccacgtctaggcgccaggcggagacgttattaccacaacattaaaggagatgccttcactccagaaagcattgcctccagaacttgctgataatgtgctcaggttatatcgtgaatgcttacggagggcgaagtatattggccatcagaaacacaatacagaacttttagtcgccatggtgagacaacaattcaagaaaaacatgcatgaaactgatccagagaagatacagaaaatgaaggacgatgctgcaaggggccttatcaatcatattctatatgagtccgagaagattacaggacgcaagttttcaggttaaaaacagaagttgaaactggacttacangtgtgtcgtgctgtatgaataatagtaaa

SEQ ID NO: 8236 - DNA, 581 bp, Zea mays
  unsure (1)..(581): unsure at all n locations; Clone ID: LIB3061-087-Q1-K6-G9
ctgcgagcgccgcctccagtacaagcggcggctgtggctgccagacaccaccgtttcatctaccgcctccgttctatatgccgcctccgttctatctgccgccgcagcagcagccgcagccatggcaataccccactcaaccaccgcagctaagcccgtgccagcagttcggatcctgcggcgtcggcagcgtcggcagcccgttcctgggccagtgcgtcgagttcctgaggcaccagtgcagcccggcggcgacgccctacggctcgccacagtgccaggcgctgcagcagcagtgctgccaccagatcaggcaggtggagccgctgcaccggtaccaggcgacatacggntgtggtcctgcagtccttcctgcagcagcagccgcagggcgagctcgcggcgctgatggcggcccaggtagcgcagcagctgacggcgatgtgcggtctgcagctgcagcagccaggtccctgcccttgcaacgcagctngccggcggtgtctactactgaggaaactatgtacctgtagtaataatgtaatggagccgctgactagctacctatagggctatagcta

SEQ ID NO: 8237 - DNA, 556 bp, Zea mays
  unsure (1)..(556): unsure at all n locations; Clone ID: LIB3061-087-Q1-K6-H1
ttcagcattcaaaaaaacacaccaagncgaagcgcactagcaacgnnacctaacaccaatggctaccaagatattangccctccttgcgcttcttgcccttttagtgagcgcaacaaatgcgttcattattccacaatgctcacttgctcctagtgccattattccacagttcctcccaccagttacttcaatgggcttcgaacatccagccgtgcaagcctacaggctacaactagcgcttgcggcgagcgccttacaacaaccaattgcccaattgcaacaacaatccttggcacatttaaccctacaaaccattgcaacgcaacaacaacaacaacaacagtttctgccatcactgagccacctagccgtggtgaaccctgtcacctacttgcaacagcagctgcttgcatccaacccacttgctctggcgaacgtagctgcataccagcaacaacaacagctgcaacagtttatgccagtgctcagtcaactagccatggtgaaccctgccgtctacctacaactactttcatctagcccgctcgcggtggg

SEQ ID NO: 8238 - DNA, 575 bp, Zea mays
  unsure (1)..(575): unsure at all n locations; Clone ID: LIB3061-087-Q1-K6-H11
gcggcgtgcgtagagggacgtcgacagaacagcatgaagatggtcatcgttctcgtcgtgtgcctggctctgtcagctgccagcgcctctgcaatgcagatgccctgcccctgcgcggggctgcagggcttgtacggcgctggcgccggcctgacgacgatgatgggcgccggcgggctgtacccctacgcggagtacctgaggcagccgcagtgcagcccgctggcggcggcgccctactacgccgggtgtgggcagccgagcgccatgttccagccgctccggcaacagtgctgccagcagcagatgaggatgatggacgtgcagtccgtcgcgcagcagctgcagatgatgatgcagcttgagcgtgccgctgccgccagcagcagcctgtacgagccagctctgatgcagcagcagcagcagctgctggcagcccagggtctcaaccccatggccatgatgatggcgcagaacatgccggccatgggtggactctaccagtaccagctgcccagctaccgncaccaacccctgtggcgtctccgctgccattccgccctactactgattca

SEQ ID NO: 8239 - DNA, 575 bp, Zea mays
  Clone ID: LIB3061-087-Q1-K6-H12
tcgacccaacgcgtccgcaacaagctgccccgcagcaacgaacacgaaccttggcagaacgaagctgaagtagttcgttgtgaacccagtatggcaaacgcgccgaggatcctggccctcggcctgctgctagcgctcctgtgcgctgccgccggcccggccgccgcgcagaactgcggctgccagcctaacttctgctgcagcaagttcggctactgcggcacgaccgacgactactgcggcgacgggtgccagtcgggcccgtgccgctcgggcggcggcggcggcggcggcggaggcggaggcagtggcggtgcgaacgtggctaacgtggtcagcgacgcgttcttcaacggcatcaagaaccaggccgggagcgggtgcgagggcaagaacttctacacccggagcgcgttcctgagcgccgtcaacaagtacccgggcttcgcccatggcgggacggaggtggagggcaagcgcgagatcgccgccttcttcgcgcacgtcacgcacgagaccggacatttctgctacatcagcgagatcaacaagagcaacgcctactgcgacgcaag

SEQ ID NO: 8240 - DNA, 574 bp, Zea mays
  unsure (1)..(574): unsure at all n locations; Clone ID: LIB3061-087-Q1-K6-H3
gcaccaccaccaacaacaacaacaacagcaccaacaacaacatcaatgtgaaggccaacaacaacatcaccaacaatcacaaggccatgtgcaacaacacgaacagagccatgagcaacaccaaggacagagccatgagcaacaacatcaacaacaattccagggtcatgacaagcagcaacaaccacaacagcctcagcaatatcagcaggnngccaggaaaaatcacaacagcaacaatgtcattgccaggagcagcaacagactacaaggtgcagctataactactatagcagtagctcaaatctaaaaaattgtcatgaattcctaaggcagcagtgcagccctttggtaatgccttttctccaatcacgtttgatacaaccaagtagctgccaggtattgcagcaacaatgttgtcatgatcttaggcagattgagccacaatacattcaccaagcaatctacaacatggttcaatccataatccaggaggagcaacaacaacaaccatgtgagttatgtggatctcaacaagctactcaaagtgcggtggcaatcttgacagcagcac

SEQ ID NO: 8241 - DNA, 555 bp, Zea mays
  unsure (1)..(555): unsure at all n locations; Clone ID: LIB3061-087-Q1-K6-H4
ctcgccgccgcagcttgtgtaaggtgtaaccctaaccctaaaacacttaccttcgcctccagcaccacgcttccatggaggggcgcggaggctaagtatagccaacctctacaccatatccccatggattgagcggattcccaaggcatgggtacaaaccctcacctgcaagagctggccgcttcggcggtggcggcttctgaaccaccaccgcgggcgcgcgtggtgcggatcctagtgcacgatgctgacgccaccgattcgtcctccagcgaggatgaggcaccgccacttcttcctcggcggaggtcgaggggtggtagcagcagcctgagcgtgaggcgccgtgttatggaaccggctggggcaagctcggccgttcggttccgtggcgtccgtcgtaggccgtgggggcgctgggctgcnggagatccgcgacccgcacaaccgccgcagactgtggctcggcaccttcgacaccgctgaggaggctgccaacgcctacgacgctgcgaacatccgcttccggcggtgtcagcgccactaccaacttcc

SEQ ID NO: 8242 - DNA, 550 bp, Zea mays
  unsure (1)..(550): unsure at all n locations; Clone ID: LIB3061-087-Q1-K6-H5
ccgggtntgnacccacgcgtttctgttccacgcgtccgtgtttcctggccctccggcggggggtgctcagcctcggctacagcaaccgtctccttcgcgtcccgcgccgcggcgctcttcggcggccggttctcctactgcctggtcgaccacctcgccccgcggaacgccaccagctacctcaccttcggccagaacccggccgtgtcctgggcctccgagacggcctgcgggggctcgggctcgggctcggcggcgcccggcgcgcgccagacgccgctgctgcttgaccgccggatgcgcccgttctacgcggtcgccgtcaacggcgtctccgtcgacggggagctcctccggatcccgcgccgcgtctgggacgtcgagaagggcggcggcgccatcctcgactccggcacgagcctcacggtcctcgtgagcccggcgtaccgcgccgtggtggcggcactgagcaggaagctggccgggctgccccgggtggccatggacccgttcgactactgctacaactggacgtcgccgtccacgggcg

SEQ ID NO: 8243 - DNA, 572 bp, Zea mays
  unsure (1)..(572): unsure at all n locations; Clone ID: LIB3061-087-Q1-K6-H6
tattgnanaaccaactagcaacatagnaaagcacaatagtgtaccaacaatggcagccaaaatattttgcctccttatgctccttggtctttctgcaagtgctgctacggcgaccattttcccgcaatgctcgcaagctcctatagcttcccttcttcccccgtacctctcaccagcggtgtcttcggtatgtgaaaacccaattcttcaaccctacaggatccaacaggcaatcgcagctggcatcttacctttatcacccttgttcctccaacaatcatcagccctattacaacagttacctttggtgcatttattggcacaaaacatcagggcacaacaactacaacaacttgtgctagcaaaccttgctgcctactctcagcaacagcagtttcttccattcaaccaactaggttcattgaactctgcttcttatttgcaacaacaacaactaccattcagccagctacctgctgcctacccccagcaatttcttccattcaaccaactagcagcattgaactctcctgcttatttacagcagcaacaactactaccattcagccagc

SEQ ID NO: 8244 - DNA, 569 bp, Zea mays
  Clone ID: LIB3061-087-Q1-K6-H8
ctcccaaacgcggtgaagagcccttcgtctctaagcttcttcagccaagttacgaaggttccaagcctgaagacctccaagaaactggatgtctccgccatggctgtatacaaggtgaagcttgtcgggcctgaaggtgaagagcacgagtttgatgctccagacgacgcctacatccttgacgcagccgagactgccggtgtggagttgccatactcgtgccgtgctggggcttgctccacctgtgccggcaaaatcgagtctggttcggttgaccagtcggatgggtccttccttgatgacgggcagcaggaggaaggttatgtgctgacatgcgtctcctacccaaagtccgactgcgtcatccacacccacaaggaaggcgacctgtactagggctagggattttcaatttggcgagggaccaaaaatgctctcgagtggtgctttgtcaagcaaagctccatctgcgcgccctaccccgttgtgcgaactgtttggcatcaaacttgtgtggttgctgtcttctatgttctgctagtttatgttcggagtccgtgggaatatac

SEQ ID NO: 8245 - DNA, 607 bp, Zea mays
  unsure (1)..(607): unsure at all n locations; Clone ID: LIB3061-087-Q1-K6-H9
tccgaatccccggtcgacccagcgtccggcaacatagnaaagtggatacagtagcaaaaatanagcaacaatggcggccaagatattttccatccttatgctccttgctctttctgcatgtgttgctaacgcgaccatttttcctcaatactcacaagctcctatagctgcccttcttcccccataccttccatcaatgaccgctttagtatgtgaaaacccagcccttcaaccctacaggatccagcaagcaatcgcaacaagcaacttacctttatcacacctgttctttcaacaatcgccagccctatctttggtgcagtcattggtacaaaccatcagggcagaacagttgcagcaactcgtgctaccagtgatcagccaagtagctctggcaaacctttccccctactctcagcaacaacaatttcttccattcaaccaactgtctatactgaaccctgctgcttatttgcagcaacaacaactactaccattcagccagctagctactgcctactctcagcagcaacaatttcttccatttaaccaattggccgcactgaacccctctgcttatttccagcagcaaatactactaccattt

SEQ ID NO: 8246 - DNA, 54 bp, Zea mays
  Clone ID: LIB3061-088-Q1-N6-A10
gtgtgtggggggtgttattttttcttttttttcttttgctttccttcttttttt

SEQ ID NO: 8247 - DNA, 244 bp, Zea mays
  Clone ID: LIB3061-088-Q1-N6-B4
ggggccccccaaaccttttccaaaaaacttcttttttggccttttacccctaagccctttaaaaaagggccccccccattattggttttttgttgaaaacttttgggtttgtcaaaacaagttggttgaatggccccaattgtttccttttttagagggggcccccgtttggcttttcgggccggttggtcggccccaacttttttttttttccgaagggccccaggcccccctcttcttgctg

SEQ ID NO: 8248 - DNA, 302 bp, Zea mays
  Clone ID: LIB3061-088-Q1-N6-C11
ggttggtgggggttatttttaaaaatttttttttttttttttttttttttttttttttttttttttttttttttttttttgggggggggccctcttttttttggggggccccccccctcctcccaaaaaccttttttttggttttccccggggggggggggttaaagggggccccccccacgctgtgttgttgggggggggctgctgggtttttccaccccaggtgggccaggggccccccccggggtttttgtttggggggtgcggggttccccccccccttcttgtcttccggccccccc

SEQ ID NO: 8249 - DNA, 388 bp, Zea mays
  Clone ID: LIB3061-088-Q1-N6-C12
gttttggggggtttttttttatttttttttttttttttaatctcatccttttttggttatttctaggaaacccacctcggtttgggggcccccttttcgggtccatctcattttttttttttaagatggcccctccccccttgggttgggggctgggcctggccgggtttctctaagagaactggttatttggctgccattgttgctgctgttgggaggcggcttcccctgggtttgccccttcccatgggtttagtccctgttgccccttttgttggttcccccctctgttcgtccgtttccgtttggttgtttgggtgccgcttttgccctgtggcctccgggtttgccccctcttgttttttttgtgctggttcccttttttccc

SEQ ID NO: 8250 - DNA, 384 bp, Zea mays
  Clone ID: LIB3061-088-Q1-N6-C2
ccaatcatcttttttccttatatattattcctttccatttcaatggttcattcaggtcattgctcacactgccacccatggtgatgggtgacactacgttactcatcgccgctaaatgagtaaactagcgagctaggtagctagtcagcggctccattacattattactacagtacatagtttcctcagtagtagacaccgccggcagctgcgttgcaagggcagggacctggctgctgcagctgcaggccgcacatcgccgtcagctgctgcgcttcctgggccgccatcagcgccgcgagctcgccctgcggctgctgctgccggaaggactgtcggacctcaccgtctgtttcctggttccggtgtctttgtttcacctgc

SEQ ID NO: 8251 - DNA, 543 bp, Zea mays
  Clone ID: LIB3061-088-Q1-N6-C3
cgatagatgtttttttcccctttgcgacacgactgactccactcctcattacagttccagtcaaaggacgcacgattgctcttatcaaccgcgacaacaaaattcagccatgacaaagtatctacctatagacatcaaaatatccccactgctttcgtatcaaggatggactgcaaaaatgacaaggtctaggcagatgcagggccttgctgcctgaagccattgttgcgctcgaccctcagtccgttcccattgctgttggggcgtcgctgttggtagccattaccagagtagtagccgtggccgttctgatggtagccgtggccgttctgagggtggccgttcccttgcggtccacggacacgacctgagtagtcgttcctcatgttatccccgccgttgtagtagccgttgttctgaccgccccactgccgcttgtagccgtccccatagtaaccaccacctctgccagaatggaaccgaccgccaccgccattgccattgtcatccccacgggtgataacaccatcaacaactcgtgtt

SEQ ID NO: 8252 - DNA, 247 bp, Zea mays
  unsure (1)..(247): unsure at all n locations; Clone ID: LIB3061-088-Q1-N6-D11
gaatctagaaatgtactttcttatttctgggaagccacaaacatcagacaaaaaactttattattgaactataactcataagaaatctaaaagagggcaccaccaatgatgggttgttggtngaatgctgttgggtttgtcaaagcaagttggttgaatggcagcaattgttgcngttgtnagagggtgccagcgtttggcgcagcgtgctggttgtacggcaacaattgtggttgtgtcaagaagg

SEQ ID NO: 8253 - DNA, 537 bp, Zea mays
  unsure (1)..(537): unsure at all n locations; Clone ID: LIB3061-088-Q1-N6-D4
ttttttttttttttatttttttttttttttttttttttttnttttttttttttttttttttttttttttttttttttttttttttttttttttttttttttttttttttttttttttttttttggtttacacatttttttggttggggggggggggggggtccattgggggggtgggggaattttgggggggggggggggccaggggggatttgggggggggggggggggggcggggggggcatgggtggggggggggggggggggggggaaagccccaccgggctggggggggggggggggggccccaatgggtcacggggtggggggggggggggggggggggggaggggttgggcgggggggggggggggtgggcgggagaaaggggggggaagaggggttgggggggggcgggagtggtcccggggtttctgggcgggggggggggggccccccggatttccctaacggggccggccggggggcctggtttcgtttttggggggggggttcggggggggggaaaagtttggcc

SEQ ID NO: 8254 - DNA, 522 bp, Zea mays
  unsure (1)..(522): unsure at all n locations; Clone ID: LIB3061-088-Q1-N6-D9
caagttaatatcattattagtgccggcttttagcatttttttaactccagaagatacagcctcacgacaactgttgaaaagggaaaatcagtacatgatggccacaaacatgcaagagctggaagtagattccgggtngaggtccaacgtccaaggctctcgctatctcgagtccacaacggtgccttctggaagcgcggacaggtgcacaagaggggcatgtgatttcagggaagcattggcaccagtgatcttggtctcctttgttctgttgagcaccttcctcacctcgtttgcaagctctatgatcgaatcatcttcgtggctaatgctggctaatgccttctccattgagaacaggtaatccctattatagccagtagggccattggctgtagcaatttgccttgccatatcctgcaaaggagcagggccaagatagtacttgttgccaattggatctggagtggaaacgaacactaagacgcctgtcacagctggtttcaagggatctccttcctt

SEQ ID NO: 8255 - DNA, 537 bp, Zea mays
  unsure (1)..(537): unsure at all n locations; Clone ID: LIB3061-088-Q1-N6-E12
tttttttttttttagaatctggaatgtaacttcttatttctggttggccacatacatcatccaaaaaactttattattgaattacaactaataagcaatctaaaagaggcaccaccaatgatgtgttgttggtaggaggctgctgggtttggcaaagcaagttggacaaagggcaacaattgttgtagttgtaagagggttgcggggttagccgcaaactgctggttgaaaggcagcaactgttgctgtgtcaagaaggaagcacggcttgctgcagcttgctggctaaatggtngttatttttgctgctgccnattagcngcgaggttcagtgcggccaattggttaaatggaagaagttgttgttgttgagagttggctgtcgcttgctggctgaatggttattgttgttgctgcccctttgcctccgggtttccgtgtttgttcgttgggttgaatggtcgtaatttgctgtttgcctgtcggttggggggcacgggtttgcccgtggcttctttggtttctttcccaagtctg

SEQ ID NO: 8256 - DNA, 508 bp, Zea mays
  unsure (1)..(508): unsure at all n locations; Clone ID: LIB3061-088-Q1-N6-E3
gctccaactaaaattatataacatatttgagcggatgtgacgattacaaatgtacaaaaattaagcaaagggtggattttgatacacgngagaagatatacaggacggctgtttagaggagaggtcgcttcgattcggcggcacgctcgcgtctctccgttccccatgatggatggatgctcatgaagaccagcagctgaggcgcaacgcctcctcgaacttgctttccagctccttatcagcgtcggccggcgccgatgacttgatctcctcgccggcgtcgcgctcgtgcagtgtcgcctccccctccggccgccactgcaacaaagcgggtgagagcacgctgctcacgctcatcctcctccagaagccgccgggggcagccgcctccctgcgcggcggcggcggcggcgtccccacctccgtcggcctgtggagctggtggtagctcaggaacagcatcgacgcgctcggggccatcgccactctgatgaatctctggttcgct

SEQ ID NO: 8257 - DNA, 533 bp, Zea mays
  Clone ID: LIB3061-088-Q1-N6-E5
gaatcggataggagaaaagtttataaatcaaattcgaatgtatacatttgacatccatattgaaatcgaataaagatacggatatccatattaacggtttcagcaaatacgaataattcggatctccagacatccatttccagtcctacttatagtggtctgatcgatgatgcacaacagcatgaggctcatctcatattttccctcatatttcaaatctctaaccattgcagctgcaaaatagtgttttccacaaccatacgcacgaccctgcaacaaacgagtccaacaatatgaaccagcaaaagcaagctatagcacaccagggtgaactgcagattctttctgagttttgcacctgttgcaaaacgcacgagatgcgtagttgtggttgttgcagttgttgcacaaccagtccccgtcgcgccattttgccccttttacgataagaccagacattccctgcccagatggtaatgacattgagctcccatagtcaaatttcgaaaaagcagcctggccattgctgctta

SEQ ID NO: 8258 - DNA, 544 bp, Zea mays
  Clone ID: LIB3061-088-Q1-N6-E8
gacaggtgaacgagcaggcatttttattcgaagcaaaggtgcagccaattcccaccatactaggaaccaggccagcgctgcccaaaaacgctcaaacaagggaaaaaaaacgagaaggaaccaaagttcttgggaaaccaagtgcacataactccaatacacgactaacaatgcgaattgcggtgaaacagatcgaaatgcaggcgatggttctccggcctgggcttcttcttcttcttctttccccgtactaatcgaaggacagcggaacctggcttgccaggctacggtacttcagggcgtagaacatctcgatgtagcggcgggtctcgcgcctctccaggttgctcacgtacttccagaacccgtacacgccggtcagggtcatcagcctctcggagtagagcttccaggtgtacttctcatagattctctgcaggccgccctgtgagatcttgtcccagtagctcggatctgccttgcatttgtcaaagaagttgaccaggatatccgcggccttgtcgctgtggtaagggtcaatgtg

SEQ ID NO: 8259 - DNA, 514 bp, Zea mays
  Clone ID: LIB3061-088-Q1-N6-E9
tttttttttttttttttttttttttttttttttttttttttttttttttttttttttttttttttttttttttttttttttttttttttttttttttttttttttttttttttttttttttttttttttttttttttttttttggggggggggggggggtttttttttttttttcccgcggcgcgcccccccggggggggggtcccccgggggggggacgttttccggcccgggggcccccccggggggggggttcccccccgggggggggccccctttaaaaaccttgttttttttccccccgggggggcgccccccggggggggggaaaaacggggggtgtacctgctggggcccctgggggggttgcctttttgggaaggggggggcgtttttttcccccccccacagttttgttttgggggggggggggttttttccggggggcgatttttgtggggggggggtcccccccggttttggggggggggttcctggggggccccccctttcc

SEQ ID NO: 8260 - DNA, 83 bp, Zea mays
  Clone ID: LIB3061-088-Q1-N6-F1
gtgggggtggttttttgttttttttttttttttgttgttttctttttttttttttttttttttgttggggggggtgggggggg

SEQ ID NO: 8261 - DNA, 518 bp, Zea mays
  Clone ID: LIB3061-088-Q1-N6-F11
actatctggacgacatcctcgtcgttaaggccatggccgaggccgcaatgctgtggatagtgccttgcgctggttccccatacgagcacatacttcacgtccttgagcaaacttctatggatatgattgcagaagtgctccaccgtgcagccacctctgtcggtggaaagaacaactgggtctgtgaaatcaggctgctggccctgtggctttgtttacaccctcactaggcccatctcctcccacattctcgcaagtagtctgtccaagttcagcttcaaattgcagctgatcactagtgaatttggttgccgagcaagattatcaacgtcatcgattccaacaacatcgatcttgttttatacgtagacgcactttatgtacttccggttcccttcgataacgtcaatgagatcatccacagtagcatcttcacggaataacacctcagcattgtgaattttgttctcgtgcagaatttgatagcacagcttctcatcaatttgagtcaaaggaac

SEQ ID NO: 8262 - DNA, 213 bp, Zea mays
  Clone ID: LIB3061-088-Q1-N6-G1
tttggggtttttttttttttttttttttttttgccctaatccggtgctttttttcccgggggttccgtgttcaagagcacagctagtcttccttccgcgccgctgggtttgtttgtgggggtggtttctttttgtttttgtgtttggggtgggggtcggcgtcgtccctggtgctttttttgccctttgggtttgcccccctggttttttttt

SEQ ID NO: 8263 - DNA, 277 bp, Zea mays
  unsure (1)..(277): unsure at all n locations; Clone ID: LIB3061-088-Q1-N6-H5
ggggggggggggtgttttttttttttttttttttgggccggncccttcgggtttttttttttctttcccttggctttcccgttttttggggcgcctttcgggccctgngttggttccatttcccggggttntcctttgcttgtggcctgggggtggtggcgtnccctttncgcccccctgtcttctgttggggcccggttttctgtccctcccgttgcgggttgttcttctttgttttctgtccctccctccgcgcctcccgggtggttgttgcccc

SEQ ID NO: 8264 - DNA, 363 bp, Zea mays
  Clone ID: LIB3061-088-Q1-N6-H9
gcgggggtggggggggggtttttttttttttttttttgtttttttttttttttttttttttttttttttttttttgttcttggggggggccttctttttttggggggggcgcccccctcctccccaaaactttctttttgggggcttccccttgggggggggggaaaaagggccccccccctggtgggggggggggtgaacccttttggggttggccccccaaggggggtgggtgggcgcccttgggggggttgggtggggggggccgcggttggggccgcgtgctggttgttccgccccccctgggggtgtggttggggggggtccggggttccttttccttgttgggccgttggggggggg

SEQ ID NO: 8265 - DNA, 429 bp, Zea mays
  unsure (1)..(429): unsure at all n locations; Clone ID: LIB3061-090-Q1-N6-A1
gtcatccaatgttctcataagcttgacaggaataatatattacaattgcttaatataaggatgctgccatgtttcatgatacatccatggtacaccattgtgctcagaaaaataacgcttgagaacctagagcttctgcattaagcgattaatccgagtcaaataatgaactccacaggcctaatcataaaggccttcttgctcccaagcgttcacaagcaaatctaccatttcgccaagaggtatcggttgggagaatggcttattgcttnctagcagactttcatacgttgtgttccaacttaactttggttctcgaggctgttgagatctaaagtggcgttttttgctttcaacccactgttgtctggtctggttccagagcataagaccttgattcataaactcattcgggttggttgaactttc

SEQ ID NO: 8266 - DNA, 550 bp, Zea mays
  Clone ID: LIB3061-090-Q1-N6-A11
agaaatgtactttcttatttctgggaagccacaaacatcagacaaaaaactttattattgaactataactcataagaaatctaaaaggggcaccaccaatgatgggttgttggtagaacactgctaggtttgtcaaagcaagttggttgaatggcagcaattgttgcagttgtaagagggtgccagcgttaggcgcagcgtgctggtagaacggcaacaactgtggttgtgtcaagaaggtagcagggctcacaccagctagctggctgaatggtagtagttgttgctgctgtaaataagcaggagagttcaatgctgccagttggttgaatggaagaaattgttgggggtaggcaacaggtagctggctgaatggtagttgttgttgttgcaaataagaagcagagttcaatgcaactagttggttgaatggaagaaactgctgttgctgagagtaggcagcaaggtttgctagcacaagttgttgtagttggtgtgccctgatgttttgtgccaataaatgcaccaaaggtaactgctgtaataaggc

SEQ ID NO: 8267 - DNA, 115 bp, Zea mays
  Clone ID: LIB3061-090-Q1-N6-A3
tttttttttttttttttttttttttttatttttttttttatttttttttttttttttttttttttttttttttttttttttttttttttttttttttttattttttttttggttt

SEQ ID NO: 8268 - DNA, 203 bp, Zea mays
  Clone ID: LIB3061-090-Q1-N6-A4
cgtcttaagctggtccttagacggccgccctttttttttttttttttcgaaaaaactcaacaagtattgattatttctggaaacacatgtcggtatgagggcaccattgcggtcatctcatatgtaatctaaaagaggcacctccaacgatgggttgctgcaaggcaggttcatcaaaaagaatggttgattgcaacaattga

SEQ ID NO: 8269 - DNA, 498 bp, Zea mays
  Clone ID: LIB3061-090-Q1-N6-A8
agtaatatataggatgacagatatagttgatccaaagcaggtaatggaaatacaaaggttcataaaaaggtttgctgcaacttctagggcagcttataacagtacatactagcagcacaaatggtcaaggaacagcatgccagacaacgcatcttgcgcccgaacgctcgacttcctgtcaagcggctcttaccataccaaggttacacgatccatcgatgcaataccattgtaggttcttgttttgtagacgcaaacgcagccgatctatatgacagacccatcgttgatggttgcattcttcaagatcaccacgattccagaccttatgtagtacccttcttccgggtgatcagcctcttggatgcccttactgtttgtgatcaccacgttctttccaatcctagcattcatgtcaatgatacagttccttatctttgtgttccttcctattccaactgggacctttccaactaacagtatcttttgaagcttttt

SEQ ID NO: 8270 - DNA, 559 bp, Zea mays
  Clone ID: LIB3061-090-Q1-N6-A9
cagaaattatcgagataaatctcaatcaatatattgattatttctaggaaacacatgtcggtatgagggcaccattgtcgagtacatctcatatgtaatctaaaagatggcacctccaacgatgggttgctgcaaggcagggttcatcaaagagaactggttgtatggcagcaattgttgttgctgctgcaggaaggtagcgaccaatgggttagccactgccaatggattaagtaactgttgtcgctgttgtaggtacgcagcagagtttgacacagccagttggttgaatggaagcaactgttgtaagtaggcagcagggtttgccacagctagctgagtcagagctggtacaatttgttgcagcaactgttgttgtaggtacgtaggtgcattgcccaccgcgagcgggctagatgaaagtagttgtaggtagacggcagggttcaccatggctagttgactgagcactggcataaactgttgcagctgttgttgttgctggtatgcaactaccttcgccagaacaagtggtttggatgcaagcagctgctgttgc

SEQ ID NO: 8271 - DNA, 480 bp, Zea mays
  Clone ID: LIB3061-090-Q1-N6-B1
ccaaacatcctttttccctatatattattcctttccatttcaatggttcattcaggtcattgctcacactgccacccatggtgatgggtgacactccgttactcatcgccgctaaacgagtgaactagctatagccctataggtagctagtcagcggctccattacattattactacagtacatagtttcctcagtagtagacaccgccggcagctgcgttgcaagggcagggacctggctgctgcagctgcagaccgcacatcgccgtcagctgctgcgctacctgggccgccatcagcgccgcgagctcgccctgcggctgctgctgcaggaaggactgcaggaccacaccgtatgtcgcctggtaccggtgcagcggctccacctgcctgatctggtggcagcactgctgctgcagcgcctggcactgtggcgagccgtagggcgtcgccgccgggctgcactggtgccttaagaac

SEQ ID NO: 8272 - DNA, 239 bp, Zea mays
  Clone ID: LIB3061-090-Q1-N6-B10
ggaaattaacttcttatttctaggaggccacatacatcagccaaaaaacttcattattgaattacaactaataagcaatctaaaagaggcaccgccaatgatgtgttgttggtagaaggctgctgggtttgtcaaagcaagttggacaaagggcagcaactgttgcagttgtaagagggttgcggggttagccacaaactgctggtagaacggaagcacttcttgacacaacaacaagt

SEQ ID NO: 8273 - DNA, 570 bp, Zea mays
  unsure (1)..(570): unsure at all n locations; Clone ID: LIB3061-090-Q1-N6-B11
cacaatcagcttactctgaaacctaagcaggngcaatgaaaaagtgacatcttgtatcctgttcgtgatataaggagttatatacatcctatgatgctcctacgatgagtccaacacaatacnatccatcgaaacttcatgtatcatagctacaatgcagctcgtccttggcccttcggtaacttctttgttccggagtcttccacatcctttagttggtaataatgtggtgctatctctaccagccattcaggcttcagttccgtcacctggcgcataaactctttcgtcgtgagaactaattcgtggtacactacccaccgcggacgtacctccgctaatcctgaactaggatggatatgcacggtctgagggttcttgacagtcttatatgtaccatccctctgcaaccgtgcagagtgatggaagaaacctgatgttatagcttttttaatagcatctaaatcactggtgtttgagcaaatctcaatctcaactctttccataagcccatctagttgatcccgaatatctcttgccctcttcatgctgcgcacctgtatatagttt

SEQ ID NO: 8274 - DNA, 335 bp, Zea mays
  Clone ID: LIB3061-090-Q1-N6-B3
tttttttttttatttttttttttttttttttttttttttttttttttttttttttttttttttttttttttttttttttttttttttttttttttttataaataaaaagggctttttatttttggggggggccaaaaacttgagacaaaaaatttttttttgggatttatcctataaagaaattaaaaggggggcccccccaagggggggttgggggggagagcgggtggggtttgaaaaaaaaggtgggttaagggggacaatttggggaggttgaaagaggggcccaagttttggggaaaggtggggggaaaaaggaaaaattgggggttgtt

SEQ ID NO: 8275 - DNA, 407 bp, Zea mays
  unsure (1)..(407): unsure at all n locations; Clone ID: LIB3061-090-Q1-N6-B4
aaaaaaaagaatgttctacttcttcggttataataaccatattacacaaagttacaagtaatacaagctacgtacagctcaagcagttaaatatgctcgtaaagcatttgacgtcagattggaataaaatcgcatcatgggagcaagcccccagtagatatatactttggaaacaccatctaatatcagtttgatcacatatcacgtgaacaaaccggcgagtcgtccttggtcgagagattagcgttctactcgccggccccgcagcaagctgccaacactggccgttaagtggtcgccattgtcaaataaaatncgggagcggtctcgttagcacgggaagaaggcagtcagacttctttgccgccggactgaggaaggcagacgtaagcccggtggcccggcgg

SEQ ID NO: 8276 - DNA, 552 bp, Zea mays
  Clone ID: LIB3061-090-Q1-N6-B7
aaagcagcacagtatggtaattaaactgatcaatttacagcatgatgtatccccaaatccaggcccccaatgtcgattcaacatgtaactaacatttgctgctacaacattctaccctacaacattgaaggacacaaaagagcaaaaagaaagaaaaaatgccttggatgacacttttattgctccgatgatctccaacagactgatctgcagatcacgcatgtaaccaggtgctgatcattgtcgaatgtcgagacacacagctgcatgtcgcacgttcacttcatataactgttccactagggagtaaagcatccttgatcactgtgacaattccacctttgatgaagtacccgtctgtctcccttgcagcttcttgaacattgtcagcattgagtatcttaacattgtctccaattcgagcattcttgtcaatgattgctctcctgatgcatgaatttttcccaataccaataggaatgccacctttttcggcaaggagttttttatcagcttctgtctcatagtagtccgcacccattagtaaactgt

SEQ ID NO: 8277 - DNA, 67 bp, Zea mays
  Clone ID: LIB3061-090-Q1-N6-B8
atggggggggggatagggaaaaaagggggggggttttgggaaagggggggggttttgtgggggggag

SEQ ID NO: 8278 - DNA, 166 bp, Zea mays
  Clone ID: LIB3061-090-Q1-N6-C1
agaaatgtactttcttatttctgggacgccacaaacatcatccaaaaaacttcattattgaactataactcataagcaatctaaaaggggcaccaccaatgatgggttgttggtagaacactgttgagtttgtcaaagcaagttggttgaatggcagcaattgttg

SEQ ID NO: 8279 - DNA, 562 bp, Zea mays
  Clone ID: LIB3061-090-Q1-N6-C10
ggaaatataacttcttatttctaggaggccacatacatcagccaaaaaacttcattattgaattacaactaataagcaatctaaaaagggcaccgccaatgatgtgttgttggtagaaggctgctgggtttgtcaaagcaagttggacaaagggcagcaactgttgcagttgtaagagggttgcggggttagccacaaactgctggtagaacggaagcacttgttgttgtgtcaagaaggaagcggggcttgttgtagctagctggccaaatggtagtagtatttgctgctggaaataagcagaggggttcagtgcggccaattggttaaatggaagaaattgttgctgctgagagtaggcagtagctagctggctgaatggtagtagttgttgttgctgcaaataagcagcagggttcagtatagacagttggttgaatggaagaaattgttgttgcttgagataggggggaaaggtttgccagagctacttggctgatcactggtagcacgagttgctgcaactgttctgccctggagggtttgtaccaatgactgcacc

SEQ ID NO: 8280 - DNA, 433 bp, Zea mays
  Clone ID: LIB3061-090-Q1-N6-C2
ctagaaagtactttcttatttctgggaagccacaaacatcagacaaaaaactttattattgaactataactcataagaaatctaaagggggcaccaccaatgatgggttgttggtagaacgctgctgggtttgtcaaagcaagttggttgaatggcagcaattgttgcagttgtaagagggtgccagcgttaggcgcagcgtgctggtagaacggcaacaactgtggttgtatcaagaaggtagcagggctcacaccagctagctggctgaatggtagtagttgttgctgctgtaaatagcaggagagttcaatgctgccagttggttgaatggaagaaattgctgggggtaggcagcaggtagctggctgaatgggaattgttgttgttgcaaataagaagcagagttcaatgcagctagttggttgaatgg

SEQ ID NO: 8281 - DNA, 550 bp, Zea mays
  Clone ID: LIB3061-090-Q1-N6-C3
acattagaatctggaaatgtaacttcttatttctggttggccacatacatcatccaaaaactttattattgaattacaactaataagcaatctaaaagaggcaccaccaatgatgtgttgttggtaggaggccgctgggtctgtcaaagcaagttggacaaagggcaacaattgttgtagttgtaagagggttgcggggttagccgcaaactgctggtagaaaggcagcaactgttgctgtgtcaagaaggaagcacggtttgctgcagctagctggctaaatggtagtagtatttgctgctgcaaataaacagcggggttcagtgcggccaattggttaaatggaagaagttgttgttgctgaaagtaggcagtagctagctggctaaatggtaatagttgttgctgcaaataagcagcagggttcagtgtagacagttggttgaatggaagaaattgttgttgctgaaagtagggagaaaagtttgccaaagctacttggttgatcagaggtagcacgagttgctgcaacttttgtgccctgatggtt

SEQ ID NO: 8282 - DNA, 533 bp, Zea mays
  Clone ID: LIB3061-090-Q1-N6-C4
gaataatcaaaagcactggattggtggaatctgtacaaggtagcaaaacttgcactctctccatacgagcatatagacagacatatagtagcaaatgcttcatgtttcgtcgctggacttgtgatctttacggacaagaaagtatacggaaacttgctgtaggcaaaaccagtcgcatgcagttggccatttgcatgaaagggtaggaatgatcaaaaatcaaattccttggcccccccttacccgaaaagtgaaaattacggcaaaaagaaacacgccgatgagcccttctcccaaaaagtcgtcgaaccattaccatcaaggccaccaatcctttcaaacttgccgctggctgagccctttcagcacgacctgaacgctagtaccgcttcccaagaaacacgccgattaggacagacagcagggcaactcccaggatgaacttgaaggccatgatgccggaaggttcttgcactccttgcagggttgggttttggtgagacagcctgagttttgtcttgctgcttgcctga

SEQ ID NO: 8283 - DNA, 252 bp, Zea mays
  unsure (1)..(252): unsure at all n locations; Clone ID: LIB3061-090-Q1-N6-C6
ggaacagatggagtactttttttcttttcatttcaattgttcattcaggtcattgctcacactgacactgccacccatggtgatgcgtgacacattttttctcaatcatcgccggtnaatgactcaactagctggctggccggcggtttttctgcagctcatagtttcttcagtgggggacaccgccggctgcagcgttggggcgtggtgtttgttggtgtaggccgtacattggcgtttgttgctgcgctt

SEQ ID NO: 8284 - DNA, 453 bp, Zea mays
  Clone ID: LIB3061-090-Q1-N6-C7
aagaatctagaaatgtactttcttatttctgggaagccacaaacatcatccaaaaaacttcattattgaagtataactcataagcaatctaaaaggggcaccaccaatgatgggttgttggtagaacgctgttgggtttgtcaaagcaagttggttgaatggcagcaattgttgcagttgtaagagggtgccagcgttaggcgcagcgtgcaggtagaacggcaacaactgttgttgtgtcaagaatgcaacagggctcacatcagctagctggctgaatggtggtagctgttgctgttgttaattagcagcagagttcaatgctgccagttggttgaatggaagaaattgctgggggttggcagcttcttagctgacttgatggtagtcgttgttgccaataatccgcttgattttaatgcccccagtttggtttgatgtgaagaaactggt

SEQ ID NO: 8285 - DNA, 522 bp, Zea mays
  Clone ID: LIB3061-090-Q1-N6-C8
gaaaaagattaacaggtatcaataaccatgattagtaggctctcaagtgaaaactgcacaacaccctggagaaccaagaagcggtcacctaatgcgggcctagtgtggtacagagtcaattatatgacggtgttatcagtcgtacagtgaagaaaccttgtgaatatatctaatctctatcaggtgtaggcatgtgatctgaacccctgctgccatctgtccttgctggggagcccttgtgccttgttatgtttcgacagaacatatccagctcttcttcctttcccttgatttcacaggaccaaagtactgggtccacattcttgggcaaggattcttgaagtttggacccctcacttagccactgctcagctttattgcactcattgtcaacagcatccctttcaggtgcggataatgacttggcagccattctgtggtcaacaatgcacttcaaaagctcccttgcgatttcagctctcacttcgtcatcattacaacgattttcaattggatctacaa

SEQ ID NO: 8286 - DNA, 558 bp, Zea mays
  Clone ID: LIB3061-090-Q1-N6-D10
ggaaatgtaacttcttatttctggttggccacatacatcatccaaaaactttattattgaattacaactaataagcaatctaaaagaggcaccaccaatgatgtgttgttggtaggaggctgctgggtttgtcaaagcaagttggacaaagggcaacaattgttgtagttgtaagagggttgcggggttagccgcaaactgctggtagaaaggcagcaactgttgctgtgtcaagaaggaagcacggcttgctgcagctagctggctaaatggtagtaatatttgctgctgcaaataagcagcgaggttcagtgcggccaattggttaaatggaagaagttgttgttgatgagagtaggcagtagctagctggctgaatggtaatagttgttgctgcaaataagcagcagggttcagtgtagatagttggttgaatggaagaaattgttgttgctgatagtagggagaaaggtttgccagagctacttggttgatcacaggtagcacgagttgctgcagctgctgtgccttgatggtttgtaccaatgactgcaccaa

SEQ ID NO: 8287 - DNA, 488 bp, Zea mays
  Clone ID: LIB3061-090-Q1-N6-D11
atcgagataaatctcaatcaatatattgattatttctaggaaacacacgtcggtatgagggcaccattatcgagtacatctcatatgtaatctaaaagaggcacctccaacgatgggttgctgcctcgacaagacaggattcatcaaagagaactggttgtatggcagcaattgttgctgctgtaggaaggcggcgaccaatgggttagccactaccaatggattaagtaactgttgtcgctgttgtaggtacgcagcagagttcgacagagtcagttggttgaatggaagcagctgttgcaagtaggcaacagggtttgccacagctagttgagtcagagctggtacaatctgttgcaacaattgttgttgcaggtatgtaggtgcattgcccacagcgagcgggctagatgaaagcagttgttgttgttgtacgtaggcggcagggttcaccatggctagttgactgagcgttggcagaaactgtt

SEQ ID NO: 8288 - DNA, 554 bp, Zea mays
  Clone ID: LIB3061-090-Q1-N6-D12
ggtgaacgagcaggcatttttattcgaagcaaaagtgcagccaattcccaccatactaggaaccaggccagcgctgcccaaaaacgctcaaacaaggaaaaaaacgagaaggaaccaaagttcttggaaaccaagtacacataactccaatacacgactaacaatgcgaattgcggtgaaacagatcgaaatgcaggcgatggttctccggcctgggcttcttcttcttcttctttccccgtactaatcgaaggacagcggaacctggcttgccaggctacggtacttcagggcgtagaacatctcgatgtagcggcgggtctcgcgcctctccaggttgctcacgtacttccagaacccgtacacgccggtcagggtcatcagcctctcggagtagagcttccaggtgtacttctcatagattctctgcaggccgccctgtgagatcttgtcccagtagctcggatctgccttgcatttgtcaaagaagttgaccaggatatccgcggccttgtcgctgtggtaagggtcaatgtgcaggccagataccccgt

SEQ ID NO: 8289 - DNA, 529 bp, Zea mays
  Clone ID: LIB3061-090-Q1-N6-D2
gttgtataaacctattaaaaggttaaaacgtttaatttggaacaatacttttcttatcatttcaattgttcattcaggtcattgctcacactgacactgccacccatggtgatgcgtgacacattattactcaatcatcgccgctaaatgactcaactagctagctagccagcggctatactacagcacatagtttcttcagtgggggacaccgccggcagcagcgtaggggcatggagtcggctgctgcaggccgcacatcgccgtcagttgctgcgctatctgcgccgccaacagccccgcgacctggccgctttgtggctgctgctgcaggatggactggaggaccaagccgaagatcgcctggtaccggtgctgcggctccacctgcctgagctgctggcaacactgctgccgcaacgactggcactgaggcgagcagtagggcgtcgccgttcggcttgactgatgccttaaaaactcgactcactgccccaggatccgggtgctgtcaacaccccaagtttcc

SEQ ID NO: 8290 - DNA, 492 bp, Zea mays
  Clone ID: LIB3061-090-Q1-N6-D5
gatcaacatatccggagaaaccaatactcgttcaaacagtctttgcgtttactagtattgcacaaataaattattgagcatcatacatgtaccggtccattaatttgatgtccatacctatgacgtttgctcaaatcggacatacataatgtcagcaccaaagctatcggaagcaccaaaaagatcggctagatatcctatgaagaatgaagcgcatggtgttcttccacagcttagcgctttgtactgcctggacgagcggggccaaaatagttcgtcaccagacccataacagcaaacatgaaggccatagaaagctgcttcagatcgttctcaaagttcttcatgtttgccaacgactgagcgcagaagatgattgcgatccacgagcacaccttgtagcggagcatgacgccgaggacgccgaagacgacggcgaggaagcctggatagtcgatgggtaggtcctggggcgacagcttcggcggcgcg

SEQ ID NO: 8291 - DNA, 423 bp, Zea mays
  Clone ID: LIB3061-090-Q1-N6-D6
ggaattgcaaaactcctattatgacgacgctaaaactgtgcagttcatcagcctttacaattacagccaagaaaagaaaatgaaaaaacaaaacctaggaaatagtcggctgctcggcgtccaaaaccttttctttaagcaaacaccgcattggttgcaaaactgcacttggtgtgccactgtgccttgtgaaatgagatgacctcctctgctcaggcggctggcagctgcagccgcaagccgatgaggctcgacgcggcgctcaagccgctcgagtcgcagcacgacagcctcggctgctgcctgacgactggctcgaagccgagcgtgagcttcagcctgaccttctttcccttctggtccgccaccagcgcctggctctggctgctgacccgcggcttggccttggcctggctcacgtgg

SEQ ID NO: 8292 - DNA, 552 bp, Zea mays
  Clone ID: LIB3061-090-Q1-N6-D7
aatctcaatcaatatattgattatttctaggaaacacatgtcggtatgagggcaccattgtcgagtacatctcatatgtaatctaaaagaggcacctccaacgatgggttgctgcaaggcagggttcatcaaagagaactggttgtatggcagcaattgttgttgctgctgcaggaaggtagcgaccaatgggttagccactgccaatggattaagtaactgttgtcgctgttgtaggtacgcagcagagtttgacacagccagttggttgaatggaagcaactgttgtaagtaggcagcagggtttgccacagctagctgagtcagagctggtacaatttgttgcagcaactgttgttgtaggtacgtaggtgcattgcccaccgcgagcgggctagatgaaagtagttgtaggtagacggcagggttcaccatggctagttgactgagcactggcataaactgttgcagctgttgttgttgctggtatgcagctaccttcgccagaacaagtgggttggatgcaagcaactgctgttgcaagtaggtgac

SEQ ID NO: 8293 - DNA, 372 bp, Zea mays
  Clone ID: LIB3061-090-Q1-N6-D9
gggccaggattgcacaaaacccgtttttgggggggggaagcaaaacggggggaaagacgtttcggcaggaaagggtaaaagggggggggcggggcgggacacgtggagggagaaaacactttcactggggggaatttaaaacccgcaggggttgcaagaacccaagcattttggggagggcggggggcacaaaccccttggccacatggggggggcgaaaacggtccctccacccgggcaaaaaaggggttcgggccggggaaaaaagccccctccccaaaattctggcgaggggcccaaaacaaccgagggaccccccgaaaaaggggtccacaaaacccattttttcccccccaaaaaaaggcccccccc

SEQ ID NO: 8294 - DNA, 530 bp, Zea mays
  Clone ID: LIB3061-090-Q1-N6-E1
ggagaatgataagcttgagggctctttctgttccttggttatcatggcagttacccattaaaaacctattgcatatgaactgttgcaacaacagaccagcggaaggttcgaattttgtttcatcatctaatacgatcacagcatgaatgacataattatagggatggctcatgcaatccttctcaattgccagtgtcattatgcatgaggattagggctacttggacttagttgatttctttttctttttttgccgcaattcatcattacttgcgatatatgattcagctatgacactctcctgggcctcgttctttctaaattccttcgcctttctctttaatgacttcgctatatcggctatctcactgttgtcactggcattcttgtcagatttggatggacctgcagtgttctcctttggaggaacaaatgcagcctctctttttcttttattttcttcagctctcccaaattgcttgtccagcttctcttgccatttctttgctgatttctttttgtcactcatg

SEQ ID NO: 8295 - DNA, 572 bp, Zea mays
  Clone ID: LIB3061-090-Q1-N6-E11
cacattaaaatctggaaatgtaacttcttatttctggttggccacatacatcatccaaaaactttattattgaattacaactaataagcaatctaaaaggggcaccaccaatgatgtgttgttggtaggaggccgctcggtctgtcaaagcaagttggacaaagggcaacaattgttgtagttgtaagagggttgcggggttagccgcaaactgctggtagaaaggcagcaactgttgctgtgtcaagaaggaagcacggtttgctgcagctagctggctaaatggtagtagtatttgctgctgcaaataagcagcggggttcagtgcggccaattggttaaatggaagaagttgttgttgctgagagtaggcagtagctagctggctgaatggtaatagttgttgctgcaaataagcagcagggttcagtgtagacagttggttgaatggaagaaattgttgttgctgagagtagggagaaaggtttgccagagctacttggttgatcacaggtagcacgagttgctgcagctgctgtgccctgatggtttgtaccaatgactgcaccaaa

SEQ ID NO: 8296 - DNA, 449 bp, Zea mays
  Clone ID: LIB3061-090-Q1-N6-E2
gcttaaacggttgtccattatttttctcatgtactgtaaaatgagttattactggccaaatcacctcgcatctaccagtgtgctctcaagggaaacaaacattcggtccacacccagaaatataaaatgttcatcaaagacaaaagatagattctgcagaagaacaaaaaagagaaacatgtgctagcagagggacccctgcgccactctacttttcagttctcctgcttcatttatcttcattgctgtctgttattattggacttgttgggcctgcgccaatgacccatacaagtttgttctttctcggcaagccttcatcagaatcgcttcaggcgtgccaaatcattgatcacttcgcttgggccgctggtggctcacctgcagctcttggatcctcatccgtacatgccacttgcagtgctggagtatagaagcttatgaacgga

SEQ ID NO: 8297 - DNA, 473 bp, Zea mays
  Clone ID: LIB3061-090-Q1-N6-E5
acaccaaacgagatctgatttttcgcttcaaagaagttgtttgcatgtacatatacagccgcaaaattacaaggattatgcaggtaaagaaaaggaagttggtatcccagaaaagctccatttcgtttaacaagtgaggagagtggagtaaagtttccaggtagtcctgatgtaaagtttccagtagcaagcgatttcttcagctcttgacgacaatcactcggcatggttgctactttggtggacgacgatcggtgtacatgtcctgaatattttctttgatataattggctgttttgtttagattcttcgcaacacctgaagcgaccagtccagcgctcctcttaaacctgtccaagaattcctgcctcgacaagttctgaggtctctgttgtccttgttggtgagagcggatggtagctgctgcatcctttgcaacatgtgctggagcttgttcagttgccgatggcttt

SEQ ID NO: 8298 - DNA, 228 bp, Zea mays
  Clone ID: LIB3061-090-Q1-N6-E9
aaccttataacttgcgatgtaaaaacggaatatcaaaagtgctaaaacagagaaagtttcgcctgtaaaaacggaatatcaaaagtgatttcgcctcgctaagttcccttcttctaaccgaatataaatacggtacccctcagtaagtcctcatctataactcccggcagagtccaacatttgtggttgtccaaaactttcatagcatgccagactgcagccttacac

SEQ ID NO: 8299 - DNA, 369 bp, Zea mays
  Clone ID: LIB3061-090-Q1-N6-F1
gagataaatctcaatcaatatattgattatttctaggaaacacatgccggaatgagggcaccattatcgagtacatctcatatgtaatctaaaagatggcacctccaacgatgggttgctgcctcgacaagacagggtttatcaaagagaactggttgtatggcagcaattgttgctgctgtaggaaggcagcgaccaatgggttagccactgctagtggattaagtaactgttgtcgctgttgtaggtacgcagcagagttcgacataatcagttggttgaatggaagcagcttgtgcaagtaggcaaaaaggtttgccacaactagctgagtcagagcttgtacaatttgttgcaacaaattgttgt

SEQ ID NO: 8300 - DNA, 447 bp, Zea mays
  Clone ID: LIB3061-090-Q1-N6-F10
gggggaaaaacccaaacaaatttttggttttttttgggaaaaccaaccccttttggggggccccttttgggggccccttttttttgtaataaaaaagggggcccccccaccggggggtggttccccccaaaggggggggttaaaaaaaaaaaacggttttttgggaaaaattttttttttttttggaagggccccccccatgggtttccccccccttgggggtaaaaaaaactgtggcccttttggggggcccccaaaaaatttccccccaccaatttgtttaaaggaaatttttttttaaaaaaggccaaagggttttcccccacttgcttgaaaaaaaccgggccaattttgtgcaaaaacctgttttgaaacaaccttttttgccggttttttggggcctttcccaaaagggggggggttaaaaaaaaaaaattttttcttttt

SEQ ID NO: 8301 - DNA, 490 bp, Zea mays
  Clone ID: LIB3061-090-Q1-N6-F11
ggaggaacataggtttgttatttggaacagattacacacttgattggcattccacacgcaaccgatcgatatgacgattatactcctatttattagcaccagctatatatagccatgtctggagtctggagtctggactagcaagcaaccgagatcgatgcatgatacagagatagattcatcggtttgcatgagcatggcttgttgccagccactatgttacacccaccacgcatgtacaaagttctgtatcgtcgcatcgcctccgcctgatgatgatcgatcagtgcagcgccgtcaggacagtagacccttccaccaccttgaaagtggcaccgcagatctcttcttcgtcggcggggacagcggtgaccttgtgcttggggttctcgtagcacttgagccctccgagggcgttggagtagaagcagccttgcgggaacggcgcgagcgacttgccgcatgagcctttgagcatgtcgatgtcgtc

SEQ ID NO: 8302 - DNA, 124 bp, Zea mays
  Clone ID: LIB3061-090-Q1-N6-F3
gttgtgtggtttttttggttgttttttgttgttgtttttttttttgttaaggagtggtttgggggtggggggtaaggagagggtgggagggaggggagggagggggggggggggggaggagggg

SEQ ID NO: 8303 - DNA, 503 bp, Zea mays
  Clone ID: LIB3061-090-Q1-N6-F6
aaccctggtagctagtactggtcgccgccggagaagagctgcactcctggggctccgacagccggcacatcatcggcaaccccgcggcgtactcccgggccttcgtaagcctcacgcggccgatccttggcccggtggtgccgggacgacacggtggatacatctgcgtttggtatccctctcctgcccggctgcaggggtagtagtagcccccctgtcctcctcctcctccctgcggcggcggctgctgctgccgcccccatggccaccagcctttctccagaggcggcatggcctcctcgtagcccctgaccatgctccggatggcggcgcagcggcactcgcggctcacgtcctggagctgctggcagcaccgcatccggagcccggtgccccaccggaaacggccgccgacgccgccgccggttagctgccggtcgaggacctggcggcacgcgtcgagcgggctcttctggacctcctgccagcactgcaggtccctg

SEQ ID NO: 8304 - DNA, 314 bp, Zea mays
  Clone ID: LIB3061-090-Q1-N6-F7
ggggaaaaatctcaaacaaatttttggttttttttgggaaaaaaattgggggttggggggccccttgggggggccctttcatttgtaatctaaaaaaggggccccccaaaaatgggtttttgcaaggggggggttataaaaaaaaactgggtgtttgggaaaaattttttttttttttttaggaagggggcccccaaaggggttgcccccgccaaagggtaaaaaaaatgggggcccttttggggggccccaaaaaagtttggaccaaccccgtgggttaatggaaacaacttgtgtaaagagggaaaaaggtt

SEQ ID NO: 8305 - DNA, 475 bp, Zea mays
  Clone ID: LIB3061-090-Q1-N6-F8
ggaacaatacttttttcttttcatttcaattgttcattcaggtcattgctcacactgacactgccacccatggtgatgcgtgacacattattactcaatcatcgccgctaaatgactcaactagctagctagccagcggctatactacagcacatagtttcttcagtgggggacaccgccggcagcagcgtaggggcatggagtcggctgctgcaggccgcacatcgccgtcagttgctgcgctatctgcgccgccaacagccccgcgacctggccgctttgcggctgctgctgcaggatggactggaggaccaagccgaagatcgcctggtaccggtgctgcggctccacctgcctgagctgctggcaacactgctgccgcaacgactggcactgaggcgagcagtaaggcgtcgccgtcgggctgcactgatgcctcagaaactcgacgcactggcccaggatcggggtgctg

SEQ ID NO: 8306 - DNA, 130 bp, Zea mays
  unsure (1)..(130): unsure at all n locations; Clone ID: LIB3061-090-Q1-N6-G1
aatattaattttttatttaatatttggnataaaaataaagaggaagaagaatatttatgtgggggggggggagagaagattaaaaaaaaagtagatagaggtagaatagaaaaaagaagaaagaaggagg

SEQ ID NO: 8307 - DNA, 555 bp, Zea mays
  unsure (1)..(555): unsure at all n locations; Clone ID: LIB3061-090-Q1-N6-G10
gaaaacgacggaggaaatccatagtgtttggtttggtatgagaggggccaaatttatcatcggattgggggcacaagaggatcagatcatcagacccaanattcagtattcgttcctctgagcccagccaaagccaacacgacgtcgttcgttcccaggatccaaatcctcggtgtttactactactaataataacataaaaatggaaccaaattcctgaagatttctacagcatttggttgaagttggaacacacgagcatttacgcaaccagtcctttttccttttcatcaatcactgagcctcttcttcagcttcggcggcggcaatctctgaatccaagagggagatgaactgctggctcacatgcttggcgacagatatcatgtcgaagatgacgcttggatccagccctgcccctcccctcttggtaagcccgcatatctggccatgcctgttgactgacaccgacactgcagaactcatctgggattcttcctctgaggtggcatcaacgatgtagtgccgacccaccttggttaatgtaataataac

SEQ ID NO: 8308 - DNA, 563 bp, Zea mays
  Clone ID: LIB3061-090-Q1-N6-G11
agaatctagaaatgtactttcttatttctgggaagccacaaacatcagacaaaaaactttattattgaactataactcataagaaatctaaaagagggcaccaccaatgatgggttgttggtagaacactgctaggtttgtcaaagcaagttggttgaatggcagcaattgttgcagttgtaagagggtgccagcgttaggcgcagcgtgctggtagaacggcaacaactgtggttgtgtcaagaaggtagcagggctcacaccagctagctggctgaatggtagtagttgttgctgctgtaaataagcaggagagttcaatgctgccagttggttgaatggaagaaattgttgggggtaggcaacaggtagctggctgaatggtagttgttgttgttgcaaataagaagcagagttcaatgcagctagttggttgaatggaagaaactgctgttgctgagagtaggcagcaaggtttgctagcacaagttgttgtagttgttgtgccctgatgttttgtgccaataaatgcaccaaaggtaactgctgtaatagggctgatg

SEQ ID NO: 8309 - DNA, 347 bp, Zea mays
  Clone ID: LIB3061-090-Q1-N6-G3
ggaacggggctggggcttttattcatataaaagggttcccaaagtccccaaagggagagagagggcgcccccctacaaaacgaacaggcctggctccatagccccggggacaacgttcaaaaaaccaaaacggcaaagcccgcaaaattattcagggcgcaagcaccgggtaattttacagggcgataactggctaccaaaaacccttctcgggagactcgaagaactggggccccatctcccgggaaaccaaaaagcaaaagagtttttttcctttcattccttttgaaaaccgggttcattcgttttttttttcgaacttggccccgtcagcccccccttgaggg

SEQ ID NO: 8310 - DNA, 507 bp, Zea mays
  Clone ID: LIB3061-090-Q1-N6-G5
ggggagcaaacgtagtagtacgtaacatctactggcatcggagtaacaaacagcatggaacagggtagcagacaagctatacatgcacaacagtagcattcaaaattacacgacacaacccccttccccctttccccggttcaccgtcacttcccaaccaacagcaatcaacaccgacatcaggaataactccctctgacgatcaccaagaataattagcgcaggactcaacaacaagacgaccaaaaagagcaaaactccccatggtctttcttctcgccggtgccagggcacaccagccatttgtaagtcacgcccccctcctcacttgctgccgcacttgaagccgtggcacaccgacaggatgatgatgaggatcagcgcgatgatgatgcccaagacgatcagcttgatcttcatgttttggagccacatcttttgccgcacgttggtgccctgctgtctgaaaacctgtgcctgagaacccagattttccggacccgtggg

SEQ ID NO: 8311 - DNA, 557 bp, Zea mays
  Clone ID: LIB3061-090-Q1-N6-G6
agaaagtactttcttatttctgggacgccacaaacatcatccaaaaaacttcattattgaactataactcataagcaatctaaagggggcaccaccaatgatgggttgttggtagaacactgttgggtttgtcaaagcaagttggttgaatggcagcaattgttgcagttgtaagagggtgccagcgttaggcatagcgtgcaggtagaacggcaacaactgttgttgtgtcaagaaggcagcagggctcacatcagctagctggctgaatggtagtagttgttgctgctgtaaataagcagcagagttcaatgctgctagttggttgaatggaagaaattgctgggggtaggcagcaactagctggctgaatggtaattgttgttgcaaataagcagcagagttcaatgcagccagttggttgaatggaagaaactgatgttgctgaaagtatgcagcaaggtttgctagcacaagtttgttgtaattgttgtgccctgatgttttgtgccaccaatgggcccaaagtaactgctgtaatagggctgacggttgtt

SEQ ID NO: 8312 - DNA, 414 bp, Zea mays
  Clone ID: LIB3061-090-Q1-N6-G7
aaccacataatgggatcttcaaagctcaggtcacagacacacaggttcacattttgttccaaaaactttcatccaggcccagagcagttttcaaataacataaaacctctatcacataatcattggtggcaaaaacaaaagagatgaggaaaaggcggtcccacaaccatcagatgaccgggaagagtctagtcgatctcctggaaagaggcgccggtggcggcgccaccagcggggggtgcagcgacctcttcggcagtaaacttgcccttagccttgtcgggggcgcggccccgggccttgcggtcgaggagagccttacggtccttgtcgagcttcaacttggtgaccaacactttggagggggggatgcccacgttcacggggggaccgttcacctttttccgggtgatc

SEQ ID NO: 8313 - DNA, 525 bp, Zea mays
  Clone ID: LIB3061-090-Q1-N6-G8
atctcctataggaacccgtcataccaaggttcactgcatacataattcatcacaacttgctgtacataattgtttgaatcaaccatctagaccgtctaccatcaaattaaaaaaaactccctaatcattgtgcagttgaaagcaatagttgctagtatcggagtaacggaagggatggcaatgttgctgtgaatctgaaagttgctgactacgtatatatgcacattcatacatcaaaacctggcatcgcaaactgtgacgcaaatgcctcaacctgatttcggagttctataacatcattattgttctgtaggcctcttagaaactccttttgcactttgccatgttctttcagaacattgttagcaatttgagtagcccttatgaggaagtctgcaatcacctcgaagtcctcttctaagcaacctctagtagtcattgcaggtgttccaatccgcacaccacctggcgatatcgagccattatctccataaattggtgtcttgttgacaggaatgtggcatg

SEQ ID NO: 8314 - DNA, 518 bp, Zea mays
  Clone ID: LIB3061-090-Q1-N6-G9
aagaatctagaaatgtactttcttatttctgggacgccacaaacatcatccaaaaaacttcattattgaactataactcataagcaatctaaagggggcaccaccaatgatgggttgttggtagaacactgttgggtttgtcaaagcaagttggttgaatggcagcaattgttgcagttgtaagagggtgccagcgttaggcatagcgtgcaggtagaacggcaacaactgttgttgtgtcaagaaggcagcagggctcacatcagctagctggctgaatggtagtagttgttgctgctgtaaataagcagcagagttcaatgctgctagttggttgaatggaagaaattgctgggggtaggcagcaactagctggctgaatggtaattgttgttgcaaataagcagcagagttcaatgcagccagttggttgaatggaagaaactgatgttgctgagagtatgcagcaaggtttgctagcacaagttgttgtagttgttgtgccctgatgttttgtg

SEQ ID NO: 8315 - DNA, 563 bp, Zea mays
  Clone ID: LIB3061-090-Q1-N6-H11
aacttgcaaacctcagtatatctattcaagatgcatgcgggtacagttgcagggtttaattaattaggaccctagcttatataaagcatgtctttttggtatctgtacttgatataattaataaaaaaatacaagtaaatgtcatcccctggatctcttcattttcacaatgaagtcatcgtcgtcgtcgtcactgtaatcaactcttctctttgccttggaatccataatgcctggcttcttggaactttcaggtttattatcttttctcactgcacaagacttgattggggtacccatcctcacttgctgctgccgcttttgcttcctttcatatgccttccttgctctctcaggagacaacataccatgctccatcaaccagaattcagccatctcactggaggggatctgcttggacagtgactcgtagaaaatcctgagaggctccctctcctccggaggatcgaacttctggccgggcaaggagtagaccttcttgtcggccttccctctacctctacctctgctgctgctggtggtggttccacgcttggtagctg

SEQ ID NO: 8316 - DNA, 561 bp, Zea mays
  Clone ID: LIB3061-090-Q1-N6-H12
aaaaaatagcttattctattagtaagatttcaattcctcaaaatgaaaggaacaaacgggacctaattgaataccacatacacctattaattcaacagatataggaaactcggtacaaattctaacaattcaacttggatccttgcaaccgaaaaaaataaaaccctacaacacaaaatcaaacccttcacccctattcttcatttctcctaaccaaaatcaccgagacaaacacttgaacacaagcgtgtactctgtgctccctccgtttctgctacaccccttgtcttctttgttggattacttcggtcagataatttgaggaagaggaggaacagtggtgccaactgtcgacagctgatttggtaaatgggagaccacgtcgaaatcatgccttccatgtgatgcaccatccagcagatctgttcacctcgtatgcacatccctgtcgcctccaggcatgccatgtttgacagggcatgggctaagcaatgggattgtggcttctatgatgttatggaacagagttgatattgaggaatggtcatgtcccaattttac

SEQ ID NO: 8317 - DNA, 481 bp, Zea mays
  Clone ID: LIB3061-090-Q1-N6-H3
aagaatctagaaatgtactttcttatttctgggaagccacaaacatcagacaaaaaactttattattgaactataactcataagaaatctaaaagagggcaccaccaatgatgggttgttggtagaacgctgctgggtttgtcaaagcaagttggttgaatggcagcaattgttgcagttgtaagagggtgccagcgttaggcgcagcgtgctggtagaacggcaacaactgtggttgtatcaagaaggtagcagggctcacaccagctagctggctgaatggtagtagttgttgctgctgtaaataagcaggagagttcaatgctgccagttggttgaatggaagaaattgctgggggtaggcagcaggtagctggctgaatggtagttgttggttgtgcaaataagaaagcagattcaatgcagctagttggttgaatggaagaaactgctgttgctgagagtaggcaacagggttgct

SEQ ID NO: 8318 - DNA, 192 bp, Zea mays
  Clone ID: LIB3061-090-Q1-N6-H6
gggggaaaaaaatttttttttttgggggggggctttttttttgcccaaaaaaatttttttttgatttcacatattaaaaaaatttaaaaaggggccccccaaaaatttttttttgggaaaaaaggttttgggtttttaaaaaaagggttgggaaaagggggcaaattttgggatttttaaaaaggggtgggg

SEQ ID NO: 8319 - DNA, 196 bp, Zea mays
  Clone ID: LIB3061-090-Q1-N6-H7
gggaacaaaactttttttttttaatttaaaatggtcattagggggattggttaaactgacccttccccccaggggggggcggggcaaattttttctaaaaaattggcctttaaagacttaaataggtggttgggcggggggtttaatacaacaaaaattttttttagggggggaaacccccggcagaaaatatggg

SEQ ID NO: 8320 - DNA, 511 bp, Zea mays
  Clone ID: LIB3061-090-Q1-N6-H8
ggaacaatacttttttcttttcatttcaattgttcattcaggtcattgctcacactgacactgccacccatggtgatgcgtgacacattattactcaatcatcgccgctaaatgactcaactagctagctagccagcggctatactacagcacatagtttcttcagtgggggacaccgccggcagcagcgtaggggcatggagtcggctgctgcaggccgcacatcgccgtcagttgctgcgctatctgcgccgccaacagccccgcgacctggccgctttgcggctgctgctgcaggatggactggaggaccaagccgaagatcgcctggtaccggtgctgcggctccacctgcctgagctgctggcaacactgctgccgcaacgactggcactgaggcgagcagtagggcgtcgccgtcgggctgcactgatgcctcagaaactcgacgcactggcccaggatcgggggtgctgccaacgcccgcagttccctgcagctggcacgggct

SEQ ID NO: 8321 - DNA, 591 bp, Zea mays
  Clone ID: LIB3061-091-Q1-N6-A10
cacgcgttctttaacttggttccttttaaacggccgccctttttttttttttttttttttttttttttttttttttttttttttttgagaacttaagcaggggctttatcaaatgattagagcacaatcaacactttggtaacacttttgcccattcagtgacactttagttttggcatttacattaccaacatttgaaaggaaattaggagcaaaatgggagcaccttagccttaaaggcagccacacaggcgacatgggattttttccataaacctcctttgatacatttgataaccgcacttccaggttgaaacacagcttaagagcagcattaaaaactgctgaccgtccttttatttggtctttgattcaaaaccattccaacctttgggcttggagcttgttgcccttgaaacaatttttttgcaatctcataaaatatttcattcacattgattgcagttttagcaaatgttttcattaaaaaaagcccatttttcttagcatacccctttgctttcttttgttgcaccttccttgcatttagcatattaacctttttttcagcaagagccctattgttttttt

SEQ ID NO: 8322 - DNA, 442 bp, Zea mays
  Clone ID: LIB3061-091-Q1-N6-A9
ttttgggtgtttctagaaagtctttcttttttgggagcccaaactcagataaaaaactttttttgaacttaactcataagaaactaaagggggcaccaccaatgatgggttgttggtagaacactgctgggtttgtgaagagcaagttggttgaatggcagcaattgttgcagttgtaagagggtgccagcgttaggcgcaacgtgctggtagaacggcaacaactgtggttgtgtcaagaaggtagcagggctcacaccagctagctggctgaatggtagtagttgttgctgctgtaaataagcaggagagttcaatgctgctagttggttgaatggaagaaattgttgggggtaggcagaaggtagctggctgaatggtagttgttgttgttgcaattaataagcggagttcaatgaacccagttggtttgaatggaaag

SEQ ID NO: 8323 - DNA, 594 bp, Zea mays
  unsure (1)..(594): unsure at all n locations; Clone ID: LIB3061-091-Q1-N6-B2
gcacgcgttctttaacttggttccttttanacggccgccctttttttttttttttttttttttttttttatcgaggtaaatctcaatcaatatattgattatttttaggaaacacatgccgctatgagggcaccattatcgagtacatctcatatgtaatctaaaagaggcaccaccaacgatgggttgctgccacgacaaggcagggttcatcaaagagaactggttgtatggcagcaattgttgctgctgtaggaaggcagcgaccaatgggttagccaccgctagtggattaagtaactgttgtcgctgttgtaggtacgcagcagagttcgacacagtcagttggttgaatggaagtagttgttgcaagtaggcagcagggtttgccacagctagctgagtaagagctggtacaatttgttgcagcaactgttgttgcaacaactgttgttgcaggtatgtaggtgcattgcccatagcgagcgggctagatgaaagaagtgttgctgttgtaggtaggcgatagggttcaccatggctagttgactgagcgctggtagaaactgttgcaactgttgttgttgttggtat

SEQ ID NO: 8324 - DNA, 405 bp, Zea mays
  Clone ID: LIB3061-091-Q1-N6-B5
ggaaagtaacttttttatttttggttggccccattcattatccaaaaaactttatttttgaattacaactaataatcaatctaaaaaaggcccccccaattatttttttttggtaggaggcttcttggtttgtcaaaacaagttggacaaagggcaacaattgttttatttttaaaaaggttgcggggttagccccaaactgcttgtaaaaaggcagcaacttttgctttttcaaaaaggaagcaccacttgctgcagctagctcgctaaatggcagtagtatttgctgctgcaaataagcaacggggttcaatgcggccaattggttaaatggaaaaatttttttttcttaaagttggcagtaactagcttgctaaatggtaatagttgttgctgcaaataaac

SEQ ID NO: 8325 - DNA, 529 bp, Zea mays
  Clone ID: LIB3061-091-Q1-N6-B6
ctcaacagcaatcggccaatatttcttatttggaaaacacctttcccccctctccataacaaagtatagcaatcaaatcaaacggaccccatttttgacacattaacctgaagattttaataggattcactttggttattagattcagacataaccaagctgtcgttgcccccaacggaatttacggtcgccgccgcgagctcccatgcctcgagcttggacacctccaccgtgccgctgccattgttgaacacgaacatgtggctgttgctcgtctccgcgtgctcagggtacactcgagccgtgatgcacatccgcccgtcagctccgaagagtctccaccaccgagtgatcaatcagggttctcaaattgatggtctcgtgctcctcaacgtcgacgtccacgaatcctccgtatggcggcttgtacacgcctgccctcgtggacgaccttgtcaggtcagtgcacatgagaagcttgtacctgccatggtacctgaacgcgcggaagaaacagcggtgtgctcgc

SEQ ID NO: 8326 - DNA, 348 bp, Zea mays
  unsure (1)..(348): unsure at all n locations; Clone ID: LIB3061-091-Q1-N6-C1
agaaatgtctttcttatttntgggaagccacaaactcagacaaaaaatttattattgaactataactcataagaaatctaaaagagggcaccaccaatgatgggttgttggtagaacgctgctgggtttgtcaaagcaagttggttgaatggcagcaattgttgcagttgtaagagggtgccagcgttaggcgcagtgtgctggtagaacggtaacaactgtggttgtattaagaaggtagnagggcttacaccagctagctggctgaatggtagtagttgttgttggtgtaaataagcaggagagttcaatgcttgcagttggtttaatggaagaaattgttggggg

SEQ ID NO: 8327 - DNA, 526 bp, Zea mays
  Clone ID: LIB3061-091-Q1-N6-C8
ctagaaagtactttcttatttctgggacgccacaaacatcatccaaaaacttcattattgaactataactcataagcaatctaaaagggggcaccaccaatgatgggttgttggtagaacactgttgggtttgtcaaagcaagttggttgaatggcagcaattgttgcagttgtaagagggtgccagcgttaggcatagcgtgcaggtagaacggcaacaactgttgttgtgtcaagaaggcagcagggctcacatcagctagctggctgaatggtagtagttgttgctgctgtaaataagcagcagagttcaatgctgctagttggttgaatggaagaaattgctgggggtaggcagcaactagctggctgaatggtaattgttgttgcaaataagcagcagagttcaatgcagccagttggttgaatggaagaaactgatgttgctgagagtatgcagcaaggtttgctagcacaagttgttgtagttgttgtgccctgatgttttgtgccaccaaatggacca

SEQ ID NO: 8328 - DNA, 470 bp, Zea mays
  Clone ID: LIB3061-091-Q1-N6-C9
agaaagtactttcttatttctgggaagccacaaacatcagacaaaaactttattattgaactataactcataagaaactaaagggggcaccaccaatgatgggttgttggtagaacgctgctgggtttgtcaaagcaagttggttgaatggcagcaattgttgcagttgtaagagggtgccagcgttaggcgcagcgtgctggtagaacggcaacaactgtggttgtatcaagaaggtagcagggctcacaccagctagctggctgaatggtagtagttgttgctgctgtaaataagcaggagagttcaatgctgccagttggttgaatggaagaaattgctgggggtaggcagcaggtagctggctgaatggtagttgttgttgttgcaaataagaagcagagttcaatgcagctagttggttgaatggaagaaactgctgttgctgagagtaggcagcaaggtttgct

SEQ ID NO: 8329 - DNA, 542 bp, Zea mays
  unsure (1)..(542): unsure at all n locations; Clone ID: LIB3061-091-Q1-N6-D5
gaaggcanaacttgttcatttaacaaagcaccggtctgcctttggctcacaccacagttggctgttggcccctgttctcttcttccgatcctttcacacgcatcacccttattgcagcagcgagcagcctcggctcactgcctggtggtggtaccggtggtggctgcgttgctcgctcacttcacagccaccgcagcaccggcgatcgccgtgccgtcttccccgccggcgttgtcggcggtaccggtacgggcgatcagcgactcctcgcggtggaaccaggtctgctgcttcgcgatgaacgcctccaccgccagccggaacgcctctgcgtcgtccatccccagctccaccggcgccgccgccgccgccgccgccgaacgtcgttgccggcgcctgccgctctccgacttggcacgccgcagctccgccgacgccgccctcgccgtgccgcccgctgcgccgccggtcttctccgacatggcccgccgcggcggctgggcgcgcactgtcctcgcgtggtgcgccgcctccttgccgtc

SEQ ID NO: 8330 - DNA, 532 bp, Zea mays
  Clone ID: LIB3061-091-Q1-N6-E4
accccgaaaatgaacatgacctcacattgagttgagtttgctgctctcttctacgattatagagaaaaacctcactgtatcctcagctcagaattcgtctttccgaggaagcaattctttttcatcagtcaaaaatttgcatggtattatttccagaaagcacaaaacagtcggcgggaaagcactggtaagtaactttatatgtcaagcagcaacctcctggggtcctcaacgacatccttgatgcgacggaggaagaatacagcctctctgccatcgatcagcctgtggtcatatgtcagcgcaaggaacatcattggccttgcgagaatgtcaccattcacaaccacagggcgttgcacaatggaatgcatccccagaattgacgactgtggggggttgatgataggtgtgctgaggaggcttccatagacaccaccattggagatagtgaatgttcctcctgccatgtcatcaatcgagagcgccccctcatttgccttctttgcaaggttgtttatccctttctcaa

SEQ ID NO: 8331 - DNA, 527 bp, Zea mays
  Clone ID: LIB3061-091-Q1-N6-E6
agaaagtactttcttatttctgggaagccacaaacatcagataaaaactttattattgaactataactcataagaaatctaaaagagggcaccaccaatgatgggttgttggtagaacactgctgggtttgtcaaagcaagttggttgaatggcagcaattgttgcagttgtaagagggtgccagcgttaggcgcaacgtgctggtagaacggcaacaactgtggttgtgtcaagaaggtagcagggctcacaccagctagctggctgaatggtagtagttgttgctgctgtaaataagcaggagagttcaatgctgctagttggttgaatggaagaaattgctgggggtaggcagcaggtagctggctgaatggtagttgttgttgttgcaaataagaagcagagttcaatgaacctagttggttgaatggaagaaactgctgttgctgagagtaggcagcaaggtttgctagcacaagttgttgtagttgttgtgccctgatgttttgtgccaataaatgcaccc

SEQ ID NO: 8332 - DNA, 505 bp, Zea mays
  Clone ID: LIB3061-091-Q1-N6-F11
ccaacagagtataatctatcgttctgaaatccaaaaggagattcaaatttacatccactagactcaaaacagagactctttgattgtaggagctgatccactcattctatatctgtgttatcctctttgctgctgccgcttgtgctgctactgcattgctcatcttccatccgtggaaggccagagaacaggtttacgggccatgaggctgattgcgttgggtaccttgcctgtggtcgtgccacatggttgggagctttgtggtcttcacacggctcatggccttcggcagatgccacttctggaaagagcttcagttcgagtggtggtgcggcatgaggtggtttggtcattgctgatggtgccagtggctgctgcaacgggaatacaacgcttgcaatggtgggtggttgcatcgcctgctccgacgagaacactgccgttgagtgaggaagagggggatctgatctggcggtgccatggccccaacctgctggactgcctg

SEQ ID NO: 8333 - DNA, 504 bp, Zea mays
  Clone ID: LIB3061-091-Q1-N6-F2
gggaaagtaacttcttatttctggttggccacatacatcatccaaaaaatttattattgaattacaactaataagcaatctaaaagaggcaccaccaatgatgtgttgttggtaggaggccgctcggtctgtcaaagcaagttggacaaagggcaacaattgttgtagttgtaagagggttgcggggttagccgcaaactgctggtagaaaggcagcaactgttgctgtgtcaagaaggaagcacggtttgctgcagctagctggctaaatggtagtagtatttgctgctgcaaataagcagcggggttcagtgcggccaattggttaaatggaagaagttgttgttgttgagagtaggcagtagctagctggctgaatggtaatagttgttgctgcaaataagcagcagggttcagtgtagacagttggttgaatggaagaaattgttgttgttgaaagtagggagaaagggttgtcagagcttcttggtttgtcacaggtag

SEQ ID NO: 8334 - DNA, 356 bp, Zea mays
  unsure (1)..(356): unsure at all n locations; Clone ID: LIB3061-091-Q1-N6-G2
atcgagataaatctcaatcaatatattgattatttctagggaacacacgttggtatgagggcaccattatcgagtacatttnatatgtaatctaaaagaggcacctccaacgatgggttgctgccttgacaagacaggattcatcaaagagaactggttgtatggcagcaattgttgctgctgtaggaaggcggggaccaatgggttagccactaccaatggattaagtaactgttgtcgctgttgtaggtacgcagcagagttcgacagagtcagttggttgaatggaagcagctgttgcaagtaggcaacagggtttgccacagctagttgagtcagagctggtacaatttgtt

SEQ ID NO: 8335 - DNA, 445 bp, Zea mays
  Clone ID: LIB3061-092-Q1-N6-B3
ttttttttttttagaaatgtactttcttatttctgggaagccacaaacatcagacaaaaaatttattattgaactataactcataagaaatctaaaagagggcaccaccaatgatgggttgttggtagaacgctgctgggtttgtcaaagcaagttggttgaatggcagcaattgttgcagttgtaagagggtgccagcgttaggcgcagcgtgctggtagaacggcaacaactgtggttgtatcaagaaggtagcagggctcacaccagctagctggctgaatggtagtagttgttgctgctgtaaataagcaggagagttcaatgctgccagttggttgaatggaagaaattgctgggggtaggcagcaagtagctggctgaatggtagttgttgttgttgcaaataaaaagcatagttcaatgcagcttgttggttgaatgg

SEQ ID NO: 8336 - DNA, 412 bp, Zea mays
  unsure (1)..(412): unsure at all n locations; Clone ID: LIB3061-092-Q1-N6-C2
gggagaaaaaaaaccttcaagctttggcaagtgtatgcaacaaaaaagaagaaaaagaaaaagatcaatcatcaatctcagtatacgcatttcgatcgaactccaaacagcatgagcttgagataatctggattacagacgctgctgcacgcaggagaggcctttactaatggttgaaggcagtgcagacttttntgatctctccgtncttccccgtctttacccctagccttcccagcttgagcatggcggggacgaaagcattgaagaagttcttttggctggcggngaacatgttgacaatgggcctggtggtcttgttggcgtaaagcacctggttggaggtgaagagacccaaaccgttctggaggttggggtaataagcgttgttgaacctgatgggggtgacggg

SEQ ID NO: 8337 - DNA, 104 bp, Zea mays
  Clone ID: LIB3061-092-Q1-N6-C6
tttttttttttttttattttttttttttatttcttttttttatttttttttttttttttttttttttttttttttttttttttttttttttttttttttttttt

SEQ ID NO: 8338 - DNA, 308 bp, Zea mays
  Clone ID: LIB3061-092-Q1-N6-D2
aagaatctagaaatgtactttcttatttctgggaagccacaaacatcagacaaaaaactttattattgaactataactcataagaaatctaaaagagggcaccaccaatgatgggttgttggtagaacgctgctgggtttgtcaaagcaagttggttgaatggcagcaattgttgcagttgtaagagggtgccagcgttaggcgcagcgtgctggttgaacggcaacaactgtggtagtatcaagaaggtagcatggctcacaccagatagctggctgaatggaaatagaggaagctggtgtgaataa

SEQ ID NO: 8339 - DNA, 591 bp, Zea mays
  unsure (1)..(591): unsure at all n locations; Clone ID: LIB3061-092-Q1-N6-D4
tcgcatgcacgcgttctgttancttggnatccttctanaggccgcccttttttttttttttttagaaatgtactttcttatttctgggaagccacaaacatcatccaaaaaacttcattattgaactataactcataagcaatctaaaaggggcaccgccaatgatgggttgttggtagaacgttgttgggtttgtcaaagcaagttggttgaatggcagcaattgttgcagttgtaagagggtgccagcgttaggcgcagcgtgcaggtagaacggcaacaactgttgttgtgtcaagaaggcaacagggctcacatcagctagctggctgaatggtggtagctgttgctgttgtaaataagcagcagagttcaatgctgccagttggttgaatggaaagaattgctgggggtaggcagcagctagctgactgaatggtagttgttgttgcaaataagcagcaaagttcaatgcagccagttggttggatggaagaaactgctgttgctgagagtaggcagaaaggttttctagcacaagttgttgtagttgttgtgccttgaagttttgtgcccacaaatgccccaaag

SEQ ID NO: 8340 - DNA, 571 bp, Zea mays
  Clone ID: LIB3061-092-Q1-N6-E10
ggaacaatacttttttcttttcatttcaattgttcattcaggtcattgctcacactgacactgccacccatggtgatgcgtgacacattattactcaatcatcgccgctaaatgactcaactagctagctagccagcggctatactacagcacatagtttcttcagtgggggacaccgccggcagcagcgtaggggcatggagtcggctgctgcaggccgcacatcgccgtcagttgctgcgctatctgcgccgccaacagccccgcgacctggccgctttgcggctgctgctgcaggatggactggaggaccaagccgaagatcgcctggtaccggtgctgcggctccacctgcctgagctgctggcaacactgctgccgcaacgactggcactgaggcgagcagtagggcgtcgccgtcgggctgcactgatgcctcagaaactcgacgcactggcccaggatcggggtgctgccaacgccgcaggttccctgcagctggcacgggcttggatgcggctgttggcacgggcatgggtgtggctggggatgaggctgaggcccgggcggt

SEQ ID NO: 8341 - DNA, 495 bp, Zea mays
  Clone ID: LIB3061-092-Q1-N6-E11
cgggtataatttaaatcatttttggtttttttttgggaaaccatgtcggtttgggggcccctttgtcgggtccatttaatttgtaatctaaagttggcccctccaacgttgggttgttgcagggcagggttcttaaaaaagaactggttgtttggcaccatttgttgttgttgttgcaggaaggtaccacccaatgggttagccactgccaatggtttaagtaactgttgtcgttgttgtaggtccccaccaaattttgccccacccagttggttgattggaaccaactgttgtaagtaggcaccagggtttgccacagttagctgattaaaacctggtccaatttgttgcaccacctgttgttgtaggtccttaggtcctttgcccaccggaggcgggttaaataaaattagttttaggtaaacggcagggttaaccatggttagttgactgacccctggcttaaactgttgcacctgttgttgttgctggttt

SEQ ID NO: 8342 - DNA, 499 bp, Zea mays
  unsure (1)..(499): unsure at all n locations; Clone ID: LIB3061-092-Q1-N6-E3
gaatctggnaatgtaacttcttatttctggttggccacatacatcatccaaaaaactttattattgaattacaactaataatcaatctaaaagaggcaccaccaatgatgtgttgttggtaggaggctgctgggtttgtcaaagcaagttggacaaagggcaacaattgttgtagttgtaagagggttgcggggttagccgcaaactgcttgtagaaaggcagcaactgttgctgtgtcaagaaggaagcacgacttgctgcagctagctcgctaaatggcagtagtatttgctgctgcaaataagcagcggggttcagtgcggccaattggttaaatggaagaagttgttgttgctgagagtaggcagtagctagctggctaaatggtaatagttgttgctgcaaataagcagcagggttcagtgtaaacagttggttgaatggaaaaaaattgttgttgctgaagataggggaaaaaggtttgccaaaactacttgg

SEQ ID NO: 8343 - DNA, 93 bp, Zea mays
  Clone ID: LIB3061-092-Q1-N6-F6
gaatctagaaagtactttcttatttctgggaagccacaaacatcagacaaaaactttattattgaactataactcataagaaatctaacgcag

SEQ ID NO: 8344 - DNA, 494 bp, Zea mays
  Clone ID: LIB3061-092-Q1-N6-G6
gaatctagaaatgtactttcttatttctgggaagccacaaacatcagacaaaaactttattattgaactataactcataagaaatctaaaagagggcaccaccaatgatgggttgttggtagaatgctgctgggtttgtcaaagcaagttggttgaatggcagcaattgttgcagttgtaagagggtgccagcgttaggcgcagcgtgctggtagaacggcaacaactgtggttgtgtcaagaaggtagcagggctcacaccagctagctggctgaatggtagtagttgttgctgctgtaaataagcaggagagttcaatgctgtcagttggttgaatggaagaaattgctgggggtaggcagcagatagctggctgaatggtagttgttgttgttgcaaataagaagcaaagttcaatgcacctagttggttgaatggaaaaaactgctgttgctggagataggcaacaaggtttgctagcacaagttgttgt

SEQ ID NO: 8345 - DNA, 154 bp, Zea mays
  unsure (1)..(154): unsure at all n locations; Clone ID: LIB3061-092-Q1-N6-G9
tttggtttttttttttttttttttnttntnttttttttttttttttttttttttttttttttttttttttttggtttttttgggttttttttttggggttttttgggggaggggcgtgttatttttgggggggcccgcaggccccccgaggaag

SEQ ID NO: 8346 - DNA, 337 bp, Zea mays
  unsure (1)..(337): unsure at all n locations; Clone ID: LIB3061-093-Q1-N6-A3
ggggagggggggggtgggggggggagggggggaggggggtggggggggttgggagggggggggagggggggggggggttatagggtttagagggggagagagagggagggggggggagagtgaggggggaagggaagaggaaaagagagaagagaggtgtagagaaggaggaggagtgaaaaaggaggaaganggaaaagaggaagaaagggaggagagaaaagagaagaagggagaaaaagagaaaaagatagaaaaagagagaaaggagagggaagagaaaaaagtgaaaaaaaaaaaaaaaaaaaaaaaaaaaaaaagaggaaaggagagagag

SEQ ID NO: 8347 - DNA, 126 bp, Zea mays
  unsure (1)..(126): unsure at all n locations; Clone ID: LIB3061-093-Q1-N6-B1
ggggggggggggttaagaaataaatcttaattaatatattgattatttntaggaaacacacgtnggtatgagggcaccatttagagtgctttnattgtaaataaaaaggtattttaagatgggttg

SEQ ID NO: 8348 - DNA, 564 bp, Zea mays
  Clone ID: LIB3061-093-Q1-N6-B10
aagaatctagaaatgtactttcttatttctgggaagccacaaacatcagacaaaaaactttattattgaactataactcataagaaatctaaaagagggcaccaccaatgatgggttgttggtagaatgctgttgggtttgtcaaagcaagttggttgaatggcagcaattgttgcagttgtaagagggtgccagcgttaggcgcagcgtgctggtagaacggcaacaattgtggttgtgtcaagaaggtagcagggctcacaccagctagctggctgaatggtagtagttgttgctgctgtaaataagcaggagagttcaaagctgtcagttggttgaatggaagaaattgctgggggtaggcagcagatagctggctgaatggtagttgttgttgttgcaaataagaagcagagttcaatgcagctagttggtggaatggaagaaactgttgttgctgagagtaggcagcaaggtttgctagcacaagttgttgtagttgttgtgccctgatgttttgtgccaataaatgcaccaaagtaactgctgtaatagggctgatga

SEQ ID NO: 8349 - DNA, 413 bp, Zea mays
  unsure (1)..(413): unsure at all n locations; Clone ID: LIB3061-093-Q1-N6-B11
ccgccctttggggggggtgtttgataaacattagcaagtggtttgagccgtntgtttacaaaatttgccagttgcagagtcgtccattctctctatttaaaactctcttcttttttcaacagctttcaatgaattgcaaatacaggcttttttattaaaggcgggggcgttaattaccaaatccggtacctgtattcaggcgggcactcacagatgcgctgtcgnctaaggtctgcctttaaccgtgcagggctccaaagcaagcacaactgtgtatctcaaagagaaaccaagctcaccatattatcaatcatgcgccaacctggcaacttcgctcgcccttgccaatgtgcaatgcatgcactccctctggcctgatccatgtgacctggtcctcttaaaatggcaatggt

SEQ ID NO: 8350 - DNA, 155 bp, Zea mays
  Clone ID: LIB3061-093-Q1-N6-B3
agaaagtactttcttatttctgggaagccacaaacatcagacaaaaaactttattattgaactataactcataagaaatctaaaagtaggcaccaccaatgatgggttgttggaagaacgctgctgggtttgtaaaagcaaggtggatgaatggc

SEQ ID NO: 8351 - DNA, 237 bp, Zea mays
  Clone ID: LIB3061-093-Q1-N6-B7
aaaggggggggtcatttagggggggggggggatttgaaaataagggtttttgggatgaggggtggaaaagggggaacaacaaagaaaaaatgtggggaaagaggggaagggggatagaaagaggggggggggggagaagcacaccaagaaagagaaggcggtggagggggtcagtaagggagaagaagaaaaaaaagagaaaaaaagaaaagggggggggagagggaggaaatgatt

SEQ ID NO: 8352 - DNA, 402 bp, Zea mays
  unsure (1)..(402): unsure at all n locations; Clone ID: LIB3061-093-Q1-N6-C1
ggggggggggggggggggggggggggggggggggggggggggggggggggggggggggngggngggggggggggggggggggggggggggngggggggggggggggggggggggggggggggggggggggggggggtgggggggggngggggggggggggggggggggggggggggggggggnnggggggggggggggggggggggggggggggggggggggggggggggggcgggggggggggggggggggggggggggggggggggggggggntgggnnngggnggnggggggggggggggggggggggggggggggggggggggggggggggggggggggggggnggggggggggggggggggngggggngggggggggggggggggggcggggggggg

SEQ ID NO: 8353 - DNA, 470 bp, Zea mays
  Clone ID: LIB3061-093-Q1-N6-C11
gtggggtttttttttttttttaggaaagcgaaaaacgaaaactctatgtttaattgacaccttgaaggtcttaaatatatagagaggacaacgcagcgaggatgcatgggcttttcatcatcgattaaagtatcagaaccttattgtggcgtgcatgcatgcatctgccggttttcgaagaaggtttttcctcacattgacagccccacacatgccgcgcagcaacgagtaccccgctatcactccactggagcatagacgacacatgttctgcttggtgtgtaaaccgagaacgaatatggcctattatcatgcgaacagtcggcggtgaagtgctcggctgcgtgatggatcctgctaaatccaccaaatagtccagcgttggggttcaagaccaccttatacaccccaggcttgtcgacaacccaatacggtgtgaaaatagctgtgtggtgctttggaagttggac

SEQ ID NO: 8354 - DNA, 221 bp, Zea mays
  unsure (1)..(221): unsure at all n locations; Clone ID: LIB3061-093-Q1-N6-C2
atagaaaaacacgttaaatttagtaatatataggatgacagatattgttgatccaaagcaggtaatggaaatacaaagggtcataaaaaggtttttttttatttntaggggagnttataacattttattgtggggggaaaaatggtgaagggaaaatattttttntaaagaataaaaaagaaagaaaggttgagtttttgttaagggggtttttccataaa

SEQ ID NO: 8355 - DNA, 393 bp, Zea mays
  Clone ID: LIB3061-093-Q1-N6-C3
aatagcacaatcatgtttattaaaacatgggggcaagcttttcgcaggaaaaagcagatcaaccgcccgtgagtggggaaggcttgatgcaggctctagcacttcacaaaggaatttgcaaacccattctaatatgtctcgacgcagcgaaactgtggtgatggcaaatccgcacaaccatcgatgggcaaacgctcaggctgactatccttttcgggcacactggtttttgcacactttacacaacacccctcctgcagctgatcgaattttcactccacataccctaatttagctgaccaatttttttgtaagcctctttgctggagggatatcgtcagaatttcccaaaaaagtccgacttgccatggtccggcccttgattatgggggg

SEQ ID NO: 8356 - DNA, 438 bp, Zea mays
  Clone ID: LIB3061-093-Q1-N6-C4
aaaaatctagaaagtactttcttatttctgggaagccacaaacatcatccaaaaaacttcattattgaagtataactcataagcaatctaaaaagggcaccacctattatgggttgttggtagaacgctgttgggtttgtcaaagcaagttggttgaatggcagcaattgttgcagttgtaagaaggtgccagcgttaggcgcagcgtgcaggttgaacggcaacaactgttgttgtgtcaagaaggcaacagggctcacaatcagctagctggctgaatggtggtagctgttgcttttgtaaataagcagcaaagttcaatgctgccagttggttgaatggaagaaattgctgggggtaggcagaagttagctgactgaatggtagttgttgttgcaaataagcagcagagtttcatgcaacccgttggttgaatgg

SEQ ID NO: 8357 - DNA, 465 bp, Zea mays
  Clone ID: LIB3061-093-Q1-N6-C5
ctagaaagtactttcttatttctgggaagccacaaacatcagataaaaaactttattattgaacttaactcatagaaactaaagggggcaccaccaatgatgggttgttggtagaacactgctgggtttgtcaaagcaagttggttgaatggcagcaattgttgcagttgtaagagggtgccagcgttaggcgcaacgtgctggtagaacggcaacaactgtggttgtgtcaagaaggtagcagggctcacaccagctagctggctgaatggtagtagttgttgctgctgtaaataagcaggagagttcaatgctgctagttggttgaatggaagaaattgctgggggtaggcagcaggtagctggctgaatggtagttgttgttttttgcaaataagaagcagagttcaatgaacctagtttgttgaatggaaaaaactgctgttgctgagagtagcaacaagt

SEQ ID NO: 8358 - DNA, 537 bp, Zea mays
  unsure (1)..(537): unsure at all n locations; Clone ID: LIB3061-093-Q1-N6-C7
cgctcaaancagcacagtatggtaattaaactgatcaatttacagcatgatgtatccccaaatccaggcccccaatgtcgattcaacatgtaactaacatttgctgctacaacattctaccctacaacattgaaggacacaaaagagcaaaaagaaagaaaaaatgccttggatgacacttttattgctccgatgatctccaacagactgatctgcagatcacgcatgtaaccaggtgctgatcattgtcgaatgtcgagacacacagctgcatgtcgcacgttcacttcatataactgttccactagggagtaaagcatccttgatcactgtgacaattccacctttgatgaagtacccgtctgtctccattgcagcttcttgaacattgtcagcattgagtatcttaacattgtctccaattcgagcattcttgtcaatgattgctctcctgatgcatgaaattttcccaataccaataggaatgccacctttttcggcaaggagttttttatcagcttctgtctcatagtagtc

SEQ ID NO: 8359 - DNA, 395 bp, Zea mays
  Clone ID: LIB3061-093-Q1-N6-C8
gggcgaaataaaaagggtgccaaaccccccccttaataatgcccttactcaaggaaaaacaaggttttggggataaacacaaccaattttgactgttctcggtgggggccccccccccaaaataagacattggttcattttccgcttaatttccaatgaaaatgttttccaaatcccaaatttttattgtttctttttgtcccatgaaatacattttctaaaaaattcggtccccctttttattttttacccgccaatatttcactctaaacaaaaactttgaagttggttttaattattttgggcaaggaaattcccacccctttaaaataaaactttggtttgcttgcttggggggcctttaatttgctctaaaaaggaaaaaaatttttttt

SEQ ID NO: 8360 - DNA, 105 bp, Zea mays
  Clone ID: LIB3061-093-Q1-N6-C9
ggacccaaggtttaaattttattttggcaagttttttattttacaatgttgaagcaaaagttattttaaagtttctgcacaagcatttacaagttttttgggggt

SEQ ID NO: 8361 - DNA, 557 bp, Zea mays
  Clone ID: LIB3061-093-Q1-N6-D10
atatcgaggaaaatctcaatcaatatattgattatttttaggaaacacatgccgctatgagggcaccattatcgagtacatctcatatgtaatctaaaagaggcaccaccaacgatgggttgctgccacgacaaggcagggttcatcaaagagaactggttgtatggcagcaattgttgctgctgtaggaaggcagcgaccaatgggttagccaccgctagtggattaagtaactgttgtcgctgttgtaggtacgcagcagagttcgacacagtcagttggttgaatggaagtagttgttgcaagtaggcagcagggtttgccacagctagctgagtaagagctggtacaatttgttgcagcaactgttgttgcaacaactgttgttgcaggtatgtaggtgcattgcccatagcgagcgggctagatgaaagaagttgttgctgttgtaggtaggcgatagggttcaccatggctagttgactgagcgctggtagaaactgttgcaactgttgttgttgttggtatgcaactacgtttgccaaaacaagtgggtt

SEQ ID NO: 8362 - DNA, 290 bp, Zea mays
  Clone ID: LIB3061-093-Q1-N6-D11
aagatctagaatgtactttcttatttctgggaagccacaaacatcagacaaaaactttattttgaactataactcataagaaactaaaagaggcaccaccaatgatgggttgttggtagaatgctgttgggttggtcaaagcaagttggttgaatggcagcaattgttgcagttgtaagagggtgccagcgttaggcgcagcgtgctggtagaacggcaacaattgtggttgtgtcaagaaggtagcagggctcacaccagctagctggctgaatggtagtagttgttgc

SEQ ID NO: 8363 - DNA, 370 bp, Zea mays
  Clone ID: LIB3061-093-Q1-N6-D3
agaaatgtactttcttatttctgggaagccacaaacatcagacaaaaaactttattattgaactataactcataagaaatctaaaagagggcaccaccaatgatgggttgttggtagaacgctgctgggtttgtcaaagcaagttggttgaatggcagcaattgttgcagttgtaagagggtgccagcgttaggcgcagcgtgctggtagaacggcaacaactgtggttgtatcaagaaggtagcagggctcacaccagctagctggctgaatggtagtagatgttgctgctgtaaataagcaggaaagttcaatgctgccagttggttgaatggaaaaaattgctgggggtaggcagcaagaatctggc

SEQ ID NO: 8364 - DNA, 387 bp, Zea mays
  Clone ID: LIB3061-093-Q1-N6-D4
atctaaaaagtactttcttatttctgggaagccacaaacatcagataaaaaactttattattgaactataactcataagaaatctaaaagagggcaccaccaatgatgggttgttggtagaacactgctgggtttgtcaaagcaagttggttgaatggcagcaattgttgcagttgtaagagggtgccagcgttaggcgcaacgtgctggtagaacggcaacaactgtggttgtgtcaagaaggtagcagggctcacaccagctagctggctgaatggtagtagttgttgctgctgtaaataagcaggagagttcaatgctgctagttggttgaatggaaaaaattgctgggggtaggcagcaggtagctggcctgaaaggtagttg

SEQ ID NO: 8365 - DNA, 471 bp, Zea mays
  Clone ID: LIB3061-093-Q1-N6-D6
gaatctagaaatgtactttcttatttctgggaagccacaaacatcagacaaaaaactttattattgaactataactcataagaaatctaaaagagggcaccaccaatgatgggttgttggtagaacgctgctgggtttgtcaaagcaagttggttgaatggcagcaattgttgcagttgtaagagggtgccagcgttaggcgcagcgtgctggtagaacggcaacaactgtggttgtatcaagaaggtagcagggctcacaccagctagctggctgaatggtagtagttgttgctgctgtaaataagcaggagagttcaatgctgccagttggttgaatggaagaaattgctgggggtaggcagcaggtagctggctgaatggtagttgttggttgtgcaaataagaagcagagttcaatgcagctagttgggttgaatggaaaaaactgctgttgctgagagtaggcagc

SEQ ID NO: 8366 - DNA, 262 bp, Zea mays
  Clone ID: LIB3061-093-Q1-N6-D7
agaactagaaatgtactttcttatttctgggaagccacaaacatcagacaaaaaactttattattgaacttaactcataagaaactaaagggggcaccaccaatgatgggttgttggtagaatgctgctgggtttgtcaaagcaagttggttgaatggcagcaattgttgcagttgtaagagggtgccagcgttaggcgcagcgtgctggtagaacggcaacaactgtggttgtgtcaagaaggtagcagggctcacaccag

SEQ ID NO: 8367 - DNA, 494 bp, Zea mays
  Clone ID: LIB3061-093-Q1-N6-D8
atcgagataaatctcaatcaatatattgattatttctaggaaacacatgtcggtatgagggcaccattgtcgagtacatctcatatgtaatctaaaagaggcacctccaacgatgggttgctgcaaggcagggttcatcaaagagaactggttgtatggcagcaattgttgttgctgctgcaggaaggtagcgaccaatgggttagccactgccaatggattaagtaactgttgtcgctgttgtaggtacgcagcagagtttgacacagccagttggttgaatggaagcaactgttgtaagtaggcagcagggtttgccacagctagctgagtcagagctggtacaatttgttgcagcaactgttgttgtaggtacgtaggtgcattgcccaccgcgagcgggctagatgaaagtagttgtaggtagacggcagggttcaccatggctagttgactgagcactggcataaactgttgcagctgttgttgttgct

SEQ ID NO: 8368 - DNA, 553 bp, Zea mays
  Clone ID: LIB3061-093-Q1-N6-D9
atcgagaaaaatctcaatcaatatattgattatttctaggaaacacatgtcggtatgagggcaccattgtcgagtacatctcatatgtaatctaaaagaggcacctccaacgatgggttgctgcaaggcagggttcatcaaagagaactggttgtatggcagcaattgttgttgctgctgcaggaaggtagcgaccaatgggttagccactgccaatggattaagtaactgttgtcgctgttgtaggtacgcagcagagtttgacacagccagttggttgaatggaagcaactgttgtaagtaggcagcagggtttgccacagctagctgagtcagagctggtacaatttgttgcagcaactgttgttgtaggtacgtaggtgcattgcccaccgcgagcgggctagatgaaagtagttgtaggtagacggcagggttcaccatggctagttgactgagcactggcataaactgttgcagctgttgttgttgctgggatgcagctacgttcgccagaacaagtgggttggatgcaagcagctgctgttgcaag

SEQ ID NO: 8369 - DNA, 514 bp, Zea mays
  Clone ID: LIB3061-093-Q1-N6-E10
agaaatgtactttcttatttctgggaagccacaaacatcatccaaaaacttcattattgaagtataactcataagcaatctaaaagaggcaccaccaatgatgggttgttggtagaacgctgttgggtttgtcaaagcaagttggttgaatggcagcaattgttgcagttgtaagagggtgccagcgttaggcgcagcgtgcaggtagaacggcaacaactgttgttgtgtcaagaaggcaacagggctcacatcagctagctggctgaatggtggtagctgttgctgttgtaaataagcagcagagttcaatgctgccagttggttgaatggaagaaattgctgggggtaggcagcagctagctgactgaatggtagttgttgttgcaaataagcagcagagttcaatgcagccagttggttgaatggaagaaactgctgttgctgagagtaggcagcaaggtttcctagcacaagttgttgtagttgttgtgccttgatgttttgtgccaac

SEQ ID NO: 8370 - DNA, 507 bp, Zea mays
  Clone ID: LIB3061-093-Q1-N6-E11
tgggtgtttttttaaaaatctagaaatgtactttcttatttctgggacgccacaaacatcatccaaaaaacttcattattgaactataactcataagcaatctaaaagaggcaccaccaatgatgggttgttggtagaacactgttgagtgtgtcaaagcaagttggttgaatggcagcaattgttgcagttgtaagagggtgccagcgttaggcatagcgtgcaggtagaacggcaacaactgttgttgtgtcaagaaggcagcagggctcacatcagctagctggctgaatggtagtagttgttgctgctgtaaataagcagcagagttcaatgctgctagttggttgaatggaagaaattgctgggggtaggcagcaactagctggctgaatggtaattgttgttgcaaataagcagcagagttcaatgcagccagttggttgaatggaaaaaactgatgttgctgaaagtatgcaacaaggttttgctagcacaaagttgttt

SEQ ID NO: 8371 - DNA, 409 bp, Zea mays
  Clone ID: LIB3061-093-Q1-N6-E4
agaaatgtactttcttatttctgggaagccacaaacatcatccaaaaacttcattattgaagtataactcataagcaatctaaagggggcaccaccaatgatgggttgttggtagaacactgttgggtttgtcaaagcaagttggttgaatggcagcaattgttgcagttgtaagagggtgccagcgttaggcatagcgtgcaggttgaacggcaacaactgttgttgtgtcaagaaggcagctgggctcacatcagctagctggctgaatggtagtagttgttgcttgctgtaaataagcagcagagttcaatgctggtagttggttgaatggaagaaattgctggggggtggcagcaactagctggctgaatggtaattgttgttgcaaataagcagcaaagttccc

SEQ ID NO: 8372 - DNA, 555 bp, Zea mays
  Clone ID: LIB3061-093-Q1-N6-E5
ctagaaagtactttcttatttctgggaagccacaaacatcagacaaaaaactttattattgaactataactcataagaaatctaaaaaagggcaccaccaatgatgggttgttggtagaacgctgctgggtttgtcaaagcaagttggttgaatggcagcaattgttgcagttgtaagagggtgccagcgttaggcgcagcgtgctggtagaacggcaacaactgtggttgtatcaagaaggtagcagggctcacaccagctagctggctgaatggtagtagttgttgctgctgtaaataagcaggagagttcaatgctgccagttggttgaatggaagaaattgctgggggtaggcagcaggtagctggctgaatggtagttgttgttgttgcaaataagaagcaaagttcaatgcagctagttggttgaatggaagaaactgctgttgctgagagtaggcagcaaggtttgctagcacaagttgttgtagttggttgggcccctgatgtttgtgccaataaatgcaccaaaggaactgatgtaatagggctga

SEQ ID NO: 8373 - DNA, 526 bp, Zea mays
  Clone ID: LIB3061-093-Q1-N6-E6
cagataaaaactttattattgaactataactcataagaaatctaaaagagggcaccaccaatgatgggttgttggtagaacactgctgggtttgtcaaagcaagttggttgaatggcagcaattgttgcagttgtaagagggtgccagcgttaggcgcaacgtgctggtagaacggcaacaactgtggttgtgtcaagaaggtagcagggctcacaccagctagctggctgaatggtagtagttgttgctgctgtaaataagcaggagagttcaatgctgctagttggttgaatggaagaaattgctgggggtaggcagcaggtagctggctgaatggtagttgttgttgttgcaaataagaagcagagttcaatgaacctagttggttgaatggaaaaaactgctgttgctgagagtaggcagcaaggtttgctagcacaagttgttgtagttgttgtgccctgatgttttgtgccaataaatgcaccaaaggtaactgttgtaatagggctgatgattgttgga

SEQ ID NO: 8374 - DNA, 150 bp, Zea mays
  Clone ID: LIB3061-093-Q1-N6-E8
cataatgtatggtactttattgcttaacaccgttttaggagtataacggctaggtagacacaattcttcaattgcaaacaccactaatgtcattgctgctgcatggattattttggtagtttgagtggtacaagccgcacattgatggta

SEQ ID NO: 8375 - DNA, 544 bp, Zea mays
  Clone ID: LIB3061-093-Q1-N6-E9
gattcattaaaaccaaaatttattatgaccatgcatatattattggtcataccacacatgataatgtgtgtcgtcttactgcattattacatatatagatagagagagatggatagaggagatttcccaaatatcatgaatcagtagtagggcggaatggcagcggagaccccacaagggttggtgcggtagctgggcagctggtactggtagagtccacccatggccggcatgttctgcgccatcatcatggccatggggttgagaccctgggctgccagcagctgctgctgctgctgcatcagagctggctcgtacaggctgctgctggcggcagcggcacgctcaagctgcatcatcatctgcagctgctgcgcgacggactgcacgtccatcatcctcatctgctgctggcagcactgttgccggagcggctggaacatggcgctcggctgcccacacccggcgtagtagggcgccgccgccagcgggctgcactgcgggtgcctcaagtactccgcgtaggggtacagcccgccggcgc

SEQ ID NO: 8376 - DNA, 591 bp, Zea mays
  unsure (1)..(591): unsure at all n locations; Clone ID: LIB3061-093-Q1-N6-F10
cgctgccgcgtacttactggtccttaacggccgccttttttttttttttcatttggagcctctttggaatattcaaaanagtttccattaggattaattcactctgaacagggaagatgtggttaacaggccagagatcctgaaaacatctgttctgcctaacgcctaggtaacaaagcaacaagcctgcagcatcttacatcactcgagtctcttctactcttcaggatcaatcaatctccattcaggagatactctcgagccatatgctacccacccattcacacataaatactagtggcgcacacaaaccttgaatcagcagcagcccagccctattctttgttccgggtccctcggtctttcttgtgtcctcccaggatacgggagatctgcagacctctgctgaacgcctggttgaacagcatcctggtctggaattccgacacgaacgggaaccaggcgaggaaggcgatgggcgtgaacaggagaagtcccatcaggatctcgtagccccgggcaagagccttgatcgagccccagagcccagtcttgtggatcacaggccggatcgcttgggcaatcaacagc

SEQ ID NO: 8377 - DNA, 467 bp, Zea mays
  Clone ID: LIB3061-093-Q1-N6-F11
ttggatctttaaaggccgccctttttttttttttttttttttttttttttttttttttttttttttttttttttggggtgacaggttttgttggtccaaaacaggtgatgggaatacaaagggtcataaaaagggttgttggaacttttagggcagctttttacagttcattcttgggggacaaatggtcaaggaacaacattccagacttcccattttgggcccgaacgctcgactttcttttaagcgggttttaccattccaaggtttcacgatccattgttgcaataccattgtaggttcttgttttgttgacgcaaacccagccgattttttttacagacccatcgttgatgggtgctttttttagggtcaccaccatttcagaccttttgttgtacccttttttcgggtgatcagccttttgggttccctttactgttttgtggtcaccaccttttttccaa

SEQ ID NO: 8378 - DNA, 504 bp, Zea mays
  Clone ID: LIB3061-093-Q1-N6-F12
cgctcaaagcacacagtttggtaattaaactgatcaatttacagcatgatgtttccccaaatccaggcccccaatgtcgattcaacatgtaactaacatttgctgctacaacattctaccctacaacattgaaggacacaggagagcaaaaagaaagaaaaaatgccttggatgacacttttattgctccgatgatctccaacagactgatctgcagatcacgcatgtaaccaggtgctgatcattgtcgaatgtcgagacacacagctgcatgtcgcacgttcacttcatataactgttccacttgggagtaaagcatccttgatcactgtgacaattccacctttgatgaagtacccgtctgtctcccttgcgggtttttgaacattgtcagcattgggttttcttaacattggcttcaattccgagcattctttgtctatgattgctctcctggtggcctgaattttttccccattcccaattgggaatgccacctttttt

SEQ ID NO: 8379 - DNA, 286 bp, Zea mays
  Clone ID: LIB3061-093-Q1-N6-F4
gttggggtgtttttttaaaaccaaaacttattatgaccatgcatatattattggtcataccacacatgataatgtgtgtcgtcttactgcattattacatatatagatagagagagtatggatagaggagatttcccaaatttcatgaatgagtggttgggcggaatggcagggggagacgccacaggggttggtgcggtagttgggcaactggttctggtagagttcacccatgtgtcggtatgttttttgttatcatcattgccatagggttgagaccttggtt

SEQ ID NO: 8380 - DNA, 184 bp, Zea mays
  unsure (1)..(184): unsure at all n locations; Clone ID: LIB3061-093-Q1-N6-F6
gcacgcgtacgtaactggaccttagaggcgccttntttttttttttttttttatttttttttttttttttttttttttttttttttttttttggggattgcttttttgttggggaggcgtgtgagggggggggtaaaaggggggggagagaaaagggggggggggggaaaaaacaaaagggggg

SEQ ID NO: 8381 - DNA, 354 bp, Zea mays
  Clone ID: LIB3061-093-Q1-N6-F7
ggaaaggggctttttttttttgggggggccccaaaccttttgcaaaaaaccttttttttgggggtttacccttaagccatttaaaaggggggcccccccatggtgggttgttgggaaaacccttttgggtttttcaaaacaaggtggttgaatgggcacaattgttgccgttttaaaagggggcccgcgtttgggcccccgtgccggttgaacgggaacaactgttgttgggttaaaaagggaacaggggtcacataaactttctggcttaatggggggagctgttttttttgtaaaaaagccgcgaagtttaatgctccccattgggtgaatgggaaaaatatgtgggggggg

SEQ ID NO: 8382 - DNA, 168 bp, Zea mays
  unsure (1)..(168): unsure at all n locations; Clone ID: LIB3061-093-Q1-N6-F8
aaaaccccctttttgggggggggggtagaaaaaaactattcttatttgctggggaagccacaaacattaggcaaaaaatttattattgaactctaactcattagaaatcgaaaagaggcaccaccaatgattgttttttggtngaacactgctatgttttttttgggg

SEQ ID NO: 8383 - DNA, 585 bp, Zea mays
  Clone ID: LIB3061-093-Q1-N6-G11
ggccgccctttttttttttttttttttttttttttttttttttttttttttttttttttttttttttttttagaaatgttcttttttttttttgggaagccacaaacattagacaaaaaacttttttttttaacttttactcataaaaaattttaaagagggggccaccaattattggttgttggtaaaacccttcttggtttttcaaaacaagttggtttaattgcaacaatttttgcaattttaaaagggtgccaacgttaggcccaccgttcttgttgaaccgcaacaactttggtttttttaaaaaggtagcagggcttacaccacctagcttgcttaatggtagtagttgttgcttcttttaataagccggaaagttcaattcttccagtttgttgaatggaaaaaattgcttggggttggccacaagttccttgcttaatgggattttttgttgttgcaaattaaaaccaagtttaatgcaccttttttggtttattggaaaaaacttttttttctttagaattggccacaatgttttcttccccaaatttttttttttttttttttcccctttttttt

SEQ ID NO: 8384 - DNA, 497 bp, Zea mays
  Clone ID: LIB3061-093-Q1-N6-G4
aacagaattccaactggaacggtgtttcgaattaaagcaaattaactctggtactggtacattcgactcgaataggatccaaaatactcacggcaatattactggccacacaaagcagacatatagctatggataaatgggggtggtgcattgcccagccaccaccattgccagcaccccaagaaaaggactgatcggaagtcacgcctagatcttgttgaaggcaactatgttgtagttctgcacgtactcgttcactggctcagcgcacagatagtccttaatgagagttttgacagagacaaggttggttacgatggtgataatgatttgcagcttttttgttccatattcaactggtacaagctttgatgcgccccaagatatacttttcatttggacacttcttaacaaatttcttgaactttggccatgtcagtctaatgggccaaggttttaacttaagtaaaactgatgacttcccatatttttttttt

SEQ ID NO: 8385 - DNA, 478 bp, Zea mays
  unsure (1)..(478): unsure at all n locations; Clone ID: LIB3061-093-Q1-N6-G6
gtaaaaactagaatgtactttcttatttctgggaagccacaaacatcagacaaaaaacttattattgaactataactcataagaaattaaagggggcaccaccaatgatgggttgttggtagaacgctgctgggtttgtcaaagcaagttggttgaatggcagcaattgttgcagttgtaagagggtgccagcgttaggcgcagcgtgctggtagaacggcaacaactgtggttgtatcaagaaggtagcagggctcacaccagctagctggctgaatggtagtagttgttgctgctgtaaataagcangagagttcaatgctgccagttggttgaatggaagaaattgctgggggtaggcagcaggtagctggctgaatggtagttgttgttgttgcaaataagaagcagagttcaatgcaactaggtggttgaatggaaaaaactggttttgcttgagagtaggcatcaaggtttg

SEQ ID NO: 8386 - DNA, 315 bp, Zea mays
  Clone ID: LIB3061-093-Q1-N6-G7
aaatctcaaccaattttttgatttttttttggaaacacatgccggtttgggggccccattttcgggtccattttattttttatctaaaaggatggcccctccaacggtgggttgctgcctcgccaagacagggtttattaaagagaaccggttgtttggcaacaattgttgcttcttttggaaggcagccaccaatgggttagccactgccaatggattaaataactgttgtcgcttttgtaggtccccaacaaaattcgacataattagttggttgaatggaaacaacttttgcaagtaggcaacagggtttgc

SEQ ID NO: 8387 - DNA, 521 bp, Zea mays
  Clone ID: LIB3061-093-Q1-N6-G8
aaaaatgtactttcttatttctgggaagccacaaacatcagataaaaactttattattgaactataactcataagaaactaaagggggcaccaccaatgatgggttgttggtagaacactgctgggtttgtcaaagcaagttggttgaatggcagcaattgttgcagttgtaagagggtgccagcgttaggcgcaacgtgctggtagaacggcaacaactgtggttgtgtcaagaaggtagcagggctcacaccagctagctggctgaatggtagtagttgttgctgctgtaaataagcaggagagttcaatgctgctagttggttgaatggaagaaattgctgggggtaggcagcaggtagctggctgaatggtagttgttgttgttgcaaataagaagcagagttcaatgaacctagttggttgaatggaagaaactgctgttgctgagagtaggcagcaaggtttgctagcacaagttgttgtaattgttgtgccctgatgtttttgtgccaataaat

SEQ ID NO: 8388 - DNA, 260 bp, Zea mays
  Clone ID: LIB3061-093-Q1-N6-G9
ggtgtgtgtgtttttttttttatttttttttttttttttttttattttttatttttttttttttttttttttttttttgtaggttggtctttttccaggggggccttggttgttttctgggggagggttgtttgggggggggttgtgggggggggggggggggtttgggaggggaacaaacaaaatttgaaaaaaaaaaaaaaaaaaagagggttaccaggctaaggcgaggggttttcccgttcaaatttggagggggg

SEQ ID NO: 8389 - DNA, 329 bp, Zea mays
  unsure (1)..(329): unsure at all n locations; Clone ID: LIB3061-093-Q1-N6-H10
ggggggggtgtttaaatctcaatcaatatattgattatttctaggaaacacacgtcggtntgagggcaccattatcgagtacatctcatatgtnatctaaaagatggcacctccaacgatgggttgctgcctcgacaagacatgattcatggagagaactggttgtttggcagcaattgttgctgctgtnggaaggcggcgaccaatgggtttgccacttccaatggattaagtnactgttgtcgctgttgtgggttctcagcagagttcgaccgtgtcagttggttgaatggaagccgctgtttggctgtgggccccagggctttgcc

SEQ ID NO: 8390 - DNA, 144 bp, Zea mays
  Clone ID: LIB3061-093-Q1-N6-H3
attaaaaccaaaactttattatgaccatgcatatattattggtcataccacacatgataatgtgtgtcgtcttactgcattgttacatatattgatagagagagatggatagaggagatttcataaatattatgaatgagggag

SEQ ID NO: 8391 - DNA, 204 bp, Zea mays
  unsure (1)..(204): unsure at all n locations; Clone ID: LIB3061-093-Q1-N6-H8
ggggggtgttttagaaatgtactttcttatttctgggaagccacaaacatcagacaaaaactttanttttgaactttaactcataagaaatctaaaagaggcaccaccaatgatgggttgttggtngaacactgcttggtttgttgaggcggggtggttgtatggccgcaattgttgcttttgttagagggtgccaatcgttag

SEQ ID NO: 8392 - DNA, 484 bp, Zea mays
  Clone ID: LIB3061-094-Q1-N6-A10
acagaaaacatatatcaattattgtgtaaacctattaaaaggttaaaaccaattttaatttggaacagatggagtactttttttcttttcatttcaattgttcattcaggtcattgctcacactgacactgccacccatggtgatgcgtgacacattattactcaatcatcgccgcttaatgactcaactagcttgcttgccagcggcttttctacagcacattgtttcttcagtgggggacaccgcccgcagcagcgttggggcctggagtcggctgctgcaggccgcacattgccgtcagttgctgcgctttttgcgccgccaacagccccgcgaccttgccgctttgcggctgctgctgcaggatggactggaggaccaagccgaatatcgcctggttccggtgctgcggcttcacctgccttggctgctggcaacacttctgccccaaccactggcccttatgcgagcagttgggcgttg

SEQ ID NO: 8393 - DNA, 584 bp, Zea mays
  Clone ID: LIB3061-094-Q1-N6-B8
gcagcaaaaccattactttgatctgacacaatactcacatagttttgcatacacacatatgctcctgcaactactatttattaacacacaaacatcaacgggccgaaaaacctcacatcaaagcacagccatctcacgattattgtcatccttcacagcattcagattaggccttcctgcacacgcctccctcgcacacatacccagcaggggcttcctcactcatcttttcctcacccaacgcgcacttggggtgcaggtcaaagtcacactcgtcgcacctgtaggaccagctgctgcccatctcgtcacaaccatcacagcggtacgtaccacggcgcagcaggacaagttcgtgctcgtcatgcagctcatgcttcagcttctgaggccaccccttcgccatctcatccagcttcttctgtagctcctcaagtctctcctcggtgaatgggaaagcatcagcaccgtggatcatcagctgggactttgcgtccctgctgactgtctgcccagtaggtccgatggcgacaagtgaagggattccacggatcttgaagggtttcttcagcgatgctttcctt

SEQ ID NO: 8394 - DNA, 333 bp, Zea mays
  Clone ID: LIB3061-094-Q1-N6-C3
agaaatgtactttcttatttctgggaagccacaaacatcagacaaaaaactttattattgaactataactcataagaaatctaaaagagggcaccaccaatgatgggttgttggtagaacgctgctgggtttgtcaaagcaagttggttgaatggcagcaattgttgcagttgtaagagggtgccagcgttaggcgcagcgtgctggtagaacggcaacaactgtggttgtatcaagaaggtagcagggctcacaccagctagctggctgaatggtagtagttgttgctgctgtaaataagcaggagagttcaatgctgccagttggttgaat

SEQ ID NO: 8395 - DNA, 605 bp, Zea mays
  unsure (1)..(605): unsure at all n locations; Clone ID: LIB3061-094-Q1-N6-D9
tttttttttttttttttttttttttttttttttttgtttttttttttttttttttttttttttttttttttttttttttttttttttttttttttttttttttttttttttttttttttttttttttttttttttttttttttttttttttttttttttttttttttttttttttttttttgtgggggggacggcggggaaaaattttttttttttttggaaaaaaacccccctgttggggggccccttttgtgggcccctttttttttttaaaaaaaaagggccccccaaaatgggggtttttccccccagggggggggttttaaaaaaaaaaagttgttttggggaaaaaaattttttttttaagaagaaagcccacaaatgggtttccccccccggggggaaaaaaaaaatttggggcgttttggggggcccccccaaattttaacaaaaaaattttggtaaaaaaaaaaatttgtcaaaaaaaaaaaaaaggattttcccccatttgggggaaaaaaaggggccaaatttttttaaacaaatggttgggaaaaaaaacttttgngacggtttttgggccccctccccaaaagggggcgctt

SEQ ID NO: 8396 - DNA, 256 bp, Zea mays
  Clone ID: LIB3061-094-Q1-N6-E4
ggaacaatacttttttcttttcatttcaattgttcattcaggtcattgctcacactgacactgccacccatggtgatgcgtgacacattattactcaatcatcgccgctaaatgactcaactagctagctagccagcggctatactacagcacatagtttcttcagtgggggacaccgccggcagcagcgtaggggcatggagtcggctgctgcaggccgcacatcgccgtcagttgctgcgctatctgcgccgcc

SEQ ID NO: 8397 - DNA, 555 bp, Zea mays
  unsure (1)..(555): unsure at all n locations; Clone ID: LIB3061-094-Q1-N6-E7
gcctcaatgagttaggactgtattcgagcaaacaagcaaccaaacaggatctaggtgagagccagggtgtgttgccctggcatagctggctagacagaccaggtctaaaaacgcaaaccaaacacgccccacccattctggtcccgtcttgaaacttcaattcctcatacactccagcgagcaaacaaacaacatatcgatggtgacaatgacattgtttaacggcacagtgctaaccgttacacagctatgtaattattatgggcctctgagttccatgatcagatagaggtgcaggttgcctttcgccggctcatttgcgcagcaagtctctcagtttatcggtggctgacctcagttcggcagcgatgccaacttcattggccgagtgccctgcatctgctaccaccttgaattctgcttcaggccaagccttatgaagatcccaagcagacatcatagggcaacaaacatcataacgtccctgtacaataaaacctttaatatgntcggatcttatcaacattgtccaataggaatgagtccgagggtaaa

SEQ ID NO: 8398 - DNA, 462 bp, Zea mays
  unsure (1)..(462): unsure at all n locations; Clone ID: LIB3061-094-Q1-N6-E9
gaatctggaaatgtaacttcttatttctggttggccacatacatcatccaaaaactttattattgaattacaactaataatcaatctaaaaggggcaccaccaatgatgtgttgttggtaggaggctgctgggtttgtcaaagcaagttggacaaagggcaacaattgttgtagttgtaagagggttgcggggttagccgcaaactgcttgtaaaaaggcagcaactgttgctgtgtcaagaaggaagcacgacttgctgcagctagctcgctaaatggcagtagtatttgctgctgcaaataagcagcggggttcagtgcggccaattggttaaatggaaaaagttgttgttgctgaaagtaggcagtagctagctggctaaatggtaatagnttgttgctgcaaataagcacgcagggttcagtgtagacaatttcttccattcaaccaactgtccggnn

SEQ ID NO: 8399 - DNA, 427 bp, Zea mays
  Clone ID: LIB3061-094-Q1-N6-F11
gaatgtacaggtgaaccgcgcattgtattatatggtccagaagaactcgactactgctgctcactcaggagaagggcctggaagcagctaggcgacactagtagctagctagctagctaggcggagaagaggccgtcggcggcggccagggcgagcgcggtcttgggctccaggtgcaccgcgacgctgaacctcaccccggacgcggcggcggcggactccacccacgagctccacaccttggccacggccccgaagttcctcctatattcgccggcgccgccgccgatgtcctcgccgggggcgcctcgcttcagcttcttgtcgaactgctccgtcaccagcaacgcgatgtctgccatatatcccccctctctcccactctcttgtttcttacaccgaagatggtctctgtggatgatctgtg

SEQ ID NO: 8400 - DNA, 572 bp, Zea mays
  unsure (1)..(572): unsure at all n locations; Clone ID: LIB3061-094-Q1-N6-F5
ggttcaagnatagatagacttaatgaaccttcaaatccaaggcgaaccaaatggccagtggaacaaggatggactctggagacaacaattgttggaaattctctctcagcttctgtgtgcatctgcacaaacttgaaaaattactggttcaaaaagtaactggagaggactgttcatagagatgaattagaagcctccttgtttaaaggtttttgcagcacaggtcaagtcacaattttttccaatttgccaatatctccaattgaggaaaatccacctccaatgtctacagtacccaataaatccaggtctcaaaccttgctttactattaaatatcgatggagagacagaatgtcagccattcagatctgaaatcaccaaaaacaagtgacaaaaccaacataacatgctctagactctgacctgcccccagttccaaaatcatttatttgctacatggatttccaattgtcaacatcctgcaacacctccaaatatgtaagttgaactaccaattatttgagctaaatggtctgcaacacctccaattgtcaacagcgagagcgcaaaa

SEQ ID NO: 8401 - DNA, 141 bp, Zea mays
  unsure (1)..(141): unsure at all n locations; Clone ID: LIB3061-095-Q1-N6-B5
agaaaatgtactcttcttnattttctgggggnaagccacnaaaacattctaggacaaaaaaaaaaacttttttttttattttgggaaaacttttaaaatcttctttttaagggaaaaatttccttaaaaaaaagggggggg

SEQ ID NO: 8402 - DNA, 559 bp, Zea mays
  Clone ID: LIB3061-095-Q1-N6-B6
aaatgtcaatcaatatattgattatttctaggaaacacatgccggtatgagggcaccattatcgattacatctcatatgtaatctaaaagaggcacctccaacgatgggttgctgccacgacaaggcagggttcatcaaagagaactggctgtatggtagcaattgttgctgctgtaggaaggcagtgaccaatgggttaggcactgctagtggattaagtaactgttgtcgctgttgtaggtacgcagcagagttcgacacagtcagttggttgaatggaagcagctgttgcaagtaggcagcagggtttgccacagctagctgagtcagagctggtacaatctgttgcagcaattgttgttgcaggtatgtaggtgcattacccacaacgagagggctagatgaaagcagttgttgctgttgtaggtaggcggcagggttcaccatggctagttgactgagcgctggcagaaactgttgcaattgttgttgttgttggtatgcaactacgtttgccagaacaagtgggttggatgcaagcacctgctgttgcaagta

SEQ ID NO: 8403 - DNA, 579 bp, Zea mays
  unsure (1)..(579): unsure at all n locations; Clone ID: LIB3061-095-Q1-N6-C11
aagacaccaaaatgtttgtctgggctctatttccattaccgaaaaaaaacatagaacaagcactttaagtagtcgcattcacataatgactgaatagaacaaaacagggtactatcttgaaccgcttcacttcttatcttgcttctctgcctgagctgccttcttctggcgggcaccaagatgtttcttgttcatccgctcaaggcggagcttgccataggcagcaaatgactacatgtcatgtgggaccttgacaacctcaactgaacgtttctcaccacgagttaatggcatgtagtcaccctggacctgggtagcggtggcaaactcctctggagtagagtcaccagccttcaccttgcgcgcacgccttgagaagataaccagcttggccttgtatgtcttaagcctctggacattggcctgcagtccctcaagggataagttcttgcggcggtgatcaacagaaaaaccaatggttggagcaagcttctttgggatgccaacaaccttcagctnctcaagggtaaagcctgttccagcccttgacttcatgttgtactttaaagtctggcattg

SEQ ID NO: 8404 - DNA, 516 bp, Zea mays
  Clone ID: LIB3061-095-Q1-N6-C2
tttttttttttttttttttttttttttttttttttttttttttttttttttttttttttttttttttttttttttttttttttttttttttttttttttttttttttttttttttttttttttttttttttttttttttttttttttttttttttttttttttttttttttttttttttggaaaaaaagagttttttggggggggggggggaaaagaggagaaaaaaaaaagtgtggtggggggaaaaggggaaaaaaagaaaagggggggggccaaaaaagggggggggggggagaaaaaaaaatggaggtagaaaaaagggggtgggagtggggataaaatgttttaattaaaatggggtagaagaaaggaaaagcaatgggggagaaaaaaaaaaaaaatgtggttagaaagaaaaaaggggttgacttaaaaacaaaaaaataagggataagagaaaggtttttgtgcgcgcaagaaaataaaaaaaaagaataaaaatgtgaagagagtag

SEQ ID NO: 8405 - DNA, 111 bp, Zea mays
  Clone ID: LIB3061-095-Q1-N6-C6
ggggacaaaactttttttttttcatttaaaggggggattcagggcattggtcaaactggccctgccccccagggggggggggggcccattttttcccaaacatcgccggta

SEQ ID NO: 8406 - DNA, 515 bp, Zea mays
  Clone ID: LIB3061-095-Q1-N6-D4
aattattgttccggatgaacgatccgagaaagcattcatcttcttgctgtgcttattattcagacatatgagctagctacaagctcattcctcatgcactatgctcttcgcagttacttggagggcatcgttccgccgccgagaatccaggggcattcggcgacgccgctgatggtggccaggttgcactcggcctccgtgacgagggtggcggcgaatcccctctgcacctcccgcgggcagcccggcaggtcctctaggcggccctccagctgcgcgtccgggcccggcgggatcgcgccgtccatgaggatgctcagcgccgtgcaccggcagtacgccgggatgtccgccagctcccggcagcatctcctcttcagctccggccacgggaggcgcggcccgatgccgcaggtccggctggtcacgtaccagcggcagctcgggagcggggttgtgccgggatggcccaccccggcacgccaggaggtcccggcgcttggcgctggcagccg

SEQ ID NO: 8407 - DNA, 582 bp, Zea mays
  Clone ID: LIB3061-095-Q1-N6-D6
aaagcttgttactcccaatcttaggaaaagtaattatcgaacacccttggagaccaatatcacattagaatctggaaatgtaacttcttatttctggttggccacatacatcatccaaaaaactttattattgaattacaactaataatcaatctaaaagagggcaccaccaatgatgtgttgttggtaggaggctgctgggtttgtcaaagcaagttggacaaagggcaacaattgttgtagttgtaagagggttgcggggttagccgcaaactgcttgtagaaaggcagcaactgttgctgtgtcaagaaggaagcacgacttgctgcagctagctcgctaaatggcagtagtatttgctgctgcaaataagcagcggggttcagtgcggccaattggttaaatggaagaagttgttgttgctgagagtaggcagtagctagctggctaaatggtaatagttgttgctgcaaataagcagcagggttcagtgtagacagttggttgaatggaagaaattgttgttgctgagagtagggagaaagggttgccagagctacttggttgatcacaggtagcac

SEQ ID NO: 8408 - DNA, 518 bp, Zea mays
  Clone ID: LIB3061-095-Q1-N6-E8
gaacttaaaattagatctctaatcttttattactgagaagttgcacatatcagtatgagaactttattattacagtataaagcataaaaaaattagaagatggcaccaccaatggtgggctgctgcaataaggtggtaggattcgtcaaagcaagttggttaaatggcagcaattgttgttgttgtaagaaggcgacattgtttgccacatcctgtgggtagaatggtagcaactgttgctgttgcaagaaggcgttaatgtttcccacaacctgtgggtaaaatggcagcaattgttgttgttgttgcaagaaagcagcaatgtttgccacaacttgtagatggaatggaagcaactgttgctgcagtaagaaggcagcagggctcctgacaagttggttgaatggtagtagctgttgtgcctgcaagtaagcagcagggttcaccccagctagttgattgaatggaagaaattgttgttgctggaagtaagcagcaaggttcgctgcaactacttg

SEQ ID NO: 8409 - DNA, 443 bp, Zea mays
  Clone ID: LIB3061-095-Q1-N6-F3
gggggaaaaaaacaaaaaaaattttttgtttttttggggaaaaaaccccgggggggggggggccccttttgggggccccttttattggaaaaaaaaaagggggccccccaaagggggggggggcccccccaaaaaggggttttaaaaaaaaaaaaggggtttgggggaaaaaatttttttttttgggggggggggcccaaaaggggggccccccccccaaagggaaaaaaaaaatggggcccttgggggggcccccccaaaaattcaaaaaaaaaatttgtgtaaaaaaaaaaaacttttaaaaaaggaaaaaaggggttccccccattttggggaaaaaaggggggaaaaattgggaaaaaaaatggtgggcgggggttttgggggttttccccaaaaaggggggggataaaaaaaaaaatttttttttttttttcgggggg

SEQ ID NO: 8410 - DNA, 543 bp, Zea mays
  Clone ID: LIB3061-095-Q1-N6-G11
gaaacggaaggagtagaaccctgaccagtttataaagatgatgcatatatttccatcacatagctcgcagaaaaaatacagagcatgcatgcaaatatgccaaatgagaaacatcaccgtctaacattgtgctggtttatttaggctaaaaataatattaacaaagaagtctgccttcttctctacaagctgaaacttggcccagaacgaacaagcctgaactccttccacaccacaatccgcagacagcacaagcattgccccgaccgggtatccacatgtgagcttcggcaatgggccttaagctaaacatagtagatcatgccgacttctatcagactaatgtgtggaatgtgcagcgtgactgatgggcctctgcagttcttccggaggaaagagtaaccaacatcaatagcaaacttcttcaggaaatttgagttcctcctggctttgatataagaatgccccatgatgtatgcgatcccagcatgtttcgcttcaactagtgccgtgagttcttctttcacttgctgacccatgcca

SEQ ID NO: 8411 - DNA, 154 bp, Zea mays
  unsure (1)..(154): unsure at all n locations; Clone ID: LIB3061-095-Q1-N6-H3
gtgtttttttttttttttttggtgggggggctttcgttttggtggctcgcgcccccgccgngcggcggggggggcggtggggtggggtgggggtgggggggggggggggggtgcggcgggttgcgtcgggttgtggggttgggggggggggggg

SEQ ID NO: 8412 - DNA, 516 bp, Zea mays
  unsure (1)..(516): unsure at all n locations; Clone ID: LIB3061-095-Q1-N6-H9
gggggggggttttttttttttttttttttttttttttttttttttttttttttttttttttttttttttttttttttttttttttttttttttttttttttttttttttttnncccgcccccagttcccctttttttttagggggggggggggtttttttttgtccccaaaaaagggtttttgcggggttccccccggccccccccttttttttggggggggtgggggccccccgccctttttggtgcccccccgggtccggccaaaaccgtttttttcccccccttttttttgggggggggggcccccttttcttgggggggggttttgtttttttcgcgggggcctttctttttgggttcccccccctggttttttttgggggttttgggggggggttgggttctcccccccctctttttggttgttcccccttttcgccttcgggggggggtttgtgggagtcccccccttggtgggcgggtttgtggggggccctctttttttttttttttt

SEQ ID NO: 8413 - DNA, 559 bp, Zea mays
  Clone ID: LIB3061-097-Q1-N6-A11
agaaatgtactttcttatttctgggacgccacaaacatcatccaaaaaacttcattattgaactataactcataagcaatctaaaagagggcaccaccaatgatgggttgttggtagaacactgttgggtttgtcaaagcaagttggttgaatggcagcaattgttgcagttgtaagagggtgccagcgttaggcatagcgtgcaggtagaacggcaacaactgttgttgtgtcaagaaggcagcagggctcacatcagctagctggctgaatggtagtagttgttgctgctgtaaataagcagcagagttcaatgctgctagttggttgaatggaagaaattgctgggggtaggcagcaactagctggctgaatggtaattgttgttgcaaataagcagcagagttcaatgcagccagttggttgaatggaagaaactgatgttgctgagagtatgcagcaaggtttgctagcacaagttgttgtagttgttgtgccctgatgttttgtgccaccaaatggaccaaaggtaactgctgtaatagggctgacggttgtt

SEQ ID NO: 8414 - DNA, 523 bp, Zea mays
  Clone ID: LIB3061-097-Q1-N6-A12
gaggacaaaatgcgtctttcctaccctttttctctgatgttctcgtacatcttgactggtaacgtgtgaaagccggagatctttttgtttggccgtgcaccggctgcagttcctaatcgtggagtgtcgctctcacgtgacaaactgcacgttttttaacggtggacggcggcagtgcactcttcgaacgccacgggcacaataattgtagtctgtcttgagatgtgcattttgttgccccctcctccttggcgtggacttcggcacgttacaagttttcgtgtctaccaccgcggcggcgggtggaagaagaagcagatcgccgagcagtcattgacggcgatgttgcgccgcttgcgcctccacgcgcgaacggagcactccaccagccgcttggtcggcttcgtccggtccggcgtgcccgccacgatatgtaccgtctcgtcgttggagagcacgtcccataccccgtccgtagcgaggatgataaattggtcactgctgctgatcctcttctgcgtta

SEQ ID NO: 8415 - DNA, 414 bp, Zea mays
  Clone ID: LIB3061-097-Q1-N6-A2
ggggggccccaaattttaaaaaaaaatttttttttttgatttttttttttaaaaaatttaaaagagggggcccccccattttggggttttggggaaaattttttgggtttttaaaaaaaagtttgttttatgggaaaaattttttcctttttaaaagggggggcctttttaattttaaagggcccgggggttccccccggattttcgggccgggcccttggggggtccccatttttctttttgggggggttttttaaggttggggaaaaaaagggaataagttttttttttgggaaaatttttttcgcttaaaatttcccaaaaatataagggcgggagaataaaatgtaaaacccggggggccctttgggggggcttacccccatttattgggggggggcaaaaggccctttt

SEQ ID NO: 8416 - DNA, 554 bp, Zea mays
  Clone ID: LIB3061-097-Q1-N6-A4
aaatctcaatcaatatattgattatttctaggaaacacatgtcggtatgagggcaccattgtcgagtacattttatatgtaatctaaaagaggcacctccaacgatgggttgctgcaaggcagggttcatcaaagagaactggttgtatggcagcaattgttgttgctgctgcaggaaggtagcgaccaatgggttagccactgccaatggattaagtaactgttgtcgctgttgtaggtacgcagcagagtttgacacagccagttggttgaatggaagcaactgttgtaagtaggcagcagggtttgccacagctagctgagtcagagctggtacaatttgttgcagcaactgttgttgtaggtacgtaaggtgcattgcccaccgcgagcgggctagatgaaagtagttgtaggtagacggcagggttcaccatggctagttgactgagcactggcataaactgttgcagctgttgttgttgctggtatgcagctacgttcgccagaacaagtgggttggatgcaagcagctgctgttgcaagtaggtgac

SEQ ID NO: 8417 - DNA, 538 bp, Zea mays
  Clone ID: LIB3061-097-Q1-N6-A5
aatctagaaagtactttcttatttctgggacgccacaaacatcatccaaaaacttcattattgaactattactcataagcaatctaaaagaggcaccaccaatgatgggttgttggtagaacactgttgggtttgtcaaagcaagttggttgaatggcagcaattgttgcagttgtaagagggtgccagcgttaggcatagcgtgcaggtagaacggcaacaactgttgttgtgtcaagaaggcagcagggctcacatcagctagctggctgaatggtagtagttgttgctgctgtaaataagcagcagagttcaatgctgctagttggttgaatggaagaaattgctgggggtaggcagcaactagctggctgaatggtaattgttgttgcaaataagcagcagagttcaatgcagccagttggttgaatggaagaaactgatgttgctgagagtatgcagcaaggtttgctagcacaagttgttgtagttgttgtgccctgatgttttgtgccaccaaatggaccaaaggtaactg

SEQ ID NO: 8418 - DNA, 554 bp, Zea mays
  unsure (1)..(554): unsure at all n locations; Clone ID: LIB3061-097-Q1-N6-A9
atcgagataaatctcaatcaatatattgattatttctaggaaacacatgtcggtatgagggcaccattgtcgagtacatctcatatgtaatctaaaagaggcacctccaacgaggggttgctgcaaggcagggttcatcaaagagaactggttgtatggcagcaattgttgttgctgctgcaggaaggtagcgaccaatgggttagccactgccaatggattaagtaactgttgtcgctgttgtaggtacgcagcagagtttgacacagccagttggttgaatggaagcaactgttgtaagtaggcagcagggtttgccacagctagctgagtcagagctggtacaatttgttgcagcaactgttgttgtaggtacgtaggtgcattgcccaccgcgagcgggctagatgaaagtagttgtaggtagacggcagggttcaccatggctagttgactgagcactggcataaactgttgcagctgttgttgttgctggtatgcaactacgttcgccagagcaagtgggttggnatgcaagcagcttctgttgcaag

SEQ ID NO: 8419 - DNA, 551 bp, Zea mays
  Clone ID: LIB3061-097-Q1-N6-B1
ctggagaaatcagtaaatttactcatatccaggctatacatacatagcgtgtaccaattaggatggctgaaactactctattaaccatccaacatgtatcagatactaggacaatgtaaaacacatgtgcacaatggcccgaccaagagcacgctagcaaaagaacagaaaaatactactttttttgttgtgcctccaagcagcagtataatagggcgcagttgaatgtaccagtgttctggtctgtgcttaatggcatttgaaaccgtggcagacagagaggataatgatcagaataagtgcgatgattattcccaggacgatgagcttgattttcatgttctgcaaccacatctttctcctcacatttgttccttgctgtctgaaatcttgtgcctgtgagcacagattctcagtcttgtcaacaagcagctcaatcttctctccacgatctaggaccttttcaatgttttccatcataacacccttgacttcagaaacctgtgcctccactttggccagcttgctaacctcttcagggtgatccacac

SEQ ID NO: 8420 - DNA, 445 bp, Zea mays
  Clone ID: LIB3061-097-Q1-N6-B10
aaaaacccaaaaagggcccttcttttttcgggggggcccccaccctcagcccaaaaacctttttttgggccctttccccctaagaaatctaaaagggggccccccccatggtggggtggggggaaaacccccccgggtttgtcaaaacaaggggggtgaatggcccccattgttgccgttgtaaaagggggccccccttaggcccccccggccggtaaaaccgcacccaccgggggtgtttcaaaaagggggcggggccccccccccccacctggctgaaagggagaaattgttgccgctgtaaataagccggaaagttcaatccccccccttggttgaatggaaaaaattgctgggggggggcaacagggacccggccgaaagggaattgttgttggtgccaataaaaaaccaagttcaatgccccctgttgggtgaatggaaa

SEQ ID NO: 8421 - DNA, 563 bp, Zea mays
  Clone ID: LIB3061-097-Q1-N6-B12
gaaacaatcaaataacggctgatgaggcttacattgtttatactatgatcaaagaacatgtacgaccattgtacagataggtccatcttcctgttgtacaacaactgattccactcacaagaggtacaattagaacagctcgactgtgcactatgttttttctcccatttgctatattgatcttcagaataaagaatatgcgactcaacaagaacagctaggctgttaccaaagacggaatctaatttaagagatcatgtcgccacaaaacatctccatcacaggttttcaaggtattgccattcattacagatggaagtcattgggttagaatttggaggtgatttggcgacctattgggtcagcatctcatttcgggctatccatcctcatctggttagcacccctatatttcttcaatgttctattattcttctgctcttgctgctccaggctttttgcctctaacaaccttgctgacaggaaaatgcaaccttgcataaaggggccttggtgcccgcactgtcctatcaaagcccctcacgcaaacaaatcctctccaa

SEQ ID NO: 8422 - DNA, 554 bp, Zea mays
  unsure (1)..(554): unsure at all n locations; Clone ID: LIB3061-097-Q1-N6-B2
anacgcacatgaaaaacaaataatttgtctgcacaataagcttgtacaatgattagaaaaataaataattacattggggaatatcatggtacaacacattcctttggtgcttggtacgcggggaaaagggtgaaaattttggttaccctgaagtccgatatgcaccaagataaaaatacatttcggcaaaactgaggatatatcattaatcgctgtcatctactgtacactatatatataaagagataatggacggccaaaaaccaactaccagtgtacacaactcactagcaggcaagcataagtctgaaagagcaacccaaaccctatagacacaggtggccctacaacccagcaggaaagttgctgatttgcccttgttccagcctgtcctcaccattcactttgtaagacatccggatacgcattgcaagtggtttctggccatgctggttgttggtgacactgaggctttgtgtaactgacccatttccactggcaggaagagtgctgctgctcgctgggtccaaacgcaactggatgaactttggcac

SEQ ID NO: 8423 - DNA, 576 bp, Zea mays
  Clone ID: LIB3061-097-Q1-N6-B3
agaaatgtactttcttatttctgggaagccacaaacatcatccaaaaaacttcattattgaagtataactcataagcaatctaaaagagggcaccaccaatgatgggttgttggtagaacgctgttgggtttgtcaaagcaagttggttgaatggcagcaattgttgcagttgtaagagggtgccagcgttaggcgcagcgtgcaggtagaacggcaacaactgttgttgtgtcaagaaggcaacagggctcacatcagctagctggctgaatggtggtagctgttgctgttgtaaataagcagcagagttcaatgctgccagttggttgaatggaagaaattgctgggggtaggcagcagctagctgactgaatggtagttgttgttgcaaataagcagcagagttcaatgcagccagttggttgaatggaagaaactgctgttgctgagagtaggcagcaaggtttcctagcacaagttgttgtagttgttgtgccttgatgttttgtgccaacaaatgcaccaaaggtaactgctgtaatagggctgacggttgttggaggaacaagggtgat

SEQ ID NO: 8424 - DNA, 567 bp, Zea mays
  Clone ID: LIB3061-097-Q1-N6-B4
gtaaacaatatttgatacttcgaaagaagtatatataacaggaatggatatcaaggtagtcaatgcatccaatattttccaatcaattcctataaacttaatgcacatttcactagacttaaagtatataaaagtctttttaaaaatacaaggaaggggtaaatgcaccggggcttgcctttgttgcagagaagagattctagatccttatacctaacctttagttagatagctccatccacttgatgagcaggcactggagtagacttcttcaagtaccacctcatctaggtgttcttcgaagctgtcggtacgcgcgcgagattaaccggggatgacgcagttcaaagggtcgacggtgaagcggtctgcgacaacgttctgcggcagcgagaccctgttctgagcagtagacaccggtagagttaatgatccttcttcggtgagcttcacttgttgatggagagcacataacacgtgttatcttggtgtgtcacgcgactaagttgatctcagatttcacaaggaccataattaccaccattttattcatttcaccggttgatg

SEQ ID NO: 8425 - DNA, 119 bp, Zea mays
  unsure (1)..(119): unsure at all n locations; Clone ID: LIB3061-097-Q1-N6-B6
tttttttttttattttagttttttttttttttttttttttttttttnttttatagatctttaaattttttttactgagaagttgcccatattagggtgagaaatttattnttacaggnt

SEQ ID NO: 8426 - DNA, 435 bp, Zea mays
  Clone ID: LIB3061-097-Q1-N6-B9
gggggggggaaaaaatatgtgtaaaaagaatttttttttttggggcttaaattaaaggtaaaaaaaggaaaaaaaacacctgggttgggggggggggcgaaaagggggggaaaaaaaaaggggggggggggggaaagaaaaaaaaaatggaaaagggggggccaaaggggggggggggggaaaaaacccgcccgggggccggaaaaaaaggggggggagaaagggcccaaaaggggggggccaaaaaaaaggaagaaaaaaaggggccgcaaagtgtgggaaaaaaaaggggggggaaggggggggggtgggtcggggcgcggggggggggcggaaaggggggggaaaaaagggggggccgcaaccgggggaaaaaaaggggaaaaaaaaaaggggccgtttgggcgagcagatctcctttttagaggggggggg

SEQ ID NO: 8427 - DNA, 460 bp, Zea mays
  Clone ID: LIB3061-097-Q1-N6-C1
ggggtaaaatttaattaattttttggttttttttagggaaccccttcccgttttgaggccccctttttcgattccttttattttttattttaaaaaatggcccccccaccattgggttgttgccacaccagggcagggttattaaaaaaaacctggttgtttggaaccatttgttgttgttgtagaaaggcaccacccattggtttaccccccgttggggatttaattaactgttgcccttgttgtaggtccccacaaaatttcaccccatccagttggttaattggaattattttttgcaagtaggcacaagggttggccccacttggttaattaaaacctgttccatttggttgaaccacctgtggttgcaccacctgttgttccaggtttttaggtcctttgcccttagcaagcggcttaaataaaaaaatttgttgttgttttaggtaggcaatag

SEQ ID NO: 8428 - DNA, 581 bp, Zea mays
  Clone ID: LIB3061-097-Q1-N6-C10
ctaaaaatgtactttcttatttctgggaagccacaaacatcagataaaaaactttattattgaactataactcataagaaatctaaaagagggcaccaccaatgatgggttgttggtagaacactgctgggtttgtcaaagcaagttggttgaatggcagcaattgttgcagttgtaagagggtgccagcgttaggcgcaacgtgctggtagaacggcaacaactgtggttgtgtcaagaaggtagcagggctcacaccagctagctggctgaatggtagtagttgttgctgctgtaaataagcaggagagttcaatgctgctagttggttgaatggaagaaattgctgggggtaggcagcaggtagctggctgaatggtagttgttgttgttgcaaataagaagcagagttcaatgaacctagttggttgaatggaagaaactgctgttgctgagagtaggcagcaaggtttgctagcacaagttgttgtagttgttgtgccctgatgttttgtgccaataaatgcaccaaaggtaactgttgtaatagggctgatgattgttggaggaacaaaggtgat

SEQ ID NO: 8429 - DNA, 256 bp, Zea mays
  Clone ID: LIB3061-097-Q1-N6-C12
gtctcaaacaaaatcaagaaaaggaacgactgagagcttatatgattggtaacatttaccagcaacagcctttgtctcgaacaaaaaacaaggaacaacggatagcttatatggttagtaacaataccgagttacttgtagaggaatgcaactctaggttatagttacaatccccaaaggcctgagtaggttgacagctgagtatgtgttaaatgggaccagaacttccgcaaactcaagcaaaacaagatatcag

SEQ ID NO: 8430 - DNA, 543 bp, Zea mays
  Clone ID: LIB3061-097-Q1-N6-C2
aaatctcaatcaatatattgattatttctaggaaacacatgtcggtatgagggcaccattgtcgagtacatctcatatgtaatctaaaagaggcacctccaacgatgggttgctgcaaggcagggttcatcaaagagaactggttgtatggcagcaattgttgttgctgctgcaggaaggtagcgaccaatgggttagccactgccaatggattaagtaactgttgtcgctgttgtaggtacgcagcagagtttgacacagccagttggttgaatggaagcaactgttgtaagtaggcagcagggtttgccacagctagctgagtcagagctggtacaatttgttgcagcaactgttgttgtaggtacgtaggtgcattgcccaccgcgagcgggctagatgaaagtagttgtaggtagacggcagggttcaccatggctagttgactgagcactggcataaactgttgcagctgttgttgttgctggtatgcagctacgttcgccagagcaagtgggttggatgcaagcagctgctgttgca

SEQ ID NO: 8431 - DNA, 505 bp, Zea mays
  Clone ID: LIB3061-097-Q1-N6-C3
ggaaatataacttcttatttctaggaggccacatacatcagccaaaaaacttcattattgaattacaactaataagcaatctaaaagaggcaccgccaatgatgtgttgttggtagaaggctgctgggtttgtcaaagcaagttggacaaagggcagcaactgttgcagttgtaagagggttgcggggttagccacaaactgctggtagaacggaagcacttgttgttgtgtcaagaaggaagcggggcttgttgtagctagctggccaaatggtagtagtatttgctgctggaaataagcagaggggttcagtgcggccaattggttaaatggaagaaattgttgctgctgagagtaggcagtagctagctggctgaatggtagtagttgttgttgctgcaaataagcagcagggttcagtataaacagttggttgaatggaaaaaattgttgttgctgaaagtagggggaaaaggtttgccagagctacttgccacgcgtccg

SEQ ID NO: 8432 - DNA, 502 bp, Zea mays
  Clone ID: LIB3061-097-Q1-N6-C4
agaatctggaaatgtaactttttatttctggttggccacatacattatccaaaaaatttattattgaattacaactaataagcaatctaaaaaagggcaccaccaatgatgtgttgttggtaggaggctgctgggtttgtcaaagcaagttggacaaagggcaacaattgttgtagttgtaaaagggttgcggggttagccccaaactgctggtaaaaaggcaacaactgttgctgtgtcaaaaaagaaacacggcttgctgcaactagctggctaaatggtagtaatatttgctgctgcaaataaacagcgaggttcaatgcggccaattggttaaatggaaaaaattgttgttgatgaaagtaggcaataactagctggctgaatggtaatagttgttgctgcaaataaacagcagggttcaatgtaaatagttggttgaatggaaaaaattgttgttgctgatagtagggagaaaaggtttgccaaagctacttggttg

SEQ ID NO: 8433 - DNA, 532 bp, Zea mays
  unsure (1)..(532): unsure at all n locations; Clone ID: LIB3061-097-Q1-N6-C5
gattcattaaaaccaaaactttattatgaccatgcatatattattggtcataccacacatgataatgtgtgtcgtcttactgcattattacatatatagatagagagagatggatagaggagatttcccaaatatcatgaatcagtagtagggcggaatggcagcggagacgccacaggggttggtgcggtagctgggcagctggtactggtagagtccacccatggccggcatgttctgcgccatcatcatggccatggggttgagaccctgggctgccagcagctgctgctgctgctgcatcagagctggctcgtacaggctgctgctggcggcagcggcacgctcaaactgcatcatcatctgcagctgctgcgcgacggactgcacgtccatcatcctcatctgctgctggcagcactgttgccggagcggctggaacatggcgctcggctgcccacacccggcgtagtagggcgccgccgccagcgggctgnactgcggctgccttaagtactccgcgtaggggtac

SEQ ID NO: 8434 - DNA, 534 bp, Zea mays
  Clone ID: LIB3061-097-Q1-N6-C6
gggcgctgacctcgatgcctcctccacgtcccgctgcgagagccgaacgggggtgatgagagcttgcgtccacttgccctggcagaagtgatcacagggccaggggtcctgtcccgaacaccccaccacgttcaacttccgggcccgccgccgccgtaagggccagggtaatttggtgggggccaatcccaccaagcacaactttccggccggccccgttggcttcaacgcccgcgacatgggcttggttaacccggcgcaatccaagctgacctcgatgtcccagcccatggccgcgccgatgcgcttcacacttgttcgccaaggccttcgcgcggggggacacccgcaccgccgcgttcgcgcccagagaccttgccacaggcaagcggtgctctttcacattcacaaccaccacacgcggggcgccgaaagacccgcgccgccagcagcgacaccacgccgatgggggcggcgcccaccacgagcacacccgtctcgggccccacccccgcgcggcgggacgcgtgcacg

SEQ ID NO: 8435 - DNA, 258 bp, Zea mays
  unsure (1)..(258): unsure at all n locations; Clone ID: LIB3061-097-Q1-N6-C7
aggggggtgttnatttttttttttttttttttgttgtgttgtggtgtttttttgtnatttttttgttggggggaagggggggtnatgggggaggggggggggggggggggggggggaaggggggggtgtgggggagggggggagtnaggggggagagggggggggcggcacgggtntggggggggggggggggggggggtttttttgaagcaagggggggagggggggaanagggggggggtaggggggggggggggg

SEQ ID NO: 8436 - DNA, 549 bp, Zea mays
  Clone ID: LIB3061-097-Q1-N6-C8
agaatctgggaatgtaacttcttatttctggttggccacatacatcatccaaaaaatttattattgaattacaactaataagcaatctaaaagagggcaccaccaatgatgtgttgttggtaggaggccgctgggtctgtcaaagcaagttggacaaagggcaacaattgttgtagttgtaagagggttgcggggttagccgcaaactgctggtagaaaggcagcaactgttgctgtgtcaagaaggaagcacggtttgctgcagctagctggctaaatggtagtagtatttgctgctgcaaataagcagcggggttcagtgcggccaattggttaaatggaaaaagttgttgttgctgagagtaggcagtagctagctggctaaatggtaatagttgttgctgcaaataagcagcagggttcagtgtagacagttggttgaatggaagaaattgttgttgctgagagtaaggagaaaggtttgccaaagctacttggttgatcaagagtagcacgagttgctgcaactgttgtgccctgatggtttgt

SEQ ID NO: 8437 - DNA, 543 bp, Zea mays
  Clone ID: LIB3061-097-Q1-N6-C9
catccaaaaaactttttttttgatttacaactaataatcaatctaaaaggagggccccaccaatgatgtgttgttggtaggaggctgctgggtttgtcaaagcaagttggacaaagggcaacaattgttgtatttgtaaaagggttgcggggttagccgcaaactgcttgtaaaaaggcagcaactgttgctgtgtcaaaaaggaagcacgacttgctgcagctagctcgctaaatggcagtagtatttgctgctgcaaataagcagcggggttcagtgcggccaattggttaaatggaaaaagttgttgttgctgaaagtaggcagtacctagctggctaaatggtaatagttgttgctgcaaataaccagcagggttcaatgtaaacagttggttgaatggaaaaaattgttgttgctgaaagtagggaaaaaggtttgccaaacctacttggttgatcacaggtagcacgagttgctgcagctgttgtgccctgatggtttgtaccaatgactgcaccaaatataggctggtgattgttg

SEQ ID NO: 8438 - DNA, 491 bp, Zea mays
  Clone ID: LIB3061-097-Q1-N6-D1
ggaaatgtaactttttatttttggttggccacatacattatccaaaaaatttatttttgaattacaactaataagcaatttaaaaaagggcaccaccaatgatttgttgttggtaggaggcccctgggtttttcaaaacaagttggacaaagggcaacaattgttgtagttttaaaaaggttgcggggttagccccaaactgctggtaaaaaggcaacaactgttgctttgtcaaaaaagaaacacggtttgctgcaactagctggctaaatggtagtagtatttgctgctgcaaataaacagcggggttcaatgcggccaattggttaaatggaaaaaattgttgttgcttaaagtaggcaataactagctggctaaatgggaatagttgttgctgcaaataaacaacagggttcaatgtaaacagttggtttaatggaaaaaatttttgttgcttaaaatagggaaaaagttttccaaaatacttggtt

SEQ ID NO: 8439 - DNA, 557 bp, Zea mays
  unsure (1)..(557): unsure at all n locations; Clone ID: LIB3061-097-Q1-N6-D10
cgtatattatatttttaatgtagcaccgctaccacgacgacgactattagtagggagccggtacacagaggggccagtagcacatgctagnaggaggactgaaacagtaaaagtgacacaaacacctgatggcgcgcggcatagacacgtaaacaagcaggaagatcagcccacgtgcgcacgtacatgcatgcacagcacacgtactagtactagcagcgcggcacggagacgccgcaggaggcgacgaccttgcgcgcgttggggctgttgatgtagcgcccgtaggtggggttcttcacgaactggcagaagcacccctgctgcgccttgaggttggagcagcacgacgcggagggcgtcgcgccggcagtgatcgccggcgcgcacgccgccagctgcccggcgttgcacgaagccgccgacgccgtctcggccgccgtcgccgccagcaccaccagcactaccagcgccactgccgccatgccctgctgctgctgcttcgccatgtagtactgtagtgtattctcttctctcccacactagcagaccgatcg

SEQ ID NO: 8440 - DNA, 491 bp, Zea mays
  Clone ID: LIB3061-097-Q1-N6-D11
cccaacccaaagccggaactttttgttctggtgggtccgggtcacacaggccaaaagttttttcagttcatggaacttgggggcccccaaaattaatggccctgcagttgcttttttgggggtaaaggggttgaaccacaaagagaaaaacaagcctttcagcgggggatgggcccccaacttgggctgcctaactgggaaaagcataaacaatcgcttaaatccaaaaatggaacttggttgtccaggattcaacaagcaaaaagcccccttatgaaacaaactccttggggattttttcggccttagcaatgacttcctcaatgcccccaaccatgtaaaatgactgctcagggggggtattatacttgccatccaaaacaccctggaaacttttaacacttttctttaactccacatacttccctggggcacctgggaaaacttcagcgacatggaaagggtggctcaagaaaccctgaatttttttt

SEQ ID NO: 8441 - DNA, 445 bp, Zea mays
  Clone ID: LIB3061-097-Q1-N6-D2
ctagaatgtactttcttatttctgggaagccacaaacatcagataaaaaactttattattgaactataactcataagaaatctaaaagagggcaccaccaatgatgggttgttggtagaacactgctgggtttgtcaaagcaagttggttgaatggcagcaattgttgcagttgtaagagggtgccagcgttaggcgcaacgtgctggtagaacggcaacaactgtggttgtgtcaagaaggtagcagggctcacaccagctagctggctgaatggtagtagttgttgctgctgtaaataagcaggagagttcaatgctgctagttggttgaatggaagaaattgctgggggtaggcagcaggtagctggctgaatggtagttgttgttgttgcaaataagaagcagagttcaatgaacctagttggttgaatggaagaaactgc

SEQ ID NO: 8442 - DNA, 543 bp, Zea mays
  Clone ID: LIB3061-097-Q1-N6-D4
gcaatacagctcacatttttttccagatatcatgaataatgtcacatatttctgtaagtaggcggcggcttcccaccacacagacacagacgatgcatgcaaatagagcccccagactcatctcttctctccgatcagcagctggtgtcgagcatggcctcgtggaaggcggcgacgcggtccggggtgacgcactgcgtgatgagccgcgcccctggcttgtgggcccagggcttcacgaggatgcacgtggcgatgtagtccaggtttgtcagcggcacgacgtgcgcgggcgggccccatccgtagtccacctccgcgaagccgaggcgcgtccagtcggacaccagcagcgtgcggtagtcggacgtgatctggtaggggtcgacgccgccggcgcccagctcccccgccgcccagcgcgcgaactccgcgggcatccggcgcttcccgtccttgatcatcctcaccacctccgcgaccgaggcgcccgccaccttccccgcgggcgccgacacgcgcatgatgtagtagcagttgccg

SEQ ID NO: 8443 - DNA, 427 bp, Zea mays
  unsure (1)..(427): unsure at all n locations; Clone ID: LIB3061-097-Q1-N6-D5
ggcgggggcangatacgagcgtccgcttggtgccgacgggcgcttgcagcgcggggacaggacgagggtctccttgccggacggcctccagacgccggtgccggccgccctggccgcgccgccgcccttgcgccagcactgcgtcgccgggcggtggaagaagaagcgctccccgtcggcgtcggctccggatccccctggtgcggcggcggggaggaggtcccacgggtggaggcgcgcgaggtcggcgtcggggatgacgccggcggggagcgggcaggccagcgccttgcggcggaggtagtgcagcagcagctcctcgtcggtggggcggaagcggaagccgatgggcaggcccgccacgggcgcgcccggccgccggccctccatcgccggccgacgggatcgaagcaggattgggtttcgt

SEQ ID NO: 8444 - DNA, 292 bp, Zea mays
  Clone ID: LIB3061-097-Q1-N6-D7
aagaatctagaaatgtactttcttatttctgggaagccacaaacatcagacaaaaaactttattattgaactataactcataagaaatctaaaagagggcaccaccaatgatgggttgttggtagaacgctgctgggtttgtcaaagcaagttggttgaatggcagcaattgttgcagttgtaagagggtgccagcgttaggcgcagcgtgctggtagaacggcaacaactgtggttgtatcaagaaggtagcagggctcacaccagctagctggctgaatggtagtagttg

SEQ ID NO: 8445 - DNA, 530 bp, Zea mays
  Clone ID: LIB3061-097-Q1-N6-D8
ccttccaaaaacttctttttggacctttacctcatagccattttaaaggggggcccccccatggtggggtggtgggtaaacccctgtggggttggcaaaaccaggtgggtggatgggcaccattggtggcatttgaaaggggggcccggcgttgggcttagcggccgggtgaaccggcaccacctgttgttggttaaaaagaggcaccggggctcacataacttacctggttaaagggtagaagtggtggctgctgaaaataaccaccaaattcaaatgctgttagtgggtgaaagggaaaaaattgctgggggtgggcacaacctacctggttaaagggaaatggtggtggcaattaaccaccaaatttcattgcacccatttggttaattggaaaaacctgtttttgttgaaagtttccacaagggtttgttaccccaagttgttgaatttgttggcccctgtttttttggccccccaattggcccaagggtaaccggcccctggggtcaccccggaatttccggccc

SEQ ID NO: 8446 - DNA, 583 bp, Zea mays
  Clone ID: LIB3061-097-Q1-N6-E1
ggaaattaacttcttatttctaggaggccacatacatcagccaaaaaacttcattattgaattacaactaataagcaatctaaaagagggcaccgccaatgatgtgttgttggtagaaggctgctgggtttgtcaaagcaagttggacaaagggcagcaactgttgcagttgtaagagggttgcggggttagccacaaactgctggtagaacggaagcacttgttgttgtgtcaagaaggaagcggggcttgttgtagctagctggccaaatggtagtagtatttgctgctggaaataagcagaggggttcagtgcggccaattggttaaatggaagaaattgttgctgctgagagtaggcagtagctagctggctgaatggtagtagttgttgttgctgcaaataagcagcagggttcagtatagacagttggttgaatggaagaaattgttgttgctgagagtagggggaaaggtttgccagagctacttggctgatcactggtagcacgagttgctgcaactgttctgccctgatggtttgtaccaatgactgcaccaaagatagggctggcgattgttg

SEQ ID NO: 8447 - DNA, 587 bp, Zea mays
  Clone ID: LIB3061-097-Q1-N6-E11
atataaataaatattccaggtagtataaggtaatcaggttgcaatgcaagtcaaaagaaatccgatacaataaagtaactctgatagttcgctattggaaaactgggacttcgtgatacagagttaaaaagctcatggttgctggaaaaagccctctaatcagataaaccagccttgctcttcaagtgtgccttgaaatccatgatatcaccttcccaccttgtcaccgcctgattctcacacacccaaatctcttgagcaacctggttgatcagcctgaaatcatggctcaccaagaccaaaccaccatcccactcattcagtgcctccgccagggagtcaatggtctcaatgtccaaatgatttgtcggctcatcgagcagtagcagttgcggctgcctatatgccaaccatgcaaagatgacacggctcctttgcccatcagaaagattcctcattggcatcacctgcgcctttcctgataggccaaacctgccaacagcagctcgcatcttctcttcttcggtcccagggtattccttcatcatgtaagccagagccggcatgtccagatccagcttgtccgc

SEQ ID NO: 8448 - DNA, 569 bp, Zea mays
  Clone ID: LIB3061-097-Q1-N6-E2
actatctggacgacatcctcgtcgttaaggccatggccgaggccgcaatgctgtggatagtgccttgcgctggttccccatacgagcacatacttcacgtccttgagcaaacttctatggatatgattgcagaagtcctccaccgtgcagccacctctgtcggtggaaagaacaactgggtctgtgaaatcaggctgctggccctgtggctttgtatacaccctcactaggcccatctcctcccacattctcgcaagtagtctgtccaagttcagcttcaaattgcagctgatcactagtgaatttggttgccgagcaagattatcaacgtcatcgataccaacaacatcgatcttgttatatacgtagacgcactttatgtacttccggttcccttcgataacgtcaatgagatcatccacagtagcatcttcacggaataacacctcagcattgtgaattttgtactcgtgcagaatctgatagcacagcttctcatcaatatgagtcaaaggaacagtggtattgaaagaaatcccacccgtcttcttcctcttgaagtatatctg

SEQ ID NO: 8449 - DNA, 466 bp, Zea mays
  Clone ID: LIB3061-097-Q1-N6-E3
attaaaaaaaaaaaagaggggggcaagggttttaaaagggttttttccaaaaagattctgggaaaacggcaaaaggtttcccggtgggcatggaattaaactttacatttttacaaggtcaaacataaaaaaagaacagggccacacactaaattttgattttgaaaagaaaaagccatcggaatcgggaaaaaaccattttccattgaaaatttttggccctggaaagggaaaagggaaatgtttttaaacaaccccctttttgtttgacttaaaagggggggagttaaaaacccggaaaccaaaggggaaaccatttattttgggaacgtccctgatgcaaccattgaaaaaaattccagcccacccatttttttgaataaagggggaaagggggccaccaaaaaatggaaaaaggatggtcccaccgggataaaaaaaaaaaaccctggcgggaacttttttt

SEQ ID NO: 8450 - DNA, 167 bp, Zea mays
  Clone ID: LIB3061-097-Q1-N6-E4
agaaaagtactttcttatttctgggatatcccaaacatcatccaaaaaacttcattattgaagtataactcataagcaatctaaaagggggcaccaccaatgatgggttgttggtagaacgctgttgggtttgtcaaagcaagttggttgaatggcagcaattgttg

SEQ ID NO: 8451 - DNA, 560 bp, Zea mays
  Clone ID: LIB3061-097-Q1-N6-E5
agaaagtactttcttatttctgggaagccacaaacatcagataaaaactttattattgaactataactcaaagaaactaaaagaggcaccaccaatgatgggttgttggtagaacactgctgggtttgtcaaagcaagttggttgaatggcagcaattgttgcagttgtaagagggtgccagcgttaggcgcaacgtgctggtagaacggcaacaactgtggttgtgtcaagaaggtagcagggctcacaccagctagctggctgaatggtagtagttgttgctgctgtaaataagcaggagagttcaatgctgctagttggttgaatggaagaaattgctgggggtaggcagcaggtagctggctgaatggtagttgttgttgttgcaaataagaagcagagttcaatgaacctagttggttgaatggaagaaactgctgttgctgagagtaggcagcaaggtttgctagcacaagttgttgtagttgttgtgccctgatgttttgtgccaataaatgcaccaaaggtaactgttgtaatagggctgatgattgttgga

SEQ ID NO: 8452 - DNA, 563 bp, Zea mays
  Clone ID: LIB3061-097-Q1-N6-E6
agaaatgtactttcttatttctgggacgccacaaacatcatccaaaaaacttcattattgaactataactcataagcaatctaaagagggcaccaccaatgatgggttgttggtagaacactgttgagtttgtcaaagcaagttggttgaatggcagcaattgttgcagttgtaagagggtgccagcgttaggcatagcgtgcaggtagaacggcaacaactgttgttgtgtcaagaaggcagcagggctcacatcagctagctggctgaatggtagtagttgttgctgctgtaaataagcagcagagttcaatgctgctagttggttgaatggaagaaattgctgggggtaggcagcaactagctggctgaatggtaattgttgttgcaaataagcagcagagttcaatgcagccagttggttgaatggaagaaactgatgttgctgagagtatgcagcaaggtttgctagcacaagttgttgtagttgttgtgccctgatgttttgtgccaccaaatggaccaaaggtaactgctgtaatagggctgacggttgttggagg

SEQ ID NO: 8453 - DNA, 277 bp, Zea mays
  unsure (1)..(277): unsure at all n locations; Clone ID: LIB3061-097-Q1-N6-E7
aggtgtggggggggggggggggggggggggggggggggggggggggggggggggggggggggggggggggggggggggtggggggggggggggggggggggggggggggggggggnggggggggggggggggggggggggggggggggggngnagggggggggnnggggggggggggggggggggggttgggggnggggggggggcccgggggggggggggggggggggtnggggggggggggggggggngggggggggggaggggggggggggggg

SEQ ID NO: 8454 - DNA, 223 bp, Zea mays
  Clone ID: LIB3061-097-Q1-N6-E8
gagataaatctcaatcaatatattgattatttctaggaaacacatgccggaatgagggcaccattatcgagtacatctcatatgtaatctaaaaaaggcacctccaacgatgggttgctgcctcgacaagacagggtttatcaaagagaactggttgtatggcagcaattgttgctgctgtaggaaggcagcgaccaatgggttagccactgctagtggatta

SEQ ID NO: 8455 - DNA, 524 bp, Zea mays
  Clone ID: LIB3061-097-Q1-N6-E9
aaaaatgtactttcttatttctgggaagccacaaacatcagacaaaaaactttattattgaactataactcataagaaatctaaaagagggccccaccaatgatgggttgttggtagaatgctgttgggtttgtcaaagcaagttggttgaatggcagcaattgttgcagttgtaagagggtgccagcgttaggcgcagcgtgctggtagaacggcaacaattgtggttgtgtcaaaaaggtagcagggctcacaccagctagctggctgaatggtagtagttgttgctgctgtaaataagcaggagagttcaaagctgtcagttggttgaatggaaaaaattgctgggggtaggcagcaaatagctggctgaatggtagttgttgttgttgcaaataaaaagcaaagttcaatgcaactagttggttgaatggaaaaaactgttgttgctgaaagtaggcagcaaggtttgctagcacaagttgttgtagttgttgtgccctgatgttttgtgccaataaatg

SEQ ID NO: 8456 - DNA, 159 bp, Zea mays
  Clone ID: LIB3061-097-Q1-N6-F10
ctaaaaagtactttcttatttctgggaagccacaaacatcagacaaaaaactttattattgaactataactcataagaaatctaaaagagggcaccaccaatgatgggttgttggtagaacgctgctgggtttgtcaaagcaagttggttgaatggcag

SEQ ID NO: 8457 - DNA, 191 bp, Zea mays
  Clone ID: LIB3061-097-Q1-N6-F11
ccaaacatcctttttccctattttttattcctttccatttcaatggttcattcaggtcattgctcacactgccccccatggggatgggggacactccgttcctcatcgccgctaaacgagggaactagctttagccctataggtagctagtcagcggctccattacatttttactacagtacatagtttcc

SEQ ID NO: 8458 - DNA, 589 bp, Zea mays
  Clone ID: LIB3061-097-Q1-N6-F2
gaaaaatccaagataaatgaaccaagttttgctgttcaagacatactcggacagacaccacccggtacaatgtgacgcgcaccgacttgacagaccaacaacgcacaaatatgtctaccaggatcctacgactgacgctacatatatattggtagcctttctttcgtctgtggcaaatgaacttggcacaaccacaagaaacctcccataacaaacaaaccaaaatcaacctacattaggagaccaccgcctggtttatcatcccctgggcccattgtgcagtctcccgaacttcatcatccaactgttgggcttggcactccctcaagaactcaacatggaataggtgggtcttgaacagatcctttgagctctggccaagcgtgtctgcaagatccccaaggacagcaactgcagcctttgtcacactgtcatccctgctcctatctttgaagacagcttcagtgaactgtagtagatgtgttgcatatgggatcatcagctgagcttttgggcccttgatgccctggagtataccagagtatgcctcaaaaagccacgtctgagctggttgccataatcaaccata

SEQ ID NO: 8459 - DNA, 560 bp, Zea mays
  Clone ID: LIB3061-097-Q1-N6-F4
atgttgtgcacgcccacagccttctatttttgcctaatatacgggcatcaaaatatggttacaaccaaagcagctcttcccatagttcaattacaccagtctttaacacaaattacacaatatttatgcctcccgatacaaatacatgtaatcaaatcgcagccaaaagaccaatcattaagttactcttaatatacatacaagagcggtgctagccgacaaccgttcccagggaagcgacttactcctagtgagcgacctcatcagttctggcagataaaaacggacctattgagggcgattggttactctttaatggtcaccgcaaggtgtcttagtaaataactaagacaaaaaaaatcgcctcaggtaagagcagctgtcgcagaaaaggtccatacctccattagtttgagatatccccgttatggtactggggttgcatataacccattccttggttgtatgctccctgttggcccatcccttgtgcagctgagctacttgctcccacatgaccaagggcatcctttttaattgagccatcgctagattttgca

SEQ ID NO: 8460 - DNA, 536 bp, Zea mays
  Clone ID: LIB3061-097-Q1-N6-F5
gcaaaaacagcactcaccattcaaaactatttgacatcccattgcagtgttcggagcatctcacggagggcctcgcctcttcatatgtgttttgtacaattgcgctcattcagaaggagctcccgtttacaagagattttggctgctaatgtggtaccagtaaaaaaaaaagctacagtaccaagcaggtggtatcacccgaagaggtggtctatctgaatgtggcctcatgagggctacacaaattctctgggtatcacttattcgtctgtttattatttgcgtcagattcagctttccacacgatatctttcagctccgatgagaagttcttgtaaaagctgtggaactccaatgtgtctcctccggttttacgaagctcaaccatgtgaagtgatggggcaacctcaaaaacctcagttgcaacagataagtgaccttttcttccagatttgtcacctttcaatttcatcttgtaattttgtttccgcacgttgaaaccgagtggcccacatgcatcctctatttttgtcatg

SEQ ID NO: 8461 - DNA, 576 bp, Zea mays
  unsure (1)..(576): unsure at all n locations; Clone ID: LIB3061-097-Q1-N6-F7
gaggcaaccagaaatttctgttcactacagaattgagtgaccaaacataaaaggagccatcaagtccaatagcacccttacaacacctgcaacacacaattgagatgatcatactcaagtctaaacacattccaacaagctctcaaacgatggcatttgctgcactggcgatcctaggccaaaggtcagcacactccttgccgataggtccagtgattgcagaacctttcatctcacccttgggattcacaatcactccagcattatcttcgaagtacatgtagacaccgtccttgcgacgccacggcttgcgctggcggacgatgacggcgggcatcactttcttcctgaggtcgggctttcccttctttacggtggccatgaccatgtcgccgacacaggcggacgggaggcggttgaggcggcccttgatgcccttgacggagatgatgtagaggttcttggcgcccgtgttgtccgcgcagttcaccgtggccgccaccggtagacccagtgacatgcgngaacttgttcccagccgaacctcccctacctcgcttcgacatgacggcggct

SEQ ID NO: 8462 - DNA, 389 bp, Zea mays
  Clone ID: LIB3061-097-Q1-N6-F8
ggggggggtttttttttgtttacaaaaagaaaaaaaaaattttggtttttttaggggaaaaaaaggggggggggggggcccctttttttagggggccggggggggcccccgggaaaatcgggccgggcccgggggggggaaaaaatttcccttaaaggggggaaaaaaaaaggggggggaaaaaagggaaaagggggtccccggggaaaaaaggtgtcccccaaaaatttccaaaaaaaataggggggggaaaaaaaaagggaaaacccggggggccctaaggggggcccaaacccaattttatgggggggagccaaagggcccttttcaaaaggaaaaacccccccgccccgggtttttaaaaaatccccccccccccgggggggggg

SEQ ID NO: 8463 - DNA, 575 bp, Zea mays
  Clone ID: LIB3061-097-Q1-N6-G1
gtcgcaactcgcaagtataataggcaccggactaaaagtagtagttcagtttacattccagaatgacagttcattcgtctaggaatccaagtcaaactttaagttgagtcgttgctctgaactgtatagctagcagatgcgaagtgttctttcaccagagcaagagctttccctctgtgagatatgttgttcttcactgacttgggcatctcagcatatgtttgttcaaaaccatctggctggaacacaggatcccacccaaaataattagggcctctagcaggcacgatctttcccgcagttttgccaacaaatgtgattggttcctctccaggtccaagagcaagagagaagatgcacatagcaaacgctgatttatcttcataagcttttaacagattatttaaaccttcatgcccaatcttctcaagaaaccactttatgtagggtcctggtaggcctttgagcgcattaaaacataggcaggtgtcctccaccagtacaggcccattcacctgagatgcagcgattcgtgctttctctttggatatgtactctggctccccttgcagttc

SEQ ID NO: 8464 - DNA, 300 bp, Zea mays
  unsure (1)..(300): unsure at all n locations; Clone ID: LIB3061-097-Q1-N6-G10
gaatctagaaagtactttcttatttctgggaagccacaaacatcagacaaaaaactttattattgaactataactcataagaaatctaaaagagggcaccaccaatgatgggttgttggtagaatgctgctgggtttgtcaaagcaagttggttgaatggcagcaattgttgcagttgtaagagggtgccagcgttaggcgcagcgtgctggtagaacggcaacaactgtggttgtgtcaagaaggtagcaggngctcacaccagctagctggcntgaatggtagtagttgttgctgctg

SEQ ID NO: 8465 - DNA, 515 bp, Zea mays
  Clone ID: LIB3061-097-Q1-N6-G12
agtaatatataggatgacagatatagttgatccaaagcaggtaatggaaatacaaaggttcataaaaaggtttgctgcaacttctagggcagcttataacagtacatactagcagcacaaatggtcaaggaacagcatgccagacaacgcattttgcgcccgaacgctcgacttcctgtcaagcggcttttaccataccaaggttacacgatccatcgatgcaataccattgtaggttcttgttttgtagacgcaaacgcagccgatctatatgacagacccatcgttgatggttgcattcttcaagatcaccacgattccagaccttatgtagtacccttcttccgggtgatcagcctcttggatgcccttactgtttgtgatcaccacgttcttcccaatcctagcattcatgtcaatgatacagttccttatctttgtgttccttcctattccaactgggaccttcccagctaacagtagctttgaagcttcttcttcagtttcataggtgt

SEQ ID NO: 8466 - DNA, 552 bp, Zea mays
  Clone ID: LIB3061-097-Q1-N6-G2
aaaaatgtactttcttatttctgggaagccacaaacatcagacaaaaaactttattattgaactataactcataagaaatctaaaagagggcaccaccaatgatgggttgttggtagaacgctgctgggtttgtcaaagcaagttggttgaatggcagcaattgttgcagttgtaagagggtgccagcgttaggcgcagcgtgctggtagaacggcaacaactgtggttgtatcaaaaaggtagcagggctcacaccagctagctggctgaatggtagtagttgttgctgctgtaaataagcaggagagttcaatgctgccagttggttgaatggaaaaaattgctgggggtaggcagcaggtagctggctgaatggtagttgttgttgttgcaaataaaaagcagagttcaatgcagctagttggttgaatggaagaaactgctgttgctgagagtaggcagcaaggtttgctagcacaagttgttgtagttgttgtgccctgatgttttgtgccaataaatgcaccaaaggtaactgatgtaatagggct

SEQ ID NO: 8467 - DNA, 342 bp, Zea mays
  Clone ID: LIB3061-097-Q1-N6-G4
gctaaggaaaaaaacatattatttctctttctggatccagggggtgtatacatgagatgctttacaagagcagcagacagacagggtttccagcattgaacttcttatcaacagcatccatccatgagccaatggaaacaacaagcttcagcagctcagtgatcgacacacgctcgcttgaacgacacctcggaccacctagtaattaagagactcccttcttcccttcacgacgtccacgccagtcacatcgccgccttcaaggccatcgtctcagggagcggttcctgcttcagtttcccttgcgtgaatctcctcagcatctccagggcagctttcggc

SEQ ID NO: 8468 - DNA, 558 bp, Zea mays
  Clone ID: LIB3061-097-Q1-N6-G6
ctggaaatgtaacttcttatttctggttggccacatacatcatccaaaaactttatttttgaattacaactaataagcaatctaaaagagggcaccaccaatgatgtgttgttggtaggaggccgctcggtctgtcaaagcaagttggacaaagggcaacaattgttgtagttgtaagagggttgcggggttagccgcaaactgctggtagaaaggcagcaactgttgctgtgtcaagaaggaagcacggtttgctgcagctagctggctaaatggtagtagtatttgctgctgcaaataagcagcggggttcagtgcggccaattggttaaatggaaaaagttgttgttgctgaaagtaggcagtagctagctggctgaatggtaatagttgttgctgcaaataagcagcagggttcagtgtaaacagttggttgaatggaaaaaattgttgttgctgagagtagggagaaaggtttgccagagctacttggttgatcacaggtagcacgagttgctgcagctgctgtgccctgatggtttgtaccaatgactgcac

SEQ ID NO: 8469 - DNA, 582 bp, Zea mays
  Clone ID: LIB3061-097-Q1-N6-H10
aaatctcaatcaatatattgattatttctaggaaacacatgccgctatgagggcaccattatcgagtacatctcatatgtaatctaaaagaggcacctccaacgatgggttgctgccacaacaaggcagggttcatcaaagagaactggttgtatggcagcaattgttgctgctgtaggaaggcaacgaccaatgggttagccaccgctagtggattaagtaactgttgtcgctgttgtaggtacgcagcagagttcgacacagtcagttggttgaatggaagcagctgttgcaagtaggcagcagggtttgccacagctagctgagtcagagctggtacaatctgttgcagcaactgttgttgcaggtatgtaggtgcattaaccacagcgagagggctagatgaaatcagttgttgctgttgtaggtaggcggcagggttcaccatggctagttgactgagcgctggtagaaactgttgcaattgttgttgttgttggtatgcaactatgtttgccagagcaagtgggttggatgcaagcaactgctgttgcaagtaggcgacagggttcaccacagcta

SEQ ID NO: 8470 - DNA, 590 bp, Zea mays
  Clone ID: LIB3061-097-Q1-N6-H11
atcgagataaatctcaatcaatatattgattatttctaggaaacacacgtcggtatgagggcaccattatcgagtacatctcatatgtaatctaaaagatggcacctccaacgatgggttgctgcctcgacaagacaggattcatcaaagagaactggttgtatggcagcaattgttgctgctgtaggaaggcggcgaccaatgggttagccactaccaatggattaagtaactgttgtcgctgttgtaggtacgcagcagagttcgacagagtcagttggttgaatggaagcagctgttgcaagtaggcaacagggtttgccacagctagttgagtcagagctggtacaatctgttgcaacaattgttgttgcaggtatgtaggtgcattgcccacagcgagcgggctagatgaaagcagttgttgttgttgtacgtaggcggcagggttcaccatggctagttgactgagcgttggcagaaactgttgtagctgttgttgttgctggtttgcaactacgttcgccagagcaagtgggttggatgcaagcagctgctcttgcaagtaggcggcagggttcaccatggct

SEQ ID NO: 8471 - DNA, 92 bp, Zea mays
  Clone ID: LIB3061-097-Q1-N6-H2
ggttgcttggtttttttttggtaatttggttcggtttttgttaggtgttacttgtttttttttttgggagttgttattaccacttggtggtt

SEQ ID NO: 8472 - DNA, 208 bp, Zea mays
  unsure (1)..(208): unsure at all n locations; Clone ID: LIB3061-097-Q1-N6-H4
caattggtcattcaggtcattgcttacactgacactggcacccatggggatgcgtgacacattatttctcaatcattgccgctaaatgactcaactagctagctaggcagggggttttcctccgcatctaatttttttcagggggggcacccccnggctgcgcttttgggcctggagttcgctgctggaggccctcctttccgtcagt

SEQ ID NO: 8473 - DNA, 559 bp, Zea mays
  Clone ID: LIB3061-097-Q1-N6-H5
gaatgaaataatgaacttttttttctctctagatctcgaccctgtatacagaaggaatttgtcatatgaatatgatacagaagcgttgcctatgttagcatactgatcctaccagacatatcaagcatgcaacgatcgcggcagcaatcaggcaacaatgctggagacctatcctcatctagaaccagtgagctttctcctggcatgcaacgatcgcagcagcaaaatggaaatgcccatgcatgtacatatatacggaaagatggagctggctaaagcaaggactgcaacgtcaaaacacagcagacagcttcgatctaaaaaagaaaatcctgcaaagttcataacactgagggctacagcagcctttcttccacctgacatcatgagcctttaatcacctatcatgaatgtgtctcgatccaggtcacaacatggtagattcgcacatcctccgctgacagcaatgctttattgtgaccacccccaccaaaggttgcaaggaatctaatgcacaagcaactgatcttcagaacatgcatctgcaccttgctgaatc

SEQ ID NO: 8474 - DNA, 564 bp, Zea mays
  Clone ID: LIB3061-097-Q1-N6-H7
aaatctcaatcaatatattgattatttctaggaaacacacgtcggtatgagggcaccattatcgagtacatctcatatgtaatctaaaagatggcacctccaacgatgggttgctgcctcgacaagacaggattcatcaaagagaactggttgtatggcagcaattgttgctgctgtaggaaggcggcgaccaatgggttagccactaccaatggattaagtaactgttgtcgctgttgtaggtacgcagcagagttcgacagagtcagttggttgaatggaagcagctgttgcaagtaggcaacagggtttgccacaattagttgagtcagagctggtacaatctgttgcaacaattgttgttgcaggtatgtaggtgcattgcccacagcgagcgggctagatgaaagcagttgttgttgttgtacgtaggcggcagggttcaccatggctagttgactgagcgttggcagaaactgttgtagctgttgttgttgctggtttgcaactacgttcgccagagcaagtgggttggatgcaagcagctgctcttgcaagtaggcg

SEQ ID NO: 8475 - DNA, 562 bp, Zea mays
  Clone ID: LIB3061-097-Q1-N6-H8
aacatccaaataaacatgtactgcatggaacatgagtacaggaagtcaggaatgcataaggttggttgcataagaaaaacaattcctaaatatattgtttcctctatgaataacgactgatgagttctgccccatgaagtgctgtggcagcataatgtatgcccaaaactgtaaatagctaactcgaatgatacaagcaaaccacagagttttcacaaggtagctaaagataatttgttggtttcagactgatctcttcataagtggcagtgagtaatgagctcttgcatctgatacctcattcgtttcatgctcctgagctcctcaggtccatattgctgcgcatcagcctctttctgttctacgctgtgtttgtcacagtatgctttgtgctgtgatgtagtaccaaaccctttcgtgttcatgtataaaccagaacttctagcgcaagtaggatggaaagtaatgttgcaatccccactactacaccttaagcacatgccaacattgcagaggcagagacaacaagtgtcttttccctctacaaggttttccattcctt

SEQ ID NO: 8476 - DNA, 215 bp, Zea mays
  Clone ID: LIB3061-097-Q1-N6-H9
gggggaaagggaacttttttttttgggggggccccctcctttttcaaaaaaattttttttttggtttcccccttaaatttaattaaaaagaggggcccccccaattttttttttttggaagggggcttttggttttttaaaaaaaagtgggaaaaagggaaaaatttttttttttttaaaaagggggggggggttaccccaaaactgtttttaaa

SEQ ID NO: 8477 - DNA, 156 bp, Zea mays
  Clone ID: LIB3061-101-Q1-N6-A8
gtttggggggtttttttttttttttttttttttttttttttgtttttgtttttttgtcgggttcttttttggggttttggtgctttcggccgggtgctctgtggggtggtgtttctctggtggtctttttctttggggggcttctggtgggggggg

SEQ ID NO: 8478 - DNA, 455 bp, Zea mays
  Clone ID: LIB3061-101-Q1-N6-A9
gtggggggggggtggtgttttttttttttttttttttttttttttttttttttttttttttttgggaaaaagaaaactctttgttttattggccccttggagggcttaaattttttgggggggctaccccccccggtgcctgggctttgcgggggggggggaagtttcagaacctttttggtgcttgcttgcctgcctttgccgggtttgggagaggggtttttctctctttggcgggccccgccctgccgggccgggccgggggccccggtttccctcccctggggccttgccgacccatggtctggttggggtttaaaccggggatggatatgggctttttttctgcccacagtcggcggggaagtgctcgggtgggtggtggttcctggtttgtccccccgaatggcccggggtgggggcctaggcctccttttacaccccagggttttggc

SEQ ID NO: 8479 - DNA, 159 bp, Zea mays
  Clone ID: LIB3061-101-Q1-N6-B1
agaaatgtactttcttatttatgggaagccacaaacatcagacaaaaactttattattgaactataacttataagaaatttaaaataggcaccaccaatgatgggttgttggtagaacactgttaggtttggcaaagcaagttggttgaatggcagcaa

SEQ ID NO: 8480 - DNA, 417 bp, Zea mays
  unsure (1)..(417): unsure at all n locations; Clone ID: LIB3061-101-Q1-N6-C9
tttttttttttgtttttttttttttttttttttttttttttttttttttttttttttttttttttttttttttttttttttttttttttttttttttttttttttttttttttttttttttttttttttttttttttttttttttttttgtgttttttttttttttttttttttttttttttttttttttttttttttttgggggggggggggtgttttttttttttttgggggggggggggtggttgggaaaaaatttttttttttttttaaaaaaaaaaaaaaaataaaaaaaggggggaaaaaaatttttttttttttgggggggtgtttttttttttaaaagataattgtaaaaaaaggaaaaaatttttttataaaagaaaggggggattgngattaaaaattttttttatt

SEQ ID NO: 8481 - DNA, 107 bp, Zea mays
  unsure (1)..(107): unsure at all n locations; Clone ID: LIB3061-101-Q1-N6-D11
gntttttttttttttttttttttttttttttttttttttttttttttttttttttttttttttttttggggaaggaactttttttctggggggcccatacattagcc

SEQ ID NO: 8482 - DNA, 484 bp, Zea mays
  unsure (1)..(484): unsure at all n locations; Clone ID: LIB3061-101-Q1-N6-D4
agtgccggcttttagcatttttttaactccagaagatacagcctcacgacaactgttgaaaagggaaaatcagttcatgatggccacaaacatgcaagagctggaagtngattccgagtagaggtccaacgtccaaggctctcgctatctcgagtccacaacggtgccttctggaagcgcggtcaggtgcacaagaggggcatgtgatttcagggaagcattggcaccagtgatcttggtctcctttgttctgttgagcaccttcctcacctcgtttgcaagctctatgatcgaatcatcttcgtggctaatgctggctaatgccttctccattgaaacaggtaatccctattatagccagtagggccattggctgtagcaatttgccttgccatatcctgcaaaggagcagggccaagatagtacttgttgccaattggatctggagtggaaacgaacactaagacgcctgtcacagctggtt

SEQ ID NO: 8483 - DNA, 498 bp, Zea mays
  Clone ID: LIB3061-101-Q1-N6-D5
ccaatcatcttttttccttatatattattcctttccatttcaatggttcattcaggtcattgctcacactgccacccatggtgatgggtgacactacgttactcatcgccgctaaatgagtaaactagcgagctaggtagctagtcagcggctccattacattattactacagtacatagtttcctcagtagtagacaccgccggcagctgcgttgcaagggcagggacctggctgctgcagctgcaggccgcacatcgccgtcagctgctgcgctacctgggccgccatcagcgccgcgagctcgccctgcggctgctgctgcaggaaggactgcaggaccacaccgtatgtcgcctggtaccggtgcagcggctccacctgcctgatctggtggcagcactgctgctgcagcgcctggcactgtggcgagccgtagggcgtcgccgccgggctgcactggtgcctcaggaactcgacgcactggcccaagaacggc

SEQ ID NO: 8484 - DNA, 515 bp, Zea mays
  unsure (1)..(515): unsure at all n locations; Clone ID: LIB3061-101-Q1-N6-E10
gctccaaactaaaattatataacatatttgagcggatgtgacgattacaaatgtacaaaaatctaaagcaaaagggtggattttgatacacggngnaagatatacaggacggctgtttagaggagaggtcgcttcgattcggcggcacgctcgcgtctctccgttccccatgatggatggatgctcatgaagaccagcagctgaggcgcaacgcctcctcgaacttgctttccagctccttatcagcgtcggccggcgccgatgacttgatctcctcgccggcgtcgcgctcgtgcagtgtcgcctccccctccggccgccactgcaacaaagcgggtgagagcacgctgctcacgctcatcctcctccagaagccgccgggggcagccgcctccctgcgcggcggcggcggcggcgtccccacctccgtcggcctgtggagctggtggtagctcaggaacagcatcgacgcgctcggggccatcgccactctgatgaatctctggttcgctcga

SEQ ID NO: 8485 - DNA, 552 bp, Zea mays
  Clone ID: LIB3061-101-Q1-N6-F3
aagaatctagaatgtactttcttatttctgggaagccacaaacatcagacaaaaaatttattattgaactataactcataagaaatctaaaagagggcaccaccaatgatgggttgttggtagaacgctgctgggtttgtcaaagcaagttggttgaatggcagcaattgttgcagttgtaagagggtgccagcgttaggcgcagcgtgctggtagaacggcaacaactgtggttgtatcaagaaggtagcagggctcacaccagctagctggctgaatggtagtagttgttgctgctgtaaataagcaggagagttcaatgctgccagttggttgaatggaagaaattgctgggggtaggcagcaggtagctggctgaatggtagttgttgttgttgcaaataagaaacagagttcaatgcagctagttggttgaatggaagaaactgctgttgctgagagtaggcagtaagggtttgctagcacaagttgttgtaattgttgtgccctgatgttttgtgccaataaaagcaccaaaagtaactgttgtaa

SEQ ID NO: 8486 - DNA, 255 bp, Zea mays
  Clone ID: LIB3061-101-Q1-N6-F8
ggcaatcaagttcatataattaaacaacatactataattaacatatttttaatatataggttcacgattatattgtcccaaactcgaatctgcttttttcaaccatcagtcatcagcccaaccgaggggggggcttacaccaaacgagacatattccacacatgcaatgatacggtgcatgtcctagcttgttcatccattcacacacattgcttaccaactactggttatttcgggattttcaaaccatgcatg

SEQ ID NO: 8487 - DNA, 543 bp, Zea mays
  Clone ID: LIB3061-101-Q1-N6-G6
agaaatgtactttcttatttctgggaagccacaaacatcagacaaaaaactttattattgaactataactcataagaaatctaaaagagggcaccaccaatgatgggttgttggtagaacgctgctgggtttgtcaaagcaagttggttgaatggcagcaattgttgcagttgtaagagggtgccagcgttaggcgcagcgtgctggtagaacggcaacaactgtggttgtatcaagaaggtagcagggctcacaccagctagctggctgaatggtagtagttgttgctgctgtaaataagcaggagagttcaatgctgccagttggttgaatggaagaaattgctgggggtaggcagcaggtagctggctgaatggtagttgttgttgttgcaaataagaagcagagttcaatgcagctagttggttgaatggaagaaactgctgttgctgagagtaggcagcaaagtttgctagcacaagttgttgtagttgttgtgccctgatgttttgtgccaataaatgcaccaaaggtaactgatgt

SEQ ID NO: 8488 - DNA, 265 bp, Zea mays
  Clone ID: LIB3061-101-Q1-N6-H3
ctagaaagtactttcttatttctgggaagccacaaacatcatccaaaaacttcattattgaagtataactcataagcaatctaaaatgggcaccaccaatgatgggttgaaggtagaacgctgttgggtttgtgaaagcgagttggttgaatggcagcatttgttgcagttgtaagagggtgccagcgttaggcgcaacgtgcaggtagaacggaaacaactggtgatgtgtcaagaaggcagcaggctcacatgagctagctgc

SEQ ID NO: 8489 - DNA, 212 bp, Zea mays
  Clone ID: LIB3061-101-Q1-N6-H4
atatatacctttattttatttatttctttcccctatccccttaccgccctcactaccactaatctccctttttataaaaactctaaaaaaacccctattataatcgggggggccccaacccctcaccaaaaagcgtgggagggaccgcagacccaagaaaaaaacaaaggggggccccccccgggggggggggggggggaaacgcggggggg

SEQ ID NO: 8490 - DNA, 268 bp, Zea mays
  Clone ID: LIB3061-102-Q1-N6-B2
ttttaataatttataaaataataaattaattaatatattaaaaaattatattttttttgctaaccaaattcaaaagggaaaaggaaaactggcaacattcttgggaaacaaaaacttggaaaattcgagggcaagctaaagatcgagaaagaagggggcccagcgaaaaggaaaatataggggcaaaaataagaaaaataaaaaccgggaaagcctatttatacatttttaagaaaaaagataggctgtttaaaaaaaaaagaccagg

SEQ ID NO: 8491 - DNA, 323 bp, Zea mays
  Clone ID: LIB3061-102-Q1-N6-B3
ggctgggggggggggggttttttttttttttttttttttttgtccaaagtaaacatttttagggattatgcaaaatcctgactggggccacaaaaactgggacaatgtttcaccattgtacgggggttcaacacattcgttttgaaacacatgtgcgtggggggtgttaagcacagtttacagattgacaaggactattacttttggtggccttgttagccttggtgggtgtgggttgagtttgtcccctgagcctttcagtgcttcttatggggttgtgaccaatcttttggctttggggaggtttttgggggacagttgag

SEQ ID NO: 8492 - DNA, 420 bp, Zea mays
  unsure (1)..(420): unsure at all n locations; Clone ID: LIB3061-102-Q1-N6-C4
gggggggggggggttttttttaaattttttttgtgttttattttttttttttttttttttttttttttttttttttttttttttttttttttttttttttttttttttttttttttttttttttttttttnttttttttttttttgggggggggggggggggttttttttttttttttnttttttnttntaaaaaaaaagaaatttttttttttgggggggccccccacatattataaaaaatatgtttttttgggttttttatttaaaggaagtaaaaaggggggccccccaaaaaggggggggtggaaaaaaaattcggtgggttagaaaaaagggggggttgggggggaaatttggggtgggggaagaagaggggcccttttttgttttatttttattttgaataaaaaaatttttc

SEQ ID NO: 8493 - DNA, 571 bp, Zea mays
  Clone ID: LIB3061-102-Q1-N6-C5
ttgttttttttttatcgagataaatctcaatcaatatattgattatttctaggaaacacatgtcggtatgagggcaccattgtcgagtacatctcatatgtaatctaaaagatggcacctccaacgatgggttgctgcaaggcagggtggatcaaagagaactggttgtatggcagcaattgttgttgctgctgcaggaaggtagcgaccaatgggttagccactgccaatggattaagtaactgttgtcgctgttgtaggtacgcagcagagtttgacacagccagttggttgaatggaagcaactgttgtaagtaggcagcagggtttgccacagctagctgagtcagagctggtacaatttgttgcagcaactgttgttgtaggtacgtaggtgcattgcccaccgcgagcgggctagatgaaagtagttgtaggtagacggcagggttcaccatggctagttgactgagcactggcataaactgttgcagctgttgttgttgctggtatgcagctacgttcgccagaacaaggggttggatgcaagcagctgctgttgcaagtaggt

SEQ ID NO: 8494 - DNA, 479 bp, Zea mays
  Clone ID: LIB3061-102-Q1-N6-C9
ggggggggtgggtgtttttttttttttttttttttgttttttttttttttttttttttttttattgtttttttttatttttgggacttctgggacttctttcaaaaaacccttttttcgttctttttctcctatgccttctaaattatggggggggggggggggggttgttggggggacacggtggggtttgtcaaagctgggagggtgaaagggaggaatgggtgcagttggaagagggggccgggggtaggcaaagcgggcatggggaacaggaacaacgggtaaaggggcaagagggcgccaagggtaacatgggttagctggccaaatggggggagtggttgatggtgttaataagcggcaaagctcaaagctgctagtggggtgaacgggacaaatggctgaaggtaggcggggactggccggccgaatgggtatagggggggcgggtgagccgaataatccaaagcagccaat

SEQ ID NO: 8495 - DNA, 122 bp, Zea mays
  unsure (1)..(122): unsure at all n locations; Clone ID: LIB3061-102-Q1-N6-D10
ggccgcccttttttttttttttttcgaagcactttttgcatacatcaccatagnanccgtttggttttttttcatcacatgctcatcgcaccttccagttgcaccacgaccaacacacacac

SEQ ID NO: 8496 - DNA, 237 bp, Zea mays
  Clone ID: LIB3061-102-Q1-N6-D2
ggaaagtaacttcttatttctaggaggccacatacccaaaaacttcattattgaattacaactaataagcaatctaaaagatggcaccgccaatgatgtgttgttggtagaaggctgctgggtttgtcaaagcaagttggacaaagggcaggaactgttgcagttgtaagagggttgcggggtatagccacaaactgcgggtctaacggaaacaattgtagtcgtttcaaaaaggaa

SEQ ID NO: 8497 - DNA, 410 bp, Zea mays
  unsure (1)..(410): unsure at all n locations; Clone ID: LIB3061-102-Q1-N6-D5
ggtgggtggttttttttttttttttttttttttttttttttttttttttttttttttttttttttttcccttgggcttccttttttcactgctcgggtttttcaatgtttaatgtttccaggctttaaccttgtgaagcattacagggggggggggccggacttttaaatggggncggtttctttggtttttttttggttcagttcaaattggtaacttgcccgttttttggcacacgaggtttgtccccttctttggtcccgaagattttctgcctgtccttggcttagggggctatccttcctcctgggttttttgaacaacattttaatttgaaccaaacgggaactcattttgtgctcgggacgcttgcgggtttagctacttcgctggtgggttttgcgggcgcc

SEQ ID NO: 8498 - DNA, 144 bp, Zea mays
  Clone ID: LIB3061-102-Q1-N6-E1
ggtggtgttttttattttcttttattttttattctttttttttttgggaaattatttttgtcttagaaaaaaggtaagcattgctctacctaaaaccaaactctttttaacaagaataacaagaaacacgtttccggggggggg

SEQ ID NO: 8499 - DNA, 498 bp, Zea mays
  Clone ID: LIB3061-102-Q1-N6-E10
agaaatgtactttcttatttctgggaagccacaaacatcagacaaaaaactttattattgaactataactcataagaaatctaaaagaggcaccaccaatgatgggttgttggtagaacgctgctgggtttgtcaaagcaagttggttgaatggcagcaattgttgcagttgtaagagggtgccagcgttaggcgcagcgtgctggtagaacggcaacaactgtggttgtatcaagaaggtagcagggctcacaccagctagctggctgaatggtagtagttgttgctgctgtaaataagcaggagagttcaatgctgccagttggttgaatggaagaaattgctgggggtaggcagcaggtagctggctgaatggtagttgttgttgttgcaaataagaagcagagttcaatgcagctagttggttgaatggaagaaactgctgttgctgagagtaggcagcaaggtttgctagcacaagttgttgtagttgttgtg

SEQ ID NO: 8500 - DNA, 469 bp, Zea mays
  Clone ID: LIB3061-102-Q1-N6-G11
gttgttttttttttttttttttttttttttttttttttttttttttttttttttttttttttttttttttttttttttttttttttttttttttttttgggggggggcccccctgtccttgggctttattttggctgggctcgcggagggggggggggcccataaaagcttgggcctcaaaatttttcccttcgggccttttggccttctccaaagggccaaaaaaggtgggtcaggggggggggtttttggcggcccttccgggctttagggagttcgggctttaccgaaccctggctttagggaattcaggcttttttaactccagcctttagggaattttatttggcgttcccaaataatttttgaaccattttgggagcctttggaaaaagaaccaaaggctttggggcctttaaattggggccttttcttgggacgggggcccttttttgtgttgctttgggga

SEQ ID NO: 8501 - DNA, 113 bp, Zea mays
  Clone ID: LIB3061-102-Q1-N6-G2
agaaagtactttcttatttttgggaagccacaaactcagacaaaaactttattattgaactataactcataagaaatctaaaagagggcaccaccaatgatgggttgttggta

SEQ ID NO: 8502 - DNA, 229 bp, Zea mays
  Clone ID: LIB3061-102-Q1-N6-G5
gtgggggggtggtttttttttttttttttttggggcgaaaagttattttacatactgcacaacatatgaattttaattcttagcatcctctccagagtccagactccaggggccgggtcattattcacctcttttggcacggcaccgggggggggggggggaaacagggggccttttacatttgagaccgttgctgtgcattgaggaccatggggcattatttttcaac

SEQ ID NO: 8503 - DNA, 78 bp, Zea mays
  Clone ID: LIB3061-102-Q1-N6-H12
gtgtattgtggtcttttgttgttcgttcgtttgccttttgttcttgttttgggttttttcatagcatatgcttgcgtt

SEQ ID NO: 8504 - DNA, 84 bp, Zea mays
  Clone ID: LIB3061-102-Q1-N6-H3
gggggggttttttttaatttttttttttttttttttttttttttttttttttttatttaatttgtactgaagtaaaaaatatta

SEQ ID NO: 8505 - DNA, 195 bp, Zea mays
  Clone ID: LIB3061-102-Q1-N6-H7
gtggttgtttttttgtttttttatttttttttttttttttttttaaaagtgctttttttttgggtgcccaaacatcatgcaaaaaatttttgttggacttactcatttttttttaaaagagggctcctccaatgtatggggggggggtggaacgctgctggggttgtcaaatcaaggcggtttgatggcaagaaa

SEQ ID NO: 8506 - DNA, 497 bp, Zea mays
  Clone ID: LIB3061-102-Q1-N6-H9
gtgggggttttttttttttagaaatgtactttcttatttctgggaagccacaaacatcagataaaaactttattattgaactataactcatagaaactaaagggggcaccaccaatgatgggttgttggtagaacactgctggggtggggagggcaagttggttgaatggcagcaattgttgccgttgtgagagggtgccagcgttaggcgcaacgtgctggttgaacggcaacaactgtggttgtgtcaagaaggtagcagggctcacaccagcttgctggctgaatggtggtagttgctgctgctgttaataagctggagagttcaatgctgctagttggttgaatggaagaaatcgctgggggtaggcagcaagtagctggctgaatggtagttggtgttgttgcatataagaagcagagctcaatgaacctatttgcgtgagtggaagaaactgctgctgctgagagtatgcagcaaggatcgctcgcccaag

SEQ ID NO: 8507 - DNA, 658 bp, Zea mays
  Clone ID: LIB3061-103-Q1-K6-A11
tgacccttctgcagccgcctgtctgtgtacaacaacaaagccatgagcagcaacatcatccacaacaacatcatccacaaaaacaacaacatcaaccaccaccacaacatcaccagcagcagcaacaccaacaacaacaagttcacatgcaaccacaaaaacatcagcaacaacaagaagttcatgttcaacaacaacaacaacaaccgcagcaccaacaacaacaacaacaacaacagcaccaacaacaacatcaatgtgaaggccaacaacaacatcaccaacaatcacaaggccatgtgcaacaacacgaacagagccatgagcaacaccaaggacagagccatgagcaacaacatcaacaacaattccagggtcatgacaagcagcaacaaccacaacagcctcagcaatatcagcagggccaggaaaaatcacaacagcaacaatgtcattgccaggagcagcaacagactacaaggtgcagctataactactatagcagtagctcaaatctaaaaaattgtcatgaattcctaaggcagcagtgcagccctttggtaatgccttttctccaatcacgtttgatacaaccaagtagctgccaggtattgcagcaacaatgttgtcatgatcttaggcagattgagccacaata

SEQ ID NO: 8508 - DNA, 609 bp, Zea mays
  Clone ID: LIB3061-103-Q1-K6-A12
agaaggacgatgaggcggacaagaagaaggacgatgagaagaaggcggagcccgagccgccgaagccggaggagaagaaggagccgccggtgatcgccgtggtgctgaaggtgcacatgcactgcgaggcgtgcgccgaggggatcaagaagaggatcctcaagatgaaaggcgtgcagtccgtagaaccggacctcaaggcgtcggaggtgacggtgaagggcgtgttcgaggagtccaagctggcggagtacgtgtacaagcgcacgggcaagcacgcggccgtcgtcaagtccgagccggccccggcgccggagggcggcggcggcgacaaggcggccaaggaggaggagaagaaggatgcaggcggagccggaagcgaggagaagaaggacggcaaggaggaggaagagaagaaggacggcggcgagaagaatgaggagaagaaggacggcggcgacggagacggcgacaagaaggacgaggccggcgacaaggacaaggacccggccgccagcctgtacatgcactacccgcggttcccgttcgcttgagggtactaccagccgccggcctacccgccgtcttcggtgtacccgtacgcctacc

SEQ ID NO: 8509 - DNA, 666 bp, Zea mays
  Clone ID: LIB3061-103-Q1-K6-A7
ggaatacagtagcaaaaatagagcaacaatggcggccaagatattttccatccttatgctccttgctctttctgcatgtgttgctaacgcgaccatttttcctcaatactcacaagctcctatagctgcccttcttcccccataccttccatcaatgaccgctttagtatgtgaaaacccagcccttcaaccctacaggatccagcaagcaatcgcaacaagcaacttacctttatcacacctgttctttcaacaatcgccagccctatctttggtgcagtcattggtacaaaccatcagggcagaacagttgcagcaactcgtgctaccagtgatcagccaagtagctctggcaaacctttccccctactctcagcaacaacaatttcttccattcaaccaactgtctatactgaaccctgctgcttatttgcagcaacaacaactactaccattcagccagctagctactgcctactctcagcagcaacaatttcttccatttaaccaattggccgcactgaacccctctgcttatttccagcagcaaatactactaccatttggccagctagctacaacaagccccgcttccttcttgacacaacaacaagtgcttccgttctccagcagtttgtggctaaccccgcaaccctcttacactgc

SEQ ID NO: 8510 - DNA, 657 bp, Zea mays
  Clone ID: LIB3061-103-Q1-K6-A8
attttgatcattcagaaacacaccaagcgaagcacattagcaacaacctaacaacaatggctaccaagatattatccctccttgcgcttcttgcgctttttgcgagcgcaacaaatgcgttcattattccacaatgctcacttgctccaagttccattattacacagttcctcccaccagttacttcaatgggcttcgaacacccagctgtgcaagcctataggctacaacaagcaattgcggcgagcgtcttacaacaaccaatttcccagttgcaacaacaatccttggcacatctaacaatacaaaccatcgcaacgcaacagcaacaacaattcctaccagcactgagccacctagccatggtgaaccctgccgcctacttgcaacagcagttgcttgcatcaaacccacttgctctggcaaacgtagttgcaaaccagccacaacaacagctgcaacagtttctgccagcgctcagtcaactagccatggtgaaccctgccgcctacctacaacagcaacaactgctttcatctagcccgctcgctgtggccaatgcacctacatacctgcaacaacaattgttgcaacagattgtaccagctctgactcagctagttgtggcaaaccctgctgcctacttgcaacagctgc

SEQ ID NO: 8511 - DNA, 659 bp, Zea mays
  unsure (1)..(659): unsure at all n locations; Clone ID: LIB3061-103-Q1-K6-B2
gagaccaacaagcaacatagaaagtggaatccagtagcaacaatagagcaacaatggcgaccaagatactttccctccttatgctccttgctctttctgcatgtgttgctaacgcgacaattttccctcaatgctcacaagctcctatagcttcccttcttcccccataccttccatcaatgatagcttcagtatgtgaaaacccagctcttcaaccctataggctccaacaagcaatcgcagcaagcaacatacctttatcacccttgtttcaacaatcgccagccctatctttggtgcagtcattggtacaaaccatcaaggcacagcagctgcagcaactcgtgctacctgtgatcaaccaagtagctctggcaaacctttctccctactatcagcaacaacaatttcttccattcaaccaactatctacactgaaccctgctgcttatttgcagcaacaactattaccattcagccagctagctactgcctactctcatcaacaacaacttcttccatttaaccaattggccgcactgaacctcgctgcttatttgcagcagcaaatattactaccatttagccagctagctgcagcaagccgtgcttncttcttgacacagcaacagttgctgcctttctaccagcagtttgcg

SEQ ID NO: 8512 - DNA, 575 bp, Zea mays
  Clone ID: LIB3061-103-Q1-K6-B5
gtggaatccagtagcaacaatagagcaacaatggcgaccaagatactttccctccttatgctccttgctctttctgcatgtgttgctaacgcgacaattttccctcaatgctcacaagctcctatagcttcccttcttcccccataccttccatcaatgatagcttcagtatgtgaaaacccagctcttcaaccctataggctccaacaagcaatcgcagcaagcaacatacctttatcacccttgtttcaacaatcgccagccctatctttggtgcagtcattggtacaaaccatcaaggcacagcagctgcagcaactcgtgctacctgtgatcaaccaagtagctctggcaaacctttctccctactatcagcaacaacaatttcttccattcaaccaactatctacactgaaccctgctgcttatttgcagcaacaactattaccattcagccagctagctactgcctactctcatcaacaacaacttcttccatttaaccaattggccgcactgaacctcgctgcttatttgcagcagcaaatattactaccatttagccagctagctgc

SEQ ID NO: 8513 - DNA, 156 bp, Zea mays
  Clone ID: LIB3061-103-Q1-K6-B8
aaaaaatttaaaaaaaaaaaaaaaaaaaaaaaaaaaaaaaaaaaaaaaagggcagaaaaaataaaaaagaatcaaaaataaaaaacacaaaattaaaaaaaaaataggggcggcctttttaaaggaacaaagattccatgggcgggcttgcaacaa

SEQ ID NO: 8514 - DNA, 665 bp, Zea mays
  Clone ID: LIB3061-103-Q1-K6-C11
agaccaactagcaacatagaaagcacaatagtgtaccaacaatggcagccaaaatattttgcttccttatgctccttggtctttctgcaagtgttgctaccgcaaccattttcccacaatgctcacaagctcctatagcttcccttcttcccccatacctctcaccagcggtgtcttcaatgtgtgaaaccccaattgttcaaccctacaggatccaacaggcaatcgcaacaggcatcttaccattatcacccttgttcctccaacaaccgtcagccctattacagcagttacctttggtccatttggtggcacaaaacatcagggcacaacaactacaacaacttgtgctagcaaaccttgctgcatactctcagcaacatcagtttcttccattcaaccaactggctgcattgaactctgctgcttatttgcaacaacaattaccattcagccagctagttgctgcctacccccagcaatttcttccattcaaccaactagcagcattgaactctgctgcttatttacagcagcaacaactactaccattcagccagctagctgatgtgagccctgctgccttcttgacacaacatcagttgttgccgttctacctgcacgctatgcctaacgctggcaccctcttacaactgcaacaattg

SEQ ID NO: 8515 - DNA, 524 bp, Zea mays
  Clone ID: LIB3061-103-Q1-K6-C4
aaacaatgctgcgacagctcgacaaagatttgtgagagtgatccggcgctgagaagagatggctaagatcgccgcagccgccgcggcggcggcggcgctgtgcttcgcggccctggtggccgtggccgtctgccaaggcgaggtcgagcggcagaggctcagggacctgcagtgctggcaggaggtccaggagagcccgctcgacgcgtgccgccaggtcctcgaccggcagctaaccggcggcggcgtcggcggcccgttccggtggggcaccgggctccggatgcggtgctgccagcagctccaggacgtgagccgcgagtgccgctgcgccgccatccggagcatggtcaggggctacgaggaggccatgccgcctctggagaaaggctggtggccatgggggcggcagcagcagccgccgccgcaaggaggaggaggaggacaggggggctactactacccctgcagccgggcaggagagggataccaaacgcagatgtatccaccgtgtcgtcccggca

SEQ ID NO: 8516 - DNA, 611 bp, Zea mays
  Clone ID: LIB3061-103-Q1-K6-C7
cgcaaattgcaccaagaaatccatcgagatgccgtcgacaggggaattaatggcgtcgtcgtctagcagcagccaccgccgcctcatcctcgcagccgccgtcctgctctccgtgctcgcggctgccagcgccagcgccgggacctcctgcgtgccggggtgggccatcccgcacaacccgctcccgagctgccgctggtacgtgaccagccggacctgcggcatcgggccgcgcctcccgtggccggagctgaagaggagatgctgccgggagctggcggacatcccggcgtactgccggtgcacggcgctgagcatcctcatggacggcgcgatcccgccgggcccggacgcgcagctggagggccgcctagaggacctgccgggctgcccgcgggaggtgcagaggggattcgccgccaccctcgtcacggaggccgagtgcaacctggccaccatcagcggcgtcgccgaatgcccctggattctcggcggcggaacgatgccctccaagtaactgcgaagagcatagtgcatgaggaatgagcttgtagctagctcatatgtctgaataataagcacagcaagaagatgaatgcatttctcggatc

SEQ ID NO: 8517 - DNA, 651 bp, Zea mays
  Clone ID: LIB3061-103-Q1-K6-C9
cgggttcgtgaggttctccggggttcggtttcgtgggtgagcggatcgagatggcggcgtcggatgttgagtaccgctgcttcgtcggcggcctcgcctgggccacggacgaccactccctccacaacgccttcagcacctacggcgaggtcctcgagtccaagatcatcctcgatcgggagacgcagaggtcccgcggcttcggcttcgtcaccttctccacggaggaggcgatgcggaacgccatcgagggcatgaacggcaaggagctggacggccgcaacatcaccgtcaacgaggcccagtcccgcggcggccgtggaggcggcggcggcggcgggtacggtggtggccgtggaggcggcggctacggcggtggcgggcgccgtgatggcggcggcggctacggcggtggcggcggctacggtggtggcggcggcggctacggtggtggtggcggcggctacggcggtggcaaccgtggcggcggctacggcaactccgacgggaactggaggaactgagcggtggggcccgcgcggccaagttatcctgttcgctaccgtgttgtttaccctagtccagagtgtttttcttcgttcgtctcgtgtttggtgttgcccatctgtgtttttgattgaaggtcgctct

SEQ ID NO: 8518 - DNA, 519 bp, Zea mays
  Clone ID: LIB3061-103-Q1-K6-D10
ggagtctcttgggtacaataccaacaccattgagccctataggttctaacaagcattatgctcatggatcatacctgaatgactgctgacgcgacaacaatcgccagacgtatataagctgcaatcattggcacaaaccatcaatacacagcagctatgatagctcgagctagctaaaaccaaccaattcaaccctatcaagcttcaacaagcaatctcagcaagaaccataccttccatacaaccaactgaacacactgcagcctgatgtttattgcaagcatcaactcttaccattaaggcacataacttctagctactctcactaacaacaaccaaccacatttaaccaatagaccgtactgaatactatcagcttatatacgcagcatcaacatactactaccatttaaccatgtagcttgatgataacgtgcatcctcatctacacacattcagtcacttacttactacctactgttatcaactaacacttcatccatcttacaactacaacaa

SEQ ID NO: 8519 - DNA, 622 bp, Zea mays
  Clone ID: LIB3061-103-Q1-K6-D5
gtcacccctctaacaccacgccgccgccgtttgctgctcggcgcctctcctcacaacccgtacgccaacgtctccaatctcgtatactttcgtgctcagcatcatggacggcttccccaagagcgtcggcggtggcggccctaacattccggcgggatcccaccccgcaggcgggagccaggcggcggcaggaggaggcgcgacgcagcggacgcagtatccgtatgtgactggtaattcagtcattgccttgaaatacaaggatggtgtgatcatggcatgtgacactggagcctcttatggatcaactttgagatacaagagtgtggaacgcattaaggcagttggcaagcatagcatcattggagcaagcggagagttcagtgacttccaggagattttgcgctatttggatgaactaactctgtctgatcatatgtgggatgatggaaactcgctgggccccaaagagatccacagctatttgacaagagtgatgtacaaccggcgcaacaagtttgatcctctctggaactcacttgtacttggtggggtgaaaaagggtccaaagggtgatgagaagtatcttgggatggttaacatgattggtacccacttcgag

SEQ ID NO: 8520 - DNA, 318 bp, Zea mays
  Clone ID: LIB3061-103-Q1-K6-D7
atgttaataaaagatgggatttttagtttctatttgtgagctcagatggtgttacgtcatgcgcacataagcaagcgtgtacagatggagagccaataagagatggatgcaaatttgtgatgtggtctgcaaaattgtttcatgcaaatgttagggagaaatcatgtaatgttagtcctcttttataggttccgtttggttcaaggtcttgttaagggaatgctaaagagctcaaccaaacaaaagtattggtaactactagaggtgtaatccgatcgaatacagacgaatatcactgaaattaaatttgttattcgg

SEQ ID NO: 8521 - DNA, 120 bp, Zea mays
  Clone ID: LIB3061-103-Q1-K6-D8
gttgattatttagcggcgatgattgagtaataatgtgtcacgcatcaccatgggtggcagtgtcagtgtgagcaatgacctgaatgaacaattgaaatgaaaagaaaaaagtattgttcc

SEQ ID NO: 8522 - DNA, 661 bp, Zea mays
  Clone ID: LIB3061-103-Q1-K6-E10
gagaccttttagcaacatagaaagcacaatagtgtaccaacaatggcagccaaaatattttgcttccttatgctccttggtctttctgcaagtgttgctaccgcaaccattttcccacaatgctcacaagctcctatagcttcccttcttcccccatacctctcaccagcggtgtcttcaatgtgtgaaaacccaattgttcaaccctacaggatccaacaggcaatcgcaacaggcatcttaccattatcacccttgttcctccaacaaccgtcagccctattacagcagttacctttggtccatttggtggcacaaaacatcagggcacaacaactacaacaacttgtgctagcaaaccttgctgcatactctcagcaacatcagtttcttccattcaaccaactggctgcattgaactctgctgcttatttgcaacaacaattaccattcatccagctagttgctgcctacccccagcaatttcttccattcaaccaactagcagcattgaactctgctgcttatttacagcagcaacaactactaccattcagccagctagctgatgtgagccctgctgccttcttgacacaacaacagttgttgccgttctacctgcacgctatgcctaacgctggcaccctcttacaactgcaac

SEQ ID NO: 8523 - DNA, 664 bp, Zea mays
  Clone ID: LIB3061-103-Q1-K6-E11
caactattttcatacatagtagaagcacactagcaacatcttagcaccaatgggagccaagatttttgccctccttgccctccttgctctttcagcaagcgctgctacctcgacttttattccacaatgctcacaacaatacctctctccggtgacagccgcgggatttcaatacccaactatacaatcctacatggtacaagaggccatccaagcaagcatcttacggtcattagcattaaccctccaacaaccatatgctctattgcaacagccatccttagtgcatctgtatctccaaagaatcgcggcacaacaactacaacaacagttgctaccaacaatcaatcaagtagttgcagcgaaccttgctgcttacctccagcaacaacagtttcttccattcaatcaactagctggggtgaaccctgctatctacttgcaggcacaacagctactaccatttaaccaacttgtcgggagcccttatgccttcttactgcaacaacagcttctgccattccatctgcaagctgtggcaaacattgttgctttcttgagacaacaacatttgttgccattttacccacaagttgtgggaaacattaatgccttcttgcaacagcaacaattgctaccattctacccacagaatgtggcaaac

SEQ ID NO: 8524 - DNA, 641 bp, Zea mays
  Clone ID: LIB3061-103-Q1-K6-E7
caacaagcatacatagaaagtggaatacagtagcaaaaatagagcaacaatggcggccaagatattttccatccttatgctccttgctctttctgcatgtgttgctaacgcgaccatttttcctcaatactcacaagctcctatagctgcccttcttcccccataccttccatcaatgaccgctttagtatgtgaaaacccagcccttcaaccctacaggatccagcaagcaatcgcaacaagcaacttacctttatcacacctgttctttcaacaatcgccagccctatctttggtgcagtcattggtacaaaccatcagggcagaacagttgcagcaactcgtgctaccagtgatcagccaagtagctctggcaaacctttccccctactctcagcaacaacaatttcttccattcaaccaactgtctatactgaaccctgctgcttatttgcagcaacaacaactactaccattcagccagctagctactgcctactctcagcagcaacaatttcttccatttaaccaattggccgcactgaacccctctgcttatttccagcagcaaatactactaccatttggccagctagctacaacatgccccgcttccttcttgacacacaacaagtgctttc

SEQ ID NO: 8525 - DNA, 425 bp, Zea mays
  unsure (1)..(425): unsure at all n locations; Clone ID: LIB3061-103-Q1-K6-E9
ggtcgatttcgcgtccgatcagcgtagccggagggcgacaccctactgctcgcctcagtgccagtcgttgcggcagcagtgttgccagcagctcaggcaggtggagccgcagcaccggtaccaggcgatcttcggcttggtcctccagtccatcctgcagcagcagccgcaaagcggcctgtttgcggggctgggggcggcgcagatagcgcagcaactgacggcgatgtgcggcctgcagcagccgactccatgcccctacgctgctgccggcggtgtcccccactgaagaaactatgtgctgtagtatagccgctggctagctagctagttgagtcatttagcggcgatgattgagtaataatgtgtcacgcatcaccatgggtggcagngtcagggtgagcaatgacctgaatgaacaattg

SEQ ID NO: 8526 - DNA, 507 bp, Zea mays
  Clone ID: LIB3061-103-Q1-K6-F1
cccgggtcgactacgcgtccggcaaactcatctgcctactctcagcaacagcagtttcttccattcaaccaactagctgcattgaactctgcttcttatttgcaacaaccaaccaacctaccattcagccagctacctgctgcctacccccagcaatttcttccattcaaccaactggcagcattgaactctcctgcttatttacagcagcaacaacctactaccattcagccagctagctggtgtgagccctgctaccttcttgatacaaccaccagttgttgccgttctaccagcacgctgcgcctaacgctggcaccctcttacaactgcaacaattgctgccattcaaccaacttgctttgacaaacccagcagcgttctaccaacaacccatcattggtggtgccctcttttagatttcttatgagttatagttcaataataaagttttttgtctgatgtttgtggcttcccagaaataagaaagtacatttctagattctt

SEQ ID NO: 8527 - DNA, 647 bp, Zea mays
  Clone ID: LIB3061-103-Q1-K6-F10
gcttctcttcttcccccatagctctcaccagcggtgtcttcaatgtgtgaaaccccaattgttcaaccctacaggatccaacaggcaatcgcaacaggcatcttaccattatcacccttgttcctccaacaaccgtcagccctattacagcagttacctttggtccatttggtggcacaaaacatcagggcacaacaactacaacaacttgtgctagcaaaccttgctgcatactctcagcaacatcagtttcttccattcaaccaactggctgcattgaactctgctgcttatttgcaacaacaattaccattcagccagctagttgctgcctacccccagcaatttcttccattcaaccaactagcagcattgaactctgctgcttatttacagcagcaacaactactaccattcagccagctagctgatgtgagccctgctgccttcttgacacaacaacagttgttgccgttctacctgcacgctatgcctaacgctggcaccctcttacaactgcaacaattgctgccattcaaccaacttgctttgacaaacccaacagtgttctaccaacaacccatcattggtggtgccctcttttagattgcttatgagttatagttcaataatgaagttttttggat

SEQ ID NO: 8528 - DNA, 649 bp, Zea mays
  Clone ID: LIB3061-103-Q1-K6-F4
attgagtccactagcaacatagacagcacaatattgtaccaataatggcagccaaaatattttgcctcattatgctccttggtctttctgcaagtgctgctacggcgagcattttcccgcaatgctcacaagctcctatagcttcccttcttcccccatacctctcaccagcgatgtcttcagtatgtgaaaatccaattcttctaccctacaggatccaacaggcaatcgcagcaggcatcttacctttatcacccttgttcctccaacaatcatcagccctattacagcagttacctttggtgcatttattggcacaaaacatcagggcacaacaactacaacaactcgtgctagcaaaccttgctgcctactctcagcaacagcagttacctttggtgcatttgttggcacaaaacatcagggcacaacaactacaacaactcgtgctagcaaaccttgctgcctactctcagcaacaacagtttctgccattcaaccaactagctgcattgaactctgctgcttatttgcagcaacaacaactactaccattcagccagctagctgctgcctacccccggcaatttcttccattcaaccaactggcagcattgaactctcatgcttatgtacaacaacaacaact

SEQ ID NO: 8529 - DNA, 671 bp, Zea mays
  Clone ID: LIB3061-103-Q1-K6-F5
attgagatcaactagcaacatagaaagcacaatagtgtaccaacaatggcagccaaaatattttgcttccttatgctccttggtctttctgcaagtgttgctaccgcaaccattttcccacaatgctcacaagctcctatagcttcccttcttcccccatacctctcaccagcggtgtcttcaatgtgtgaaaccccaattgttcaaccctacaggatccaacaggcaatcgcaacaggcatcttaccattatcacccttgttcctccaacaaccgtcagccctattacagcagttacctttggtccatttggtggcacaaaacatcagggcacaacaactacaacaacttgtgctagcaaaccttgctgcatactctcagcaacatcagtttcttccattcaaccaactggctgcattgaactctgctgcttatttgcaacaacaattaccattcagccagctagttgctgcctacccccagcaatttcttccattcaaccaactagcagcattgaactctgctgcttatttacagcagcaacaactactaccattcagccagctagctgatgtgagccctgctgccttcttgacacaacaacagttgttgccgttctacctgcacgctatgcctaacgctggcaccctcttacaactgcaacaattgct

SEQ ID NO: 8530 - DNA, 521 bp, Zea mays
  Clone ID: LIB3061-103-Q1-K6-F7
gttttcatatacagcttccacagtcaccagagcactagagcagagcaacaaccgacaagagcagagtgagatcgtcgtcagcgagcccagcagatacgagagagaggatggcggacatcgcgttgctggtggcggagcagttcgagaagacggcaaggcgaggcgcccccggcggggacagcggtagcgacagcgggaccggcggcgagacgaggaacttcggggccgtggccaaggtgtggagctcttgggtggagtccgcctccgccgccgcgtccggggtcagattcaccgtcgcggtgcagctggagcccaagaccgggctcgcgctggccgccgccgacggcctcttctccgcctagcgtcctgcttccatgtcttcctcctgagcagtgccagtggtcgagcgagtcctgctcctgcaccccgtactatgtttgtgcgacctgtacatttcgttcgtcgttgcgcggttgcgcctgcgctctaatccggaacaaaatactattcatatttgctcc

SEQ ID NO: 8531 - DNA, 450 bp, Zea mays
  Clone ID: LIB3061-103-Q1-K6-F8
aaaatttcttccattcaaccaactgtctacactgaaccctgctgcttatttgcagcaacaactattaccatttagccagctagctactgcctactctcagcaacaacaacttcttccatttaaccaattggccgcactgaaccccgctgcttatttgcagcagcaaatactactgccatttagcgagctagctgcagcaagtcgtgcttccttcttgacacagcaacagttgctgcctttctacaagcagtttgcggctaaccccgcaaccctcttacaactacaacaattgttgccctttgtccaacttgctttgacaaacccagcagcctcctaccaacaacacatcattggtggtgccctcttttagattgattattagttgtaattcaataataaagttttttggatgatgtatgtggccaaccagaaataagaagttacatttcc

SEQ ID NO: 8532 - DNA, 566 bp, Zea mays
  Clone ID: LIB3061-103-Q1-K6-G2
ctctccttttgctcggaacgcacaacacagcccggtccccgatctccgatcccctcgtcgatccaagatgcagatcttcgtcaagaccctcactaggaaagactatcaccctcgaggtggagtcttctgacaccattgacaacgtcaaggccaagatccaggacaaggagggcattcccccggaccagcagcggctcatcttcgctggcaagcagctcgaggacgggcgcacacttgccgactacaacatccagaaggagagcaccctccaccttgttctccgcctcaggggaggcatgcagatcttcgtcaagaccctcactggaaagactatcaccctcgaggtggagtcttctgacaccatcgacaacgtcaaggccaagatccaggacaaggagggcatccctccggaccagcagcggctcatttttgctggcaagcagctcgaggacgggcgcacgctggccgactacaacattcagaaggagagcaccctccacttggtgttgcgtctcaggggcggcatgcagatatttgtgaagactctgactggcaagactatcacc

SEQ ID NO: 8533 - DNA, 533 bp, Zea mays
  Clone ID: LIB3061-103-Q1-K6-G6
cccgggtcgacggcggcaggtgccgccgccggcgtcatctcagatgcgggtttgggcgccggcgaagcggacgccagccctgcccaacgccgcatccggtcgatcagcgtcggttcgggcgcgtcggctgccgtcacggcaggtttttgcgcggcgtgccccgagatcagcaccctgacgatcgccacgaaacgcctgacacgcgcgaatccgggatcgaacgggctgctgacggcatacagcggcatcttcgagtcgtccaggccatccgagacgagcgaagcgcacagctgcgggtcgcccgacatgagcaaccggtacatgaagggcacgtcataggcccattcggacaggccggagatggtctgcggacgatcttcgtacgacgtcggccggttgctcaggctgtagagataagatcggttggccatgcaggctcccaagttgacgagaaggtttcctggcgcggtgatgcacccactgtggcgaacgactcgatgctgtacccccgatggccgcctcacgcgaaatcc

SEQ ID NO: 8534 - DNA, 649 bp, Zea mays
  unsure (1)..(649): unsure at all n locations; Clone ID: LIB3061-103-Q1-K6-G9
aaagattttaagaagttcttaccacgcgaacagagaatttgaaggttcatgaaaatagaaggcaaatgttctcttcgtcagctgcaaaggacgcgtcaaatccattcatccgtcaacgaccccttgttgctagggatccatcagagtcatctgtgcccccagcaccatgggccagcgactctgcatctaccccattattccagaggaagaaaactaatggagaccatggggcatcatcatctcagcctttcgcacagcagcaacaattggcagtgcagcaggacagttacatgcagagcagagctgaggcccttcaaaatgtggaatcaacaatccatgagctgagcaacatatttacacagttggcaaccatggtttctcaacagggagagctagcaatcagaattgacgagaacatggaggaaacagtggctaacgtggagggagcgcagggccagctcctgaagtatctcaacagcatttcgtccaacaggtggctgatgatgaagatattctttgtgctgatggtgttcctcatgatcttcatattcttcgtggcttgaccttctgtaccattctgcccgaggtgctctggccgctatgcgtagtattcttttatttttactcatactacaccgngtacacaatt

SEQ ID NO: 8535 - DNA, 646 bp, Zea mays
  Clone ID: LIB3061-103-Q1-K6-H10
cgagttgcaaaccatggacatggctttggcgtctaaagcctcccctccgccatggaatgccaccgccgccgagcagccaattccaaagcgtgacaaagccgctgcaaatgattcaacatacctcaatcctcaagctcatgatagtgttcttggaatcattctgggaggtggtgctgggactagattgtaccccttgacaaagaagcgtgccaagcctgcagtgccattgggtgccaactatagactgattgatattcctgtcagcaattgtctcaacagcaacatatccaagatctatgtgctaacgcaatttaactctgcttccctcaaccgtcacctctcaagagcctacgggagcaacattggagggtacaagaatgaagggtttgttgaagtcttagctgcacagcagagcccagataatccaaactggtttcagggtactgcagatgctgtaaggcagtacttgtggttgtttgaggagcataatgtgatggaatttctaattcttgctggcgatcacctgtaccggatggactatgaaaagttcattcaggcacacagagaaacaaatgctgatattaccgttgctgccctaccgatggatgagaaacgtgcaactgcatttggcctcatgaaaattgat

SEQ ID NO: 8536 - DNA, 503 bp, Zea mays
  Clone ID: LIB3061-103-Q1-K6-H4
ggcagcttatcagaaggccgccgaggccgggcagtacgccaaggacaccgccgtctccggcaaggacaagtccagcggcgtcatccagcaggccactgagcaggtgaagagcgcggcggcgggcgccaaggacgcggtgatgagcacgctggggatgggcggggacgacaagcagggcgacgccaacaccaacaccaacaaggactcctctaccatcaccagggatcactagacgcgtgtatgcacacgcacttggtccgatcctgtcgtccgtgaccctgtttgcttgttcgcgagtccagtatgggtttgtgcatgttttcagtgtcatggtttccttttctacgaatttggcgttgtaagttcgattcgcaggtacgttgctgtgttttttttctgcgccatcaggtgtctgtaaacgagtcgggcgggtttgagtgtcctttgttgtgataataaagttggtaaatcgtaattaatatatagcatgcgactgtcttgct

SEQ ID NO: 8537 - DNA, 528 bp, Zea mays
  Clone ID: LIB3061-103-Q1-N6-A1
atcgagataaatctcaatcaatatattgattatttctaggaaacacatgtcggtatgagggcaccattgtcgagtacatctcatatgtaatctaaaaaaggcacctccaacgatgggttgctgcaaggcagggttcatcaaagagaactggttgtatggcagcaattgttgttgctgctgcaggaaggtagcgaccaatgggttagccactgccaatggattaagtaactgttgtcgctgttgtaggtacccagcaaagtttgacacaaccagttggttgaatggaagcaactgttgtaagtaggcagcagggtttgccacagctagctgagtcaaagctggtacaatttgttgcaacaactgttgttgtaggtacctaggtgcattgcccaccgcgagcgggctaaatgaaagtagttgtaggtagacggcagggttcaccatggctagttgactgagcactggcataaactgttgcagctgttgttgttgctggtatgcagctacgttcgccagagcaagtgggtt

SEQ ID NO: 8538 - DNA, 520 bp, Zea mays
  Clone ID: LIB3061-103-Q1-N6-A10
ccaatcatctttcatccttatatattattcctttccatttcaatggcacattaagggcatagctaacactgccacccatcgggctgggagacactacgttgctaatccccgcctaatgagcaaacaatcaagctacggggggggggggcggctccattacatcattactacagtacatcgtcacctcataagtagacaccgccggcagacgcgctgcaggggcagggaccgggctgctgcatgtgtaggccgcacatcggcctcagatgctgcgctacctgggccgccatcagcgccgcaagctcgccctgaggttgctgctgcaggaaggactgcaggaccacaccataagcacactggtaccggtgcagcacctccacctgcctgatctggtggcagcactgctgctgcaccgcctgtcactgtggcgagccttagggcatccccaccgggctgcactggtgctctcagaactcctcacactggcccaggaacggcctgccaacgctgtcgacgccct

SEQ ID NO: 8539 - DNA, 530 bp, Zea mays
  Clone ID: LIB3061-103-Q1-N6-A11
agtacaaacattataatggatgggcctttattggttaacaccgctatttgagtttaacgggtagggacaacacaattctttaattgcaaacgccgctaatgtcattgctgctgcatgggttattttgggggtctgagggggccaagccgcacattgatgggggggattgggctggtggcaaaattgcccccccactttgagtagcttgttgagatccacataacccaaatgggtggtggtggtgctccccccggattatggattgaaccatgttgtaaattgcttggggaatgtattggggctaaatctgcctaaaatacaagacaacattgttgctgaaatacctggcagatacttggttgtatcaaacgtgattggaaaaaaggattaccaaagggctgcactgctgccttaagaattcaaaacaattttttaaatttgacccactgctatagtagttatagctgcaccttggaaactggtgctgctcctggcaaagacattggtgctgttgggaattttcctggcca

SEQ ID NO: 8540 - DNA, 505 bp, Zea mays
  Clone ID: LIB3061-103-Q1-N6-A12
aaccccgcaaaaaatctgctactttttgttcaaacaaagtcgccattagcttggttgcccaggggcatttttggcaaaacagggtccttcgctttggcaggggcaggaccccaggaccccgcgcaaagacagggtcctacgggtcttttttttttacatgacatttgagtgacaactacctgacggagcaggcgttggggttctcgtcgctgaaaatctgcggcgccctgggctgcttctggtgcaagtggtggtgccgcggcccctaaaacagcggcgggtaggccggctggtaggcgtaccggtacccccgaggcggcgggtaggcccgcggctggtagtaccctccaacgaacgggaaccccgggtagtgcatgtacaggctggcggccgggtccttgtccttgttgccggcctcgtccttcttgttgccgtctccgtcgccgccgtccttcttctcctcattctttttgccgccggccttcttcttttcctcctccttgcc

SEQ ID NO: 8541 - DNA, 558 bp, Zea mays
  Clone ID: LIB3061-103-Q1-N6-A3
gagataaatctcaatcaatatattgattatttctaggaaacacatgtcggtatgagggcaccattgtcgagtacatctcatatgtaatctaaaagaggcacctccaacgatgggttgctgcaaggcagggttcatcaaagagaactggttgtatggcagcaattgttgttgctgctgcaggaaggtagcgaccaatgggttagccactgccaatggattaagtaactgttgtcgctgttgtaggtacgcagcagagtttgacacagccagttggttgaatggaagcaactgttgtaagtaggcagcagggtttgccacagctagctgagtcagagctggtacaatttgttgcagcaactgttgttgtaggtacgtaggtgcattgcccaccgcgagcgggctagatgaaagtagttgtaggtagacggcagggttcaccatggctagttgactgagcactggcataaactgttgcagctgttgttgttgctggtatgcagctacgttcgccagagcaagtgggttggatgcaagcagctgctgttgcaagtaggtgac

SEQ ID NO: 8542 - DNA, 427 bp, Zea mays
  Clone ID: LIB3061-103-Q1-N6-A4
attcctcatagttattatcattattggaacgaacacgcgcagaatttgcgagcccacgtcagagctacgtcattctggatttgcacgcgcacagtacacatgctgcgccttgcacggcgggccgactcagggtgggggtgggaaccctggtagctaggactggtcggcggcggagaagatgcggcgctcctggggctcccacaggcgtggcataatcggccaccccgcggcgggctcccgggcctggggcagcctgacgcgggcgatccttgggccggtggtgcccggtccccgcgggcggaacatctgtgctagggtgccctgtcctgcccggctgcaggggtaggggcatccctgctgtccgcgtgctactgcctgcggcggacgttgctgctgacgtcccagggggcagcaatactttgtccag

SEQ ID NO: 8543 - DNA, 557 bp, Zea mays
  Clone ID: LIB3061-103-Q1-N6-A5
gaatgaaacaaaaaattcatgcaaaataaaatctgcatatattccagcctagtgctgggtttcgttacaagagaagctctctcattccctatccccaccgcccacagtgagatgaaagtggatactaattcaccaaacgttacaaacttatacaaatataatgcatcctccaacttaatttatttaaataggctagaaaggaggcatgaaccatgcaggacctgcggctgccgggatcaaactatgccgaggctggtattcttatcgccatcatctggaggagccatggcctatcgacgtctgggtcgataaaagtgtgcgcaaggaactgctctgcttcaacatccagcaactgtctacaccatgtgacccggttcgatgggagggcgcctggccctgagcacctgtactcataaaagcaagcagttcgttcgttctcggatttgtcccagttgtgccacccagaaggcttgatgcatcgatccatgaaagtgtacgcaaaaacaacccttccaaagggcccccatggccgacctagaaacatgtatccagcttct

SEQ ID NO: 8544 - DNA, 550 bp, Zea mays
  Clone ID: LIB3061-103-Q1-N6-A6
atcgagataaatctcaatcaatatattgattatttctaggaaacactgtcggtatgagggcaccattgtcgagtacatctcatatgtaatctaaaagaggcacctccaacgatgggttgctgcaaggcaggggtcatcaaagagaactggttgtatggcagcaattgttgttgctgctgcaggaaggtagcgaccaatgggttagccactgccaatggattaagtaactgttgtcgctgttgtaggtacgcagcagagtttgacacagccagttggttgaatggaagcaactgttgtaagtaggcagcagggtttgccacagctagctgagtcagagctggtacaatttgttgcagcaactgttgttgtaggtacgtaggtgcattgcccaccgcgagcgggctagatgaaagtagttgtaggtagacggcagggttcaccatggctagttgactgagcactggcataaactgttgcagctgttgttgttgctggtatgcagctacgttcgccagaacaagtggggttggatgcaaacagctgctgttgc

SEQ ID NO: 8545 - DNA, 565 bp, Zea mays
  Clone ID: LIB3061-103-Q1-N6-A7
ggaaatataacttcttatttctaggaggccacatacactcagccaaaaaacttcattattgaattacaactaataagcaatctaaaagagggcaccgccaatgatgtgttgttggtagaaggctgctgggtttgtcaaagcaagttggacaaagggcagcaactgttgcagttgtaagagggttgcggggttagccacaaactgctggtagaacggaagcacttgttgttgtgtcaagaaggaagcggggcttgttgtagctagctggccaaatggtagtagtatttgctgctggaaataagcagaggggttcagtgcggccaattggttaaatggaagaaattgttgctgctgagagtaggcagtagctagctggctgaatggtagtagttgttgttgctgcaaataagcagcagggttcagtatagacagttggttgaatggaagaaattgttgttgctgaaagtagggggaaaaggtttgccagagctacttggctgatcactggtagcacgagttgctgcaactgttctgccctgatggtttgtaccaatgactgcaccaa

SEQ ID NO: 8546 - DNA, 480 bp, Zea mays
  Clone ID: LIB3061-103-Q1-N6-A8
tttttttttttttttttttttttttttttttttttttttttttttttttttttttttttttttttttttttttttttttttttttttttttttttttttttttttttttttttttttttttttttttttttttttttttttttttgggggggggggggagagaaatatggggtatttttggggaaaaaaagcgggggggggggggccctttttggggggagcttaggtgggaataaaaaaagggggcccccaaaaagggggggggggctcccgaaagaggggggtttaaaaaaaaaaaggggggtggggaaaaaaattttttgttttggggagggggcgccaaaaagggggacccccgggggggggaaaaaaaaaattggggccgttgttgggggccccaaaaaaattcacaaaaaaaaagggggaaaaaaaaaaaactttttgaaaaaaggaaaaagggttctccaaaactgtttgggg

SEQ ID NO: 8547 - DNA, 389 bp, Zea mays
  Clone ID: LIB3061-103-Q1-N6-A9
gggggggggggaaaaaaattttttttaaaaaaaaaaaaaaaaaaaaaaaaaaaggggggggggtttttggggaaaaacccggttttgggattaaggggggggggaaaaaaaattttttttgggaaaaacccaaaaatgttttgggggggggggggtttttttgggggggggggggggaaaaacccccaaattggggggggggttgggggcttttaaaaaaacccccccccctttggggggggggggggaaaaaaaaaaaaaaaaaaggggggggggggggggcccccggggggatttttggggggttaaaaaggggggggggaaaagaggttttaaaggggggggccccggcccttaaaaaaaaaaaaaaatttttttaaaaaggggcc

SEQ ID NO: 8548 - DNA, 552 bp, Zea mays
  Clone ID: LIB3061-103-Q1-N6-B1
agaaatgtactttcttatttctgggaagccacaaacatcagacaaaaactttattattgaactataactcataagaaatctaaaagagggcaccaccaatgatgggttgttggtagaacactgctaggtttgtcaaagcaagttggttgaatggcagcaattgttgcagttgtaagagggtgccagcgttaggcgcagcgtgctggtagaacggcaacaactgtggttgtgtcaagaaggtagcagggctcacaccagctagctggctgaatggtagtagttgttgctgctgtaaataagcaggagagttcaatgctgccagttggttgaatggaagaaattgttgggggtaggcaacaggtagctggctgaatggtagttgttgttgttgcaaataagaagcagagttcaatgcagctagttggttgaatggaagaaactgctgttgctgagagtaggcagcaaggtttgctagcacaagttgttgtagttgttgtgccctgatgttttgtgccaataaatgcaccaaaggtaactgctgtaatagggcta

SEQ ID NO: 8549 - DNA, 351 bp, Zea mays
  Clone ID: LIB3061-103-Q1-N6-B10
caattaaaatggttaattaaggtttttgttaaaactgaccttgccaccggggggggggggggaaaaatttttactaaataatggccgttaaatgactaaattagtttgttggccaggggtttttttaaaaaaaatatttttttaagggggggacacccccggcagaaccttaggggcatggatttggttttttaaggccaaaaattcccgaaatttgttggtttttttgggccgcaaacaaccccgaaacctggccttttttgggttttttttaaaggatggattggagaaccaacccaaaaatcgcttggtaccggggttggggttccacctgcttgagttggtggaaaa

SEQ ID NO: 8550 - DNA, 578 bp, Zea mays
  Clone ID: LIB3061-103-Q1-N6-B11
agaaatgtactttcttatttctgggaagccacaaacatcagacaaaaactttattattgaactataactcataagaaatctaaaagagggcaccaccaatgatgggttgttggtagaacactgctaggtttgtcaaagcaagttggttgaatggcagcaattgttgcagttgtaagagggtgccagcgttaggcgcagcgtgctggtagaacggcaacaactgtggttgtgtcaagaaggtagcagggctcacaccagctagctggctgaatggtagtagttgttgctgctgtaaataagcaggagagttcaatgctgccagttggttgaatggaagaaattgttgggggtaggcaacaggtagctggctgaatggtagttgttgttgttgcaaataagaagcagagttcaatgcagctagttggttgaatggaagaaactgctgttgctgagagtaggcagcaaggtttgctagcacaagttgttgtagttgttgtgccctgatgttttgtgccaataaatgcaccaaaggtaactgctgtaatagggctgatgattgttggaggaacaagggtgat

SEQ ID NO: 8551 - DNA, 498 bp, Zea mays
  Clone ID: LIB3061-103-Q1-N6-B12
gggcgttgtttggtaaaaaaggggcaaaaaacaaggaccggggcaggaaacggggaaccagacgcaaaggacagcgcccccccgaggggcgcccaaaaaggcgcccacgcgcacaaacaaaagaggaaagggaccatagagcgggggcaaagccaaaagagggggttgcccggagaaaaacctgagggggggggggatgacaaaggaccccgggggggtgggggggccaagaaaaaaaaacggaaaaaagacccccgcccgaccaacggggacccgcgacgccccccccagaacaacaactgggaaaccccgggaccccaggggaccaaaacatgaaaaagagcagaccgggagaccaccccccggaaaaagccccaaaaaggggcaacccacggggacccccccccccgaaagacaacgccgggggaggatttttgcccccaaacaaggagaaaaaaaccttcttccccggcatcagggggttccccccccccccaa

SEQ ID NO: 8552 - DNA, 554 bp, Zea mays
  Clone ID: LIB3061-103-Q1-N6-B2
ggagaccaatatcacattagaatctggaaatgtaacttcttatttctggttggccacatacatcatccaaaaactttattattgaattacaactaataagcaatctaaaagaggcaccaccaatgatgtgttgttggtaggaggctgctgggtttgtcaaagcaagttggacaaagggcaacaattgttgtagttgtaagagggttgcggggttagccgcaaactgctggtagaaaggcagcaactgttgctgtgtcaagaaggaagcacggcttgctgcagctagctggctaaatggtagtaatatttgctgctgcaaataagcagcgaggttcagtgcggccaattggttaaatggaagaagttgttgttgatgagagtaggcagtagctagctggctgaatggtaatagttgttgctgcaaataagcagcagggttcagtgtagatagttggttgaatggaagaaattgttgttgctgatagtagggagaaaggtttgccagagctacttggttgatcacaggtagcacgagttgctgcagctgctgtgca

SEQ ID NO: 8553 - DNA, 555 bp, Zea mays
  unsure (1)..(555): unsure at all n locations; Clone ID: LIB3061-103-Q1-N6-B3
caaacaacaaacttattcatgatttgtcatagttctgggtagtacgcacacacaacacaaccggtccattattaaaccaacactgacacgaacagcagatacttcgacaacctccatatggagagggcaccagacgacgcaggcacatcggcagcttaaacgacccatgacttactgaccaccacggagacggagcacaaggtggagggtgctctccttttggatgttgtagtctgctagggtgcggccatcctccagctgtttgccggcgaagatcagacgctgctggtccggggggatgccctccttgtcctggatcttcgccttcacattgtcgatggtgtccgagctctcaacctccagggttatggtttttccagtcagggtcttcacaaagatctgcataccacccctgaggcggagaacaaggtgaaagggtgnctctccttctgggaatgttgtagtccgcgaagaggtgcggccattcctccagcctgcttggccccgcaaagatcaagacgctttgctggtctgggggggaatgcccctccttgt

SEQ ID NO: 8554 - DNA, 541 bp, Zea mays
  unsure (1)..(541): unsure at all n locations; Clone ID: LIB3061-103-Q1-N6-B5
aaagcttgttactcccaatcttagcaaaagtaattatcgaacacccttggggaccaatatcacattagaatctggaaatgtaacttcttatttctggttggccacatacatcatccaaaaaactttattattgaattacaactaataagcaatctaaaagagggcaccaccaatgatgtgttgttggtaggaggctgctgggtttgtcaaagcaagttggacaaagggcaacaattgttgtagttgtaagagggttgcggggttagccgcaaactgctggtagaaaggcagcaactgttgctgtgtcaagaaggaagcacggcttgctgcagctagctggctaaatggtagtaatatttgctgctgcaaataagcagcgaggttcagtgcggccaattggttaaatggaagaagttgttgttgatgagagtaggcagtagctagctggctgaatggtaatagttgttgctgcaanataagcagcagggttcagtgtagatagttggttgaatggaagaaattgttgttgctgatagtaggg

SEQ ID NO: 8555 - DNA, 560 bp, Zea mays
  Clone ID: LIB3061-103-Q1-N6-B7
ggaggaacataggtttgttatttggaacagattacacacttgattggcattccacacgcaaccgatcgatatgacgattatactcctatttattagcaccagctatatatagccatgtctggagtctggagtctggactagcaagcaaccgagatcgatgcatgatacagagatagattcatcggtttgcatgagcatggcttgttgccagccactatgttacacccaccacgcatgtacaaagttctgtatcgtcgcatcgcctccgcctgatgatgatcgatcagtgcagcgccgtcaggacagtagacccttccaccaccttgaaagtggcaccgcagatctcttcttcgtcggcggggacagcggtgaccttgtgcttggggttctcgtagcacttgagccctccgagggcgttggagtagaagcagccttgcgggaacggcgcgagcgacttgccgcatgagcctttgagcatgtcgatgtcgtcggagaaggcgacgcagccgtcggcggtgatcccccagaagacggcaccctgcccttggggtcagatgcga

SEQ ID NO: 8556 - DNA, 472 bp, Zea mays
  Clone ID: LIB3061-103-Q1-N6-B8
cctggttattttggtcggtttcttgtgggtttccttatttccggacggggggggcgccccgggaatgggggaccggagccggaggggggggggggggggcaaatggggggccgttaaaaagccggggcaaaaacaggggccggaggcgtaacgggggaaaaaggggggcccctaaaaagggcccaaaaaaaaacaaacggggaggaaaaaagggaaagcctggggggccaaaaaggggacccaccccacaataaagggattgggccaaccgccgggtaaagagggggaaaacctggggggccagggggtttaatgaatcccccaacccccggggaaaggcgttttgccctttggcccccggggggggttttattttcaccagggggacgggcaagatttgcccgcccttaaaaaaatggccctgagggggtggaaacggggggtcaccccggggggggcccaaggggggaaa

SEQ ID NO: 8557 - DNA, 524 bp, Zea mays
  Clone ID: LIB3061-103-Q1-N6-C1
ctaaaaagtccttttttatttctgggaagccacaaacatcagataaaaaactttatttttgaactttaactcataaaaaatctaaaagaagggcccccccaatgatgggttgttggtaaaacactgctgggtttgtcaaagcaagttggttgaatggcagcaattgttgcagttgtaagagggggccagcgttaggcccaacgtgctggtaaaacggcaacaactgtggttgtgtcaaaaaggtagcagggctcacaccagctagctggctgaatggaaaaagttgttgctgctgtaaataaccaggagagttcaatgctgctagttggttgaatggaaaaaattgctgggggtaggcaacaggtacctggctgaatggtatttgttgttgttgcaaataaaaagcagagttcaatgaacctatttggttgaatggaaaaaactgctgttgctgagagaaggcaccaaggtttgctagcacaagttgttgaagttgttgtgccctgaatttttgtgccaataaa

SEQ ID NO: 8558 - DNA, 560 bp, Zea mays
  unsure (1)..(560): unsure at all n locations; Clone ID: LIB3061-103-Q1-N6-C10
ccaatcatcttttttccttatatattattcctttccatttcaatggttcattcaggtcattgctcacactgccacccatggtgatgggtgacactacgttactcatcgccgctaaatgagtaaactagcgagctaggtagctagtcagcggctccattacattattactacagtacatagtttcctcagtagtagacaccgccggcagctgcgttgcaagggcagggacctggctgctgcagctgcaagccgcacatcgccgtcagctgctgcgctacctgggccgccatcaacgccgcgagctcgccctgcggctgctgctgcatgaaggactgcacgaccacaccgtatgtcgcctggtaccggtgcaacggctccacctgcctgatctggtggcagcactgctgctgcagcgcctggcactgtggcgagccgtanggcgtcgccgccgggctgcactggtgcctcaagaactcgacgcactggcccaggaacgggctgccgacgctgccgacaccgcaggatccgaactgctggcacgggcttagcttcagtggttg

SEQ ID NO: 8559 - DNA, 547 bp, Zea mays
  Clone ID: LIB3061-103-Q1-N6-C11
agaaagtactttcttatttctgggacgccacaaacatcatccaaaaaactcattattgaactataactcataagcaatctaaaagaggcaccaccaatgatgggttgttggtagaacactgttgggtttgtcaaagcaagttggttgaatggcagcaattgttgcagttgtaagagggtgccagcgttaggcatagcgtgcaggtagaacggcaacaactgttgttgtgtcaagaaggcagcagggctcacatcagctagctggctgaatggtagtagttgttgctgctgtaaataagcagcagagttcaatgctgctagttggttgaatggaagaaattgctgggggtaggcagcaactagctggctgaatggtaattgttgttgcaaataagcagcagagttcaatgcagccagttggttgaatggaagaaactgatgttgctgagagtatgcagcaaggtttgctagcacaagttgttgtagttgttgtgccctgatgttttgtgccaccaaatggaccaaaggtaactgctgtaatagggctg

SEQ ID NO: 8560 - DNA, 569 bp, Zea mays
  Clone ID: LIB3061-103-Q1-N6-C12
acacctgcaacactgaattgggggcctcatcatacacatgacatacaacctagcatatagcgcatgctgtaatccgcctctccgggcaaagagagacgcatgcagcgtatagtactcgcctgcactgcatgcccgggggggggggcgtgcgcacacaaaggacaacacataaacgactagctagagctatggcggcgaccgagactctacggcagcgtccgtagcagcagccaccggctttaagggccatatgccgccgcgccggcagtggttcaaggaggtcgcgcgcgcggtccgctcgagtgtggttcttctctcaagacccctgcgcctgggcgatgcggtgctgtgctgcatccttgatgtcgcgggccttggacgccagcctcgccttggcgtggtccagctggtcggcgcccggcgggtgcttgcccgtcaggtacttgtacatccaggagaacacggacagcgcatcgacgccgaggccgccggaggtgacgaacccggccgccatgagcgccagcgcgatggcggccggcaccagcaccgggctgaagatcaccagcacg

SEQ ID NO: 8561 - DNA, 559 bp, Zea mays
  Clone ID: LIB3061-103-Q1-N6-C4
attcctcatagttattatcattattgtaacgaacacgcgagaatttgcgagcccacgtcagagctacgtcattctggatttgcacgcgcacagtacacatgctgcgccttgcacgtcgcgccgactcactcttttttttttaaccctggtagctagtactggtcgccgccggagaagatgctgcactcctggggctccgacagccggcacatcatcggcaaccccgcggcgtactcccgggccttcgtaagcctcacgcggccgatccttggcccggtggtgccgggacgacacggtggatacatctgcgtttggtatccctctcctgcccggctgcaggggtagtagtagcccccctgtcctcctcctcctccctgcggcggcggctgctgctgccgcccccatggccaccagcctttctccagaggcggcatggcctcctcgtagcccctgaccatgctccggatggcggcgcagcggcactcgcggctcacgtcctggagctgctggcagcaccgcatccgggggcccgggtgccccaccgggaaccgggccgccg

SEQ ID NO: 8562 - DNA, 558 bp, Zea mays
  Clone ID: LIB3061-103-Q1-N6-C5
gataaaacagagaaccattctttatatcactgctatggggggactattacaattacactcagctcagaagcgagcagcatggactccaccacacattattgccaattgcaatcgctaaaactctcaatgcccattggcagggcgatacgacgggtatctgcttgctgcactcgctggactcgggaaaccctgcggctgataggagtagccacctgtgtctgacccaaaaccaggcatggcgaggtcggcgcggctgtatggcggccactggctcatcaatagaccatcaagctggctgctcctggagtatgaagggagatcgaagtgcgagtagctccggtccctcatcctccgaggagcgctgctcaatggactgtagaaccttggaggctcctcgtcaaagtactgctcggaccggtcgaacaggtacggctcactgaacaagccataatcaggcgcgctgacgccgttatgcacagagaattgctggacgaaaccaggctggaagaacccttctcctgtcactctgctcctcatccagcaggtcgttgatgatgt

SEQ ID NO: 8563 - DNA, 512 bp, Zea mays
  Clone ID: LIB3061-103-Q1-N6-C7
attggtccgggatgaacgatccgaggaaagcattcatcttcttgctgggcttattattcagacatatgagctagctacaagctcattcctcatgcactatggtgtgggggggtacttggagggcattgttccgccgccgagaaatccaggggcattcggcgacccccctgatggtggccaggttgcactcggcctccgtgacgagggggggggggaatcccctttgcacctcccgcgggcagcccgggaggtcctttaggcggccctccaactgcgcgtccgggcccggggggatcgcgccgtccatgaggatgctcaacgccgtgcaccggcagtacgccgggatgtccgccagctcccggcagcattttcttttcagctccggccacgggaggcgcggcccgatgccccaggtccggctggtcacgtaccaacggcagctcgggagcgggttgtgcgggatggcccaccccggcacgcaggaggtcccggcgctggcgctggcagccgcg

SEQ ID NO: 8564 - DNA, 473 bp, Zea mays
  Clone ID: LIB3061-103-Q1-N6-C9
ggcggccccaaaaagccccatttttttccttagggtttaacttaaaaaaaaacccgacgggggtaacggggcgcgggggatccccaacccatgcgggggggtgcctggggctgcgggggcccggggtgaacacagcactaacaacgggcacaggggggcccttaatcaaaaacccagggggggcacaacaaacccggggcgaacgaagataaaccccctgggctgggggaaacaacccgggggcgaacaggataacttgggcgggcgggccccaccggttaattcccccagttcccgggggggttgccggaaccccccccacgggtgccccccccgtagcccccgcccccaccaccggagcccccgccgccaccaccgtagcccccgccacccccggagccccccccgccattacggggccccccacccccggaacccccgccttcacgggcaccaccggacccgccgggggc

SEQ ID NO: 8565 - DNA, 549 bp, Zea mays
  Clone ID: LIB3061-103-Q1-N6-D1
gcctcgtcaaaaaaaacatttattatgattatattccaacaagaaagtacattggtaagaaaagtatatgacaaataaagaggcagagatgacagaatctgcgaagtgtaacgaaagaacagcaggcttaaatcacgcatgtaaacgatggttctcattttaaggaaattcttttgtactctctcatggtgttcgtgatagcttgctctactggtaatctttccatgcttgatgcaccgtaaaatccatgaacccttttagtattcttcaatacgaactcggcttctaggggtccagatatggggcctccgtgacagagaacaatgatatcaggattaaccccaaatgccgcatccgcaatggcctgaacacgtaaaacactatcatctaaagtggcagctgtcattgccccgatagaccctgcagttgtcagacccatatgtgcaactacgatatgagctcctgccttggccatggcagcagcttcatccggattgaaagcatatggagtagtaaggaaacccatgcgatgagccattgaaatcatct

SEQ ID NO: 8566 - DNA, 410 bp, Zea mays
  Clone ID: LIB3061-103-Q1-N6-D10
agaatctggaaatgtaacacacccttggtggccggccacatacataattcagaaaacgttactattgaattacaggctggcagatacctaaagcaggcaccacctatgttgagtacaacgaaggaggctgctggggtgggcaaccccgatggtcaaagggcggcaggaggccgatcggtcatgaggaagcaagggggaccacaggactgattggttaaaggcagcaaatggtggtggggcaagaagaaaaacggttgtgctaaaggcagcaacggttaatggtggcaataatgagatgctgctaattagcagctaggttgctaaacggcaataggatttaatgatagaaataatcgtcggtgataataggcagccaactaggctaaatgagaaggaaatagttgttgctg

SEQ ID NO: 8567 - DNA, 444 bp, Zea mays
  Clone ID: LIB3061-103-Q1-N6-D11
gggaaaaaaactttttttttttcatttaaaatgggcattaagggaatgggtaaaacgggcccggccccccaggggggggggggacccatttttccccaaataccggcggtaaaaggcccaacttgcttgctggcccgggggttttccacaaaaaaaattttttttagggggggacccccccgggaaaaaggtaggggcatggggtcggttttttaaggccccaaaatgcccgaaggtggtgggttttttgggccccaaaaaacccccaaaactggccctttttggggttttttttcaggatggcccgggggacccaacccaaaaaccccggggcccgggggtgggggtccccccggctgagggggggggaaaacttgtgcccaaaaaactgggctttgggggaacaatggggggttcccccgggggttcactgatgccccaaaa

SEQ ID NO: 8568 - DNA, 334 bp, Zea mays
  Clone ID: LIB3061-103-Q1-N6-D5
agggaccaaatattggaattaaacttcctgaaccatacgcatgtcatacaagcaaatgcagagttccagttatgttcagaacaaacgttcacaagggttttgatttcagcagcacagattggtctcccctaagttcatggcatgatacgcggcatgcagagcataaatctaccatgatcccacagcgccctgggctgggttttcgaagggagtgaagccccagtaggtcttcaaggaatatggggggtagatgggtgatccttcacttgggatcttggcaatctggaatttgttgatagatgatctgtctcgggacagcaagaccaccaagcac

SEQ ID NO: 8569 - DNA, 430 bp, Zea mays
  unsure (1)..(430): unsure at all n locations; Clone ID: LIB3061-103-Q1-N6-D6
atcgagataaatctcaatgagtatatnntgattatttctagggaaacacacgtcggtatgagggcaccattatcgagtacatctcatatgtaatctaaaagaggcaccttcaacgatgggttgctgcctcnacagagggggggggggggagagaactgggtgtatggcagcaattgttgctggtgggggaaggcggcgaccaatgggttagccactgccaatgggttaagtaaccggtgcggctgttgtcggtacgcatcagagtctgacagagtcagttggtctgaatggaagcatgtgttgtgagtgagaaacagggtttgccacagttacgcagagtcataagctggcacaatctgttgcaacaaaggctggtgcgcgtattgaggggccttgcccacatcaagtgggctacactaaatgaccggtt

SEQ ID NO: 8570 - DNA, 318 bp, Zea mays
  Clone ID: LIB3061-103-Q1-N6-D7
ccgaataacaaatttaatttcagtgatattcgtctgtattcgatcggtttacacctctagtagttaccaatacttttgtttggttgagctctttagcattcccttaacaagaccttgaaccaaacggaacctataaaagaggactaacattacatgatttctccctaacatttgcatgaaacaattttgcagaccacatcacaaatttgcatccatctcttattggctctccatctgtacacgcttgcttatgtgcgcatgacgtaacaccatctgagctcacaaatagaaactaaaaatcccatcttttcttaacat

SEQ ID NO: 8571 - DNA, 131 bp, Zea mays
  Clone ID: LIB3061-103-Q1-N6-D8
gggaacaaaactttttttttttaatttaaaatggtcattcagggcattggtcaaacgggggggggggcccatgggggtgcgggacaaaatattaccaaaacatggggggtaaaagacccaaccggccccgg

SEQ ID NO: 8572 - DNA, 384 bp, Zea mays
  Clone ID: LIB3061-103-Q1-N6-D9
aacattgccctcaaaaggccaagaaaccctttttttttctgtcgcgaactcatcatttcatttcagaaaccttaggggggcgggctgacctcttgggaaatctaaagggggggcccccccatggtggagcggtttttaaaaaccggggggttggcaaaaaaaaaaaggggggggcgcccccacatttgtgggggggaaaaaggggcccgcgtttggcacaacagggttggaaaaaggcaacaacgggttttgtttcaaaaagaggaccggacaacacaccaaccgggggtataaagaaaaaaaattgtggtggctaaaaaaagaggggaggcacacccctcttgttgggggaaatgaaaaaaatcttttggcggacccaagggg

SEQ ID NO: 8573 - DNA, 565 bp, Zea mays
  Clone ID: LIB3061-103-Q1-N6-E10
aatctagaaaatgtactttcttatttctgggacgccacaaacatcatccaaaaaacttcattattgaactataactcataagcaatctaaaaggggcaccaccaatgatgggttgttggtagaacactgttgagtttgtcaaagcaagttggttgaatggcagcaattgttgcagttgtaagagggtgccagcgttaggcatagcgtgcaggtagaacggcaacaactgttgttgtgtcaagaaggcagcagggctcacatcagctagctggctgaatggtagtagttgttgctgctgtaaataagcagcagagttcaatgctgctagttggttgaatggaagaaattgctgggggtaggcagcaactagctggctgaatggtaattgttgttgcaaataagcagcagagttcaatgcagccagttggttgaatggaagaaactgatgttgctgagagtatgcagcaaggtttgctagcacaagttgttgtagttgttgtgccctgatgttttgtgccaccaaatggaccaaaggtaactgctgtaatagggctgacggttgttg

SEQ ID NO: 8574 - DNA, 440 bp, Zea mays
  Clone ID: LIB3061-103-Q1-N6-E11
attgttctgtttatgttgtgtttttttttttttgcttgtgggttttttttggggggggggggcggagggttttggggggcccccaaaaaatgaggaaaaaaagttagtcagaaactgctggcaaaacggaagcaaaagggggggcccccaaaaggggggggggggggaaaaaccaggggggctaaaaaaaaaaggggggggtgagggaaaaaatcgggggggccaaaaaagggcaaaagggttacccaaataagggggggaaaaggggaaaaattgttgcttgccgaaaagaagtttaattttccccccccctggggggaaaaaggggaaaaaagtgtggtctgtaaaaaaaaaaaaaaattttgcccaacctgaaaaaaggaagaaaaaaaaccctttgctacaaaaaaaagcaatggggcccccacaaggggggaaaa

SEQ ID NO: 8575 - DNA, 270 bp, Zea mays
  Clone ID: LIB3061-103-Q1-N6-E12
agaaatgtactttcttatttctgggacgccacaaacatcatccaaaaaacttcattattgaactataactcataagcaatctaaaaggggcaccaccaatgatgggttgttggtagaacactgttgggtttgtcaaagcaagttggttgaatggcagcaattgttgcagttgtaagagggtgccagcgttaggcatagcgtgcaggtagaacggcaacaactgttgttgtgtcaagaaggcagcagggctcacatcagctagctggctga

SEQ ID NO: 8576 - DNA, 555 bp, Zea mays
  unsure (1)..(555): unsure at all n locations; Clone ID: LIB3061-103-Q1-N6-E3
agtagagcgccatctcttattatngcgaaaattcaaagttcatatgaacagtagttcgtgtcttaagagaacacaaacgattgagcacgtactcacgaactacagaccaaaccaagcaccgtctatatagtctacattacgcagacccgccgcggcaacacacgatacggcgatcaagtgaagaccctcccggcgccggcggtagtactcgccggcaaatcgacctcacggatctcggtcctcaggcccttgccggtagcgttcgctagcgggtggataccatgctccggtccgctcatgtacgcccggttctccctctccttctggaaggagacaccgaacttcttctccacacagtcagcgaggtcctgccgaagctggccctcgcgggtgagcaccatcatgatctgcgggaggccgagcgggaacgcgtcgccgcggtccacctgccagaagtggatggtcttgccgtaggtcttgcacaccttctccaggtcccggcgctccaccacgccgggcacccncggcatgaacagcaccccgcccttcacctcg

SEQ ID NO: 8577 - DNA, 547 bp, Zea mays
  Clone ID: LIB3061-103-Q1-N6-E4
ctaaaaagtactttcttatttctgggaagccacaaacatcagacaaaaactttattattgaactataactcataagaaatctaaaagagggcaccaccaatgatgggttgttggtagaatgctgctgggtttgtcaaagcaagttggttgaatggcagcaattgttgcagttgtaagagggtgccagcgttaggcgcagcgtgctggtagaacggcaacaactgtggttgtgtcaagaaggtagcagggctcacaccagctagctggctgaatggtagtagttgttgctgctgtaaataagcaggagagttcaatgctgtcagttggttgaatggaagaaattgctgggggtaggcagcagatagctggctgaatggtagttgttgttgttgcaaataagaagcagagttcaatgcagctagttggttgaatggaagaaactgctgttgctgagagtaggcagcaaggtttgctagcacaagttgttgtagttgttgtgcccttgatgtttgtgccaataaatgcaccaaaggtaactgctgtaata

SEQ ID NO: 8578 - DNA, 523 bp, Zea mays
  Clone ID: LIB3061-103-Q1-N6-E5
aaagcacattccatttccattaagatagagggaaacgccacttcagaggccccggtgcaagaacaagcagattagaaaatgcaactcctaacactacgaagaggggggggcgaacagaaggaaccgaacagaagcaaggtttctacaagcagagacacagaggaaaggcccaacaacgtggacgacgacaacgggagatcaagccctctcgcccctgatgcggcgcgcgagctggatgtccttgggcatgatggtgacccccttggcgtggatggcgcaaaggttggtgtcctcgaagagccccacgaggtaggcctcgggggcctcctgcagcgcggcgacagcggaggactggaagcggaggtcggtcttgaaatcctgcgcgatctcacggacgaagcgctggaagggcaccttgcggatgagcagctccgggctcttttggtacttgcgaatctcccggagcgcgacggtgccggggcggaagcggtgaggctttttcaccccaccggttgccggcgcc

SEQ ID NO: 8579 - DNA, 458 bp, Zea mays
  Clone ID: LIB3061-103-Q1-N6-E7
gggaaaaaaaactttttttttttgggggggcccatacattaaccaaaaaatggggggggggattccaactaaaaagcaatctaaaaaggggcccccccaaagatgggttggggggaaaaggggggggggtttttaaaaaaaagggggaaaaaggggaacaactggggcagttgaaaaaggggtggggggttaaccaaaaactggggggaaaaaggaaacactttttgttgggtaaaaaaagaaagggggctttttgtaactacctggccaaaagggaaaaatatttggggggggaaaaaaaaaaagggggtaaggggggccaattggttaaaaggaaaaaaatttttttttttaaaataggcaaaacctacctgggtaaaagggaaaaattgtgggtggtgcaaataaacagcaggggtaaaaaataaaaaagggggtgaaaggaaaaaatttttttt

SEQ ID NO: 8580 - DNA, 507 bp, Zea mays
  unsure (1)..(507): unsure at all n locations; Clone ID: LIB3061-103-Q1-N6-E8
cttggggggttttttttaatccactaaacattatcaaaaactttattattgaactataactcataagaaatctaaaagaggcaccaccaattatggtttgttggtacaatgcccctgggtgtggggggggggctttttgaatggccccaattgctgcagttgtaagagggtgccagcgttaggcgcaccgcgctggtagaaccgcaacaactgtggttgtgtcaagaaggtagcagggctcacaccagctagctggctgaatggtactagttggtgctcctgtaaatcaccaagagagttcaatgctgtcacttggttgaatggaagaaattgctgggggtaggcaacanatagctcgctgaatggtacctgcagctgctgcaaataagaagcagaattcaaagcaactagtcgccctgaaaggaagaaactgctcctgctgagagtgggcagcaaagtttgccagcacaagttgtagaacttgttgtgccctcgtgttttgtgcca

SEQ ID NO: 8581 - DNA, 408 bp, Zea mays
  Clone ID: LIB3061-103-Q1-N6-E9
caattgttcattcaggtcattgctcacactgacactgccacccatggtgatgcgtgacacattattactcaatcatcgccgctaaatgactcaactagctagctagccagcggctatactacagcacatagtttcttcagggggggacaccgccggcagcagcgtaggggcatggagtcggctgctgcaggccgcacatcgccgtcagttgctgcgctatctgcgccgccaacagccccgcgacctggccgctttgcggctgctgctgcaggatggactggaggaccaagccgaagatcgcctggtaccggtgctgcggctccacctgcctgagctgctggcaacactgctgccgcaacgactggcactgaggcgagcagtagggcgtcgccgtcgggctgcactgat

SEQ ID NO: 8582 - DNA, 480 bp, Zea mays
  Clone ID: LIB3061-103-Q1-N6-F1
aaaaactaaaaagtccttttttatttctgggaacccacaaccttcagcacaaaaacctttattatggacctttacctcataaaaaactaaaaagggccccaccaatgatgggttgtgggtaaacccctgctgggttggtcaaaccaggttggttgattggcaccatttgttgcagttgtaaaagggtcccaccgttaggcccaccgtcctggtaaaccggcaccacctggggttgtttcaaaaaggtaccaggcctaaccccacctacctggctgaatggtagtagttgttgctgctgaaaataaccaggaaagtccaatgctgccagttggttaaatggaaaaaattgctgggggtaggcaccaggtacctgcctaaatggaacttgttgttgttgcaaataaaaaccaaagttcaatgcacttagttggttaaatggaaaaaactgctgttgcttaaaagtagccaccaaggtttgcc

SEQ ID NO: 8583 - DNA, 548 bp, Zea mays
  Clone ID: LIB3061-103-Q1-N6-F10
aatctagaatgtactttcttatttctgggacgccacaaacatcatccaaaaaacttcattattgaactataactcataagcaatctaaaagagggcaccaccaatgatgggttgttggtagaacactgttgggtttgtcaaagcaagttggttgaatggcagcaattgttgcagttgtaagagggtgccagcgttaggcatagcgtgcaggtagaacggcaacaactgttgttgtgtcaagaaggcagcagggctcacatcagctagctggctgaatggtagtagttgttgctgctgtaaataagcagcagagttcaatgctgctagttggttgaatggaagaaattgctgggggtaggcagcaactagctggctgaatggtaattgttgttgcaaataagcagcagagttcaatgcagccagttggttgaatggaagaaactgatgttgctgagagtatgcagcaaggtttgctagcacaagttgttgtagttgttgtgccctgatgttttgtgccaccaaatggaccaaaggtaactgctgtaata

SEQ ID NO: 8584 - DNA, 422 bp, Zea mays
  Clone ID: LIB3061-103-Q1-N6-F12
aaaaaaaaacccttggggtaaaagcccccccgggggggttaaaattttagggggggccccccccggggggggggggggctcccccccccgttaaaaaggtaaaaacccttttgggggaagccccccctcccttggggggtttgaaaaaaaggtttttcccaaaaaggccccccccccaaatgccgggaaaaaaaaaacccccccttttcccccccgggggaaaaaaaaaaaaaatgttgggggggggggaaaacccgaaaaaaaattgggccttttttaacccaaaacagggggggaaaaaccccccgggggggaaggaccccccaaaaaaccccaaaaatcccccgggggggggtaaaaaacccccttaaaccccccgggtttttaaaaacaaaaggggggaaaaaaaaaggggggggggg

SEQ ID NO: 8585 - DNA, 360 bp, Zea mays
  Clone ID: LIB3061-103-Q1-N6-F2
ataacatatttagaatagggacaaaaaagcgcaacaccgaaaaaggaaaaaaaaggggaggaaaacacaaaacaccaaagggaaacaccaaaaaaggaaaaggagcaggagggagaagcagggggcaaagaggggaacagggggaagacgggagggggggagggggcggggggcaagggggccaccggacagggaggaagggggggggggccacaagacccacaagaccacggaaggcgggggagggaagcagcaaggcacacggacgcggggggtagccggggagagagcggaccggtaccgggaagggggccagacccccggagagcgggccgggacagaggggggggcaagcagggc

SEQ ID NO: 8586 - DNA, 556 bp, Zea mays
  Clone ID: LIB3061-103-Q1-N6-F3
agaatctagaaagtactttcttatttctgggaagccacaaacatcagacaaaaactttattattgaactataactcataagaaattaaagggggcaccaccaatgatgggttgttggtagaatgctgctgggttgggggaagcaagttggttgaatggcagcaattgttgcagttgtaagagggtgccagcgttaggcgcagcgtgctggtagaacggcaacaactgtggttgtgtcaagaaggtagcagggctcacaccagctagctggctgaatggtagtagttgttgctgctgtaaataagcaggagagttcaatgctgtcagttggttgaatggaagaaattgctgggggtaggcagcagatagctggctgaatggtagttgttgttgttgcaaataagaagcagagttcaatgcagctagttggttgaatggaagaaactgctgttgctgagagtaggcagcaaggtttgctagcacaagttgttgtagttgttgtgccctgatgttttgtgccaataaatgcaccaaaggtaactgctgtaatagggctg

SEQ ID NO: 8587 - DNA, 566 bp, Zea mays
  Clone ID: LIB3061-103-Q1-N6-F4
atcagcaaaaaaatttattattgaactctaactcacaagcaatctaaaagaggcaccaccaatgatgggttgttggtagaacactgctgggtttgtcaaagcaagttggtcgaatggcagcaattgttgcagttgtaagagggtgccaacgttaggcgcagtgtgcaggtagaacggcaacaaatgttgctgtgtcaagaaggcagcagggctcacagcagctagctggctgaatggtagtagttgttgttgttgtacataagcatgagagttcaatgctgccagttggttgaatggaagaaattgccgggggtaggcagcagctagctggctgaatggtagtagttgttgttgctgcaaataagcagcagagttcaatgcagctagtttggttgaatggcagaaactgttgttgctgagagtaggcagcaaggtttgctagcacgaattgttgtagttgttgtgccctgatgtttttgtgccaacaaatgcaccaaaggtaactgctgttgctggagagtaggcagcaaggtttgctagcacgaattgttgtaagttgttgtgcc

SEQ ID NO: 8588 - DNA, 560 bp, Zea mays
  Clone ID: LIB3061-103-Q1-N6-F5
ctaaaaagtactttcttatttctgggacgcccacaaaatcatccaaaaaacttcattattgaactataactcataagcaatctaaaagaggcaccaccaatgatgggttgttggtagaacactgttgggtttgtcaaagcaagttggttgaatggcagcaattgttgcagttgtaagagggtgccagcgttaggcatagcgtgcaggtagaacggcaacaactgttgttgtgtcaagaaggcagcagggctcacatcagctagctggctgaatggtagtagttgttgctgctgtaaataagcagcagagttcaatgctgctagttggttgaatggaagaaattgctgggggtaggcagcaactagctggctgaatggtaattgttgttgcaaataagcagcagagttcaatgcagccagttggttgaatggaagaaactgatgttgctgagagtatgcagcaaggtttgctagcacaagttgttgtagttgttgtgccctgatgttttgtgccaccaaatggaccaaaggtaactgctgtaatagggctgacggttgttg

SEQ ID NO: 8589 - DNA, 481 bp, Zea mays
  Clone ID: LIB3061-103-Q1-N6-F6
ggggccccaaacccccaaccatatataatgggtctggggggttcctttggcgggcttcgggggggggggggggggcttttaaaacttttggggcctttacttgacagggggaaagaaacaaatctggggatccaggggaacgtatttttaaacaatttgcacacgtgggcctcccaccaacaggtagggtacatacgggggcacatgctgaaaacactcgctttatgtctaactggcccttatgctggtgctgctgccccccccaaaagtaaaatgcaggccgttttttccaaaggatcggagggcccctgtacggcaccccgaacatgggcagttccttgggcttgggcgtttccaggagccaccccaaacgcgggttttggtcctaaaccccgggggcctaatttgttatcgccaatataaccgcggtatggcaagccctggtagtaggggcaccccccgtccccggaatagggggggc

SEQ ID NO: 8590 - DNA, 521 bp, Zea mays
  Clone ID: LIB3061-103-Q1-N6-F7
ggagcaaatatgaatagtattttgttccggattagagcgcaggcgcaaccgcgcaacgacgaacgaaatgtacaggtcgcacaaacatagtacggggtgcaggagcaggactcgctcgaccactggcactgctcaggaggaagacatggaagcaggacgctaggcggagaagaggccgtcggcggcggccagcgcgagcccggtcttgggctccagctgcaccgcgacggtgaatctgaccccggacgcggcggcggaggcggactccacccaagagctccacaccttggccacggccccgaagttcctcgtctcgccgccggtcccgctgtcgctaccgctgtccccgccgggggcgcctcgccttgccgtcttctcgaactgctccgccaccagcaacgcgatgtccgccatcctctctctcgtatctgctgggctcgctgacgacgatctcactctgctcttgtcggttgttgctctgctctagtgctctggtgactgtggaagctgtctgtgaaaac

SEQ ID NO: 8591 - DNA, 523 bp, Zea mays
  Clone ID: LIB3061-103-Q1-N6-F8
tttttttttttttttttttttttttttttttttttttttttttttttttttttttttttttttttttttttttttttttttttttttttttttttttttttttttttttttttttttttttttggggaaaaggaactttttttttgggggggggccgattctttatcaaaaaaactttttttttggtttccacccaataaacaaattaaaaggggggccccccaatttttttttttggggggggggcccctggttttttaaaaaaaagggggaaaaaggggaaaaattgttggtttttaaaaagggggggggggttaccccaaaaatgttttgaaaaagggaaaaacttttgtttggtaaaaaaaaaaaaaccaattggtgaaattggccccataaaagggaggtgtttttggtggtgaaaaaaaaaagggggggttaagggggccaattggtaaaaaaaaaaaaattttttttttttaaaaagggcaaaacccaccgggctaaaggggaaaagggggggccg

SEQ ID NO: 8592 - DNA, 408 bp, Zea mays
  Clone ID: LIB3061-103-Q1-N6-G1
agaaatgtactttcttatttctgggaagccacaaacatcagacaaaaaactttattattgaactataactcataagaaatctaaaagagggcaccaccaatgatgggttgttggtagaatgctgttgggtttgtcaaagcaagttggttgaatggcagcaattgttgcagttgtaagagggtgccagcgttaggcgcagcgtgctggtagaacggcaacaattgtggttgtgtcaagaaggtagcagggctcacaccagctagctggctgaatggtagtagttgttgctgctgtaaataagcaggagagttcaaagctgtcagttggttgaatggaagaaattgctgggggtaggcagcagatagctggctgaatggtagttgttgttgttgcaaataagaagcagag

SEQ ID NO: 8593 - DNA, 561 bp, Zea mays
  Clone ID: LIB3061-103-Q1-N6-G10
acatcatccaaaaaactttattattgaattacaactaataagcaatctaaaagaggcaccaccaatgatgtgttgttggtaggaggccgctcggtctgtcaaagcaagttggacaaagggcaacaattgttgtagttgtaagagggttgcggggttagccgcaaactgctggtagaaaggcagcaactgttgctgtgtcaagaaggaagcacggtttgctgcagctagctggctaaatggtagtagtatttgctgctgcaaataagcagcggggttcagtgcggccaattggttaaatggaagaagttgttgttgctgagagtaggcagtagctagctggctgaatggtaatagttgttgctgcaaataagcagcagggttcagtgtaaacagttggttgaatggaagaaattgttgttgctgagagtagggagaaaggtttgccagagctacttggttgatcacaggtagcacgagttgctgcagctgctgtgccctgatggtttgtaccaatgactgcaccaaagatagggctggcgattgttgaaacaacaaggtgat

SEQ ID NO: 8594 - DNA, 565 bp, Zea mays
  unsure (1)..(565): unsure at all n locations; Clone ID: LIB3061-103-Q1-N6-G11
ggaaatgtaacttcttatttctaggaggccacatacatcagccaaaaacttcattattgaattacaactaataagcaatctaaaanatggcaccgccaatgatgtgttgttggtagaaggctgctgggtttgtcaaagcaagttggacaaagggcagcaactgttgcagttgtaagagggttgcggggttagccacaaactgctggtagaacggaagcaattgttgttgtttcaaaaaggaagtggggcttgttgtagctagctggccaaatggtagtagtatttgctgctggaaataagcagaggggttcagtgcggccaattggttaaatggaagaaattgttgctgctgagagtaggcagtagctagctggctgaatggtagtagttgttgttgttgtaaataagcagcagggttcagtgtagacagttggttgaatggaagaaattgttgttgctgagagtagggagnaaaggtttgccagagctacttggctgatcactggtagcacgagttgttgcagctgttgtgcccctgagggtttgtaccaatgactgcaccaaa

SEQ ID NO: 8595 - DNA, 401 bp, Zea mays
  Clone ID: LIB3061-103-Q1-N6-G12
gggggggggggttgtttttttttttttttttttttttttttgggggaggaaaccgccttttttgggggggggggccgggggggggggggaaaagggtgggggggggggggaaaggagagaaaaggaaaagggggggcccccccccgggggggggggggggaaaaacgggggggggggaaaaaaaaggggggggggaagagccccaagttgggggaatgaaagggggggcccggggaggaaaaggggggggggaaaaaaaaaaaaacgggggggggggaaaaaaggggggggggcccccacccccgtcggggggggagggagaaagaggggggccgcccaaaaaaaaggggggggcccccccccgggtggggggaaaaaaaaaaaaaaaagggggggggggg

SEQ ID NO: 8596 - DNA, 526 bp, Zea mays
  Clone ID: LIB3061-103-Q1-N6-G3
aaaaagtactttcttatttctgggaagccacaaacatcagacaaaaaactttattattgaactataactcataagaaatctaaaagagggcaccaccaatgatgggttgttggtagaatgctgctgggtttgtcaaagcaagttggttgaatggcagcaattgttgcagttgtaagagggtgccagcgttaggcgcagcgtgctggtagaacggcaacaactgtggttgtgtcaagaaggtagcagggctcacaccagctagctggctgaatggtagtagttgttgctgctgtaaataagcaggagagttcaatgctgtcagttggttgaatggaagaaattgctgggggtaggcagcaaatagctggctgaatggtagttgttgttgttgcaaataagaagcagagttcaatgcagctatgttggttgaatggaaaaaactgctgttgctggagagtaggcagcaaggtttgctagcacaagttgttgtagtttgttgggccctgatgttttgtgccaataaatg

SEQ ID NO: 8597 - DNA, 563 bp, Zea mays
  Clone ID: LIB3061-103-Q1-N6-G5
aaactgaaagcgatttacttattcatttgcataaatacaaactcaacggacccctttcatgctgcacaaacaataatccaacaacactgtagaaagatttaggcaataatgcaaaggtctatgtacaattaaacaaacaggggccacatgttgacagcatcctttccctctcattcaagaggtcagtttctgaccatggtcttctcggtaagaaaactttccatctttagcaatgcctcaatggcgatggtactaggtgtaagtatagtgacatcattatggccttgttttaatgcaatatgttcaagtgaaactctggcatcagcattagcatacgagtccattctttgctcaaaaagtgacgtaagttttgcataagcctttgcataaggatcaccggattcctgatgcaagagtggtcgagacgcggttcctacagcagcgattcttcttgcaagtgcatccagtgggacatctaaccataccgtcagccctttcttcatgtaactccaattgattggtcggatcactgcaccacctccggttgcaacaaccaaccgatg

SEQ ID NO: 8598 - DNA, 522 bp, Zea mays
  Clone ID: LIB3061-103-Q1-N6-G6
ggatttcgcgtgaggcggccatcggggtacagcatcgagtcgttcgccacagtgggtgcatcaccgcgccaggaaaccttctcgtcaacttgggagcctgcatggccaaccgatcttatctctacagcctgagcaaccggccgacgtcgtacgaagatcgtccgcagaccatctccggcctgtccgaatgggcctatgacgtgcccttcatgtaccggttgctcatgtcgggcgacccgcagctgtgcgcttcgctcgtctcggatggcctggacgactcgaagatgccgctgtatgccgtcagcagcccgttcgatcccggattcgcgcgtgtcaggcgtttcgtggcgatcgtcagggtgctgatctcggggcacgccgcgcaaaaacctgccgtgacggcagccgacgcgcccgaaccgacgctgatcgaccggatgcggcgttgggcagggcttggcgtccgcttcgccggcgcccaaacccgcatctgagatgacgccggcggcggcacctgccgcc

SEQ ID NO: 8599 - DNA, 577 bp, Zea mays
  unsure (1)..(577): unsure at all n locations; Clone ID: LIB3061-103-Q1-N6-G8
aagaatctagaaatgtactttcttatttctgggaagccacaaacatcagacaaaaaactttattattgaactataactcataagaaatctaaaagagggcaccaccaatgatgggttgttggtagaatgctgctgggtttgtcaaagcaagttggttgaatggcagcaattgttgcagttgtaagagggtgccagcgttaggcgcagcgtgctggtagaacggcaacaactgtggttgtgtcaagaaggtagcagggctcacaccagctagctggctgaatggtagtagttgttgctgctgtaaataagcaggagagttcaatgctgtcagttggttgaatggaagaaattgctgggggtaggcagcagatagctggctgaatggtagttgttggttgttgcaaataagaagcagagttcaatgcangctagttggttgaatggaagaaactgctgttgctgagagtaggcagcaaggtttgctagcacaagttgttgtagtttgttgtgcccctgagtttttgtgccaataaatgcaccaaaggtaactggctgtaatagggctgatgattgttgg

SEQ ID NO: 8600 - DNA, 471 bp, Zea mays
  Clone ID: LIB3061-103-Q1-N6-G9
gcccgaactagcggggcatacccccgtttagggttagggatccgacaagaaccaaaagcgggtttgccacccgccttttactggctgggggggtggtacctcaaatacaggggggattttgcccatcaaaagtaacggaacagggctcgaacccatcccaatttacatgggcccaaaagggggaacgatgggttatcggccaaggggaaaattgggtccccgggggagtttgagtaaaaataaaaaaaacttcccataggggccaaagcaccccgggcaaaatgggccaaaagggcaagcccccaaaaatatgaagatcatgaggaacaccctccgcccaaaaaatttttttattattaaccacctgttggaccaaaagccgttgaaaaactctaggagctggccctgggctcccttcacgttagccaccggttcccccatgttctcggcaattctgaatggtagctctcc

SEQ ID NO: 8601 - DNA, 57 bp, Zea mays
  unsure (1)..(57): unsure at all n locations; Clone ID: LIB3061-103-Q1-N6-H1
ggggggggggggnnnnngagggggnnnngggggggggggagggnggagggggggggg

SEQ ID NO: 8602 - DNA, 561 bp, Zea mays
  Clone ID: LIB3061-103-Q1-N6-H10
cgctcaaagcagcacagtatggtaattaaactgatcaatttacagcatgatgtatccccaaatccaggcccccaatgtcgattcaacatgtaactaacatttgctgctacaacattctaccctacaacattgaaggacacaaaagagcaaaaagaaagaaaaaatgccttggatgacacttttattgctccgatgatctccaacagactgatctgcagatcacgcatgtaaccaggtgctgatcattgtcgaatgtcgagacacacagctgcatgtcgcacgttcacttcatataactgttccactagggagtaaagcatccttgatcactgtgacaattccacctttgatgaagtacccgtctgtctcccttgcagcttcttgaacattgtcagcattgagtatcttaacattgtctccaattcgagcattcttgtcaatgattgctctcctgatgcatgaatttttcccaataccaataggaatgccacctttttcggcaagggagttttttatcagcttctgtctcatagtagtccgcacccattagtaaactgtcct

SEQ ID NO: 8603 - DNA, 546 bp, Zea mays
  unsure (1)..(546): unsure at all n locations; Clone ID: LIB3061-103-Q1-N6-H12
ccaatcatcttttttccttatatattattcctttccatttcaatggttcattcaggtcattgctcacactgccacccatggtgatgggtgacactacgttactcatcgccgctaaatgagtaaactagcgagctaggtagctagtcagcggctccattacattattactacagtacatagtttcctcagtagtagacaccgccggcagctgcgttgcaagggcagggacctggctgctgcagctgcaggccgcacatcgccgtcagctgctgcgctacctgggccgccatcagcgccgcgagctcgccctgcggctgctgctgcaggaaggactgcaggaccacaccgtatgtcgcctggtaccggtgcagcggctccacctgcctgatctggtggcagcactgctgctgcagcgcctggcactgtggcgagccgtanggcgtcgccgccgggctgcactggtgcctcaggaactcgacgcactggcccaggaacgggctgccgacgctgccgacgccccaggatccgaactgctggcacgggctt

SEQ ID NO: 8604 - DNA, 510 bp, Zea mays
  Clone ID: LIB3061-103-Q1-N6-H4
cttgagccagacagtcgcatgctatgtattaattacgatttaccaacttccttattacaacaagagacactcaaacccgcccgacttgtttgcagacacccgatggcgcagaaaaaaaacacagtaacgtgcgggggggtcgaacttacaacgccaaagtcgccgcaaaaggaaaccatgacactcgaaaacatgcccaaacccatactggcctggcgaacaagcaaacagggtcacggacgacaggatcggaccaagtgcgtgtgcatacacgcgtctagtgaatccctggtgatgggagaggagtccttggtggtgtaggtgttggcgtcaccctgcttggcggccccgcccatccccagcgggctcatcaacgcgtgcttggcgcccgccgccgtgctcttcacctgctcagtggcctgctggatgacgccgctggacttgtccttgccggagacggcggggtccttggcgtactgcccggcctcggcgggcttctgcttggctgcc

SEQ ID NO: 8605 - DNA, 552 bp, Zea mays
  Clone ID: LIB3061-103-Q1-N6-H6
gtagaacatttgtttgttgtttggtacagattacacacttgattggcatttcacacgcaaccgatcgatatgaccattatactcctatttattagcaccagctgtttatagccatgtctggagtctggagtctgggggggggggggaccgagatcggtgcatgatacagagatagattcatcggtttgcatgagcatggcttgttgccagccactatgttacacccaccacgcatgtacaaagttctgtgtcgtcgcatcgcctccgcctgatgatgatcgatcagtgcagcgccgtcaggacagtagacccttccaccaccttgaaagtggcaccgcagatctcttcttcgtcggcggggacagcggtgaccttgtgcttggggttctcgtagcacttgagccctccgagggcgttggagtataagcagccttgcgggaacggcgcgagcgacttgccgcatgagcctttgagcatgtcgatgtcgttggagaatgggacgcaatcgtcgggggtggatcccccaaaagacggcaccctgtccttggggtt

SEQ ID NO: 8606 - DNA, 569 bp, Zea mays
  Clone ID: LIB3061-103-Q1-N6-H7
tttttttttttatttttttttattttttttttttttttttattttttttctttttttttttttttttttttttattttttttttttttttttttttttttttttttttttttttttttttttttttttttttttttttttttttttttttgggggttgttttttttttttttttttttttaaaaaggggcctttttttttgggggggggccccccccctttccaaaaaaattttttttgggggcctttccccaaagaccaataaaagagggggcccccccctggggggggggggggggaaaccgggggggggtttaaaaaaagggggggggggggggggccatttggggcctgtgaaaggggggcccccgttggggcccccgggggggggaaaaagcccccccttttggggggggaaaaaggggaccggggccccaaaaaatttttggggaaaaggggggggcccttccttttttaaaaaaaacccaaggtttcctccccccccggggggggaggggaaaaaatggggggggggggggccccccccccccccccaaggggggttggggg

SEQ ID NO: 8607 - DNA, 576 bp, Zea mays
  Clone ID: LIB3061-103-Q1-N6-H8
gtgcaactgtacttggcatggctttttttttccttcacttgtattcaagcagccatgtctggcacagcaagctttctcaacaagaagcatcagcctaccacgttaaacaggcgattaacagaagaacacaacatcgccatcagtcagaaccacacgacctgggcaacagaacatcgcattgcactctggaagacaggtgaacgagcaggcatttttattcgaagcaaaaggtgcagccaattctcaccatactaggaaccaggccagcgctgcccaaaaacgctcaaacaagaaagaaaaaaaaacaaggaaccaaagttcttggaaaccaagtacacataactccaatacacgactaacaatgcgaattgcggtgaaacagatcgaaatgcaggcgatggttctccggcctgggcttcttcttcttcttctttccccgtactaatcgaaggacagcggaacctggcttgccaggctacggtacttcagggcgtagaacatctcgatgtagcggcgggtctcgcgcctctccaggttgctcacgtacttccaaaacccgtacacgccggtcagggt

SEQ ID NO: 8608 - DNA, 505 bp, Zea mays
  Clone ID: LIB3061-104-Q1-K6-A3
catagattctttgattgatcggacggaggcgcgtgtccggtcccgtccgtaataacactgatccgatccacgccggccggcgatggagctcatcaagtccagggcgaccgtgtgcgcgctcctcctggcgctgctcctgctctcacactacgacggcgggacgacgacgacgatggtggcggaggcccgggtgtgcatgggcaagagccagcaccactcgttcccctgcatctccgaccgcctctgcagcaacgagtgcgtcaaggaggacggcgggtggaccgccggctactgccacctccgctactgcaggtgccagaaggcgtgctaagcaaagctcttcaaacacccttggcttgccagaactgaactctagtagtactaagtaacacccttggctagctgtgcacaacctacgtaccgtgcatgcatgtaatgtggtgtcatgtaacgtgacagcaataaatagtattaataataataacacggcatgtagccaagcaac

SEQ ID NO: 8609 - DNA, 629 bp, Zea mays
  Clone ID: LIB3061-104-Q1-K6-A8
aacaagctcatagaaaggggaatccaggagcaacaatagagcaacaatggcgaccaagatactttccctccttatgctccttgctctttctgcatgtgttgctaacgcgacaattttccctcaatgctcacaagctcctatagcttcccttcttcccccataccttccatcaatgatagctgcagtatgtgaaaacccagctcttcaaccctataggctccaacaagcaatcgcagcaagcaacatacctttatcacccttgtttcaacaatcgccagccctatctttggtgcagtcattggtacaaaccatcaaggcacagcagctgcagcaactcgtgctacctgtgatcaaccaagtagctctggcaaacctttctccctactatcagcaacaacaatttcttccattcaaccaactatctacactgaaccctgctgcttatttgcagcaacaactattaccattcagccagctagctactgcctactctcatcaacaacaacttcttccatttaaccaattggccgcactgaacctcgctgcttatttgcagcagcaaatattactaccatttagccagctagctgcagcaagccgtgctttcttcttgacacagcaacagttgc

SEQ ID NO: 8610 - DNA, 654 bp, Zea mays
  Clone ID: LIB3061-104-Q1-K6-B1
attgagattaacaagcaacatagaaagtggaatgcagtagcaaaaatagagcaacaatggcggccaagatattttccatccttatgctccttgctctttctgcatgtgttgctaacgcgaccatttttcctcaatactcacaagctcctatagctgcccttcttcccccataccttgcggaatgaccgctttagtatgtgaaaacccagcccttcaaccctacaggatccagcaagcaatcgcaacaagcaacttacctttatcacacctgttctttcaacaatcgccagccctatctttggtgcagtcattggtacaaaccatcagggcagaacagttgcagcaactcgtgctaccagtgatcagccaagtagctctggcaaacctttccccctactctcagcaacaacaatttcttccattcaaccaactgtctatactgaaccctgctgcttatttgcagcaacaacaactactaccattcagccagctagctactgcctactctcagcagcaacaatttcttccatttaaccaattggccgcactgaacccctctgcttatttccagcagcaaatactactaccatttggccagctagctacaacaagccccgcttccttcttgacacaacaacaagtgctttcgttcta

SEQ ID NO: 8611 - DNA, 658 bp, Zea mays
  Clone ID: LIB3061-104-Q1-K6-B10
gtaaggtttgtgctccttaaaattgagtgggggggcgccatttttggtgatattgaccacactaagcttcaaacccatttccttctgcggactccacatatttcagcaatgcaccatgacgaaacatctgatctgaagattgtggccgaaaattttgaagaaaacctagagattacaggcgcatccttggaggctcgtaagctggtcgttgaaatctgtgacattgtggcgacaagagcagcccggctggctgctgcggggcttgcagggatcctcatgaagatcgggagagatcacagcgtcgaggaccaacggtcagtcatcgccatcgacggaggactgttcgagcactacaccaaattccgccggtgcttggagaccacactgggtgagctgctaggagacgaggcgtccaaggcggtggccatcaagcatgccgatgacggctcatgaataggtgctgccctgattgcagcttcacagtctcagtacaaaaacgacttagtggccgtcaagcatgcagatgacggttcaggagtcaagtatgcagaagacaagcgtgcagatgacggttcagaaataggtgctgccctgattgcagcctcgcaatctcagtagagagatgtcctgagtggtatagaggtagcaagtagctatg

SEQ ID NO: 8612 - DNA, 498 bp, Zea mays
  Clone ID: LIB3061-104-Q1-K6-B2
gcagggtttacctctacctgggcgggctgctctcgtcggggctctccatcctgctctggctgcagctcgccgcctccatcttcggccactccgcaaccagcttcatgttcgaggtctacttcgggctgctcatcttcctgggctacgtggtgtacgacacgcaggagatcatcgagagggcgcaccgcggcgacatggaccacgtcaagcacgccctcaccctcttcaccgacttcgtggccgtcctcgtccgcgtcctcgtcatcatgctcaagaacgcggccgacaagtcggaggacaagaagaggaagaagaggtcgtgagcgtcgagaacggaagctctcccacatgcataggagtaactgccagggttccttcctggggtggaagtgtggaactgagcttgaatgttaagaagtgttcctttgttctcttcctctcttgatgactctgtaaatagctatgtcaatctggttaagtttggtttggttgcaaaaa

SEQ ID NO: 8613 - DNA, 662 bp, Zea mays
  Clone ID: LIB3061-104-Q1-K6-B5
ctgatagacctattgctacgctgctttgctgtggtccaacaggagttggtaaaacagagctcaccaaagctctagcagctagttattttggatcggaatctgctatgcttaggttagacatgagcgagtatatggagaggcacactgtgagcaagctcataggctctcctccagggtacattgggtatggtgaaactggtactttgacagaagcagtcaggagaaaaccatttactgtggtattgttggatgagatagagaaagctcaccctgatattttcaacatccttctccaaatatttgaggatggacatttgacagactcacagggtcgcagggtttccttcaaaaatacgttgattgtcatgacttcgaatgttggttcaacatcaatttcaaaaggaagacagagcataggtttcttgaaggaagataccgagtcaggctcatacttcgcaatgaaatccttagtgatggaagagctcaaggcatttttccgtccagagttgctcaatagaatcgacgagatggttgtgttccgtcctctggagaagactcagatgctggccattcttgatatcatcctaaaggaagtcaagggccgacttttggccctcgggataggtttggaggtgtctgatgcaatgaaggacctgatatgc

SEQ ID NO: 8614 - DNA, 677 bp, Zea mays
  Clone ID: LIB3061-104-Q1-K6-B6
gttgcaatccatggacatggctttggcgtctaaagcctcccctccgccatggaatgccaccgccgccgagcagccaattccaaagcgtgacaaagccgctgcaaatgattcaacatacctcaatcctcaagctcatgatagtgttcttggaatcattctgggaggtggtgctgggactagattgtaccccttgacaaagaagcgtgccaagcctgcagtgccattgggtgccaactatagactgattgatattcctgtcagcaattgtctcaacagcaacatatccaagatctatgtgctaacgcaatttaactctgcttccctcaaccgtcacctctcaagagcctacgggagcaacattggagggtacaagaatgaagggtttgttgaagtcttagctgcacagcagagcccagataatccaaactggtttcagggtactgcagatgctgtaaggcagtacttgtggttgtttgaggagcataatgtgatggaatttctaattcttgctggcgatcacctgtaccggatggactatgaaaagttcattcaggcacacagagaaacaaatgctgatattaccgttgctgccctaccgatggatgagaaacgtgcaactgcatttggcctcatgaaaattgatgaagaagggaggatcattgagtttgctgagaaac

SEQ ID NO: 8615 - DNA, 449 bp, Zea mays
  Clone ID: LIB3061-104-Q1-K6-B7
ctgagattctacaaagctagctctctcgggggtgcggttcggatcaccatgccgtccaccgtgaactccgcgtccctcgaccagaaccttgagctcgccaagcaatgctcgcgagaggccgccctcgcagggttcaaggcagcagctgtcgcgaccgtcgcctctgcagttcccaccctggctagcgtcaggatgctgccatgggccaaggccaacatcaaccccgctggccaggccctcatcgtctccacagttgctggcatggcgtacttcatcgcggcggacaagaagatcctctcgctggcgaggcagcactcgtacgagaacgcgccggagcacctcaaggacacctccttccagggcaccggccgtccgcacccagggttcttcaggccttgagcgagaccatcaaactaccgccctagctagctggaagcactagttcgtca

SEQ ID NO: 8616 - DNA, 573 bp, Zea mays
  Clone ID: LIB3061-104-Q1-K6-C12
ccttgtttctccaacaaccgtcagccctattagagcagttacctttggtccatttggtggcacaaaacatcagggcacaacaactacaacaacttgtgctagcaaaccttgctgcatactctcagcaacatcagtttcttccattcaaccaactggctgcattgaactctgctgcttatgggcaacaacaattaccattcagccagctagttgctgcctacccccagcaatttcttccattcaaccaactagcagcattgaactctgctgcttatttacagcagcaacaactactaccattcagccagctagctgatgtgagccctgctgccttcttgacacaacaacagttgttgccgttctacctgcacgctatgcctaacgctggcaccctcttacaactgcaacaattgctgccattcaaccaacttgctttgacaaactcaacagtgttctaccaacaacccatcattggtggtgccctcttttagattgcttatgagttatagttcaataatgaagttttttggatgatgtttgtggcgtcccagaaataagaaagtacatttctag

SEQ ID NO: 8617 - DNA, 654 bp, Zea mays
  Clone ID: LIB3061-104-Q1-K6-C2
attttcattattcaaaaacacaccaagcgaagcgcactagcaacgacctaacaccaatggctaccaagatattagccctccttgcgcttcttgcccttttagtgagcgcaacaaatgcgttcattattccacagtgctcacttgctcctagtgccattattccacagttcctcccaccagttacttcaatgggcttcgaacatccagccgtgcaagcctacaggctacaactagcgcttgcggcgagcgccttacaacaaccaattgcccaattgcaacaacaatccttggcacatctaaccctacaaaccattgcaacgcaacaacaacaacaacaacagtttctgccatcactgagccacctagccgtggtgaaccctgtcacctacttgcaacagcagctgcttgcatccaacccacttgctctggcgaacgtagctgcataccagcaacaacaacagctgcaacagtttatgccagtgctcagtcaactagccatggtgaaccctgccgtctacctacaactactttcatctagcccgctcgcggtgggcaatgcacctacgtacctacaacaacagttgctgcaacaaattgtaccagctctgactcagctagctgtggcaaaccctgctgcctacttacaacagttgc

SEQ ID NO: 8618 - DNA, 546 bp, Zea mays
  Clone ID: LIB3061-104-Q1-K6-C4
caaccctttttgatccaacaggcaatcgcagctggcatcttacctttatcacccttgttcctccaacaatcatcagccctattacagcagttacctttggtgcatttattggcacaaaacatcagggcacaacaactacaacaacttgtgctagcaaaccttgctgcctactctcagcgggggcggtttcttccattcaaccaactagctgcattgaactctgcttcttatttgcaacaacaacaactaccattcagccagctatctgctgcctacccccagcaatttcttccattcaaccaactgacagcattgaactctcctgcttatttacagcagcaacaactactaccattcagccagctagctggtgtgagccctgctaccttcttgacacaaccacagtttgttgccgttctaccagcacgcttgcgcctaacgctggcacccttttacaactgcaacaattgctgccattcaaccaacttgctttgacaaaccccagcagattctaccaacaacccatcattgggggggccctctttt

SEQ ID NO: 8619 - DNA, 674 bp, Zea mays
  Clone ID: LIB3061-104-Q1-K6-C7
gtcaaattatagtccaaaactcttaggtccccagccccaaatcctttttgatgagatcactccattttctgtggtaattagtgttgaactatcaggatagcatcggtaaggagcaggttgatggttccaaagtttggcaccgaagtgccaaggtttgcaactattcatcggagcccacatgccacatactgaggccaaatactaggagcctggtttctggtctgagcccttcaactgaatacttcttcaaggttttgccttttagcagcgtacaggggtttactgagtgggaggcaaaatgcagtacacgcagcctggaccatggcagcagccagtgctcaactcagaactctgagagcatgtgcctcaaagaggatccaatgaagcatcagaaaaaggatttgaatgtgcagaatcatcagagaaccattcaatatgattcacctaaggggtctacaaattcaagtgagaacaatttattatgtgaccggtattccaagcgggctaaggttgcaaggctagatggtgcaagtgacaacgacgaaagccagttgccgccaacttctgaagttttaccgtttgcaagctccaactactctccttccgaagctccaagtaaacctgacttgcttattggcaccccagattcggcctccaagatctatgtggagcag

SEQ ID NO: 8620 - DNA, 75 bp, Zea mays
  Clone ID: LIB3061-104-Q1-K6-C8
tcctgcattccacgtcatatctgtgctataggaggatctaaatggaatggattggccggtgagcgacaacatatg

SEQ ID NO: 8621 - DNA, 490 bp, Zea mays
  Clone ID: LIB3061-104-Q1-K6-D3
aaaaaatttttaaaaaaaaaaaaaaaacagaaagaaaaaaaaaaaaaaaatttaaaaaaaaaaaaaagggaggaaaaataaaaaggaaaaaaaaaaaaaaaaaaaaagaatagaaaaagaaaaggatattattttgtggggaaaaaaaaaataaaaagggggagaagaaaaaaaaataaaaaaaaggggggggggaaaaaaatttggggggggggttttggggggccccattttttttcgggggggggggggggttttgtttttttttggggggcccgcattttaattctggggggggggttttttggcgggggggggggggaaacccggggggttcccccttttggggggggggggggagccccccttttgccggggggggggtttaggggggggggccccccttttttctttttcaaaatttggccccccctgggggggggggggggccccccctggggggggtttttgggggggggggggggggggg

SEQ ID NO: 8622 - DNA, 657 bp, Zea mays
  Clone ID: LIB3061-104-Q1-K6-D5
gccattggtttggtgtattgtgacagagtatgcaaagggtggatctcttaagaatttcttgagcaggaggcagaacaggtctgttccgctgaagttggcagtcaagcaggcattggatgttgcacgcggcatggcctatgtccatggccttgggttcattcacagagatcttaagtcggacaacctcctgatttctggtgataagtccattaagattgccgactttggtgtggctaggattgaagtcaagactgaggggatgacacctgaaactggaacataccgttggatggctcccgagatgatccagcacaggccatacaaccagaaagtggacgtctacagtttcgccattgtcctgtgggagttggtaactgggaatgtccctttcgcaaacatgactgcagtgcaagctgcatttgctgtggtgaacaagggtgtgcgaccagccataccccacgactgcctccctgcccttggggagatcatgaccaggtgctgggacgcaaaccctgatgtccgtcccccattcactgagatcgtgaggatgctggaacaggtggagatggaggttctgaccaccgtccgaaaggctcggttccgctgctgcatcgcccaaccgatgacgctggactgagtcatccacaaaatccagga

SEQ ID NO: 8623 - DNA, 624 bp, Zea mays
  unsure (1)..(624): unsure at all n locations; Clone ID: LIB3061-104-Q1-K6-D6
gaggactgcatggatccacggctatcaggtgagttctcgatggtggaggccacactgatcatcaagctgggcctggtctgtgcatctcaggtgccttctcaacgaccggacatggctgaggtggtcagtatgcttgagatggtgaggagtcctcagggtaccccagaggatgatctggtttgagatccatttagggtgcgttcttttgttcaggattgatgccaggattggttccaggtgatcaaagcttatacaaattagataagcattcatggttagattggttctagatcatgattccggaacaaacaaacacacccttaccggagtttctcccttttctcattccttttttccattcgtctttgggtagatacatgttgaggagatggggaaagtgcggtccgaaagtatgttaggtctttgactagtgagtctagtttggttgcaatatttaggcacttctctatctcaggtgtctgaatttttagttgattttagggaacactcttgaataaccaactaaaaatttaggcacttctctatctcaggtgtctgaatntttagttgattttagggaacactcttgaataaccaactagtataagaaaatttattgtttta

SEQ ID NO: 8624 - DNA, 654 bp, Zea mays
  Clone ID: LIB3061-104-Q1-K6-D7
ccgtttgctttcctgaatcctgtcgccgtctcgcgtgccttcattcccggcggcgacctcttcgtggggcctttcgccggcaacgagcacccacgcaccaggattcagatcgtgctacggcggctcctgtccatccaccatgattaatttcgtgcctgatcagccgccagggcaaggtgaggctcaccaagtggtattctccgtacacccagaaggagaggaccaaggtcattcgcgagctcagtggactcgttcttacacgagggcccaaactctgcaactttgtcgagtggaggggttacaaggttgtataccggaggtatgctagcctgtatttctgcatgcgcattgatgctgatgacaatgagcttgaagtccttgagatcatccatcatttcgtcgagatactggaccgatattttggcagtgtatgtgagctggatttgatattcaatttccataaggcctactacatactggatgagattctcattgccggtgaacttcaagaatctagcaagaagaatgttgcaagacttattgccacacaggattcgttagtggaggctgctaaagaggaagccagctccataagtaacatcattgctcaagccacaaaataaagttcttcaccagtctaatgcccgacatctt

SEQ ID NO: 8625 - DNA, 539 bp, Zea mays
  Clone ID: LIB3061-104-Q1-K6-D8
gggcacaacagctgcagcaactcgtgctacctgtgatcaaccaagtagctctggcaaacctttctccctactctcagcaacaacaatttcttccattcaaccaactgtctacactgaaccctgctgcttatttgcagcaacaactattaccatttagccagctagctactgcctactctcagcaacaacaacttcttccatttaaccaattggccgcactgaaccccgctgcttatttgcagcagcaaatactactgccatttagcgagctagctgcagcaagtcgtgcttccttcttgacacagcaacagttgctgcctttctacaagcagtttgcggctaaccccgcaaccctcttacaactacaacaattgttgccctttgtccaacttgctttgacaaacccagcagcctcctaccaacaacacatcattggtggtgccctcttttagattgattattagttgtaattcaataataaagttttttggatgatgtatgtggccaaccagaaataagaagttacatttccagattct

SEQ ID NO: 8626 - DNA, 666 bp, Zea mays
  unsure (1)..(666): unsure at all n locations; Clone ID: LIB3061-104-Q1-K6-E4
agaccaactagcaacatagaaagcacaatagtgtaccaacaatggcagccaaaatattttgcttccttatgctccttggtctttctgcaagtgctgctaccgcaaccattttcccacaatgctcacaagctcctatagcttcctttcttcccccatacctctcaccagcggtgtcttcagtgtgtgaaaacccaattcttcaaccctacaggatccaacaggcaatcgcagcaggcatcttacctttatcacccttgttcctccaacaaccgtcagccctattacagcagttacctttggtgcatttgttggcacaaaacatcaaggcacaacaactacaacaacttgtgctaggaaaccttgctgcctactctcagcaacagcagtttcttccattcaaccaactggctgcattgaactctgctgcttatttgcaacaacaactaccattcagtcagctagctgctgcctacccccagcaatttcttccattcaaccaactggcagcattgaactctgctgcttatttacaacagcaacagctaccaccattcagccagctagctgatgtgagccctgttgccttcttgacacaacaacagttgttgccgttctacctgcacgctgcgcctaacgctngcaccctcttacaactgcaacaattgc

SEQ ID NO: 8627 - DNA, 690 bp, Zea mays
  Clone ID: LIB3061-104-Q1-K6-E6
atcaagctcaacacgatctcaattcgattccagttcatccatccaacgcctcccgcctgtacgtatagaagaaagaaggaagaaccgtcaccgtacgtcctcgccagtacaaataatggccctgctcaaagccgcgcgcgtcgccgatgtgcccaccctggacgtggtggtggcccccggcctggtggcggttgccaaggcgaggagcgccgcggctgtgggcggccggttctcggtgatcggccaccgcggcaaggggatgaacgcgctggcgtcggaggacccgcgtctgcgggatgtgcgcgagaacacggtccgctccttcaacgacgccgggcgcttccccgtcgactacgtcgagttcgacgtccaggtcaccaaggacgggtgcccaatcatcttccatgacaacttcatcttcacacaagacgatggtaagatttcacaaaagcgtgtggccgatattcagctggaagacttcctgcagtatgggctccagaacgagcaggggaaggttggcaagcccctgcttcgcagattgaaggatggcaggatggtgaactgggacgtgcaatcagaggacgctctttgcacactcgaagaagcgttcgacaaggtcaatccaaggttgggcttcaacgtcgagctgaaatttgacgacagtcttgaatacaccgaggaagagctcac

SEQ ID NO: 8628 - DNA, 611 bp, Zea mays
  Clone ID: LIB3061-104-Q1-K6-E9
aacacattaagcgaagcgcactatcaacgacctaacaacaatggctaccaagatattagccctccttgcgcttcttgccctttttgtgagcgcaacaaatgcgttcattattccacaatgctcacttgctcctagtgccattattccacagttcctcccaccagttacttcaatgggctgcgaacacctagctgtgcaagccaacatgcaacaacaagcgcttgcggcgagcgtcttacaacaaccaattgcccaattgcaacaacaatccttgccacatctaacaatacatgccatcacatcgcaacagcaacaacagttgctaccagcactgagccacctagccatggtgaaccctgccgcctacttgcaagagcagctgcttgcatccaacccacttgctctggcgaacgtatttgctaaccagctacaacaacagctacaacagattctgccaactctcagtcaactagccatggtgattccctgccaactacgtacaacaacaacaactgtttgcatctagaccgctcgctgtggtcaatgcacctacatacctgcatcatcaattgttgcaacagattgtaccagatctgactcaactagctgtg

SEQ ID NO: 8629 - DNA, 665 bp, Zea mays
  Clone ID: LIB3061-104-Q1-K6-F1
aagcacaatagtgtaccaacaatggcagccaaaatattttgcttccttatgctccttggtctttctgcaagtgttgctaccgcaaccattttcccacaatgctcacaagctcctatagcttcccttcttcccccatacctctcaccagcggtgtcttcaatgtgtgaaaacccaattgttcaaccctacaggatccaacaggcaatcgcaacaggcatcttaccattatcacccttgttcctccaacaaccgtcagccctattacagcagttacctttggtccatttggtggcacaaaacatcagggcacaacaactacaacaacttgtgctagcaaaccttgctgcatactctcagcaacatcagtttcttccattcaaccaactggctgcattgaactctgctgcttatttgcaacaacaattaccattcagccagctagttgctgcctacccccagcaatttcttccattcaaccaactagcagcattgaactctgctgcttatttacagcagcaacaactactaccattcagccagctagctgatgtgagccctgctgccttcttgacacaacaacagttgttgccgttctacctgcacgctatgcctaacgctggcaccctcttacaactgcaacaattgctgccattcaaccaacttgc

SEQ ID NO: 8630 - DNA, 624 bp, Zea mays
  Clone ID: LIB3061-104-Q1-K6-F2
gagcatttataacacaccaagcgaagcgcactagcaacgacctaacaacaatggctaccaagatattagccctccttgcgcttcttgccctttttgtgagcgcaacaaatgcgttcattattccacaatgctcacttgctcctagtgccattattccacagttcctcccaccagtggcttgaatgggcttcgaacacctagctgtgcaagccaacatgcaacaacaagcgcttgcggcgagcgtcttacaacaaccaattgcccaattgcaacaacaatccttgccacatctaacaatacaagccatcacaacgcaacagcaacaacagttcctaccagcactgagccacctagccatggtgaaccctgccgcctacttgcaagagcagctgcttgcatccaacccacttgctctggccaacgtatttgcaaaccagcaacaacaacagctacaacagtttttgacaacgctcaatcaactagccttggtgaaccttgccgcctacgtacaacaacaacaacctgctgtcatttaaccccgttctctgtgggcaatgcacctacatacctgcaacaacaattgatggaacagattgtaacatttcagactaaactttctttgta

SEQ ID NO: 8631 - DNA, 660 bp, Zea mays
  Clone ID: LIB3061-104-Q1-K6-F3
ccgagcggcgccctttttttttttttttttttttttttttatttactccaccactacaggtccatttatttactcgcaatataaaattaccgatcggtacttaactacacacgcaagcaattagttcatgcgcttattaggttgtgccactggccaccactacactacattacactagcacaagcaagcagctacacatacttgtccatatcacataaacgaaacagcatatataagaagatgtcccaacatctttgcaccacgcgcgagatcaggggccctgcaggccgaactcttcagggcgcggccacgttctccttggcgagcggcgcgatctcctcgccttcgacccctggctcgccgccggcgaccccgaggctgagcagcacgttctcccagttcttggcagggcccttccaggagagatcctggatcatgcagttcctcaccatctcctcgtacgccggcgtgccgaccaccttgatggcgcgctgcaatgtggtggccaccttcttgacgtccgccggctccacgacgttacagtcgacgctgaggcggcccatgtggaacccggtcttgccttcgatgatggtgtcgacgagtccaccggtggacgcgcaggcgcagggcgttccgtatcgcatcccctgcagctggatg

SEQ ID NO: 8632 - DNA, 563 bp, Zea mays
  Clone ID: LIB3061-104-Q1-K6-F4
atccatttatcattttagctgttgatacaaagagaagggaatggccgagataaccctagagccgagtgatcttatggcgcaaacaaacaaaagaatagtgccaaagttcactgaaatcttccccgtggaggacgcgaactacccttacagcgccttcatcgcgtcggtccggaaagacgtgatcaaacactgcaccgaccataaagggatcttccagcccgtgctgccaccggagaagaaggtcccggagctatggttctacacagagctcaaaactaggaccagctccatcacgctcgccatacgcatggacaacctgtacctcgtgggcttcaggaccccgggcggggtgtggtgggagttcggcaaggacggcgacacccacctcctcggcgacaaccccaggtggctcggcttcggcggcaggtaccaggacctcatcggcaacaagggtctggagaccgtcaccatgggccgcgccgaaatgaccagggccgtcaacgacctggcgaagaagaagaagatggcgacactggaggaggaggaggtgcagatgcagatgc

SEQ ID NO: 8633 - DNA, 655 bp, Zea mays
  Clone ID: LIB3061-104-Q1-K6-F8
gggagattggcgtcggctcgccgcagcagaagttcaccgtcatcttcgacaccggcagttccaacctctgggtgccgtcctccaagtgctacttctcgatcgcttgctacttccactcgcgctacaagtcagggcagtcaagcacttacaagaagaacggaaaacctgctgccattcgctatggaactggttccattgctggttttttcagtgaggatagcgttacattaggtgatctggttgtgaaggatcaggaatttattgaagctacaaaggagccagggcttaccttcatggttgcaaaatttgatggcattcttgaaagcctagcccaagaatgcaacaccagtgtggtataacatggtgaaacaaggtctcatcagcgaccctgttttctctttctggtttaaccgacatgctgatgaaggagaaggtggtgaaattgtgtttggtggaatggattctagccactacaagggcgatcacacgtttgtcccagtcactcggaagggatactggcagttcaacatgggtgatgtcctggttgatggaaagtccactgggttttgtgccggtggctgtgcagccatcgcagattctggaacttccttgcttgctggccccacagccataattactgaaatcaatgaaaaga

SEQ ID NO: 8634 - DNA, 653 bp, Zea mays
  Clone ID: LIB3061-104-Q1-K6-G10
gctttatttcccttgcccttttccagagcacctgcgccgtcggccatgggtcaagcctggggtaatctccaagataggctccaagggcggcggtggaaggagcaccaggtgaggaagatcaccgacaaggtgttcgaccgcctcacggaggacgcccagaagcgcgacaaggaggccctcagattcgaggaggtctacatcgccgtcctctgcgtctacaatgacatcaacaagtacttgccggggccgcaccacgaccccccgtccaaggagaagctcagggccatgatggaggagtacgacgtgaacctggacgggctcctggaccgcgaggagttcgcggagttcatccggaagctgaccgcatactcgctgtgctcgatcagcgtgaagctgctgatcacgctggtggcggcgccggcgctggcgatggcgaccaagcgggcgacggatggcgtccccggcgtgggcaaggtggtacgcaaggtgcccaacgcgctctacgcctccgccatcaccctgggcgttgtgctggtgcagagatccaccgatggcgtcgagtgactcgcgctgctgaaactgcaatgtcgtcggctgtgtagatggagcagcgtatctaggatagctgttggttcttttcggcttgtgcggtg

SEQ ID NO: 8635 - DNA, 535 bp, Zea mays
  unsure (1)..(535): unsure at all n locations; Clone ID: LIB3061-104-Q1-K6-G6
ggaatcttccagatggacagatgatctgggaaactaaccttcgaacttccacagcatcgaactcacagttgcatgttatgtcaaacaataaagcggccagggacaacttagttttagtttcagctgggcgatggatttatgctgtatcaagcattgatggggcaatttcatgggaaaaagagttttctcttgatggcttggaaatcaagcggattctccaatcacctgaaaatgatgttgtgtatgctttaggacttgctggttcctcgaagctagctntgtatcacttgagtgctaaaaccggacagatactaaaagatatccaagagtcattccctggtggattatgtggtaaaacagtacttggttctgataatgtgtttgtagctttagataaggccagatcaagtctgttacttattgaattcaagggtgagaggattagctacaacaaggtgctggtttcagatcttgttcaagacttatcaggatcatttgagcttcaatctttgtccagtgacatcatatctttgca

SEQ ID NO: 8636 - DNA, 648 bp, Zea mays
  unsure (1)..(648): unsure at all n locations; Clone ID: LIB3061-104-Q1-K6-G7
tcgacttctggaccctcccctccacgagttcctggcagaagggaacgtcgaggaaatcgtgcgtgaactgtgttctgagacgggagccaaccaggaggatgccctcgcacggatcgaaaagctttcggaagtaaacccgatgcttggcttccgtggctgcaggcttggtatatcgtacggtgagctaacagaaatgcaaggccgtgccatctttgaagctgctataacgatgaccaaccagggcgttcaagtctttccagagataatggttcctcttgttggaacaccgcaggaattgggacatcaggtggcccttatccgtcaagtcgctaacaaagttttcaccagtatgggtaaaactattgggtacaagatcgggacgatgattgagattcccagggcagctctagtggctgacgagatcgcggagcaggctgaattcttctcctttggaacgaacgacctcacgcagatgacctttggctacagcagggatgatgtggggaagttcatccccatttatctggctcatggcatcctccagcatgaccccttcgaggttctcgaccagagaggagtgggcgagctggttaagcttgctacagagaggggccgcanagctaggcctaacttgaaggtgggcatttg

SEQ ID NO: 8637 - DNA, 664 bp, Zea mays
  Clone ID: LIB3061-104-Q1-K6-G8
aacccgatcgacaccatgagggtgttgctcgtggccctcgctctcctggctctcgctgcgagcgccacctccacgcatacaagcggcggctgcggctgccagccaccgccgccggttcatctaccgccgccggtgcatctgccacctccggttcacctgccacctccggtgcatctcccaccgccggtccacctgccgccgccggtccacctgccaccgccggtccatgtgccgccgccggttcatctgccgccgccaccatgccactaccctactcaaccgccccggcctcagcctcatccccagccacacccatgcccgtgccaacagccgcatccaagcccgtgccagctgcagggaacctgcggcgttggcagcaccccgatcctgggccagtgcgtcgagttcctgaggcatcagtgcagcccgacggcgacgccctactgctcgcctcagtgccagtcgttgcggcagcagtgttgccagcagctcaggcaggtggagccgcagcaccggtaccaggcgatcttcggcttggtcctccagtccatcctgcagcagcagccgcaaagcggccaggtcgcggggctgttggcggcgcagatagcgcagcaactgacggcgatgtgcggcctgcagcagccgactccatgcccctacgctg

SEQ ID NO: 8638 - DNA, 676 bp, Zea mays
  Clone ID: LIB3061-104-Q1-K6-H1
gaacacaccaagcgaagcacattagcaacaacctaacaacaatggctaccaagatattatccctccttgcgcttcttgcgctttttgcgagcgcaacaaatgcgttcattattccacaatgctcacttgctccaagttccattattacacagttcctcccaccagttacttcaatgggcttcgaacacccagctgtgcaagcctataggctacaacaagcaattgcggcgagcgtcttacaacaaccaatttcccagttgcaacaacaatccttggcacatctaacaatacaaaccatcgcaacgcaacagcaacaacaattcctaccagcactgagccacctagccatggtgaaccctgccgcctacttgcaacagcagttgcttgcatcaaacccacttgctctggcaaacgtagttgcaaaccagccacaacaacagctgcaacagtttctgccagcgctcagtcaactagccatggtgaaccctgccgcctacctacaacagcaacaactgctttcatctagcccgctcgctgtggccaatgcacctacatacctgcaacaacaattgttgcaacagattgtaccagctctgactcagctagttgtggcaaaccctgctgcctacttgcaacagctgcttccattcaaccaactgactatgtcgaactctga

SEQ ID NO: 8639 - DNA, 308 bp, Zea mays
  Clone ID: LIB3061-104-Q1-K6-H10
aaggatgttccgcggcgagagggcctaatcgccacctcaaacatcgtgacaaaaacatgaagtcctggggttattgttaatctggtgccattgtaaggacatatgagtagggtttgttttgtggatcgcaagtttctcttctgctactgttgctgctacctttgctggtgttattgctagggtcgaatacttaagttaactatgcgctgacagtctggactagcagtgttatgtgcgctgctggaccttgcgcgcaatgctgtggccgatttgttcgttaatgtcaagaattgtgttacagtgcgtgt

SEQ ID NO: 8640 - DNA, 624 bp, Zea mays
  Clone ID: LIB3061-104-Q1-K6-H2
aagcaacatataaagtggaatccagtagcaacggcagagcaacaatggcgaccaagatattttccctccttatgctccttgctctttctgcatgtgttgctaacgcgacaattttccctcaatgctcacaagctcctatagcttcccttcttcccccataccttccatcaatgatagcttgagtatgtgaaaacccagctcttcagccctataggctccaacaagcaatcgcagcaagcaacatacctttatcacccttgttgtttcaacaatcgccagccctatctttggtgcagtcattggtacaaaccatcagggcacagcagctgcagcaactcgtgctacctgtgatcaaccaagtagctctggcaaacctttctccctactctcagcaacaacaatttcttccattcaaccaactgtctacactgaaccctgctgcttatttgcagcaacaactattaccattcagccagctagctactgcctactctcagcaacaacaacttcttccatttaaccaattggccgcactgaaccccgctgcttatttgcagcagcaaatactactaccatttagccagctagctgcagcaaaccgtgcttccttcttgacacagcaac

SEQ ID NO: 8641 - DNA, 647 bp, Zea mays
  Clone ID: LIB3061-104-Q1-K6-H4
ccttgctctttcagcaagcgctgctacctcgagtgttattccacaatgctcacaacaatacctctctccggtgacagccgcgggatttcaatacccaactatacaatcctacatggtacaagaggccatccaagcaagcatcttacggtcattagcattaaccctccaacaaccatatgctgtattgcaacagccatccttagtgcatctgtatctccaaagaatcgcggcacaacaactacaacaacagttgctaccaacaatcaatcaagtagttgcagcgaaccttgctgcttacctccagcaacaacagtttcttccattcaatcaactagctggggtgaaccctgctatctacttgcaggcacaacagctactaccatttaaccaacttgtcgggagcccttatgccttcttactgcaacaacagcttctgccattccatctgcaagctgtggcaaacattgttgctttcttgagacaacaacatttgttgccattttacccacaagttgtgggaaacattaatgccttcttgcaacagcaacaattgctaccattctacccacagaatgtggcaaacattgttgccttcttacaacaacaacaattgctaccatttagccaacatgctttgacgaatccta

SEQ ID NO: 8642 - DNA, 145 bp, Zea mays
  Clone ID: LIB3061-104-Q1-K6-H6
cttgctttgacaaacccagcagtgttctaccaacaacccatcattggtggtgccctcttttagatttcttatgagttatagttcaataataaagttttttatctgatgtttgtggcttcccagaaataagaaagtacatttctag

SEQ ID NO: 8643 - DNA, 424 bp, Zea mays
  Clone ID: LIB3061-104-Q1-N6-A1
ggaaaaacttcgaaaaaaaattaaaaggggggggggggggaaaggaaaaaaggggagaagaaagaaaaggggggggggaagaaagggaaaaaggaaaaaaaaaaaggagaggagggggggaaagggggggggggggggggggtggggggggggggggggggaaaaggggggggagggggggggggggggcgggggggcgacggaatgggggggaattggggaagccgcggaaggggacggggggggggggggggctccggggggaaatttgaggaaacctggggggaaaacgggggggaaaaaggatgggaataaatggggggggaaattggaaaaagaaaggggaggaatggggggctcaacgaggggggaaaaaacgggggggggaaaagaaggagtttaaaaaggggggggctaaaggggg

SEQ ID NO: 8644 - DNA, 559 bp, Zea mays
  unsure (1)..(559): unsure at all n locations; Clone ID: LIB3061-104-Q1-N6-A10
ggccgccctggggggggggggttttttttttaaaaatctaggaatgtactttcttatttctgggaagccacaaacatcagacaaaaaactttattattgaactataactcataagaaatctaaaagagggcaccacctatgatgggttgttggtagaatgctgggtggtggggcaaancaagttggttgaatggcaccaattgttgcagttgtaaaagggtgccagcgttaggcgcagcgtgctggtagaacggcaacaattgtggttgtgtcaagaaggtagcagggctcacaccagctagctggctgaatggtagtagttgttgctgctgtaaataagcaggagagttcaaagctgtcagttggttgaatggaagaaattgctgggggtaggcagcagatagctggctgaatggtagttgttgttgttgcaaataagaagcagagttcaatgcagctagttggttgaatggaagaaactgttgttgctgagagtaggcaacaaggtttgctagcacaagttgttgtagttgttgtgccctgatgttttgtgccaata

SEQ ID NO: 8645 - DNA, 560 bp, Zea mays
  Clone ID: LIB3061-104-Q1-N6-A2
gacgaattgaattaagttcacagacgcctcggtcggatttattctcaggcacaacatcccgaggaactgattcaagttcacggacgcctcggtctaatttggcacaactccgtgtggagtttattcaagttcacagaggtctccttgagagcacacacaaaaaaaaatcgatcactcaacccaacaaacatagcaactcacaacccgagtcttcctttttccatttctcggcttatctggatttccttcgtcatataattaatcccgtggccaaaattgtgctgcgagcctgggattttatccaacgaaagcgaaatcttcatgcggctgacggtgactctgcccacttattcactacctctttcaatttgtcgaatcctgttcggtttgtgaagcttccaaaagattcgccttcctggcgtgtgccattccaataggtaaagagaggctccaaaaccttctcgatgtcatcaagcttcaccttgtccataaatgattctgctagcgtactctggtttggtgttccacccagccagatctggtaactttttgggccatca

SEQ ID NO: 8646 - DNA, 505 bp, Zea mays
  Clone ID: LIB3061-104-Q1-N6-A3
gttgcttggctacatgccgtgttattattattaatactatttattgctgtcacgttacatgacaccacattacatgcatgcacggtacgtaggttgtgcacagctagccaagggtgttacttagtactactagagttcagttctggcaagccaagggtgtttgaagagctttgcttagcacgccttctggcacctgcagtagcggaggtggcagtagccggcggtccacccgccgtcctccttgacgcactcgttgctgcagaggcggtcggagatgcaggggaacgagtggtgctggctcttgcccatgcacacccgggcctccgccaccatcgtcgtcgtcgtcccgccgtcgtagtgtgagagcaggagcagcgccaggaggagcgcgcacacggtcgccctggacttgatgagctccatcgccggccggcgtggatcggatcagtgttattacggacgggaccggagacgcgcgtccgtccgatcaatcaatggatctatg

SEQ ID NO: 8647 - DNA, 550 bp, Zea mays
  Clone ID: LIB3061-104-Q1-N6-A4
ttgtttttttttttttttttttttttttttttttttttttttttttttttttttttttttttttttttttttttttttttttttttttttttttttttttttggacaaaagctggtttttacaaaaaaacaaattgggaaacaatggggggggggggggcaagggggaccccaatgccccccgctcaggggtacacaaaaaaacacttgttccggggcgggacagggcccttttctactttatacccatttccacaaaaaaagcgggaaaacgtttcaaaaagggggggggtggtttaaaaaaaagaacttttaaacaatcagggggcccgggggaaatatttggaaaagggctagggctgttttttgacccccctcaggggggttttggccaaaacattgaaaatctccctttttttttgggggttttcgcccattttcccaaaggaaacgtgggcctgtttttccaacccttccctcacaaaaaatttcaccccccaaaaagtgggccccctctgggcatccaataaaaaaaccactttttttggttt

SEQ ID NO: 8648 - DNA, 559 bp, Zea mays
  Clone ID: LIB3061-104-Q1-N6-A5
agaatctggaaatgtaacttcttatttctggttggccacatacatcatccaaaaactttattattgaattacaactaataatcaatctaaaagaggcaccaccaatgatgtgttgttggtaggaggctgctgggtttgtcaaagcaagttggacaaagggcaacaattgttgtagttgtaagagggttgcggggttagccgcaaactgcttgtagaaaggcagcaactgttgctgtgtcaagaaggaagcacgacttgctgcagctagctcgctaaatggcagtagtatttgctgctgcaaataagcagcggggttcagtgcggccaattggttaaatggaagaagttgttgttgctgagagtaggcagtagctagctggctaaatggtaatagttgttgctgcaaataagcagcagggttcagtgtagacagttggttgaatggaagaaattgttgttgctgagagtagggagaaaggtttgccagagctacttggttgatcacaggtagcacgagttgctgcagctgttgtgccctgatggtttgtaccaatgactg

SEQ ID NO: 8649 - DNA, 557 bp, Zea mays
  Clone ID: LIB3061-104-Q1-N6-A6
catccaaaaacttcattattgaactataactcataagcaatctaaaagaggcaccaccaatgatgggttgttggtagaacactgttgagtttgtcaaagcaagttggttgaatggcagcaattgttgcagttgtaagagggtgccagcgttaggcatagcgtgcaggtagaacggcaacaactgttgttgtgtcaagaaggcagcagggctcacatcagctagctggctgaatggtagtagttgttgctgctgtaaataagcagcagagttcaatgctgctagttggttgaatggaaaaaattgctgggggtaggcagcaactagctggctgaatggtaattgttgttgcaaataagcagcaaagttcaatgcagccagttggttgaatggaagaaactgatgttgctgaaagtatgcagcaaggtttgctagcacaagttgttgtagttgttgtgccctgatgttttgtgccaccaaatggacccaaagtaactgctgtaatagggctgacggttgttggaggaacaagggtgataatggtaagatgcctgttgcg

SEQ ID NO: 8650 - DNA, 560 bp, Zea mays
  Clone ID: LIB3061-104-Q1-N6-A7
ggttgtgtgttttatataatattctgtactctttggtgaacttctgaactcaactattttttgttacagaaaattgttttaggccttgtttgtttaccatctatattatataatctagcttaaataaattgagagttaaacaaacaatgggggtgggggggggaattatataatccggatatctagattatgataatctataagcaggtcaataggtgcttatataatccacgagctggattatataatcttggaaggaaacaaacggggctttagtcctagatccagcgttaggctataaccaaacagctccagattgtccttattaatatcaacagaattaaggagttgtgccattgaaatctccacccagcggagatgttttgtgcgtcgacagtgtacactgagccagtcttgtcatcctcaattttaatgctcgaggagcagttgtagtctgtccatccaataacttctttttccaagtcataaactactagtttgtttgagaggaccaggtctcctaaggagagcatatctttcccatctttagtctgtacacc

SEQ ID NO: 8651 - DNA, 536 bp, Zea mays
  Clone ID: LIB3061-104-Q1-N6-A8
gatctggaaatgtaacttcttatttctggttggccacatacatcatccaaaaaactttattattgaattacaactaataagcaatctaaaagaggcaccaccaatgatgtgttgttggtaggaggctgctgggtttgggaagagcaagttggacaaagggcaacaattgttgtagttgtaagagggttgcggggttagccgcaaactgctggtagaaaggcagcaactgttgctgtgtcaagaaggaagcacggcttgctgcagctagctggctaaatggtagtaatatttgctgctgcaaataagcagcgaggttcagtgcggccaattggttaaatggaagaagttgttgttgatgagagtaggcagtagctagctggctgaatggtaatagttgttgctgcaaataagcagcagggttcagtgtagatagttggttgaatggaagaaattgttgttgctgatagtagggagaaaggtttgccagagctacttggttgatcacaggtagcacgagttgctgcagctgctgtgcc

SEQ ID NO: 8652 - DNA, 589 bp, Zea mays
  Clone ID: LIB3061-104-Q1-N6-A9
ggggggggggggtttaatttaaaaccagacaaagctttatgatttaaaacgggaacagtaataaatgtgcacaatgattacggtcatcatcatcatcctaaaacagcagcaacaaatgccacttattccataccaggttacaagcagagtctgggggggggggcaccacccactcatttcattccgagcaaaccaaccaccggacttagccccacatacacaaacaatccacggaggaaaatcaaaacagagcctagcagcagatataacaagagtctgacaaaccgccccaatcatggggccaacagttccatcgccgccacattcatcagtcgctgatagcaggcgacgccgaccttgaccgtgacccaggaggtgacatggacgctggccggggtgacctatgatgaccgcgccgaggctcctcatcctcctcgcctgctggggacctcttcctctcatcacgaccattgtctgcaccacggcgatcatttatatcatcaggagtataggatctcctcctatccctgttattttctttaggctgttttgatgacctcgggtgctcttcctttgcccggggtgggga

SEQ ID NO: 8653 - DNA, 468 bp, Zea mays
  Clone ID: LIB3061-104-Q1-N6-B1
tttttttttttttttttttttttttttttttttttttttttttttttttttttttttttttttttttttttttttttttttttttttttttttggggaaaaaaaacttttttttttggggggggcccatcccttagccaaaaaacttattggggggttccaaccaaaaagcaatctaaaaggggggccccccaaaggggggttggggggaaaagggtgcggggtttgtaaaaacaggggggcacaaagggcggccaaccgtgtgcctttgtaaaagagggggtgggggggtttttcccccccaaaaaaggtgggggggggaaaaggggaaagcccttgtgggtgggggtaaaaaaagaaaaggggcggtttttttttcccccccccgggcccccaaaagggggagatatttttttgcggggggggaaaaaaaaaaaggggggggtgttcgtgcggccccccttggttg

SEQ ID NO: 8654 - DNA, 439 bp, Zea mays
  Clone ID: LIB3061-104-Q1-N6-B10
ctgcaaccctgctgtttttggaattatgaacagccagttggccaagcctggttttggttacagatcgcatccagctttagcatgctaaactgcaaaccctgggacagggaagacgttggaaacaaatcatagctacttgctacctttataccactcaggacatttttttactgagattgcgagggtgcaatcagggcagcacctatttttgaaccgtcatttgcacgcttggcttttgcatacttgactcctgaaccgtcatttgcatgcttgacggccactaagtcgtttttgtactgagactgtgaaactgcaatcagggcagcacctattcctgagccgtcatcggcatgcttgatggccaccgccttggacgcctcgttttctagcagctcacccagtgtggtctccaagcaccggcggaatttggtgtagtgct

SEQ ID NO: 8655 - DNA, 549 bp, Zea mays
  Clone ID: LIB3061-104-Q1-N6-B2
ttttgtttttttttttttttttttttttttttttttttttttttttttttgcaaccaaaccaaacttaaccagattgacatagctttttacagggtcatcaagagagggagagaacaaaggaacactttttaacattcaagctcagttccacgactggcaccccaggaaggaaccctggcagttactcctatgcatgggggagagcttccgttctcgacgctcacgacctttttttcctcttcttggcctccgacttggcggccgcgttcttgagcctgatgaccaggacccggacgaggacggccaccaagtcggggaaaagggggagggcgtgcttgacgtggtccatgtcgccgcggggcgccctctcgatgatctcctgggggtcggacaccacgtagcccaggaagatgagccgcccgaagtagacctcgaacatgaagctggttgcgggggggcccaagatgggagggggggagctgcagccagagcaggatggaaagccccgacgaggagcagcccgcccaggtagaggtactccctgccgg

SEQ ID NO: 8656 - DNA, 507 bp, Zea mays
  Clone ID: LIB3061-104-Q1-N6-B4
ggggcaaaataccacgaggtggttcaatacattactaacaaacaatgtttcggtcaaaaatactttgccatgtctagtttctagaggtagggaaaaaacacagttgataatctctggctgccacattcatgaacttgaaatgctttatttcttcttgtcagtgtgcgtaccagccgatctcatcttcctgaggacccccatcatctcctctctcttcttctttgccctcttgtgagttccaagctttctcttggcaagcttcaaagcgcgcttgtccttgccaaccttcaaaagctcggtgatacccttctcataaggagcaaagccagcaacctctttgatcaggcccctgaccatggacaccctcttcgttgctttccccttgcggtgggacgggcgcaaaggcagctcgcgcttggtgaccacatggcccttgttgatgcccacgaagaggcccgactttggctgcggcggcgccatgaggaccaacactttcctgtgagccgg

SEQ ID NO: 8657 - DNA, 546 bp, Zea mays
  Clone ID: LIB3061-104-Q1-N6-B5
gaatcagaaacaattcaacaatatacatacagctgggatgaaaatttcaaataactccaatgactgaccagattcccctatctggatcatctggttgatatatatacataatgaaatactactctatatatctacgtaacaaagaattaataatctctatcttgaaagaataaaagatttagatccctaatctactacactggaaaaggtccaacacagcttcagattgcccgtgttgggtcagagacctggacgatctgttggtccagatggcccatgcatggcttcccctctgcatcgatgtccatcagtatcgtgtcaccgggcttgaactcgccaaaaagaatcgcttcgctgatgacatcctcgataatgtgggtgacagctctcctcagaggccgagcgccatagcttttgtcgtagccctcttggcatatcaggtccttcattgcatcagacacctccaaacctatcccgagggccaaaagtcggcccttgacttcctttaggatgatatcaagaatggccagcatctgagtcttctcc

SEQ ID NO: 8658 - DNA, 574 bp, Zea mays
  Clone ID: LIB3061-104-Q1-N6-B6
cgctcaaagcagcacagtatggtaattaaactgatcaatttacagcatgatgtatccccaaatccaggcccccaatgtcgattcaacatgtaactaacatttgctgctacaacattctaccctacaacattgaaggacacaaaagagcaaaaagaaagaaaaaatgccttggatgacacttttattgctccgatgatctccaacagactgatctgcagatcacgcatgtaaccaggtgctgatcattgtcgaatgtcgagacacacagctgcatgtcgcacgttcacttcatataactgttccactagggagtaaagcatccttgatcactgtgacaattccacctttgatgaagtacccgtctgtctcccttgcagcttcttgaacattgtcagcattgagtatcttaacattgtctccaattcgagcattcttgtcaatgattgctctcctgatgcatgaatttttcccaataccaataggaatgccacctttttcggcaaggagttttttatcagcttctgtctcatagtagtccgcacccattagtaaactgtcctctatgatagcacct

SEQ ID NO: 8659 - DNA, 446 bp, Zea mays
  Clone ID: LIB3061-104-Q1-N6-B7
tgacgaactatgcttccactagctagggcggtagtttgatggtctcgctcaagcctgaagaacctgggtgcggacggccggtgccctggaaggaggtgtccttgaggtgctccggcgcgttctcgtacgagtgctgcctcgccagcgagaggatgcgtgttgtccgccgcgatgaagtacgccatgccagcaactgtggagacgatgagggcctggccagcggggttgatgttggccttggcccatggcagcatcctgacgctagccagggtgggaactgcagaggcgacggtcgcgacagctgctgccttgaaccctgcgagggcggcctctcgcgagcattgcttggcgagctcaaggttctggtcgagggacgcggagttcacggtggacggcatggtgatccgaatccgatccctggagagagctagctttgtcgctctcag

SEQ ID NO: 8660 - DNA, 518 bp, Zea mays
  Clone ID: LIB3061-104-Q1-N6-B8
cttaattactgaatttgataacaaatttccggtttgccaaattgcagactctctttggtcagaggcacatacccccacgctaaccagaaacacacgcacattctgcggcaggggggggggcgaaagaaggcaacccaaacggaaccctttaaggcacaactggctaggcactacagggacccacaagaaaatccccctatagccaagttaagggtccacagctgctaatcaaaaaccaggaacccaagccaagtcgccctttccttctaaaagggtccgaagttttggtatataattgccacagcgagcaatataccagctcctgaaccaatgggacccataaaatcagccaggacggtcaatgcgccaatgcatacaccaccaaatgcaccggcagcggggaatgaatcggctaagttccttttgcaagttcgactcaccacggcctggcatcaccatggggggttccttgagctgcttaccaacatcctttgctgataaaccagaaacttcaatcc

SEQ ID NO: 8661 - DNA, 254 bp, Zea mays
  Clone ID: LIB3061-104-Q1-N6-C10
gtaagggggggaaaattattctttttttttgggggggggccgtcctttggcaaaaaattttttttgggggggacaaaaaaggggggtttaaaaaagggggccccccaaaaaggtttttgggggggggggcgctgggtttttcctccctggggggcgcaggggggaaaaatgggggtgtttgtaggggggggggggggtccccccccccttttttgggaaaggggcaaaatggggtttgttcttagaaggaaaaa

SEQ ID NO: 8662 - DNA, 479 bp, Zea mays
  Clone ID: LIB3061-104-Q1-N6-C11
gggggggggggggtttttttttttttttttttggggggggttttttttttttttttttttttttttttttatggggccccaagaaataaaggggtttaaaatttacggggtcccttttagacctttttagggacaccccgtccccccggtggggggtgtggggggccaacattggaattaagggccgccgccgatcatggtggggcggggcattgatcagggcccggcgtcgtcgttggcagccctggccgcagtagcggggggggcagtagtttgatttttaacgggggcaacgatccccggtggtttggttttatccttggtgccaagcttttggatggggggggtcacagggggggggggggcagccccctcgaagggcgccttggagatcctgtcccacttttggacctggttcccctgggttacgggcaagggcaccccgtgctgggtggtgaaccccgggttcaccggggggg

SEQ ID NO: 8663 - DNA, 589 bp, Zea mays
  Clone ID: LIB3061-104-Q1-N6-C12
gttttgtttttttctaaaaagtactttcttatttctgggacgccacaaacatcatccaaaaaacttcattattgaactataactcataagcaatctaaaagaggcaccaccaatgatgggttgttggtagaacactgttgagtttgtcaagagcgggggggttgaatggcagcaattgttgcagttgtaagagggtgccagcgttaggcatagcgtgcaggtagaacggcaacaactgttgttgtgtcaagaaggcagcagggctcacatcagctagctggctgaatggtagtagttgttgctgctgtaaataagcagcagagttcaatgctgctagttggttgaatggaagaaattgctgggggtaggcagcaactagctggctgaatggtaattgttgttgcaaataagcagcagagttcaatgcagccagttggttgaatggaagaaactgatgttgctgagagtatgcagcaaggtttgctagcacaagttgttgtagttgttgtgccctgatgttttgtgccaccaaatggaccaaaggtaactgctgtaatagggctgacggttgttggaggaacaaggcgga

SEQ ID NO: 8664 - DNA, 562 bp, Zea mays
  Clone ID: LIB3061-104-Q1-N6-C2
atcgagataaatctcaatcaatatattgattatttctaggaaacacatgtcggtatgagggcaccattgtcgagtacatctcatatgtaatctaaaagatggcacctccaacgatgggttgctgcaaggcagggttcatcaaagagaactggttgtatggcagcaattgttgttgctgctgcaggaaggtagcgaccaatgggttagccactgccaatggattaagtaactgttgtcgctgttgtaggtacgcagcagagtttgacacagccagttggttgaatggaagcaactgttgtaagtaggcagcagggtttgccacagctagctgagtcagagctggtacaatttgttgcagcaactgttgttgtaggtacgtaggtgcattgcccaccgcgagcgggctagatgaaagtagttgtaggtagacggcagggttcaccatggctagttgactgagcactggcataaactgttgcagctgttgttgttgctggtatgcagctacgttcgccagagcaagtgggttggatgcaagcagctgctgttgcaagtaggtgac

SEQ ID NO: 8665 - DNA, 92 bp, Zea mays
  Clone ID: LIB3061-104-Q1-N6-C3
gggaaaatcatgaacatgatccatgcccatgatcgccatttaaaaaaaaccttcactttgtaacaatcaacgcggagggtgagagagaatta

SEQ ID NO: 8666 - DNA, 581 bp, Zea mays
  Clone ID: LIB3061-104-Q1-N6-C4
gggtggtggttttttttttttttaaaaagtactttcttatttctgggaagccacaaacatcagacaaaaactttattattgaactataactcataagaaactaaagggggcaccaccaatgatgggttgttggtagaatgctgctggggggggggaggcaagttggttgaatggcagcaattgttgcagttgtaagagggtgccagcgttaggcgcagcgtgctggtagaacggcaacaactgtggttgtgtcaagaaggtagcagggctcacaccagctagctggctgaatggtagtagttgttgctgctgtaaataagcaggagagttcaatgctgtcagttggttgaatggaagaaattgctgggggtaggcagcagatagctggctgaatggtagttgttgttgttgcaaataagaagcagagttcaatgcagctagttggttgaatggaagaaactgctgttgctgagagtaggcagcaaggtttgctagcacaagttgttgtagttgttgtgccctgatgttttgggccaataaatgcaccaaaggtaactgctgtaatagggctgatgattgtt

SEQ ID NO: 8667 - DNA, 554 bp, Zea mays
  Clone ID: LIB3061-104-Q1-N6-C5
cacctgaacactgcattttattcctcatcataaacatgacatccaaactagacatatcgagcatgctgtacatccgcctctccgatcaaagagagacgcatacagcatatagtactgcactgcactgcatgcccccagacacaagcatgcacacacaaagcacaacacataaacgactagctagagctatcgcggcgaccgagactctacggcagcgtacgtagcagcagccaccgcctttaagggccatatgccgccgcgccggcagtggttcaaggaggtcgcgcgcgcggtccgctcgagtgtggttcttctctcaagacccctgcgcctggtcgatgcggtgctgtgctgcatccttgatgtcgcgggccttggacgccagcctcgccttggcgtggtccagctggtcggcgcccggcgggtgcttgcccgtcaggtacttgtacatccaggagaacacggacagcgcagcgacgccgaggccgccggaggtgacgaacccggccgccatgagcgccagcgcgatggcggccggcaccagcaccgggctg

SEQ ID NO: 8668 - DNA, 398 bp, Zea mays
  Clone ID: LIB3061-104-Q1-N6-C6
aaaccacaaaaggggtgggccctttttgcttaaccccctttttggggtttaaccgcttgggggacccaattttttaattgcaaaccccccttatgtccttgctgccgcctgggtttttttgggggtttgagggggcccacccccccctttgtgggggggttttggcctctttcaaaatttccccccccctttgagtagcttgttgaaacccccaaaccccccaggggggggggggggccccccccggattatggattgaacccctttttaaaattcttggggaaagtatttgggctcaatttgcccaaaaaataacaacacttttggtgcaaaacccggcaagtactttgttttttcaaacctcattggggaaaaaaggttttcccaaagggggcccc

SEQ ID NO: 8669 - DNA, 534 bp, Zea mays
  Clone ID: LIB3061-104-Q1-N6-C7
aataataaacatctcttaagtcatgatatgaattcacaatagttagcttgcagatccaccatagcattccacatatgaatacagttgcttgtctgctaacaagcttcaactacttactagttgaaaccggagctcagaacccgttcatgattaccagcacatggttccaccatgattgtcttcatggattaatagtctgcctacggactgaatttgaatgaataaatgagagatctgatggacctgaatgccaaatggagcatctacagcatcttataacctttaagagagtgcacaatatccatctcaacagaatccgcacgcaatctgctaggtgatataacttcaatagttcatcattcagtcgccagaaaattaccagaaaaatgatgtcacacagcgacacagagcagttatgaaggtttctagtgccaaatcttgcagcgtgcatccttctgttgtgtttgaaagggcttctccttggtgtagacgatatccttgaatgcatcaaccagttgggcaaccaagcttgca

SEQ ID NO: 8670 - DNA, 574 bp, Zea mays
  Clone ID: LIB3061-104-Q1-N6-C9
agaaagtactttcttatttctgggaagccacaaacatcatccaaaaaacttcattattgaactataactcataagcaatctaaaagaggcaccaccaatgatgggttgttggtagaatgctgctgggtttgtcaaagcaagttggttgaatggcagcaattgttgcagttgtaagagggtgccagcgttaggcgcagcgtgcaggtagaacgacaacaactattgttgtgtcaagaaggcagcagggctcacatcagctagctggttgaatggtggtagctgttgctgttgtaaataagcagcagagttcaatgttgctagttggttgaatggaagaaattgctgggggtagacaacagctagttggctgaatggtagttgttgttgcaaataagcagcagagttcaatgcagccagttggttgaatggaagaaactgctgttgctgagagtaggcagcaaggtttgctagcacaagttgttgtagttgttgtgccctgatgttttgtgccaacaaatgcaccaaaggtaactgctgtaatagggctgaccgttgttggaggaacaagggtgat

SEQ ID NO: 8671 - DNA, 553 bp, Zea mays
  unsure (1)..(553): unsure at all n locations; Clone ID: LIB3061-104-Q1-N6-D1
aaacaatggtcattccaacactgacagcatgctngagaatcacggcagtgcaaaagcatagcttcccttaacttgtacggacgacgaactctttgaacatctctttgtatgatgtgagaagggtgagacaatatggaagtcattttttttctcggcccatgcaaaagcacaagcggaaaccaaatctaaggggagtgagaaaatgccccagtgatttttcctgtcagtctattttgggtctagcaatgaagcattgcgtatgctactagctctttgaaccgtgcactttgttcttcactgcaagggcagcagctctgtaccatgcagctgcagccattgcaccaggatcagggattgaggccaggagatctggagcgatgtatgatgaccgtccagccttcgcttgcatttgtttggtggattcagcgccagctgatgctgcttcagaagacgcgatgaaagcagtcacgggatcatccccagcctcaagtctctgtttcagaacagcagaagcaggaattagggcatccaacattgtgcggtatcctgcgct

SEQ ID NO: 8672 - DNA, 560 bp, Zea mays
  Clone ID: LIB3061-104-Q1-N6-D10
aaaatcaaattaacaatgccaaaaggttaacatatagctcttacagcattcttgtattgcagaaggtgaaatagcaagaaggtaccaaataaatagataaaagtgcacaggctaacagagctcaacagttcacacaataacagcaacgaccacaaacaaaacttgtaatgatgaaaactaggtattgctaaagcaggcgcaggatcgcatcatttcttcttggcagcagccttggtcaccttggcgccggttgggtccttcttctccacactcttgataactccaacagcaaccgtctgcctcatgtcacggacagcaaacctaccaaggggaggatacgctgagaatgtctccaccaccatgggcttggtgggtatcatcttcaccataccagcatcaccgttcttcaggaactttggctccttctcaagctccttgccagagcgcctgtcgatcttggtaatgagctcagcaaacttgacagcgatgtgggaggtgtggcagtccagcacaggggcatagccgttgccaatctgcccagggtggttcatgatgatgac

SEQ ID NO: 8673 - DNA, 584 bp, Zea mays
  unsure (1)..(584): unsure at all n locations; Clone ID: LIB3061-104-Q1-N6-D11
gggggttgtttttttttttttttttttttttgggggggttttttttttttttttttttttttttttttttttttttttttttttttttatttttttttttttttttaaaaaaaaaatttttttttttttttnnnnnnnnnntnnaaaaaaaggggagggggggttttggacaccccaggttggccaaaccgcccccgggcccgggggaccaaaaaaacccgggggggggaaaggacaaaaaaaaaacccttatccaacaaattgggagacccccccccggggggaaaaccaaacaaaaagggggcccggggaacccccatcccaaaaaaaaacccggggggcccccccccaaaaaaacccaaaaatcctttccccaggggcccggggaaacaaaaaacggggccccttttgaagccccaaggcccccaaaccttgggggggggggggaaaaacccaaaaaagggaagggggggcccccccttaaaagcccccgacggtcaaaaaaaccccttggaatattaaagggccccaaaaaaaaacttccggacggtgcccccaaatcccccccattccccaaggggggc

SEQ ID NO: 8674 - DNA, 562 bp, Zea mays
  Clone ID: LIB3061-104-Q1-N6-D12
agaaatgtactttcttatttctgggaagccacaaacatcagacaaaaaactttattattgaactataactcataagaaactaaaagaggcaccaccaatgatgggttgttggtagaatgctgttgggtttgtcaaagcaaggggggtgaatggcagcaattgttgcagttgtaagagggtgccagcgttaggcgcagcgtgctggtagaacggcaacaattgtggttgtgtcaagaaggtagcagggctcacaccagctagctggctgaatggtagtagttgttgctgctgtaaataagcaggagagttcaaagctgtcagttggttgaatggaagaaattgctgggggtaggcagcagatagctggctgaatggtagttgttgttgttgcaaataagaagcagagttcaatgcagctagttggttgaatggaagaaactgttgttgctgagagtaggcagcaaggtttgctagcacaagttgttgtagttgttgtgccctgatgttttgtgccaataaatgcaccaaaggtaactgctgtaatagggctgatgattgttgg

SEQ ID NO: 8675 - DNA, 67 bp, Zea mays
  Clone ID: LIB3061-104-Q1-N6-D3
cggttcctgtgggttgtcctttttcccctttttggggcctctgagcaccaggggggggggggggggg

SEQ ID NO: 8676 - DNA, 353 bp, Zea mays
  Clone ID: LIB3061-104-Q1-N6-D5
gcagcaaatccatgctagttacttaataaaacatattatatataccatgaagcatcaagactcccacatgttgccgcatgatgataaacacgcaaacaggggccaggaagaacaggcacttttacaacggagaagggtatttggtcaagcataaagctacctttattacaaccactctggtgtactctacggggacatgtcaaagacagaaggcagactgaggagtcagctccctgcttttgaagcacaactctaataatatatattataaatacataggagtaaacggcactccaggttattttcctggattttggggatgactcaatccagcgtcattggttgggcgatgc

SEQ ID NO: 8677 - DNA, 556 bp, Zea mays
  Clone ID: LIB3061-104-Q1-N6-D7
ggaagaaaaagatagaacgaatcaatcccatgcttgtgctccaacataaggctctgcacacacctacaacatcaaggaatttacacatcacgctctttctaagtcttgaaacccgtattccacagaaaacatgagcagagcaaatggactagcagtccagtgcattacagttgcttgaacaacaacgacaagatgtcgggcattagactggtgaagaactttattttgtggcttgagcaatgatgttacttatggagctggcttcctctttagcagcctccactaacgaatcctgtgtggcaataagtcttgcaacattcttcttgctagattcttgaagttcaccggcaatgagaatctcatccagtatgtagtaggccttatggaaattgaatatcaaatccagctcacatacactgccaaaatatcggtccagtatctcgacgaaatgatggatgatctcaaggacttcaagctcattgtcatcagcatcaatgcgcatgcagaaatacaggctagcatacctccggtatacaaccttgtaacccctccactc

SEQ ID NO: 8678 - DNA, 539 bp, Zea mays
  Clone ID: LIB3061-104-Q1-N6-D8
agaatctgggaatgtaacttcttatttctggttggccacatacatcatccaaaaaactttattattgaattacaactaataatcaatctaaaaggggcaccaccaatgatgtgttgttggtaggaggctgctgggtttgtcaaagcaagttggacaaagggcaacaattgttgtagttgtaagagggttgcggggttagccgcaaactgcttgtagaaaggcagcaactgttgctgtgtcaagaaggaagcacgacttgctgcagctagctcgctaaatggcagtagtatttgctgctgcaaataagcagcggggttcagtgcggccaattggttaaatggaagaagttgttgttgctgagagtaggcagtagctagctggctaaatggtaatagttgttgctgcaaataagcagcagggttcagtgtagacagttggttgaatggaagaaattgttgttgctgagagtagggagaaaggtttgccagagctacttggttgatcacaggtagcacgagttgctgcagctgttgtgcccc

SEQ ID NO: 8679 - DNA, 507 bp, Zea mays
  Clone ID: LIB3061-104-Q1-N6-D9
tttttttttttttttttttttttttttttttttttttttttttttttttttttttttttttttttttttttttttttttttttttttttttttttttttttatttttttttttttttttttttttttattaattagcccaaccccccggggggggggggggggaaacccgctcagggcattaacaaagggggcaaaaaaaggaaaaggggtaaattgggtggaccaaaaaaaaaaggaaaaaaaaatggaagagttttaaaaaaacctctagtgagacccgggaaatcttggggaaaacccggacaaagaccagagttgtgtaaaatagggatattttaaaaatttggaaaaatttggaaaaaggggtccctaagggtaaaatgggggcgccctaaatagtgggcaaaattacaaaaaataaccaacacttaataaaaaggggggaataaaaagggcgggaacacaaattaaataaattatatatagcaaaccgctttgcggggccg

SEQ ID NO: 8680 - DNA, 408 bp, Zea mays
  Clone ID: LIB3061-104-Q1-N6-E1
gtgggggggttttttttttttttttttttttatttttttttttttttttttttttttttttttttttttttttttttttttttttttttttttttttatttttcctcccttggggttggttgtttcttttttacttattgcctctttttgggggggggggcgggcttcgttgctagtcggtggtttcattacatttttacttcaggacttagttgcctgaggagttgaaaccgttggccgttggtttttaagggcaggggcctggctgctgtagctgtaggccacacatagccgcaagctgctggttttactggggggccatcagcgccgcgagctcgctctccggctgctgctgcaggaagggctgcaggaccaccccgcttggtgcctggggccggggctgcgggt

SEQ ID NO: 8681 - DNA, 575 bp, Zea mays
  Clone ID: LIB3061-104-Q1-N6-E10
cagaaattatcgagataaatctcaatcaatatattgattatttctaggaaacacatgtcggtatgagggcaccattgtcgagtacatctcatatgtaatctaaaagaggcacctccaacgatgggttgctgcaaggcaggggtcatcaaagagaactggttgtatggcagcaattgttgttgctgctgcaggaaggtagcgaccaatgggttagccactgccaatggattaagtaactgttgtcgctgttgtaggtacgcagcagagtttgacacagccagttggttgaatggaagcaactgttgtaagtaggcagcagggtttgccacagctagctgagtcagagctggtacaatttgttgcagcaactgttgttgtaggtacgtaggtgcattgcccaccgcgagcgggctagatgaaagtagttgtaggtagacggcagggttcaccatggctagttgactgagcactggcataaactgttgcagctgttgttgttgctggtatgcagctacgttcgccagagcaagtgggttggatgcaagcagctgctgttgcaagtaggtgacagggtt

SEQ ID NO: 8682 - DNA, 572 bp, Zea mays
  unsure (1)..(572): unsure at all n locations; Clone ID: LIB3061-104-Q1-N6-E11
gatatcgagataaatctcaagggatatattgattatttctaggaaacacatgccgctatgagggcaccattatctagtacatctcatatgtaatctaaaaaaggtttttttttttttgggnnngctgccacaacaaggggggggggagcaaagagaactggttgtatggcagcaattgttgctgctgtaggaaggcaacgaccaatgggttagccaccgctagtggatatagtaactggtgtcgctgttgtaggtacgcagcagagttcgacacagtcagttggttgaatggaagcagctgttgcaagtaggcagcagggtttgccacagctagctgagtcagagctggtacaatctgttgcagcaactgttgttgcaggtatgtaggtgcattaaccacagcgagagggctagatgaaatcagttgttgctgttgtaggtaggcggcagggttcaccatggctagttgactgagcgctggtagaaactgttgcaattgttgttgttgttggtatgcaactatgttttgccagagcaagggggttggatgcaagcaactgctgttgcaagta

SEQ ID NO: 8683 - DNA, 398 bp, Zea mays
  Clone ID: LIB3061-104-Q1-N6-E12
ctggttggccacatacatcatccaaaaactttattattgaattacaactaataatcaatctaaaagaggcaccaccaatgatgtgttgttggtaggaggctgctgggtttgtcaaagcaagttggacaaagggcaacaattgttgtagttgtaagagggttgcggggttagccgcaaactgcttgtagaaaggcagcaactgttgctgtgtcaagaaggaagcacgacttgctgcagctagctcgctaaatggcagtagtatttgctgctgcaaataagcagcggggttcagtgcggccaattggttaaatggaagaagttgttgttgctgagagtaggcagtagctagctggctaaatggtaatagttgttgctgcaaataagcagcagggttcagt

SEQ ID NO: 8684 - DNA, 554 bp, Zea mays
  Clone ID: LIB3061-104-Q1-N6-E4
aaaaatctaaaatgtactttcttatttctgggaagccacaaacatcatccaaaaaacttcattattgaagtataactcataagcaatctaaagggggcaccaccaatgatgggttgttggtagaacgctgttgggtttgtcaaagcaagttggttgaatggcagcaattgttgcagttgtaagagggtgccagcgttaggcgcagcgtgcaggtagaacggcaacaactgttgttgtgtcaagaaggcaacagggctcacatcagctagctggctgaatggtggtagctgttgctgttgtaaataagcagcagagttcaatgctgccagttggttgaatggaagaaattgctgggggtaggcagcagctagctgactgaatggtagttgttgttgcaaataagcagcagagttcaatgcagccagttggttgaatggaagaaactgctgttgctgagagtaggcagcaaggtttcctagcacaagttgttgtagttgttgtgccttgatgttttgtgccaacaaatgcaccaaaggtaactgctgtaatagggc

SEQ ID NO: 8685 - DNA, 571 bp, Zea mays
  unsure (1)..(571): unsure at all n locations; Clone ID: LIB3061-104-Q1-N6-E5
aagaatctagaaagtactttcttatttctgggaagccacaaacatcagacaaaaaactttattattgaactataactcataagaaatctaaaagagggcaccaccaatgatgggttgttggtagaacgctgctgggtttgtcaaagcaagttggttgaatggcagcaattgttgcagttgtaagagggtgccagcgttaggcgcagcgtgctggtagaacggcaacaactgtggttgtatcaagaaggtagcagggctcacaccagctagctggctgaatggtagtagttgttgctgctgtaaataagcaggagagttcaatgctgccagttggttgaatggaagaaattgctgggggtaggcagcaggtagctggctgaatggtagttgttgttgttgcaaataagaagcagagttcaatgcagcntagttggttgaatggaagaaactgctgttgctgagagtaggcagcaaggtttgctagcacaagnttgtttgtagttgttgtgcccctgatgttttgtgccaataaatgcaccaaaggtaacctgatgtaatagggctgatgatt

SEQ ID NO: 8686 - DNA, 559 bp, Zea mays
  unsure (1)..(559): unsure at all n locations; Clone ID: LIB3061-104-Q1-N6-E6
atcaaatacccaaccctgtcagcataagtaaaactgggagcaggacaagcttcaggacagacaaatcaacccacgacaacaaataataccctgcacaagggcttcttttcttgtatgcggatcagtacatcagtaacacattagtcaattcatccatgatagacagacagaacaccaggaagtctaggcattattggacaagctcaggaataagcctcagcaggaacgagatctcgcgctgcgagaaattcggagttgtggctcctctagctgccgcctggttgctcaagctgcccacttccaggtcgggctcgggcaggggcagggcgatgagctcagagactgcctcggtgatctccggcaccaggtcgacgatgaccccgttcactcccatgaggtgctgcatgtaaaccgcctccggcacgttgttcaatgttccataggttagcagggagaggttagcttcccttgatctttggcacggcgngcggggtgccctgaagatcccgcgggcttctgaaactattccttgcaggccaccggcaaggcacagcttgac

SEQ ID NO: 8687 - DNA, 547 bp, Zea mays
  Clone ID: LIB3061-104-Q1-N6-E7
actatcaatgtttctccttccattatatatcaaaagttcgatgcacgaatggacaaattaatttagacatctggtttcagttacagaaggcagtacgtgctttaggtctacgagagaccaatagcttgtcagcccattgcatatttctgagtccagctcctagcagtcgattcgtacttcacgcgatcagtcttgtacaagtgagcaatctctgggaccaacggatcgtcagggtttgggtccgtcagaagggaacaaattgagaggaggaccttagaaactgtcagtgcagggctccattgctccttcaagatatcaagacagatgctcccgttgctgttgatattcggatggtaaaccttcgtcttgaatgcaaccttcggtggtttgaatgggtagtccggtggaaagtgaatagtgaccaaaaaacgccaccagcgtatgggctatctgatggccccataatcgtcgcctgccagtagaacatatcttcggcaacagggcctgcgctgcaagaggtggggaaggatccttctgcaggtccttg

SEQ ID NO: 8688 - DNA, 524 bp, Zea mays
  Clone ID: LIB3061-104-Q1-N6-E9
atcgagataaatctcaatcaatatattgattatttctaggaaacacacgtcggtatgagggcaccattatcgagtacatctcatatgtaatctaaaaatggcacctccaacgatgggttgctgcctcgacaagacaggattcatcaaagagaactggttgtatggcagcaattgttgctgctgtaggaaggcggcgaccaatgggttagccactaccaatggattaagtaactgttgtcgctgttgtaggtacccaacaaagttcgacagagtcagttggttgaatggaagcagctgttgcaagtaggcaacagggtttgccacagctagttgagtcaaagctggtacaatctgttgcaacaattgttgttgcaggtatgtaggtgcattgcccacagcgagcgggctaaatgaaagcagttgttgttgttgtacgtaggcggcagggttcaccatggctagttgactgagcgttggcagaaactgttgtagctgttgttgttgctggtttgcaactacgttcg

SEQ ID NO: 8689 - DNA, 577 bp, Zea mays
  Clone ID: LIB3061-104-Q1-N6-F1
agaaatgtactttcttatttctgggacgccacaaacatcatccaaaaaacttcattattgaactataactcataagcaatctaaaagaggcaccaccaatgatgggttgttggtagaacactgttgagtttgtcaaagcaagttggttgaatggcagcaattgttgcagttgtaagagggtgccagcgttaggcatagcgtgcaggtagaacggcaacaactgttgttgtgtcaagaaggcagcagggctcacatcagctagctggctgaatggtagtagttgttgctgctgtaaataagcagcagagttcaatgctgctagttggttgaatggaagaaattgctgggggtaggcagcaactagctggctgaatggtaattgttgttgcaaataagcagcagagttcaatgcagccagttggttgaatggaagaaactgatgttgctgagagtatgcagcaaggtttgctagcacaagttgttgtagttgttgtgccctgatgttttgtgccaccaaatggaccaaaggtaactgctgtaatagggctgacggttgttggaggaacaagggtgataa

SEQ ID NO: 8690 - DNA, 512 bp, Zea mays
  Clone ID: LIB3061-104-Q1-N6-F11
gggggttggttttttttttttcatttcaattgttcattcaggtcattgctcacactgacactgccacccatggtgatgcgtgacacattattactcaatcatcgccgctaaatgactcaactagctagctagccagcggctatactacagcgcagggggggttcagtgggggacaccgccggcagcagcgtaggggcatggagtcggctgctgcaggccgcacatcgccgtcagttgctgcgctatctgcgccgccaacagccccgcgacctggccgctttgcggctgctgctgcaggatggactggaggaccaagccgaagatcgcctggtaccggtgctgcggctccacctgcctgagctgctggcaacactgctgccgcaacgactggcactgaggcgagcagtagggcgtcgccgtcgggctgcactgatgcctcagaaactcgacgcactggcccaggatcggggtgctgccaacgccgcaggttccctgcagctggcacgggcttg

SEQ ID NO: 8691 - DNA, 115 bp, Zea mays
  Clone ID: LIB3061-104-Q1-N6-F2
ggggtgtggggggggtctcctccctctctctctcgttttttggtttttttgggggggccccctttggtgtgggggggcttcttgggtgccttttctctttttttgtcgtgggggg

SEQ ID NO: 8692 - DNA, 572 bp, Zea mays
  Clone ID: LIB3061-104-Q1-N6-F3
atcccgcagctcatggagatggtggaggacgtgcagatcgttctgctgggcacgggcaagaagaagttcgagcgcatgctcatgagcgccgaggagaagttcccaggcaaggtgcgcgccgtggtcaagttcaacgcggcgctggcgcaccacatcatggccggcgccgacgtgctcgccgtcaccagccgcttcgagccctgcggcctcatccagctgcaggggatgcgatacggaacgccctgcgcctgcgcgtccaccggtggactcgtcgacaccatcatcgaaggcaagaccgggttccacatgggccgcctcagcgtcgactgtaacgtcgtggagccggcggacgtcaagaaggtggccaccacattgcagcgcgccatcaaggtggtcggcacgccggcgtacgaggagatggtgaggaactgcatgatccaggatctctcctggaagggccctgccaagaactgggagaacgtgctgctcagcctcggggtcgccggcggcgagccaggggtcgaaggcgagggagatcgcgccgctcgccaaggagaacgtggccgcgccct

SEQ ID NO: 8693 - DNA, 477 bp, Zea mays
  Clone ID: LIB3061-104-Q1-N6-F4
ataaggaacaccgcgtacgccgggtgtatttatttgtatacgaacatagtaattaagtgcagcagcagatcatgatgtgtcgttgcattgatcaggcctcgtcgtcgtcgttgtcagcactggcagcagtagcggcagcggcagtagtttgatttttaacgagcgcaacgatcctcgctgcttcgttcttatccttgatgccaagcttctgcatgtcggggatcacagcggtggggtggtcagcccactcgaaggccgccttggagatcctgtcccacttttgcacctgcttcccctgcgtcacggtcaaggtcaccccgtgctggctgttgaaccccgcgtccaccgtgcgggacacggtgttgaaccgcagccccttgcacaccatgaccaccagcttcaccagcttgctctttgtgtcggcctgtgggtcagccgctgccgccgccgccagatcagcggcctccggcatctgca

SEQ ID NO: 8694 - DNA, 350 bp, Zea mays
  Clone ID: LIB3061-104-Q1-N6-F6
gagaacaagtccccaacaataactatcaaccacatttgaagactagaagcacataagaatctagaaatgtactttcttatttctgggaagccacaaacatcagataaaaaactttattattgaactgtagctcataagaaatctaaaagagggcaccaccaatgatgggttgttggtagaacactgctgggtttgtcaaagcaagttggttgaatggcagcaattgttgcagttgtaagagggtgccagcgttaggcgcaacgtgctggtagaacggcaacaactgtggttgtgtcaagaaggtagcagggctcacaccagctagctggctgaatggtagtagttgttgc

SEQ ID NO: 8695 - DNA, 547 bp, Zea mays
  Clone ID: LIB3061-104-Q1-N6-F7
gcagcaccaagaagcaccatttttttccttaggatttaacttagaataaagcctgacgggggtaacagcacccatcgatccgcagtccatgctggttgatgcatgggtctgctggagccgaggatgaacacagcactaacaactgacacagagcgaccttcaatcaaaaacacagatgggcaacaacaaacacgagacgaacgaagataaacactctggactagggtaaacaacacggtagcgaacaggataacttggccgcgcgggccccaccgctcagttcctccagttcccgtcggagttgccgtagccgccgccacggttgccaccgccgtagccgccgccaccaccaccgtagccgccgccgccaccaccgtagccgccgccaccgccgtagccgccgccgccatcacggcgcccgccaccgccgtagccgccgcctccacggccaccaccgtacccgccgccgccgccgcctccacggccgccgcgggactgggcctcgttgacggtgatgttgcggccgtccagctccttgccgttcatg

SEQ ID NO: 8696 - DNA, 507 bp, Zea mays
  Clone ID: LIB3061-104-Q1-N6-F8
caaacacgcaaccgcaagatggtcaccattgcatcagacacgcctttgtgtacgggagatacatcgagaaccataattattcttgcgccacgttaaaacagacgggcgttgtctcaggtctcggaaagcatgactaaacatgtagtagcatatatacacacatcgccggtcgcataaacacacaaattacgcgtttgcctctggacgggttgctgccaaaccatatccctaggtcgactctgcgaagccaaccctcagcttgccatagtcgaagacggtgtggtagactcccatgaaaacatcacccaagatccagagagggccacggggtggtgggatatccatagctgtgaatccgctgatgcactgggcagcctgtccttcaccaaccttaaaaatgtactgctctggtttcagcttgaacttcttgcctccaatggtgaacgcaatgtcaggcatggacgcaagactgccacagtccacagctgattctcccatcggactcgg

SEQ ID NO: 8697 - DNA, 429 bp, Zea mays
  Clone ID: LIB3061-104-Q1-N6-G1
aacatcagacaaaaaactttattattgaactataactcataagaaactaaaagaggcaccaccaatgatgggttgttggtagaacgctgctgggtttgtcaaagcaagttggttgaatggcagcaattgttgcagttgtaagagggtgccagcgttaggcgcagcgtgctggtagaacggcaacaactgtggttgtatcaagaaggtagcagggctcacaccagctagctggctgaatggtagtagttgttgctgctgtaaataagcaggagagttcaatgctgccagttggttgaatggaagaaattgctgggggtaggcagcaggtagctggctgaatggtagttgttgttgttgcaaataagaagcagagttcaatgcagctagttggttgaatggaagaaactgctgttgctgagagtaggcagc

SEQ ID NO: 8698 - DNA, 577 bp, Zea mays
  unsure (1)..(577): unsure at all n locations; Clone ID: LIB3061-104-Q1-N6-G10
cacaaggatccacaactatttgtcccaaatccaggataaatcacatcgaattgatacacagatcaattcaccgcacaagccgaaaagaaccaacagctatcctagatacgctgctccatctacacagccgacgacattgcagtttcagcagcgcgagtcactcgacgccctcggtggatctctgcaccagcacaacgcccagggtgatggcggaggcgtagagcgcgttgggcaccttgcgtaccaccttgcccacgccggggacgccctccgtcgcccgcttggtcgccatcgccagcgccggcgccgccaccagcgtgatcagcagcttcacgctgatcgagcacagcgagtctgcggtcagcttccggatgaactccgcgaactcctcgcggtccaggagcccgtccaggttcacgtcgtactcctccatcatggccctgagcttctccttggacggggnggtcgtggtgcggccccggcaagtacttgttgatgtcattgtagacgcagaggacggcgatgtagacctcctcgaatctgagggcctccttgtcgcgcttctgggcgtcctccg

SEQ ID NO: 8699 - DNA, 522 bp, Zea mays
  Clone ID: LIB3061-104-Q1-N6-G11
ggaaatgtaacttcttatttctggttggccacatacatcatccaaaaactttttttttgaattacaactaataagccatctaaaaggggcccccccaatgatgtgttgttggtaggaggctgctgggtttgtcaaagcaagttggacaaagggcaacaattgttgtagttgtaaaagggttgcggggttagccccaaactgctggtaaaaaggcagcaactgttgctgtgtcaaaaaggaaacacggcttgctgcaactagctggctaaatggtagtaatatttgctgctgcaaataaacagcgaggttcaatgcggccaattggttaaatggaaaaagttgttgttgatgaaagtaggcaatacctagctggctgaatggtaatagttgttgctgcaaataaacagcagggttcaatgtaaatagttggttgaatggaaaaaattgttgttgctgatagtagggagaaaaggtttgccaaaactacttgtgttgatcacaggtagcaccagttgctgcaac

SEQ ID NO: 8700 - DNA, 520 bp, Zea mays
  Clone ID: LIB3061-104-Q1-N6-G2
aaaaatgtactttcttatttctgggaagccacaaacatcagataaaaactttattattgaactataacccataagaaatctaaaagagggccccccccatgatgggggggggggggaacactgctgggtttgtcaaagcaagttggttgaatggcagcaattggtgcagttgtaagagggtgccagcgttaggcccaacgtgctggtagaacggcaacaactggggttgtgtcaagaaggtagcagggctcacaccagctagctggctgaatggtagtagttgctgctgctgtaaataagcaggagagttcaatgctgctagttggttgaatggaaaaaattgctgggggtaggcagcaggtagctggctgaatggtatttgttggtgttgccaataagaagcagagttcaatgaaccctattggttgaatggaaaaaactgctgttgctgagagtaggcatcaaggtttgttagcacaagttggtgtagttggtgggccctgatgttttgggccaataa

SEQ ID NO: 8701 - DNA, 527 bp, Zea mays
  Clone ID: LIB3061-104-Q1-N6-G4
ataaaactaggaatatatatccatataaatcattacattaagggcatgagcaagatgccaaagactctagattgaaagcgcatccgtaaagggttatctctaggagcgctggcatacaagacccaaataccatatacaaacatgtatacatctcatgcccttaacacttccacgtcggtttggctggagcaaactacaggcttggcttgcagttgatcaacgcacaaagacgtttttcatctttgctgatctgggtttgacaaaaaaagcggctagcatactttttgggcgaagcggagccttctggatttggcgccccctgggggtggccaaagaactgaatgatgacaagtgcctggtcgggggctgatccttcatgccggcactgacaatatccaaactggttatgttggaatgcacattcctgggcaagggagatgcagatgattccttaccgagaaggcggaaaccacttgacgaagccttagtagtttttggttctcctaaaggaatttcagactgatctg

SEQ ID NO: 8702 - DNA, 574 bp, Zea mays
  Clone ID: LIB3061-104-Q1-N6-G5
gtgtggtgtgtgtttttttttttttttttttttttttttttttttttttttttttttttttttttttttttttttttttttttttttttttttttttttttttttttttttttttttttttttttttttttttttttttttggggccccaggggggggggggggttaagccccaaagggggccacccccacccttttgggggaaaaaaaaactctttggcccaaagaaggaggggggggggttttcgggggggggcccggggggtcccccggggatttcgggccgggccccggggggggcccaaatttcccttttaggggggcattaaaaacttgggggaaaaaagggaaaaactgtttccggggggaaaatgtgttcccctccaaattcccccaaaaaaaagagccggaagaataaaagggaaaacccggggggcccatagggggggcccacccaaaataattgggggggggccaaggccccctttccagggggggaacctggggggcccggtcctattaaaaattcgcccaccccccgggaggagggggttgggtattgggcccccgggggg

SEQ ID NO: 8703 - DNA, 583 bp, Zea mays
  Clone ID: LIB3061-104-Q1-N6-G6
gtgtcgggttcactgaacggcgtggatcaagatagcgcttatcgagtgccaaaacctgatcaccaatagtaccaatcagaatctgcttggaagtgatccccttagccgtttgtgtaactgccattgcttttactgaatgggggaaaaagtatgactgggattttactgccacctcagggcgggcgtatgatgtaattggtgctgaaagattatgcttcccaagtatgagcttcatgacatctttattgtccgccctagattgatcatatatctcaatcaccgctatttcaaatctgtgagctcgcagattaaaataatgataaacaacccagttctcgctcaagactgcatgtacagggccttgtgcaccatgatgagttacacgatgaagtatgcgtccagtgactgcatcaataagatatgcaacaagtgaagcttcttcaggtagcacagatccaatatcaccagcagctttaggagacaaagtagcaacaaaaactaaattctttgacaagtacttgtacatcacatcatgatcaccaattgtcttagcttgggtatgaacaacctcattcatatttcg

SEQ ID NO: 8704 - DNA, 485 bp, Zea mays
  Clone ID: LIB3061-104-Q1-N6-G7
caccaaaaaaaccctcagttttaagcatgaacagtttggaagttttacatagctggaaaaaagaacggaactgtagcttttatgagcgctgctactaatactcttcacagagcatggctggggcgtggtagttttattaatcaccagatgcaccaacagcaggcgatccggctgccaacgagcagaggccccctcagacaagcacctgagctgcagctagcctagcgatcgggaccctgaaaggggagcaagaaacgtaatccagcccagtcttggcgaaaaaagcaaccgatgaaggctctccaccatgttctccacaaatgcccaccttcaagttaggcctagctttgcggcccctttctgtagcaagcttaaccagctcgcccactcctttttggtcgagaacctcgaaggggtcatgctgggagatgccctgagccagataaaatggggatgaacttccccacattatccctggtgtagcc

SEQ ID NO: 8705 - DNA, 560 bp, Zea mays
  Clone ID: LIB3061-104-Q1-N6-G8
attcaggtcattgctcacactgacactgccacccatggtgatgcgtgacacattattactcaatcatcgccgctaaatgactcaactagctagctagccagcggctatactacagcacatagtttcttcagtgggggacaccgccggcagcagcgtaggggcatggagtcggctgctgcaggccgcacatcgccgtcagttgctgcgctatctgcgccgccaacagccccgcgacctggccgctttgcggctgctgctgcaggatggactggaggaccaagccgaagatcgcctggtaccggtgctgcggctccacctgcctgagctgctggcaacactgctgccgcaacgactggcactgaggcgagcagtagggcgtcgccgtcgggctgcactgatgcctcaggaactcgacgcactggcccaggatcggggtgctgccaacgccgcaggttccctgcagctggcacgggcttggatgcggctgttggcacgggcatgggtgtggctggggatgaggctgaggccggggcggttgagtagggtagtggcatggtggc

SEQ ID NO: 8706 - DNA, 552 bp, Zea mays
  Clone ID: LIB3061-104-Q1-N6-H1
cagaaatatattgagataaatctcaatcaatatattgattatttctaggaaacacatgccggaatgagggcaccattatcgagtacatctcatatgtaatctaaaagaggcacctccaacgatgggttgctgcctcgacaagacagggtttatcaaagagaactggttgtatggcagcaattgttgctgctgtaggaaggcagcgaccaatgggttagccactgctagtggattaagtaactgttgtcgctgttgtaggtacgcagcagagttcgacatagtcagttggttgaatggaagcagctgttgcaagtaggcagcagggtttgccacaactagctgagtcagagctggtacaatctgttgcaacaattgttgttgcaggtatgtaggtgcattggccacagcgagcgggctagatgaaagcagttgttgctgttgtaggtaggcggcagggttcaccatggctagttgactgagcgctggcagaaactgttgcagctgttgttgtggctggtttgcaactacgtttgccagagcaagtgggtttga

SEQ ID NO: 8707 - DNA, 308 bp, Zea mays
  Clone ID: LIB3061-104-Q1-N6-H10
acacgcactgtaacacaattcttgacattaacgaacaaatcggccacagcattgcgcgcaaggtccagcagcgcacataacactgctagtccagactgtcagcgcatagttaacttaagtattcgaccctagcaataacaccagcaaaggtagcagcaacagtagcagaagagaaacttgcgatccacaaaacaaaccctactcatatgtccttacaatggcaccagattaacaataaccccaggacttcatgtttttgtcacgatgtttgaggtggcgattaggccctctcgccgcggatcctcctt

SEQ ID NO: 8708 - DNA, 553 bp, Zea mays
  Clone ID: LIB3061-104-Q1-N6-H11
agtagtaacattattattaatctcatcgattcgttctggtagaaatgtagaagaggagtacatagatcaaaccacactgtggacagattccaccaaacccaaaagactataaataagggaagatacaggctaaaatcgctggggagaagagatgcatggtcgtcgacaagccatgtgacctggctatccatgcatgagacgagaccacaaggattctgtcgatctgtgctcttgcgtcagctcagctcgcatgggatctggtaggacacgctctaccgccgcagggtctgcatgatgtactggccgtacaggtccatggagtactggatggcttcgcgggcagcggcggcgggcaggaagtcgttgacggccacctccttgttctcgttcttcttgtagtcttcgaagaagcggcggatctcctggaggcggtgaggggagagctcgctgatgtcgttgtagtggcggtactcggggtcgtcggcgcagacggcgatgatcttgtcgtccttctctccctgatctatcataggcatgaggccgatggccctgg

SEQ ID NO: 8709 - DNA, 553 bp, Zea mays
  Clone ID: LIB3061-104-Q1-N6-H2
aaaatctggaaatgtaacttcttatttctggttggccacatacatcatccaaaaaatttattattgaattacaactaataagcaatctaaaagaggcaccaccaatgatgtgttgttggtaggaggccgctcggtctgtcaaagcaagttggacaaagggcaacaattgttgtagttgtaagagggttgcggggttagccgcaaactgctggtagaaaggcagcaactgttgctgtgtcaagaaggaagcacggtttgctgcagctagctggctaaatggtagtagtatttgctgctgcaaataagcagcggggttcagtgcggccaattggttaaatggaagaagttgttgttgctgagagtaggcagtagctagctggctgaatggtaatagttgttgctgcaaataagcagcagggttcagtgtagacagttggttgaatggaagaaattgttgttgctgagagtagggagaaaggtttgccagagctacttggttgatcacaggtagcacgagttgctgcagctgctgtgccctgatggtttgtaccaa

SEQ ID NO: 8710 - DNA, 106 bp, Zea mays
  unsure (1)..(106): unsure at all n locations; Clone ID: LIB3061-104-Q1-N6-H3
ccgggcgcccccccccgcccgggccccccccgggggggccccccccgggggggggggggggggcccccccccccccgccgcncccccccccccccccccccccccc

SEQ ID NO: 8711 - DNA, 560 bp, Zea mays
  unsure (1)..(560): unsure at all n locations; Clone ID: LIB3061-104-Q1-N6-H4
aaaatatagatctctaatacttanttactgagaggtcgcacatatcagcatgagaactttattattacagtataaatcataaaaaatctagaagatggcaccaccaatggtgggcggttgcaataaggtggtaggattcgtcaaagcatgttggctaaatggtagcaattgttgttgttgtaagaaggcaacaatgtttgccacattctgtgggtagaatggtagcaattgttgctgttgcaagaaggcattaatgtttcccacaacttgtgggtaaaatggcaacaaatgttgttgtctcaagaaagcaacaatgtttgccacagcttgcagatggaatggcagaagctgttgttgcagtaagaaggcataagggctcccgacaagttggttaaatggtagtagctgttgtgcctgcaagtagatagcagggttcaccccagctagttgattgaatggaagaaactgttgttgctggaggtaagcagcaaggttcgctgcaactacttgattgattgttggtagcaactgttgttgtagttggtgtgccccgattcttt

SEQ ID NO: 8712 - DNA, 575 bp, Zea mays
  Clone ID: LIB3061-104-Q1-N6-H5
atcgagataaatctcaatcaatatattgattatttctaggaaacacatgtcggtatgagggcaccattgtcgagtacatctcatatgtaatctaaaagaggcacctccaacgatgggttgctgcaaggcagggttcatcaaagagaactggttgtatggcagcaattgttgttgctgctgcaggaaggtagcgaccaatgggttagccactgccaatggattaagtaactgttgtcgctgttgtaggtacgcagcagagtttgacacagccagttggttgaatggaagcaactgttgtaagtaggcagcagggtttgccacagctagctgagtcagagctggtacaatttgttgcagcaactgttgttgtaggtacgtaggtgcattgcccaccgcgagcgggctagatgaaagtagttgtaggtagacggcagggttcaccatggctagttgactgagcactggcataaactgttgcagctgttgttgttgctggtatgcagctacgttcgccagagcaagtgggttggatgcaagcagctgctgttgcaagtaggtgacagggttcaccacgg

SEQ ID NO: 8713 - DNA, 144 bp, Zea mays
  Clone ID: LIB3061-104-Q1-N6-H6
ctaaaaagtactttcttatttctgggaagccacaaacatcagataaaaaactttattattgaactataactcataagaaatctaaaagagggcaccaccaatgatgggttgttggtagaacactgctgggtttgtcaaagcaag

SEQ ID NO: 8714 - DNA, 492 bp, Zea mays
  Clone ID: LIB3061-104-Q1-N6-H8
ggggggggggtttttttttttttttttttttttttttttttttttttttttttttttttttttttttttttttttttttttggaaattaaactaagtttaaattggttattttccacgtgtacttaacacgagcccggaaaatggcagggggggaagacggcgcccccaaacatgcatgcctgggttttctatttcaaatgaaaatgcacgagggccccccccccttcctgggttggtggtgggggcggccattctttttttttttcgccccctggcagtcggcgtcggggttgtcctcggtgcccttggaacaaccaggcttgcactggttgccaccagcgttggcagtaggcggtagcattggttttattattagcgttcccgggggcgggggcgcggtgccgctttagcactttccccagtttcgtgacggccaacaccggggtgaccgccttcagcgtgcgcatttgccacccctccgcctcggcggg

SEQ ID NO: 8715 - DNA, 574 bp, Zea mays
  Clone ID: LIB3061-104-Q1-N6-H9
aaaaacgcaaaccaaacacgtcccacccattctggtcccgtcttgaaacttcaattcctcatacactccagcgagcaaacaaacaacatatcgatggtgacaatgacattgtttaacggcacagtgctaaccgttacacagctatgtaattattctgagcctctgagttccatcatcagatagaggtgcaggttgcctttcgccggctcatttgcgcagcaagtctctcagtttatcggtggctgacctcagttcggcagcgatgccaacttcattggccgagtgccctgcatccgctaccaccttgaattctgcttcaggccaagccttgtgaagatcccaagcagacatcatagggcaacaaacatcataacgtccctgtacaataaaacctttaatatgtcggatcttatcaacattgtccaataggaatgagtccgatggtaaaaatcccttattcacaaagtagtggttttcaatccttgcaaatgccagtgaaaattcatcatcttctcctcgtttaatgttatcattgttttggataagttgcgcagtcatcatctcccacatcgtc

SEQ ID NO: 8716 - DNA, 659 bp, Zea mays
  Clone ID: LIB3061-105-Q1-K6-A12
gttctagtatcgcagcggccgctcgcgatctagaactagcccacgcgtccgcggacgcgtgggcggacgcgtgggcggacgcgtgggcggacgcgtgggggcgctcgctgcgagcgccgcctccagtacaagcggcggctgtggctgccagacaccaccgtttcatctaccgcctccggggtgatatgccgcctccgttctatctgccgccgcagcagcagccgcagccatggcaataccccactcaaccaccgcagctaagcccgtgccagcagttcggatcctgcggcgtcggcagcgtcggcagcccgttcctgggccagtgcgtcgagttcctgaggcaccagtgcagcccggcggcgacgccctacggctcgccacagtgccaggcgctgcagcagcagtgctgccaccagatcaggcaggtggagccgctgcaccggtaccaggcgacatacggtgtggtcctgcagtccttcctgcagcagcagccgcagggcgagctcgcggcgctgatggcggcccaggtagcgcagcagctgacggcgatgtgcggcctgcagctgcagcagccaggtccctgcccttgcaacgcagctgccggcggtgtctactactgaggaaactatgtactgtagtaataatgtaatggagccgct

SEQ ID NO: 8717 - DNA, 659 bp, Zea mays
  Clone ID: LIB3061-105-Q1-K6-A5
ctcagattgggacaaggaggaggacgaggagaggatttggtgctaccaggttcaggccccatgtcctagaaatggaccttcctccttttcctaggcagcttgtgcatcgggctactcttcaccaacagtttactttatacaccagaaccaaagaaattgtgcgatcagattctacagcggggaactgatgtctgccaccgattcatgtggagcatattgtttgatgcgaggacatggcatacacctcatgagacacattaactttaggcaagaaatgttaatattggtgattgacaaagagactggcaagccaaaaggttatggcttttgcgagtacaaggatgaggaaactgttttaagtgcatgtcgagaccttcatggttacgagattaatggtcgtcaattatgtgttgattttgctgaaaatgggaggaatactgatagcaatagagaaaaggtcgacaatcctcaaaattattatagaagagccattactaccactttggagttctttattaatacgagtaggtgtatagtcttcattcatgtgaatgataatagttgtgcctcctccgactaccatgtgtctcccgttgcaatttcttacaagcatgtttatatatgtacaactgcttgactgtacatacacacacctgttg

SEQ ID NO: 8718 - DNA, 550 bp, Zea mays
  Clone ID: LIB3061-105-Q1-K6-A6
ggacaaataaataatgttgccatgatgtgtgactccaattcgcaagatccattggcgttgagatcgcatcgaccatctagtacaggatcaaacgtgaagagcaacatagaagctgtttggatgggacactctcctcctttgctaaggctcgcaattgtggatttggcattaccaaaggcgggtaatgataactctctgtcattgtttgctgatccccttgttccagagagattttattgtgcgcatggtggggggcttgacatggtcacactgcacttcctaccattttcataccctgaaatgtcttcgacaccaccctctgtgcatcctgtcctcactacagggaacagcgaaacaagctcaccttttctttctggatttgttaccatagctgatgcatatggtcatgtacagttagctggcatcacatgcttgggtgagtgctttgtggtggagatgaagggttggaaggaacccgcacctcttcagcttgacttagaaagcaaaatcgtcaaggatgtggagcctcctgcaactggaatgatcagca

SEQ ID NO: 8719 - DNA, 665 bp, Zea mays
  Clone ID: LIB3061-105-Q1-K6-A8
cattccttgcgcggcgaccacccgattggaagcgtgcggagagaccgaagaagcgggagagatggctcgtaccaagcagactgctcgcaagtccacgggagggaaggctcccaggaagcagcttgccaccaaggctgcccgtaagtctgcccccaccactggtggagtgaagaagccggggggctaccgccctggaactgttgcactccgtgagatccgcaagtaccagaagagcactgagctgctgatcaggaagctgcccttccagaggctcgttagggaaattgcacaggacttcaagactgatttgcgtttccagagccatgcggtgcttgctctccaggaggctgctgaggcataccttgttggcctgtttgaggacaccaacctgtgcgccatccatgctaagcgtgtgaccatcatgcccaaggacattcagctggcaaggaggatccgcggcgagagggcctaatcgccacctcaaacatcgtgacaaaaaaatgaagtcctggggttattgttaatctggtgccattgtaaggacatatgagtagggtttgttttgtggatcgcaagtttctcttctgctactgttgctgctacctttgctggtgttattgctaggggtgaatacttaagttaactatgccctgacagtctggact

SEQ ID NO: 8720 - DNA, 606 bp, Zea mays
  unsure (1)..(606): unsure at all n locations; Clone ID: LIB3061-105-Q1-K6-B4
gttctagatcgcgagcgccgccctttgtttttgtttttttttttttttttagacggtaagagtgcatgcatgaaacattaattctactcatgatcgaccacgacacacaacaattgagcacgcatgcaagctgtttttttattcagaagatcccgaggagcggggacgacgacgacgggggggtgctcctgcatgcatgtagtcctctacgcacgacggcggtcgccgcagctcggcgcgggctcctcctcctcctcggcggccgggccggcgacgaggtgctcgtagacgacgccggagaggccggcgccgaccatgggccccacccagtacacccattggtgtctccagcgacgggagcccacgacggcgggcccgaacgcgcgcgccggattcatcacggggccctccagcgcgccgcaggccagcacgttagcccccgccaggagccccacggcgagcggcgccgccagcgctccggcgccggcgcggaccctccgngctttgtccatcaccgtcgcaaagtaggcgtacatgagcccgaacgccatggccgncttcagcaccgncgggttccatccggtcacgccccccggcagcgcgtac

SEQ ID NO: 8721 - DNA, 646 bp, Zea mays
  Clone ID: LIB3061-105-Q1-K6-C5
caatggtgcttcgaacacccagctgtgcaagcctataggctacaacaagcaattgcggcgagcgtcttacaacaaccaatttcccagttgcaacaacaatccttggcacatctaacattacaaaccatcgcaacgcatcagcaacaacaattcctaccagcactgagccacctagccatggtgaaccctgccgcctacttgcaacagcagttgcttgcataaaacccacttgctctggcaaacgtagttgcaaaccagccacaacaccagctgcaacagtttctgccagcgctcagtcaactagccatggtgaaccctgccgcctacctacaacagcaacaactgctttcatctagcccgctcgctgtggccaatgcacctacttacctgcaacaacaattgttgcaacagattgtaccagctctgactcagctagttgtggcaaaccctgctgcctacttgcaacagctgcttccattcaaccaactgactatgtcgaactctgctgcgtacctacaacagcgacaacagttacttaatccactagcagtggctaacccattggtcgctgccttcctacagcagcaacaattgctgccatacaaccagttctctttgataaaccctgtcttgtcgaggcagcaac

SEQ ID NO: 8722 - DNA, 650 bp, Zea mays
  Clone ID: LIB3061-105-Q1-K6-D12
atgtcatcgagagggatctgacagaacctgacagaattgtgggcgagctgttgcaacctgggggttacttgaaattaattgagctgggcctccaagattgtgtggaagaaattgatgcccaacgcgtgcttggttacgcattattcaaagatggaaggaacacaaagcttgcttatcccctggagaagttccattctgatgttgctggtaggagctttcacaatgggaggtttatacagaggatgcgtcaaaaagctgcgtctttgcccaatgtccaattagagcaaggaactgttacctcacttcttgaagaaaatggtactgttaaaggtgttcaatacaaaaccaagtcaggtgaagaactaaaggcttatgcgcccttgacgattgtatgtgatggctgctttacgaatctacgacgcgccctttgctcttcaaaggttgatgtcccatcatgttttgttgggctggtattggagaactgccaactttcacatgcaaaccatggtcatgttatcttggtcaatgcttctgcatgttatgttacccaattagtcatacagaggtgcactgttaggttgatgttcctggttagaggtgccttttatatctaccggtgaaatggtaaactatcttataactgattttgt

SEQ ID NO: 8723 - DNA, 656 bp, Zea mays
  unsure (1)..(656): unsure at all n locations; Clone ID: LIB3061-105-Q1-K6-D9
aatagcaggtccagcccattttcgaagcatgtggccgatagagaggtatctaatgagattgaagggttctgttcatacaaaaagtcattgtgaaggatcaatcatggagtggtctatgtttactgaatgccttacattttgtgctcgctatttacatggcgagtctcaattgaaccatctggatgctaatgatgaagattgtagtacaactcctttcttccatataattggtcgtggattgtctggaaaatgcatagttactttagaccacaagacatggctacaagcccacagatatgttttgttcaactattacaatatagggccttacttggagtaagttatctatataagtatatatcttctcatcacatgatcactaccttttgcatgttgaagtgataaaatgacctttacagcaagcatgctcactatctatcctcaaatggtcttcaaaataaacgagatatcaaccacatacaacatcaatcctttcatgagtggcttaggttgcatgtaagtaagaaataaacttaatagatttatttgagatggaattcacatatactntaacggtagcatttcaaattcaggtggaagatacgtgtgaagaagcatcagacgagattaatattttagccaaagcaccaatgatg

SEQ ID NO: 8724 - DNA, 667 bp, Zea mays
  Clone ID: LIB3061-105-Q1-K6-E2
gtcagcctagcaattagctcatcgactccagattggagaactcgacaccatgaaggtgctgatcgttgcccttgctctcctggcgctcgctgcgagcgccgcctccagtacaagcggcggctgtggctgccagacaccaccgtttcatctaccgcctccgttctatatgccgcctccgttctatctgccgccgcagcagcagccgcagccatggcaataccccactcaaccaccgcagctaagcccgtgccagcagttcggatcctgcggcgtcggcagcgtcggcagcccgttcctgggccagtgcgtcgagttcctgaggcaccagtgcagcccggcggcgacgccctacggctcgccacagtgccaggcgctgcagcagcagtgctgccaccagatcaggcaggtggagccgctgcaccggtaccaggcgacatacggtgtggtcctgcagtccttcctgcagcagcagccgcagggcgagctcgcggcgctgatggcggcccaggtagcgcagcagctgacggcgatgtgcggtctgcagctgcagcagccaggtccctgcccttgcaacgcagctgccggcggtgtctactactgaggaaactatgtactgtagtaataatgtaatggagccgctgactagctacctatagggctatagcta

SEQ ID NO: 8725 - DNA, 301 bp, Zea mays
  unsure (1)..(301): unsure at all n locations; Clone ID: LIB3061-105-Q1-K6-E3
aanaggcctggngacaaaaaagagaacatggaaaagcangcccccagngcanggacagacacngagacgnnacnccnnnnagaaggagnccnaaaacanggaganganngggancnnaacgcncagcagggccgcacaaagaanaaancagaaggcanagcaaggcnnanncaaggacggggggggcgaacanangccgggcacaannaaaaggaaanncgnnagcaggcnccacanaaaccaggcaganganggaaaaacgaaccagcacannanggagnccacaagacacccaaccgaa

SEQ ID NO: 8726 - DNA, 571 bp, Zea mays
  Clone ID: LIB3061-105-Q1-K6-E5
cgaaagatcgcaaggacaagcaggcgtcgaaagagtacctccggatcgcgctcgacaggatcgccgattcggcgggcctgccgcctctgggggccgtcggtcaggtggatgccgtggtgaacgaggcgttcaagatggcgaaagccgacgacctcagggcggtggacgaggcggagttcaagaagctgctgaccgaggttcttggggccgtcatgctgcagctggacgccagccccgtcgctgtctccaccaacaccgtcgtccacgagcccatgtgcacctcctcctcctcctccgcgctgctgtcgcccacgccgctgtctccgatggtgtcctctcctgctagtgaataggagaagacttgacaactgagtgaggagatgacgatggagatggatcacaccggcccgtcacgctcagtttttctttttctgtgtcaccgggtactaataacatgttaggaacttgtgggtttttatgtcgcttataacttctcgtcaaataaggcttttctaagcttttgagtagttgtgaacattttaagcaatcgtgaacagatggtggttgatat

SEQ ID NO: 8727 - DNA, 655 bp, Zea mays
  unsure (1)..(655): unsure at all n locations; Clone ID: LIB3061-105-Q1-K6-E8
attttgatcattcagaaacacaccaagcgaagcgcactagcaacaacctaacaacaatggctaccaagatattatccctccttgcgcttcttgcgctttttgcgagcgcaacaaatgcgtccattattccacaatgctcacttgctcctagttccattattccacagttcctcccaccagttacttcaatggccttcgaacacccagctgtgcaagcctataggctacaacaagcgattgcggcgagcgtcttacaacaaccaattgcccaattgcaacaacaatccttggcacatctaacaatacaaaccatcgcaacgcaacagcaacaacagttcctaccagcactgagccacctagccatggtgaaccctgtcgcctacttgcaacagcagctgcttgcatccaacccacttgctctagcaaacgtagttgcaaaccagcaacaacaacaactgcaacagtttctgccagcgcttagtcaactagccatggtgaaccctgccgcctacctacaacagcaacaactgctttcatctagcccgctcgctgtggccaatgcacctacatacctgcaacaagaattgttgncacagattgtaccagctctaactcagctagctgtggcaaaccctgttgcctacttgcacagctg

SEQ ID NO: 8728 - DNA, 229 bp, Zea mays
  Clone ID: LIB3061-105-Q1-K6-E9
gcacgctgcgcctaacgctggcaccctcttacaactgcaacaattgctgccattcaaccaacttgctttgacaaacccaacatcgttctaccaacaacccatcattggtggtgccctcttttagattgcttatgagttatacttcaataatgaagttcttcggatgatgtttgtggctgggcagaaataagaaagtacatttctagattctaaaaaaaaaaaaaaggac

SEQ ID NO: 8729 - DNA, 437 bp, Zea mays
  Clone ID: LIB3061-105-Q1-K6-F1
cgagaagattgcgtccaagctgccggccgatgacaagaagaagatcgaggacgccatcgacgcggccatcagctggctggacgccaaccagctcgccgaggcggacgagttcgaggacaagatgaaggagctggagagcctctgcaaccccatcatcgccaagatgtaccagggcgcgggtgaagacatgggcggcgctggcggcatggacgaggacgcccctgccggcagcggcggccctggccccaagatcgaggaggtggactaagcggtttgttgtcagtcttgagtgtgctgcagttgctggctggcccagttgctgccgagagttatcgtcagttggtgcggtgtgtccgcttaaactttatttgtggttggttggtacttttgtggtggttatttttttggacctcgtgatagtcggtcggttcaatgtt

SEQ ID NO: 8730 - DNA, 531 bp, Zea mays
  Clone ID: LIB3061-105-Q1-K6-F2
atcgagttggattgggttcaaagctgggcttttggacagctgtggtgtgcacggcagctctgtgacttgtgaggaggaagggaggaagaaagcggatccatggcgtcgaagcggatcctcaaggagctcaaggacctgcagaaggatcctcccacctcttgcagcgcaggccctggggcggaagatatgttctactggcaggcgacgattatggggccatcagatagcccatacgctggtggcgtatttttggtcactattcactttccaccggactacccattcaaaccaccgaaggttgcattcaagacgaaggtttaccacccgaatatcaacagcaacgggagcatctgtcttgatatcttgaaggagcaatggagccctgcactgacagtttctaaggtcctcctctcaatttgttcccttctgacggacccaaaccctgacgatccgttggtcccagagattgctcacttgtacaagactgatcgcgtgaagtacgaatctactgctaggagctggactcagaaa

SEQ ID NO: 8731 - DNA, 667 bp, Zea mays
  Clone ID: LIB3061-105-Q1-K6-F6
cttttccatatcaatgaaaaccttatgtgggtccttttgctccctatactgttccatcacttgtctttttaagaaaatggcttacatggttgatcttttgagtatgaaaacaaattagttcatagagatccttgttatttctcttagacaatgctcaataattcttccatagcttcatgtgtggctcgtcaactttactgcctggtaactagtacagctttgaatgtctcccttattttttgtagattggtactgatatacttctccactcgttagccatcttgttttcatgttcacttatttgatactagatcgtacaactaagattttctctgaatcggtatatcatcaaacttaacggcacatattaatctgaggccattcttctgcagggggatttcacaccaatagatgtgtttgccgtaaagtggatccaagctggagtgactcattttggtttgacagcttcctactatggtttcgtagctgatgttctgcaactgtcagaaaagttccgcgtgcagctcggtcccttccgttacgttgttgctggccttctgaagtttctttcattaccccagtacagatttgaggtggactatctcccttcatcgctgcaggggagatgttctgaatcaagaccactggctgaaaaacgtcacgaaca

SEQ ID NO: 8732 - DNA, 635 bp, Zea mays
  Clone ID: LIB3061-105-Q1-K6-G10
gttgaaattgaatgagaagatggagcatgttgaacaaaaagtgaaagaagtgtcaaacaccatcagagagaaagacttaaggctttccaagcttcaaatactgatcggtactgcagatagggcaacggtggaggaggcagcagctagcatcgaccagctagagacagagttcgagcaccatgtccaggagatactggaagctgaaatccagtatctggtgatgatgaaagcgaggcagaactggcaggtccgggcagaagaccagatggccttggaggagcacagggcgtctgctgccggggacaacaccaggatgctgctcaagctacgagagacggagagcaagatcgtgatgttgaaagagcaggtggacaagctggaggtccgggagaaggatctctaccggacgaccgaggtcctgaagatgcagagcaggaccttcaaagtgtccctctttggcctcgtccagctgataatgatgtgcctgtccctgaagatgttcttcgcgcaggtctcggcgccgtttgacgaggttgtgccgacatgatgatgccctgcctcgtttggatgcattcgtatccacatggattgacgtgctcagttggtgttctcttccgtctgtaacttcattcgcc

SEQ ID NO: 8733 - DNA, 598 bp, Zea mays
  Clone ID: LIB3061-105-Q1-K6-G3
agaccaacatgcaacatagaaagtggaatccagtagcaacaacagagcaacaatggcgaccaagatattttccctccttatgctccttgctctttctgcatgtgttgctaacgcgacaattttccctcaatgctcacaagctcctatagcttcccttcttcccccataccttccatcaatgagagcttcagtatgtgaaaacccagctcttcagccctataggctccaacaagcaatcgcagcaagcaacatacctttatcacccttgttgtttcaacaatcgccagccctatctttggtgcagtcattggtacaaaccatcagggcacagcagctgcagcaactcgtgctacctgtgatcaaccaagtagctctggcaaacctttctccctactctcagcaacaacaatttcttccattcaaccaactgtctacactgaaccctgctgcttatttgcagcaacaactattaccattcagccagctagctactgcctactctcagcaacaacaacttcttccatttaaccaattggccgcactgaaccccgctgcttatttgcagcagcaaatactactaccatttagccagctagct

SEQ ID NO: 8734 - DNA, 582 bp, Zea mays
  unsure (1)..(582): unsure at all n locations; Clone ID: LIB3061-105-Q1-K6-G9
aaanaatatcagctcaggctgaaacagggatgacgacgacgacgacgctgccgacggggcgcgccgtggccctgctgctgctcctgctggccacgacggcgacggaggccgcgaacccgtgcaacccggcgcagctgacgccgtgcgcggggccggcgctgttcggcggcgcggtgcggggggcgtgctgcgcgcagctgcgggcgcagcaggggtgcctgtgcgggtacgcgcgcagccccaactacgggagctacatccgcagccccaacgcggcgaggctcttcgccatctgcaacctgcccatgccgcgctgccgttattagcgggcagtagtatatatactagctagctattccaatacaatcatgctcagtcgttggtatatcgtaagtactcatgtgaagcatgcggtgcacactatggatcatgtaggacgttctgatacatgaataaaatccaggacgtctcagtttgggcggcaatataggtgggtagggatggatatattagtcgcgaatcaatacccgcgaaacaaaactcaactcatatctgtatctataaacgttcgtgggtatggat

SEQ ID NO: 8735 - DNA, 663 bp, Zea mays
  Clone ID: LIB3061-105-Q1-K6-H1
caactagcaacatagaaagcacaatagtgtaccaacaatggcagccaaaatattttgcttccttatgctccttggtctttctgcaagtgctgctaccgcaaccattttcccacaatgctcacaagctcctatagcttcctttcttcccccatacctctcaccagcggtgtcttcagtatgtgaaaacccaattcttcaaccctacaggatccaacaggcaatcgcagcaggcatcttacctttatcacccttgttcctccaacaaccgtcagccctattacagcagttacctttggtgcatttgttggcacaaaacatcaaggcacaacaactacaacaacttgtgctaggaaaccttgctgcctactctcagcaacagcagtttcttccattcaaccaactggctgcattgaactctgctgcttatttgcaacaacaactaccattcagtcagctagctgctgcctacccccagcaatttcttccattcaaccaactggcagcattgaactctgctgcttatttacaacagcaacagctaccaccattcagccagctagctgatgtgagccctgttgccttcttgacacaacaacagttgttgccgttctacctgcacgctgcgcctaacgctggcaccctcttacaactgcaacaattgct

SEQ ID NO: 8736 - DNA, 421 bp, Zea mays
  Clone ID: LIB3061-105-Q1-K6-H4
acgccctactgctcgcctcagtgccagtcgttgcggcagcagtgttgccagcagctcatgcaggtggagccgcagcaccggtaccaggcgatcttcggcttggtcctccagtccatcctgcagcagcagccgcaaagcggccaggtcgcggggctgttggcggcgcagatagcgcagcaactgacggcgatgtgcggcctgcagcagccgactccatgcccctacgctgctgccggcggtgtcccccactgaagaaactatgtgctgtagtatagccgctggctagctagctagttgagtcatttagcggcgatgattgagtaataatgtgtcacgcatcaccatgggtggcagtgtcagtgtgagcaatgacctgaatgaacaattgaaatgaaaagaaaaaaagtactccatctgttcc

SEQ ID NO: 8737 - DNA, 328 bp, Zea mays
  Clone ID: LIB3061-105-Q1-N6-A1
gagctgaggctgaatcaatgtattgattatttctaggaaacacacctaggtatgagggcgccattatcggacgcatgtgctctgtaatctaaaagatggccccttcaacgatgggttgctgcctcggcggggcgggattcatcaaagagaactggttgtctgggagcactgggtgctgctgttggaagggggcgaccaatgggttagccactcccaatggcttaagttactgttgtcgctgttgttggtgcgcaccatagttcgacagagtccgtgggttgaatgggcgcagctgttgcaagttggcaaccgggtttgccacaggttg

SEQ ID NO: 8738 - DNA, 547 bp, Zea mays
  Clone ID: LIB3061-105-Q1-N6-A10
gtgtggtttttttttttttttttttttttttttttttttttttttttttttttttttttttttttttttttttttttttttttgggcttccggggttttcaattaaggccttttttttttgggggtcccaaggaatagggccatcttggggggggggggggggggctttttttaacaggctccccctgggccttggggtaatttggggggttttttatccccctaggtttcacgggggccccatgcttagggggggggagggggtttggcaaagggtcagccaccttcaaatccgggggggtttggggtttttttttttccccccggctaagggattcccgggggggggggaacttccgcaggacggggttggtttttggggggggccttgggtccttaggttgggcaatagcccccttgggggcccaggggggggtcaagggggttgatggctttggaaacacccccgggtcggggggggactttttttttcaaaaacctttctttggggattcagaaggcgggaggggccggggttcgggggggg

SEQ ID NO: 8739 - DNA, 535 bp, Zea mays
  Clone ID: LIB3061-105-Q1-N6-A12
ggttgggggttttttttttttttttttttttgggtgtttttttttttttttttttttttttttttttttttttttttttttttttttttttttaattttaaaaaagtcccaaaaaacttttttccttaaaaaaaaacccctcccatttgagggttgcggggggggcattgctcaaactcccccccctgggggggggggaaaataacttactcattgccggtaaaagagaaaactacccagctagggagctagtaaacggctccctttcatttttactacaaaacaaaatttccccaaaaaaaaacaccccccccaacttcttttcaagggaaaggacctggtttttttaattttaggccccaaaataccctaaatttttgggcttccttggcccccattaacgccccaagctcccccttcggtttttttttaaagaaggactggaggaccacaccctattttgcctggtaccggggcaaggggtccacccgccttattttgtgggaaaactttttttttaacccctggcactttg

SEQ ID NO: 8740 - DNA, 544 bp, Zea mays
  Clone ID: LIB3061-105-Q1-N6-A2
ggaacaatacttttttcttttcatttcaattgttcattcaggtcattgctcacactgacactgccacccatggtgatgcgtgacacattattactcaatcatcgccgctaaatgactcaactagctagctagccagcggctatactacagcacatagtttcttcagtgggggacaccgccggcagcagcgtaggggcatggagtcggctgctgcaggccgcacatcgccgtcagttgctgcgctatctgcgccgccaacagccccgcgacctggccgctttgcggctgctgctgcaggatggactggaggaccaagccgaagatcgcctggtaccggtgctgcggctccacctgcctgagctgctggcaacactgctgccgcaacgactggcactgaggcgagcagtagggcgtcgccgtcgggctgcactgatgcctcagaaactcgacgcactggcccaggatcggggtgctgccaacgccgcaggttccctgcagctggcaccggcttggatgcggctgttggcccgggcatgggtgtggc

SEQ ID NO: 8741 - DNA, 243 bp, Zea mays
  unsure (1)..(243): unsure at all n locations; Clone ID: LIB3061-105-Q1-N6-A3
gcgccctttttttttttttttaacgataaagggtgtaggaaataaatgtcacaaatntcattatcacataggcggaagtctaacaaaaatgaataagaataataaaacgaactaagtnttatccctgggcgccatcaagcgggctgggacaccccacctagaggggcgggaactcgcgggggtngggcccctcttggcccacctacaaggagctcctgcccaccaccttctaccggggaaaca

SEQ ID NO: 8742 - DNA, 265 bp, Zea mays
  unsure (1)..(265): unsure at all n locations; Clone ID: LIB3061-105-Q1-N6-A4
ggggggggggtggtggttatccaaataaatctcagtgcagatgtattgattatttctaggaaacacatgtcggtctgagggcaccattgtcgagtccatctcatatgtaatctaaagctggcacctccaacgttgggttgctgcatggcgggggtcagcaaggggaactgnttgtatggcaccaattgttgttgctgctgcaggaaggttgcgccctatgggttagccactgcccctggcttaagtggctgctgtcgctgttgtg

SEQ ID NO: 8743 - DNA, 563 bp, Zea mays
  Clone ID: LIB3061-105-Q1-N6-A5
agaccataacaatataattcaataaaggaattggacagtacaacaggtgtgtgtatgtacagtcaagcagttgtacatatataaacatgcttgtaagaaattgcaacaggagacacatggtagtcggaggaggcacaactgttgtcattcacatgaatgaagactatacaactactcgtattaataaagaactccaaagtggtagtaatggctcttctataataattttgaggattgtcgaccttttctctattgctatcagtattcctcccattttcagcaaaatcaacacataattgacgaccattaatctcgtaaccatgaaggtctcgacatgcacttaaaacagtttcctcatccttgtactcgcaaaagccataaccttttggcttgccagtctctttgtcaatcaccaatattaacatttcttgcctaaagttaatgtgtctcatgaggtgtatgccatgtcctcgcatcaaacaatatgctccacatgaatcggtggcagacatcagttgtgcgttgtagaatctgatcgcacaatttctttggttctggtgtat

SEQ ID NO: 8744 - DNA, 544 bp, Zea mays
  Clone ID: LIB3061-105-Q1-N6-A6
gcacttggttctgtattgctagttacaacttacaacacgctgacatgcaaatgcagttcgcgagccccccacagaaagtgacagcaaacaggctcctatggatcctgtacttagtgtccgaacaacaaaataccaatatggcaataagtcgcacatggacctgccaacctatcgttcctggttcttgagttcatgatcaataagccggagcttcagactgttctcttcgttgaggagggagagcttctcaagcgaagatttcagaagtgacatctgggattctgagatatggctccgtccagccctttgtgcctgccatggcaccattcctgtgctagccgcactgcccgtggattgctgagcaaaacgtttcatcctagcactcagggcggcaatggaggaacgcaaagcatccagctccacatctgcgaaccgatcaagctgtgatttgaactcctgctctgcctgggttaatggtttcttgtttgcagcaggaagcatcttgaagctatctattcgcttctccaacagttcatacaccttg

SEQ ID NO: 8745 - DNA, 508 bp, Zea mays
  Clone ID: LIB3061-105-Q1-N6-A8
acacgcactgtaacacaattcttgacattaacgaacaaaatcggccacagcatcgcgcgcaaggtccagcagcgcacataacactgctagtccagactgtcagcgcatagttaacttaagggttcaaccctagcaataacaccagcaaaggtggcagcaacagtagcagaagagaaacttgcgatccacaaaacaaaccctactcatatgtccttacaatggccccagattaacaataaccccaggacttcatttttttgtcacgatgtttgagggggcgattaggccctctcgccgcggatcctccttgccagctgaatgtccttgggcatgatggtcacacccttagcatggatggcgcacaggttggtgtcctcaaacaggccaacaaggtatgcctcagcagcctcctggagagcaagcaccgcatggctctggaaacgcaaatcagtcttgaagtcctgtgcaatttccctaacgagcctttgggaaggcagcttcctgatca

SEQ ID NO: 8746 - DNA, 247 bp, Zea mays
  unsure (1)..(247): unsure at all n locations; Clone ID: LIB3061-105-Q1-N6-B1
gattggactcaggctttactgtagccagatataattatacgacgcacaacctagagtagcgttctcaaaaacccacactctaatgttcgacgattatataatcctattacagaccctgcgatattgataggccatggttcacttgggnaataatgcattaatgctcagcccatctcccttcgaaatcttgagtttattggactcaccacaaaccattatatcccacgtagtcgaccagactacattt

SEQ ID NO: 8747 - DNA, 432 bp, Zea mays
  Clone ID: LIB3061-105-Q1-N6-B2
cccccaaccttttctttattccaccccatttataaaggcccttcccggggggggaggggttttgggaccctccgggccccaaaatcaatccccccccccaaaaattttgggggagcccccggggtttcttgggttttaacttttcgggggggcccctaaaatttttcactttttttgggggcccccccaatttttggggggggcctgcctggttggccccccccccttttttccccaaccctttttattttttttttcttcccgggggccccggcctgggtgcggggggtttttttttttttgtaaagtgtgggagattttttttccaatttaatggggggtttttgccaccccttggggtttggggggcggggggctcccaatttttgggcccggggggcggggttccagggccccctctccccttttttt

SEQ ID NO: 8748 - DNA, 535 bp, Zea mays
  Clone ID: LIB3061-105-Q1-N6-B3
atccccaaatccaggcccccaatgtcgattcaacatgtaactaacatttgctgctacaacattctaccctacaacattgaaggacacaaaagagcaaaaagaaagaaaaaaatgccttggatgacacttttattgctccgatgatctccaacagactgatctgcagatcacgcatgtaaccaggtgctgatcattgtcgaatgtcgagacacacagctgcatgtcgcacgttcacttcatataactgttccactagggagtaaagcatccttgatcactgtgacaattccacctttgatgaagtacccgtctgtctccattgcagcttcttgaacattgtcagcattgagtatcttaacattgtctccaattcgagcattcttgtcaatgattgctctcctgatgcatgaatttttcccaataccaataggaatgccacctttttcggcaaggagttttttatcagcttctgtctcatagtagtccgcacccattagtaaactgtcctctatgatagcaccttcagatttgcaag

SEQ ID NO: 8749 - DNA, 577 bp, Zea mays
  Clone ID: LIB3061-105-Q1-N6-B4
gtggggtgcgccgccaacatctccggcggccacgtcaacccggccgtcaccttcggcgcgctgatcgccggccggatctgcctcgtccgctccctcgtctactgggccgcgcagctgctcggcgccgtcgccgccgcgctcgtgctcaggctcgccaccggagggatgcatctgccggagtacgcgctggcggggggcgtgagcggatggaacgcggcggtgctggaggcggccatggcgttcgggctcatgtacgcctactttgcgacggtgatggacaaagcgcggagggtccgcgccggcgccggagcgctggcggcgccgctcgccgtggggctcctggcgggggctaacgtgctggcctgcggcgcgctggagggcgccgtgatgaatccggcgcgcgcgttcgggcccgccgtcgtgggctcccgtcgctggagacaccaatgggtgtactgggtggggcccatggtcggcgccggcctctccggcgtcgtctacgagcacctcgtcgccggcccggccgccgaggaggaggaggagcccgcgccgagctgcggcgaccgccgtcgtgcgt

SEQ ID NO: 8750 - DNA, 578 bp, Zea mays
  Clone ID: LIB3061-105-Q1-N6-B5
ttgttttttttttttttttttttttttttttttttttttttttttatcgagataaatctcaatcaatatattgattatttctaggaaacacatgtcggtttgagggccccattggcgagtacatctcatatgtaatctaaaagatggggcggggcggggggggttgctgcaaggcagggttcatcaaagagaactggttgtatggcagcaattgttgttgctgctgcaggaaggtagcgaccaatgggttagccactgccaatggattaagtaactgttgtcgctgttgtaggtacccagcaaagtttgacacagccagttggttgaatggaagcaactgttgtaagtaggcagcagggtttgccacagctagctgagtcagagctggtacaatttgttgcagcaactgttgttgtaggtacctaggtgcattgcccaccgcgagcgggctaaatgaaaatagttgtaggtagaccgcagggttcaccatggctagttgactgagcactggcataaactgttgcagctgttggtgttgctggtttgcagctaccttcgccaaacaagtgggttggatg

SEQ ID NO: 8751 - DNA, 461 bp, Zea mays
  Clone ID: LIB3061-105-Q1-N6-B6
ggacgccctttttttggtgtgttgtccttaattctttattggtggtgtcaacttacaacactctttctttcttattcttttttttttccccccccaaaaatgacatcaaacaacctcctatcaatactgtttttttttgtccttcaacaaaatttttttggtttgaaaaggggcacatcaactcgccaaccaaaacttcctcgtaaatgaatttatcccccaaacccccgactttctgacaagcctctttttccatgccgaagatcccccttccctcagatccaaaccattacatgttctttttttggatacccataccccccccccttttttcccaaacccctcccttttgtttgctatcttcactatcagcgcaattccccaccctatcttttacccttcctccccgggacccccctcttgaacccccttcattctcttgcccaccccctttcttccca

SEQ ID NO: 8752 - DNA, 396 bp, Zea mays
  Clone ID: LIB3061-105-Q1-N6-B7
cacattaaaactggaaatgtaacttcttatttctggttggccacatacactcatccaaaaaactttattattgaattacaactaataagcaatctaaaagaggcaccaccaatgatgtgttgttggtaggaggccgctcggtctgtcaaagcaagttggacaaagggcaacaattgttgtagttgtaagagggttgcggggttagccgcaaactgctggtagaaaggcagcaactgttgctgtgtcaagaaggaagcacggtttgctgcagctagctggctaaatggtagtagtatttgctgctgcaaataagcagcggggttcagtgcggccaattggttaaatggaagaagttgttgttgctgaaagtaggcagtagctagctggctgaatggt

SEQ ID NO: 8753 - DNA, 337 bp, Zea mays
  Clone ID: LIB3061-105-Q1-N6-B8
ggcgctgctgccgggttcaccggtggcgcggcgcgcggcggctggctgaccgactggtgcgcaggtgatgtcggtgtggcgtcactcggtggagcgcgacgcccgccagatcgaattccattacgacctgtccgacgatttctatgccctgtgggtggatccgcgccgggtctattcctgcgcctattaccgcgagccgggcatgaacctggcgcaggcccaggaagccaagctcgaccacatctgccgcaagctgcggctgcggccgggcgagcgctttctcgacgtgggcgcgggctggggcgggctgttgctgtgggcggccgagcactatggc

SEQ ID NO: 8754 - DNA, 576 bp, Zea mays
  Clone ID: LIB3061-105-Q1-N6-B9
agtataatcttttcattaaacaagcaaactgagcacaaaactttggtgggttaattttgcaacccccactgggcctagccatcaactcatacacgacgaaggggccaaaatttcacgaatcgtcgacgccagtcatcggctcattatcctccttggcttcatccccagcgtcttcgtcttcaccatccgcggcgtcctccatctggtaatccaccttgaaatcgtagtccgcgtccatgtcgttcagcacactgaacctgttcgccttgcgccgtttcttctctgctttcctcttgcgagggtcgagtatgccctcggcggtgtacaacttgtcgttctgtgtgctggcggtggctggcttgcttccttgtgggtcgttcgcgtcagacatttgctcctcccggttttcctgagcgggttcacttggtttgctgccatcctctagcatctctttgtcaattgccggtggagcattaggaggaatctcaatatgatggaactcctcaatggacttcaaaccaccaatatatgaagactcagctttgtaaatttcatcaatattaaattctttcccat

SEQ ID NO: 8755 - DNA, 573 bp, Zea mays
  Clone ID: LIB3061-105-Q1-N6-C10
ggtcgaaacgttattctttgcatattaccatgcgggcatatacaggcacgaaagatttggggtagtaatgtagaagaaagcaaaaaaaatgtcgatcctgtaaactgcagctaatcaatcctacaccacgccggggggggaatctcgttgtgttcatcaccactggttatccttgctcgatgtttgctgtttactgctgctactagcgctgtgtgttctcctcttccccctcagagcgagccttcgaacgagacccgcagctgcaccgccggcctgggccgctgctgcgacggcgcgctggccaggccgtccagcatcttgaccacgtccaccgtgtcgtccaggtagtacctggccatgctcggcttcttgcccaccgtgcacgcgaacacctcgctgctggccggcagcttcacgccgctgttggaggccgggcacacgatgctctcgaacatgtcctcgtccgaccggtcgtcgccgatgcacagcacgaagtccggcggcttccccgtcctcaccatcgacgacaggaggctgtccactaccacgcctttgctgatgccctgggggtta

SEQ ID NO: 8756 - DNA, 546 bp, Zea mays
  Clone ID: LIB3061-105-Q1-N6-C11
aaatagtgaaacttgcaaacagaaactccttgatgttcagaatttttcctgtctggagaaggaaatcgccacgggtcaatttggcaacttcatccttccacaatcactatatctacagctacatgattgttcgacacgcagtaacaagagaaaattcaaacacttgccatgaagagtaacttccaggcgaacagttaggtatggtatattatttggtttctctgctctggtagttgcccttgcccaatgctgacctcaagtttggcgccatcatgctgttgtcttgatgcatccacaggagagcctcagagctgctggaagcaaaatgggttcactatctcacattttgtttggccccataaatttgttttctctcagcaggtttcagaatttggaaggaacacatcaaagtttcgtcaacgctcatcattgcgccagcattatcaaattcaccacaataattgggagccgagaatatggtgacaagctgtctgtcagcaaagaattcatacccatcctcgacaacctgatgagcacgacaaataa

SEQ ID NO: 8757 - DNA, 153 bp, Zea mays
  unsure (1)..(153): unsure at all n locations; Clone ID: LIB3061-105-Q1-N6-C12
ggccgccctggggggggggnnagaacagaaaggcgggcggagncgggagcccaaacacancaaaaaccnnanagggaacanaacnanaagaaacgaaagggggcacaaccaacgggcagcanngaacncnccggcnnatggaggggggggggg

SEQ ID NO: 8758 - DNA, 352 bp, Zea mays
  Clone ID: LIB3061-105-Q1-N6-C2
gggggaaaaacccaaaaaaaattttgggtttttttgggaaaaaaaaggggggggggggggccccctgggggggcccctttaattgggaaaaaaaaaaggggcccccccaaaaggggggggcccaaggggggggttaaaaaaaaaaaaaggggggggggggaaaaattggtgttcttctcgggaaaagggaccccccaagggggtccccccccccaaggggaaaaaaaacgggggggcggggggggggccccccaaaaattttacaccaccccgggggggaaaggaaaaaaactgtttaaaagaggacaaagggttccccaaaattgggggaaaaaaagggggaaaaattttt

SEQ ID NO: 8759 - DNA, 549 bp, Zea mays
  Clone ID: LIB3061-105-Q1-N6-C3
cagcgcatcacgacataagtagctcaatacgcaaagcgcaaagcactttcaagtaagataacctaaaatattctccaaatttacaccttaacaaaaattggacccaatccacagcttctcggtaacgttacaaccggggttactatgcacccaatccactgcttctcggtaatgttacaaaatgactaagtatccattcttcaaggtcacggatcattcctcccaagatgcaccaagaatggcaacacaactacagaacaccatgctgatgagaaagcagaacctgaaagctacatgccatgatcttagttgtgtgatggaattggtagcctgcgcttccaagatttaacaaagaaatagcagccaaacattaacagttcagccccaaaatttgcgcacaattgaataacagatatccacctaaggatcaatcagaacacaaatggagtcgaccgttgatgactgctgaggttgttgccttgaaactgcagggcgcccccaccaacctccctccccaattttccagcaaagcaaaaatgtttgcccaac

SEQ ID NO: 8760 - DNA, 442 bp, Zea mays
  Clone ID: LIB3061-105-Q1-N6-C4
acagaaaacatatatcaattattgtataaacctattaaaaggttaaaaccaattttaatttggaacagatggagtactttttttcttttcatttcaattgttcattcaggtcattgctcacactgacactgcctcgggggggggggcgtgacacattattactcaatcatcgccgctaaatgactcaactagctagctagccagcggctatactacagcacatagtttcttcagtgggggacaccgccggcggcagcgtaggggcatggagtcggctgctgcaggccgcacatcgccgtcagttgctgcgctatctgcgccgccaacagccccgcgacctggccgctttgcggctgctgctgcgggatggactggaggaccaagccgaagatcgcctggtgccggtgctgcggctccacctgcctgagctgctggcaacact

SEQ ID NO: 8761 - DNA, 531 bp, Zea mays
  Clone ID: LIB3061-105-Q1-N6-C5
gagataaatctcaatcaatatattgattatttctaggaaacacatgccggaatgagggcaccattatcgagtacatctcatatgtaatctaaaaaatggcacctccaacgatggggtgctgcctcgacaagacagggtttatcaaagagaactggttgtatggcagcaattgttgctgctgtaggaaggcagcgaccaatgggttagccactgctaggggattaagtaactgttgtcgctgttgtaggtacccagcaaagttcgacataatcagttggttgaatggaagcagctgttgcaagtaggcagcagggtttgccacaactagctgagtcagagctggtacaatctgttgcaacaattgttgttgcaggtatgtaggtgcattggccacagcgagcgggctaaatgaaaacagttgttgctgttgtaggtaggcggcagggttcaccatggctagttgactgaacgctggcaaaaactgttgcaactgttgttgtggctggtttgcaactacctttgccaaaacaa

SEQ ID NO: 8762 - DNA, 403 bp, Zea mays
  Clone ID: LIB3061-105-Q1-N6-C6
ttgtgttttttattttttttacttttttttggggggtttttttttttttttttttttttttttttttttttggccccattagaatttggaaatgtaactttttttttctgggggggccctttctttagccaaaaaacctcatttttggggttacagccaaagaggccattctaaaaaatgggccccggccaagattgtgttgttgggaagaaaggcttcttggttttccaaagccaggggggcaaaggggcccaactggggcccttgtaagaggggtgcgggggttgccccaaactggtggggtaaccgaagcaaatggtggtggttcaaaaaagaaaggggggttgttggtccttgctggcccaaggggggagggtttgctgctggggaaaaacccaggggg

SEQ ID NO: 8763 - DNA, 478 bp, Zea mays
  Clone ID: LIB3061-105-Q1-N6-C7
ggccaaagctacactttggattgatcacagccaagtccttcccacagttcggtgtccaagaattattgttcagcgtatgcttgtttgaacaaatatttatttcagaatcatattgtactcctggtgcaaaatcgtgggggtgacatgcataatcttcgtagaaatcttcttgctcattaggtgtttcattgtattcatattctgggcttggtggcatctcaacaattggctcgcagctatggatgggtggtgtttcagtagtagtgctgcttattgcaatttgataccgatacatttgttgagaacttggtgtgcaactcccataagcaaccatgcttgtttgctgttctccttgttcatgcttctctggaagaggtagcgactttttggcaagtgaactattgtaatatttacaacttgcactgaaaggacaagctccgcagtttggattttttttcctgcaaactacctttccaaa

SEQ ID NO: 8764 - DNA, 579 bp, Zea mays
  Clone ID: LIB3061-105-Q1-N6-C9
aagtccacattcaaattatttgaatgattataaatgtagacatacattcaagctacattcacgagtacctgattaatgaatgtaggtttagcctaaaatgaattacattttgagacggagcagattaatgaatgtaggtttagcctaaaacgaattacattttaagacggacagagtaaaaagctagcagcgagttacaaatatatagggtggttgctttgattgcttcgtcatctctttaccatgttgtaaagaatgatactatctaccagtcgtcaaaaccatgtaacatatcagacctcgacgaaatcgtcttcatcaatttcatctacccactcgacctgtgagcaagacgcggatttcatcaactccgtgaggccggtcaggtcttccaaataggttggttcattgattacttgcatcacgaaatccatccctctcctccgatattgatacaataccgcatgggagcatgccgtgcaattactcgaggaatagcccaacagggttaatatgttgtactgcgatagtgatccacgcatctggtgaggtaaaaggccgtgctcatgaccactgcct

SEQ ID NO: 8765 - DNA, 525 bp, Zea mays
  Clone ID: LIB3061-105-Q1-N6-D1
gagataaatctcaatcaatatattgattatttttaggaaacacatgccgctatgagggcaccattatcgagtacatctcatatgtaatctaaaaaaggcaccaccaacgatgggttgctgccacgacaaggcagggttcatcaaagagaactggttgtatggcagcaattgttgctgctgtaggaaggcagcgaccaatgggttagccaccgctaggggattaagtaactgttgtcgctgttgtaggtacccagcaaagttcgacacaatcagttggttgaatggaagtagttgttgcaagtaggcagcagggtttgccacaactagctgagtaagaactggtacaatttgttgcagcaactgttgttgcaacaactgttgttgcaggtatgtaggtgcattgcccatagcgagcgggctaaatgaaaaaaattgttgctgttgtaggtaggcgatagggttcaccatggctagttgactgagcgctggtaaaaactgttgcaactgttgttgttgttggtatgc

SEQ ID NO: 8766 - DNA, 452 bp, Zea mays
  Clone ID: LIB3061-105-Q1-N6-D10
cccggggttaccccccccccttttttgggtttttttgggggacccccccccgggggggggcggcggtttccggtccccccccttttgggccccaaagggggggcccccccccgggggggggggccccccccggggggggggccctcaaagggaccggggggttggggcccctttgttgctgctgtgggggggccccccccctgggggtcccccccccgggggggttaagtccccggggcccctgtggggggccccccccaggttcccccccccccagttgggtgatgggaaattttttttcccggggggcccccgggtttccccccctctgccgggaaaggccggggccctttgggtgccccccccgggggggcccccccgtttttccgggtttttgggggctttccccctagcgggggggctttttaaaaaaatttttccttttgtggggg

SEQ ID NO: 8767 - DNA, 571 bp, Zea mays
  Clone ID: LIB3061-105-Q1-N6-D12
ttttttttttttttttttttttttttttttttttttttttttttttttttttttttttttttttttttttttttttttttttttttttttttttttttttttttttttttttttttttttttttttttttttttttttttttttggggggggggggggaaaattttcaaacctagagagcccccggggaaaaaaccaaaaggggggcctctttcctgggggggggccaaaaaacccaaaagtaccccccgggaaaaggaaaaaggctgcccggaaaaaaaacatgggcctgaaacctttaggggggggacccggaggaggaaaccggttgctggaaaaaccttttttcccccaagggggggcccgtaaattgggggggtaggggcaagaaaaaaaaaattccgtaacccccaaccttttaaaagtgggggggtaaacccccccccccccaaaaaaggctgagcgcaaaacaaaattccttaagggaaaaaaaaagggaattttaaggggcccccccccggttggggcccctaaaaaaatggccaaaaaaaaccaggggggggggggttaag

SEQ ID NO: 8768 - DNA, 389 bp, Zea mays
  unsure (1)..(389): unsure at all n locations; Clone ID: LIB3061-105-Q1-N6-D2
aatctagaaagtactttcttatttctgggaagccacaaacatcagacaaaaactttattattgaactataactcatagaaactaaagggggcaccaccaatgatgggttgttggtagaacgctgctgggtttgggaggggggggtggttgaatggcagcaattgttgcagttgtaagagggtgccagcgttaggcgcagcgtgctggttgaacggcaacaactgtggttgtntcaagaaggtagcagggctcacaccagctagctggctgaatggtagtagttgttgctgctgtgaataagccggagagttcaatgctgccagttggttgaatggaagaaattgctgggggtaggcagcaggttgctggctgaatggtagttgctgttg

SEQ ID NO: 8769 - DNA, 445 bp, Zea mays
  Clone ID: LIB3061-105-Q1-N6-D6
ggacccaaagcagggaatggaaatacaaaggttcataaaaagggttgctgcaacttttagggcagcttataacagggcatactagcagcacaaatgggcaaggaacagcatgccaaacaacgcattttgcgcccgaacgctcgacttcctgtaaagcgggttttaccataccaagggtacacgatccatcgatgcaataccattggaggttcttgttttgtaaacccaaacccacccgatctatatgacaaacccatcggtgatgggtgcatttttaaaaaacaccacgattccaaaccttatgtagtaccctttttccgggggaacaaccttttggatgcccttactgtttgggaacaccacgttcttcccaatcctaacattcatgtcaatgatacaggtccttatactttgggttccttcctattccaactgggaccttccc

SEQ ID NO: 8770 - DNA, 533 bp, Zea mays
  Clone ID: LIB3061-105-Q1-N6-D9
aggatcaactaggtaaccatctatgtctcttctaacagcagggacaatcccattaacaatatcaatagtcacattgccatttagatcaactagtggggcaaaaaactgattatcattatctatgggctcgttctccaaattatccaggtcatacacatctcttgctttagattgaacaacagcagcccactcaatatcaattggatcaggaacatagtatacttggactgcttgtgatgctagaatgaaaggctcatctgataatttttcacctgtattgaacaagtgcttaaaattgacagatgtgatacctaactggtcagttttcacccacttgttctgcacacggttgtcaacccaatcacatttgaaaagcacgaccgtacctttgtggttatagtttagttcaacaatttcattgataataccaaaataggtcttatttcctattatgacattatcattattacccctgtcaaagcttgttgactctgcaactacaacaaccccactattttgaatagatctaccct

SEQ ID NO: 8771 - DNA, 432 bp, Zea mays
  Clone ID: LIB3061-105-Q1-N6-E10
ggggggggggggtttttttttttaaaaaaaaaaaaaaaaaaaaaaaaaaaggggggggggccttttgggaaaaacccccttttgggaaaaaaggggggggggaaaaaaattttttaagggaaaaacccccaaaaggtttggggggggggggggttttttgggggggggggggggccaaaccccccaaatggggggggggttgggggcgggtaaaaaaaaccccccccccttgggggggggggggaaaaaacaaaaaaaaaaaaagggggggggggggcccccccccgggtttggggaaaaaccccttttaaaaatgggggggaaaaatttgggggcaaaaacccccaaaaaaaaaaaaaaaaggggggggaaaaaccggggaaattttggggggtaaaaaaagggggggggaaaaaggtctcccaagggggg

SEQ ID NO: 8772 - DNA, 576 bp, Zea mays
  Clone ID: LIB3061-105-Q1-N6-E11
cagaaattattgagataaatctcaatcaatatattgattatttctaggaaacacatgccggaatgagggcaccattatcgagtacatctcatatgtaatctaaaaaatggcacctccaacgatgggttgctgcctggacaagacagggtttatcaaagagaactggttgtatggcagcaattgttgctgctgtaggaaggcagcgaccaatgggttagccactgctagtggattaagtaactgttgtcgctgttgtaggtacgcagcagagttcgacatagtcagttggttgaatggaagcagctgttgcaagtaggcagcagggtttgccacaactagctgagtcagagctggtacaatctgttgcaacaattgttgttgcaggtatgtaggtgcattggccacagcgagcgggctagatgaaagcagttgttgctgttgtaggtaggcggcagggttcaccatggctagttgactgagcgctggcagaaactgttgcagctgttgttgtggctggtttgcaactacgtttgccagagcaagtgggtttgatgcaagcaactgctgttgcaagta

SEQ ID NO: 8773 - DNA, 561 bp, Zea mays
  unsure (1)..(561): unsure at all n locations; Clone ID: LIB3061-105-Q1-N6-E12
gtggtgtttttctagaatgtactttcttattgctgggaagccacaaacatcatccaaaaaacttcattattgaagtataactcataagcaatctaaagggggcaccaccaatgatgggttgttggtagaacgctgttgggtttgtgggggggggggggtgaatggcagcaattgttgcagttgtaagagggtgccagcgttaggcgcagcgtgcaggtagaacggcaacaactgttgttgtgtcaagaaggcaacagggctcacatcagctagctggctgaatggtggtagctgttgctgttgtaaataagcagcagagttcaatgctgccagttggttgaatggaagaaattgctgggggtaggcagcagctagctgactgaatggtagttgttgttgcaaataagcagcagagttcaatgcagccagttggttgaatggaagaaactgctgttgctgagagtaggcagcaaggtttcctagcacaagttgttgtagttgttgtgccttgatgttntgtgccaacaaatgcacccaaaggtaactgctgtaatagggctg

SEQ ID NO: 8774 - DNA, 558 bp, Zea mays
  Clone ID: LIB3061-105-Q1-N6-E2
ccaaacatcctttttccctatatattattcctttccatttcaatggttcattcaggtcattgctcacactgccacccatggtgatgggtgacactccgttactcatcgccgctaaacgagtgaactagctatagccctataggtagctagtcagcggctccattacattattactacagtacatagtttcctcagtagtagacaccgccggcagctgcgttgcaagggcagggacctggctgctgcagctgcagaccgcacatcgccgtcagctgctgcgctacctgggccgccatcagcgccgcgagctcgccctgcggctgctgctgcaggaaggactgcaggaccacaccgtatgtcgcctggtaccggtgcagcggctccacctgcctgatctggtggcagcactgctgctgcagcgcctggcactgtggcgagccgtagggcgtcgccgccgggctgcactggtgcctcaggaactcgacgcactggcccaggaacgggctgccgacgctgccgacgccgcaggatccgaactgctggcacgggcttagctgc

SEQ ID NO: 8775 - DNA, 548 bp, Zea mays
  Clone ID: LIB3061-105-Q1-N6-E3
ggaggtaccattttcacatccatacgaacgaaaccatacatgtcaacagctacaagaaaatttcagcaattttgccatctaacctagttggtacaacagggcaaagagttacgaagggttgttgtggggcccaaaattctgagaaatcgaaagcacaatcggcacctttacagacgcacccacgcaggaagctttctaccagcaacagtcaagggggtgacgcatatcagagaactactcgactacagccaggtcctcatgggatgggcggctagttcagcaacagtttggtgagcaattcatctttcggtagagacactccagcccggaatgcatgctcaaggacctttatccattcattcatgagggaccccttcatttgctgtatagcggtgtactcttgatccatgagtgaatctagctcctcaaagtgtttgatcttgtattgcatcttttttagctgagtttcaattacagaccccattaggagctccatttctcgctcctcctggtctgcaagcattttatcacgggcagcatctacacca

SEQ ID NO: 8776 - DNA, 567 bp, Zea mays
  Clone ID: LIB3061-105-Q1-N6-E4
agaatctagaaatgtactttcttatttctgggaagccacaaacatcagacaaaaaactttattattgaactataactcataagaaatctaaaagagggcaccaccaatgatgggttgttggtagaacactgctaggtttgtcaaagcaagttggttgaatggcagcaattgttgcagttgtaagagggtgccagcgttaggcgcagcgtgctggtagaacggcaacaactgtggttgtgtcaagaaggtagcagggctcacaccagctagctggctgaatggtagtagttgttgctgctgtaaataagcaggagagttcaatgctgccagttggttgaatggaagaaattgttgggggtaggcaacaggtagctggctgaatggtagttgttgttgttgcaaataagaagcagagttcaatgcagctagttggttgaatggaagaaactgctgttgctgagagtaggcagcaaggtttgctagcacaagttgttgtaagttgttgtgcccttgatgttttgtgccaataaatgcaccaaaggtaacttgctgtaatagggctgatga

SEQ ID NO: 8777 - DNA, 534 bp, Zea mays
  Clone ID: LIB3061-105-Q1-N6-E5
ggacacatatcaaccaccatctgttcacgattgcttaaaatgttcacaactactcaaaagcttagaaaagccttatttcgacgagaagttataagcgacataaaaacccacaagttcctaacatgttattagtacccggtgacacagaaaaagaaaaactgagcgtgacgggccggtgtgatccatctccatcgtcatctcctcactcagttgtcaagtcttctcctattcactagcaggagaggacaccatcggagacagcggcgtgggcgacagcagcgcggaggaggaggaggaggtgcacatgggctcgtggaccacggtgttggtggagacagcgacggggctggcgtccagctgcagcatgacggccccaagaacctcggtcagcagcttcttgaactccgcctcgtccaccgccctgaggtcgtcggctttcgccatcttgaacgcctcgttcaccacggcatccacctgaccgacggcccccagaggcgggaggcccgccgaatcggcgatcctgtcgagcgcgat

SEQ ID NO: 8778 - DNA, 564 bp, Zea mays
  Clone ID: LIB3061-105-Q1-N6-E6
gccagaaactaccacacatcttttttacataaacaagaacagcgaagcatgaaaacagggctaacactacagcaactataattataccaccccacgaacaatacactgcttattattcctccgaaaaacaaaacgtgccaaataaatcaatcctcaccactgaattttaaaaaaatgaagagaaaggagacattattatccccaccagatgaattaatagtgcgtgatctacattaccacacaccacatggcaaacctacaggaggcataacagcagtcttgcccaggccacagtaagggtaatcatctctgactggattcgacagtgcgcacgttagctcctgtcattccttcaagcctgtccttcattatatctacaaagtgaccaaccatttcatggaactgcttcaaacccgagagcggcaagattatagacgaacgatcaactccagccacctcagaaatcctcaaataatggcccctgttgttgcttcccaggtcgaagaagaacctcttctgatctgccctaatcaccttagacatacccatgccactaatttcttc

SEQ ID NO: 8779 - DNA, 563 bp, Zea mays
  Clone ID: LIB3061-105-Q1-N6-E8
atcgagataaatctcaaccaatatattgattatttctaggaaacacatgccggtatgagggcaccattatcgagtacatctcatatgtaatctaaaagaggcacctccaacgatgggttgctgcctcgacaaggacaggattcatcaaagagaaccggttgtatggcagcaattgttgctgctgtaggaaggcagcgaccaatgggttagccactgccaatggattaagtaactgttgtcgctgttgtaggtacgcaacagagttcgacatagttagttggttgaatggaagcagctgttgcaagtaggcaacagggtttgccacagctagctgagttagagctggtacaatctgttgcaacaattcttgttgcaggtatgtaggtgcattggccacagcgagcgggctagatgaaagcagttgttgctgttgtaggtaggcggcagggttcaccatggctagttgactaagcgctggcagaaactgttgcagttgttgttgttgctggtttgcaactacgtttgctagagcaagtgggttggatgcaagcagctgctgttgc

SEQ ID NO: 8780 - DNA, 211 bp, Zea mays
  Clone ID: LIB3061-105-Q1-N6-E9
agaatctagaaagtactttcttattgctgggaagccacatacatcatccaaaaaacttcattattgaagtctaactcataagctatctaaagagagggccccaccaatggtgggttgttggtcgaaccctgttggggggaggagggggggttggttggatggcatcgattgttgcggttgtaggagggtgccagcggtaggcgcagcgtgc

SEQ ID NO: 8781 - DNA, 437 bp, Zea mays
  Clone ID: LIB3061-105-Q1-N6-F1
aacattgaaccgaccgactatcacgaggtccaaaaaaataaccaccacaaaagtaccaaccaaccacaaataaagtttaagcggacacaccgcaccaactgacgataactctcggcagcaactgggccagccagcaactgcagcacactcaagactgacaacaaaccgcttagtccacctcctcgatcttggggccagggccgccgctgccggcaggggcgtcctcgtccatgccgccagcgccgcccatgtcttcacccgcgccctggtacatcttggcgatgatggggttgcagaggctctccagctccttcatcttgtcctcgaactcgtccgcctcggcgagctggttggcgtccagccagctgatggccgcgtcgatggcgtcctcgatcttcttcttgtcatcggccggcagcttggacgcaatcttctcg

SEQ ID NO: 8782 - DNA, 571 bp, Zea mays
  Clone ID: LIB3061-105-Q1-N6-F10
acattagaatctggaaatgtaacttcttatttctggttggccacatacatcatccaaaaaactttattattgaattacaactaataatcaatctaaaagagggcaccaccaatgatgtgttgttggtaggaggctgctgggggggggaaagcaagttggacaaagggcaacaattgttgtagttgtaagagggttgcggggttagccgcaaactgcttgtagaaaggcagcaactgttgctgtgtcaagaaggaagcacgacttgctgcagctagctcgctaaatggcagtagtatttgctgctgcaaataagcagcggggttcagtgcggccaattggttaaatggaagaagttgttgttgctgagagtaggcagtagctagctggctaaatggtaatagttgttgctgcaaataagcagcagggttcagtgtagacagttggttgaatggaagaaattgttgttgctgagagtagggagaaaggtttgccagagctacttggttgatcacaggtagcacgagttgctgcagctgttgtgccctgatggtttgtaccaatgactgcacca

SEQ ID NO: 8783 - DNA, 552 bp, Zea mays
  Clone ID: LIB3061-105-Q1-N6-F11
cagatgacggatccaccgtaattcggcacaaaaaaaggggatacataagcaccattattgatacgtccagaggtaaacattattagcaagctcaagctagaagttgggggcaggcaaaacagtctctgctcctgcgcggaacgtcggggttacatagcacagttgagcaaaaaaaagtatgttcgtcttcagcgtagcatcttaagcggacttcacggtggccgcgttgatgatgtcgatgaactcaggcttcaaagaagctccaccgacaagaaaaccatcgacatcaggctgtgctgctagctctttgcagttcgcagcagttacagagcctccgtagatgatcctagtagattcagcaacctcagggctggcattggtctttagccaatccctcagggaggcgtgcacttcctgagcctgagctggggtggcaactttaccagttccaatagcccaaactggttcataggcaacaactacgttgctccagtccttgatcttctcagcaattgcttttgtttgtgcagcaacaacatccatggtagaccc

SEQ ID NO: 8784 - DNA, 544 bp, Zea mays
  unsure (1)..(544): unsure at all n locations; Clone ID: LIB3061-105-Q1-N6-F12
gggtgttttttttttttttttttttttttttggtgttttttttttttttttttttttttttttttttttttttttttttttccgttttttttttttgtttttttttgtttgtttcttttttttgggttttttcnggtttttgttttgggttcgcccggggggttgggggtcttttcgttgtttttggggtgttgtgggggnacttgggggggtgggtgttttgtgggggggttcttgtttttttggttcggtcctttgttttttgggtgggggcccttggggggggttgggttggggggggggggtcctggttgttgccgttggggggtgccctttgggggtgggtgttggggttgttggggggcttttgggggcgggggtttggcttggggttgttggttttgggtggttttgggggccctcccgtttttttgtggggcccggggttgggggtttttgtggctggtttggggggggtgttggtgttggttggcgtggcttttgggtggggtggtgggggttgccgggggttgggtttggggtt

SEQ ID NO: 8785 - DNA, 454 bp, Zea mays
  Clone ID: LIB3061-105-Q1-N6-F2
actatcaatgtttctccttccattatatatcaaaagttcgatgcacgaatggacaaattaatttagacatctggtttcagttacagaagggtctatgagagaccaatagcttgtcagcccattgcatatttctgagtccagctcctagcagtagattcgtacttcacgcgatcagtcttgtccaagtgagcaatctctgggaccaacggatcgtcagggtttgggtccgtcagaagggaacaaattgagaggaggaccttagaaactgtcagtgcagggctccattgctccttcaagatatcaagacagatgctcccgttgctgttgatattcgggtggtaaaccttcgtcttgaatgcaaccttcggtggtttgaatgggtagtccggtggaaagtgaattgtgaccaaaaatacgccaccagcgtatgggctatctggtggccccctaatcg

SEQ ID NO: 8786 - DNA, 476 bp, Zea mays
  Clone ID: LIB3061-105-Q1-N6-F3
ccttaggatttaacttaaaataaagcctggcgggggtaacagcccccatcgatccgcagtccatgctggttgatgcatgggtctgctggggccggggatgaacacagcactaacaactgacacagagcgaccttcaatcaaaaacacagatgggcaacaccaaacacgagacgaacgaagataaacactctggactagggtaaacaacacggtagcaaacaggataacttggccgcgcgggccccaccgttcagttcctccagttcccgtcggagttgccgtaccccccgccacggttgccaccgccgtagccgccgccaccaccaccgtagccgccgccgccaccaccgtagccgccgccaccgccgtagccgccgccgccattacggggcccgccaccgccgtagccgccgccttcacggccaccaccgtacccgccgccgccgccgtcttcacggccgccgggggactggccc

SEQ ID NO: 8787 - DNA, 523 bp, Zea mays
  Clone ID: LIB3061-105-Q1-N6-F4
gcattctatccaagggcagcgaacacaggcacatgcaaccaaaccaaacttaaccagattgacatagctatttacagagtcatcaagagaggaagagaacaaaggaacacttcttaacattcaagctcagttccacacttccaccccaggaaggaaccctggcagttactcctatgcatgtgggagagcttccgttctcgacgctcacgacctcttcttcctcttcttgtcctccgacttgtcggccgcgttcttgagcatgatgacgaggacgcggacgaggacggccacgaagtcggtgaagagggtgagggcgtgcttgacgtggtccatgtcgccgcggtgcgccctctcgatgatctcctgcgtgtcgtacaccacgtagcccaggaagatgagcagcccgaagtagacctcgaacatgaagctggttgcggagtggccgaagatggaggcggcgagctgcagccagagcaggatggagagccccgacgagagcagcccgcccaggtagaggtactcc

SEQ ID NO: 8788 - DNA, 438 bp, Zea mays
  Clone ID: LIB3061-105-Q1-N6-F5
ggggaaaaaacccaaaaaaattttggggtttttttgagaaaacaaattggggttggggggccccttgggggggcccttttattttgtaataaaaaagaggggccccccaaacagggggttgctcaagggggggtttaaaaaaaaaaaacgggtttttgggaaaaatttttttttttttttcaaaaaagggcccccccaaggggttccccccccccaagggttaaaaaaactgtggcccttttggggggcccccaaaaaattttccccacccccttgggtaaaaggaaaaaaattttttaaaaaggcaaaagggtttcccccaattttgttaagaaaaagtgggcaaaatttgtggaaaaacctgttgtggaaggcccaaggggcctttcccccccggggggggttaaaaaaaaatattttttgggaaaacggggggtt

SEQ ID NO: 8789 - DNA, 536 bp, Zea mays
  Clone ID: LIB3061-105-Q1-N6-F6
gctgaaactcgctctcttatcatgaaattaaccaacaacctcggtactgctggacagataaaacagtaagccttgttcggttattcccaatacacatggattagatgggattggaaaaaataagaagtttgacttgtttgggattcaaactcatctaatctcactcaatctacatggattgagagctaaccgaacgagccctaactagttgaaagcaccgggatcctggccaagcagcctgccttgtgctggaagcagcgagcactgccattcagcaccgcgctctccatcaagaagctcaccgtcgacgccacaaccactgtgggtactgccaactggcctaaccttcacttcttttatcttgacatattccacgtaggggagtagaagatgccagcagagctgataggcaacaaagaagcaaaacagtctcagcctgccgcttccatggacgagaatcaggtccaggctgccgtcgtcgtgccgcgctttcggtgcgataacaggagaaagtaacccctgggcaggcttgcaaa

SEQ ID NO: 8790 - DNA, 555 bp, Zea mays
  Clone ID: LIB3061-105-Q1-N6-F8
agaaatgtactttcttatttctgggacgccacaaacatcatccaaaaaacttcattattgaactataactcataagcaatctaaaagaggcaccaccaatgatgggttgttggtagaacactgttgggtttgtcaagagggggtggggggaatggcagcaattgttgcagttgtaagagggtgccagcgttaggcatagcgtgcaggtagaacggcaacaactgttgttgtgtcaagaaggcagcagggctcacatcagctagctggctgaatggtagtagttgttgctgctgtaaataagcagcagagttcaatgctgctagttggttgaatggaagaaattgctgggggtaggcagcaactagctggctgaatggtaattgttgttgcaaataagcagcagagttcaatgcagccagttggttgaatggaagaaactgatgttgctgagagtatgcagcaaggtttgctagcacaagttgttgtagttgttgtgccctgatgttttgtgccaccaaatggaccaaaagtaactgctgtaatagggctgaccgt

SEQ ID NO: 8791 - DNA, 553 bp, Zea mays
  Clone ID: LIB3061-105-Q1-N6-F9
cgagaaaattcatcaattattgattatttctaggaaacacatgtcggtatgagggcaccattgtcgagtacatctcatatgtaatctaaaaaaggcacctccaacgatgggttgctgcaaggcaaggttcatgaggggggggctggttgtatggcagcaattgttgttgctgctgcaggaaggtagcgaccaatgggttagccactgccaatggattaagtaactgttgtcgctgttgtaggtacccagcagagtttgacacaaccagttggttgaatggaagcaactgttgtaagtaggcagcagggtttgccacagctagctgagtcagagctggtacaatttgttgcagcaactgttgttgtaggtacctaggtgcattgcccaccgcgagcgggctagatgaaagtagttgtaggtagacggcagggttcaccatggctagttgactgagcactggcataaactgttgcagctgttgttgttgctggtatgcagctacgtccgccagagcaagtgggttggatgcaagcagctgctgttgcaagtaggt

SEQ ID NO: 8792 - DNA, 523 bp, Zea mays
  Clone ID: LIB3061-105-Q1-N6-G1
aatatatcgagataaatctcaatcaatatattgattatttctaggaaacacacgtcggtttgagggcaccattatcgagtacatctcatatgtaatctaaaagatggcacctccaacgatgggttgctgcctcgacaagacaggattcatcaaagagaactggttgtatggcagcaattgttgctgctgtaggaaggcggcgaccaatgggttagccactaccaatggattaagtaactgttgtcgctgttgtaggtacccaacaaagttcgacagagtcagttggttgaatggaagcagctgttgcaagtaggcaacagggtttgccacagctagttgagtcaaagctggtacaatctgttgcaacaattgttgttgcaggtatgtaggtgcattgcccacagcgagcgggctaaatgaaagcagttgttgttgttgtacctaagcggcagggttcaccatggctagttgactgagcgttggcagaaactgttgtaactgttgttgttgctggtttgcaact

SEQ ID NO: 8793 - DNA, 583 bp, Zea mays
  Clone ID: LIB3061-105-Q1-N6-G10
aaagagacgaatttagtttgcctaattaatccatgatttggtagctgcagaccgtcagctagcctagttgtcaatcgaacccaatttatgcacagacctacattattagtttttacagaacacgcgtagcttctgacgggttgcatcacaagtgcatgtacgactaagaaactatactacctgctgggtgctggctacaggcctacagctacagtaagatacacgttaagacatcacaaacccggcgaacgaagttacagacggaagagaacaccaactgagcacgtcaatccatgtggatacgaatgcatccaaacgaggcagggcatcatcatgtcggcacaacctcgtcaaacggcgccgagacctgcgcgaagaacatcttcagggacaggcacatcattatcagctggacgaggccaaagagggacactttgaaggtcctgctctgcatcttcaggacctcggtcgtccggtagagatccttctcccggacctccagcttgtccacctgctctttcaacatcacgatcttgctctccgtctctcgtagcttgagcagcatcctggtgttgtccccgga

SEQ ID NO: 8794 - DNA, 595 bp, Zea mays
  Clone ID: LIB3061-105-Q1-N6-G11
aacggcccctttttttttttttttcattaaaaccaaaactttattatgaccatgcatatattattggtcataccacacatgataatgtgtgtcgtcttactgcattattacatatatagatagagagagatggatagaggagatttcccaaatatcatgaatcagggggggggcggaatggcagcggagacgccacaggggttggtgcggtagctgggcagctggtactggtagagtccacccatggccggcatgttctgcgccatcatcatggccatggggttgagaccctgggctgccagcagctgctgctgctgctgcatcagagctggctcgtacaggctgctgctggcggcagcggcacgctcaagctgcatcatcatctgcagctgctgcgcgacggactgcacgtccatcatcctcatctgctgctggcagcactgttgccggagcggctggaacatggcgctcggctgcccacacccggcgtagtagggcgccgccgccagcgggctgcactgcggctgcctcaggtactccgcgtaggggtacagcccgccggcgcccatcatcgtcgtcaggccggcgccagcgc

SEQ ID NO: 8795 - DNA, 541 bp, Zea mays
  unsure (1)..(541): unsure at all n locations; Clone ID: LIB3061-105-Q1-N6-G12
agtaatatataggatgacagatatagttgatccaaagcaggtaatgngaaatacaaaggttcataaaaggtttgctgcaacttctagggcagcttataacagtacatactagcagcacaaatggtcaaggaacagcatgccagacaacgcatcttgcgcccgaacgctcgacttcctgtcaagcggctcttaccataccaaggttacacgatccatcgatgcaataccattgtaggttcttgttttgtagacgcaaacgcagccgatctatatgacagacccatcgttgatggttgcattcttcaagatcaccacgattccagaccttatgtagtacccttcttccgggtgatcagcctcttggatgcccttactgtttgtgatcaccacgttcttcccaatcctagcattcatgtcaatgatacagttccttatctttgtgttccttcctattccaactgggaccttcccagctaacagtagctttgaagcttcttcttcagtttcataggtgtccgctcccatcatcacggagtccttg

SEQ ID NO: 8796 - DNA, 564 bp, Zea mays
  Clone ID: LIB3061-105-Q1-N6-G3
aaaatctggaaatgtaacttcttatttctggttggccacatacatcatccaaaaaatttattattgaattacaactaataagcaatctaaaagaggcaccaccaatgatgtgttgttggtaggaggccgctcggtctgtcaaagcaagttggacaaagggcaacaattgttgtagttgtaagagggttgcggggttagccgcaaactgctggtagaaaggcagcaactgttgctgtgtcaagaaggaagcacggtttgctgcagctagctggctaaatggtagtagtatttgctgctgcaaataagcagcggggttcagtgcggccaattggttaaatggaagaagttgttgttgctgagagtaggcagtagctagctggctgaatggtaatagttgttgctgcaaataagcagcagggttcagtgtagacagttggttgaatggaagaaattgttgttgctgagagtagggagaaaggtttgccagagctacttggttgatcacaggtagcacgagttgctgcagctgctgtgccctgatggtttgtaccaatgactgcacca

SEQ ID NO: 8797 - DNA, 280 bp, Zea mays
  Clone ID: LIB3061-105-Q1-N6-G5
gggggggggggggggttttttttttttttttttttttggaaaaaaaaggccttttttttggggggggggccaaaaaaagggaaaaaaaaattttttggggggatggcgcgaagaaaaaaaaaaagagggggggcccaacaagggggggggggggagaaaaaaaaggggggggggaaaaaaaaagggggggaagggaaaaaaaagtgggagttgaaaaaagggcgaagggagaagggccaaaaggggaggaaaaaaaaacaaaagggggggggtagaaaaa

SEQ ID NO: 8798 - DNA, 484 bp, Zea mays
  Clone ID: LIB3061-105-Q1-N6-G6
catccaaaaaacttcatttttgaactttaacccataagccatctaaaagggggccccccccatggggggggggggggagaacactgttgggtttgtcaaaacaaggtggttgaatggcaacaattgttgcagttgtaaaagggggcccgcgttaggcataacgtgccggtaaaacggcaacaactgttgttgtgtcaaaaaggcaacagggctcacatcaactaactggctgaatgggaataattgttgctgctgtaaataaacagcaaagttcaatgctgctagttggttgaatggaaaaaattgctgggggtaggcaacaactaactggctgaatgggaattgttgttgcaaataagcagcaaagttcaatgccccccgttggttgaatggaaaaaaccgatgttgctgaaagtattcaacaaggtttgctagcacaagttgttgtaattgttgggccctgatgttttgtgccccccaatgg

SEQ ID NO: 8799 - DNA, 450 bp, Zea mays
  Clone ID: LIB3061-105-Q1-N6-G7
agaatctggaaatgtaacttcttatttctggttggccacatacatcatccaaaaaatttattattgaattacaactaataatcaatctaaaagaggcaccaccaatgatgtgttgttggtaggaggctgctgggtttggcaaagcaagttggacaaagggcaacaattgttgtagttgtaagagggttgcggggttagccgcaaactgcttgtagaaaggcagcaactgttgctgtgtcaagaaggaagcacgacttgctgcagctagctcgctaaatggcagtagtatttgctgctgcaaataagcagcggggttcagtgcggccaattggttaaatggaagaagttgttgttgctgagagtaggcagtagctagctggctaaatggtaatagttgttgctgcaaataagcagcagggttcagtgtagacaagtggttgaatggaagaa

SEQ ID NO: 8800 - DNA, 484 bp, Zea mays
  Clone ID: LIB3061-105-Q1-N6-G8
cgagaaaaatgtcaatcaatatattgattatttctaggaaacacatgccggtatgagggcaccattatcgattacatctcatatgtaatctaaaagaggcacctccaacgatgggttgctgccacgacaaggcagggttcatcaaagagaactggctgtatggtagcaattgttgctgctgtaggaaggcagtgaccaatgggttaggcactgctagtggattaagtaactgttgtcgctgttgtaggtacgcagcagagttcgacacagtcagttggttgaatggaagcagctgttgcaagtaggcagcagggtttgccacagctagctgagtcagagctggtacaatctgttgcagcaattgttgttgcaggtatgtaggtgcattacccacaacgagagggctagatgaaagcagttgttgctgttgtaggtaggcggcagggttcaccatggctagttgactgagcgctggcagaaactg

SEQ ID NO: 8801 - DNA, 544 bp, Zea mays
  Clone ID: LIB3061-105-Q1-N6-G9
aacgggtatccgtcgaatagcgaatacccgacggatacggatataagtagagatccatacccacgaacgtttatagatacagatatgagttgagttttgtttcgcgggtattgattcggggggggtgtatccatccctacacacctatattgccgcacaaactgagacgtcctggattttattcatgtatcagaacgtcctacatgatccatagtgtgcaccgcatgcttcacatgagtacttacgatataccaacgactgagcatgattgtattggaatagctagctagtatatatactactgcccgctaataacggcagcgcggcatgggcaggttgcagatggcgaaaagcctcgccgcgttggggctgcggatgtagctcccgtagttggggctgcgcgcgtacccgcacaggcacccctgctgcgcccgcagctgcgcgcagcacgccggcgggaccgcgccgccgaacagggccggccccgcgcacggggttagctgcgccgggttgcacgggttcgcggcctccgtccccgtcgtgg

SEQ ID NO: 8802 - DNA, 556 bp, Zea mays
  unsure (1)..(556): unsure at all n locations; Clone ID: LIB3061-105-Q1-N6-H1
agaaatgtactttcttatttctgggaagccacaaacatcatccaaaaaacttcattattngaactataactcataagcaatctaaaagagggcaccgccaatgatgggttgttggtagaacgttgttgggtttgtcaaagcaagttggttgaatggcagcaattgttgcagttgtaagagggtgccagcgttaggcgcagcgtgcaggtagaacggcaacaactgttgttgtgtcaagaaggcaacagggctcacatcagctagctggctgaatggtggtagctgttgctgttgtaaataagcagcagagttcaatgctgccagttggttgaatggaagaaattgctgggggtaggcagcagctagctgactgaatggtagttgttgttgcaaataagcagcagagttcaatgcagccagttggttgaatggaagaaactgctgttgctgagagtaggcagcaaggtttcctagcacaagttgttgtagttgttgtgccttgatgttttgtgccaacaaatgcaccaaaggtaactgctgtaatagggctgacggt

SEQ ID NO: 8803 - DNA, 575 bp, Zea mays
  Clone ID: LIB3061-105-Q1-N6-H10
cagaaattatcgagataaatctcaatcaatatattgattatttctaggaaacacacgtcggtatgagggcaccattatcgagtacatctcatatgtaatctaaaagaggcacctccaacgatgggttgctgcctcgacaggacaggattcatcaaagagaactggttgtatggcagcaattgttgctgctgtaggaaggcggcgaccaatgggttagccactaccaatggattaagtaactgttgtcgctgttgtaggtacgcagcagagttcgacagagtcagttggttgaatggaagcagctgttgcaagtaggcaacagggtttgccacagctagttgagtcagagctggtacaatctgttgcaacaattgttgttgcaggtatgtaggtgcattgcccacagcgagcgggctagatgaaagcagttgttgttgttgtacgtaggcggcagggttcaccatggctagttgactgagcgttggcagaaactgttgtagctgttgttgttgctggtttgcaactacgttcgccagagcaagtgggttggatgcaagcagctgctcttgcaagta

SEQ ID NO: 8804 - DNA, 568 bp, Zea mays
  Clone ID: LIB3061-105-Q1-N6-H11
gacttaaaattagatctctaatcttttattactgagaagttgcacatatcagtatgagaactttattattacagtataaagcataaaaaaatctagaagatggcaccaccaatggtgggctgctgcaataaggtggggggggggggcaaagcaagttggttaaatggcagcaattgttgttgttgtaagaaggcgacattgtttgccacatcctgtgggtagaatggtagcaactgttgctgttgcaagaaggcgttaatgtttcccacaacctgtgggtaaaatggcagcaattgttgttgttgttgcaagaaagcagcaatgtttgccacaacttgtagatggaatggaagcaactgttgctgcagtaagaaggcagcagggctcctgacaagttggttgaatggtagtagctgttgtgcctgcaagtaagcagcagggttcaccccacctagttgattgaatggaagaaattgttgttgctggaggtaagcagcaagggtcgctgcaactacttgattgattgttggaagcaactgttggtgtagttgttgtgctgcgattcttt

SEQ ID NO: 8805 - DNA, 544 bp, Zea mays
  Clone ID: LIB3061-105-Q1-N6-H2
cccaaatcggcaataaatcatattaagaatatggtaccaccaggtccatccagggacaaaggttgcagcgtacatctcataacctgaaacgaaatggctttattcttttaactctcaaaagtaccctcccagactagaccaataggacactatctcaacaaccgacaccacatccatcctacaatcctccagtatacggtaacataagtaaactaggaataggaaaactttggtacggagctaatgacatcatgggcacaaatgtacacataaggaaggtatcgccagtggtggatgctcagggaacggaggcgaaggtcggcagcagccagccgcgctctgttgccagctccacatactctccaaacttctcctgggcatttgggatgtcgaggatcagatcatcaaggccttccttgacacgggcaaagcctttggtcatctggttgatggttatgagcccctcgccgaaacactcctgcagcaggaccaagatgctggtgtcattctgcttctccatcgccatgaccagtgccttctttac

SEQ ID NO: 8806 - DNA, 421 bp, Zea mays
  Clone ID: LIB3061-105-Q1-N6-H4
ggaacagatggagtactttttttcttttcatttcaattgttcattcaggtcattgctcacactgacactgccacccatggtgatgcgtgacacattattactcaatcatcgccgctaaatgactcaactagctagctagccagcggctatactacagcacatagtttcttcagtgggggacaccgccggcagcagcgtaggggcatggagtcggctgctgcaggccgcacatcgccgtcagttgctgcgctatctgcgccgccaacagccccgcgacctggccgctttgcggctgctgctgcaggatggactggaggaccaagccgaagatcgcctggtaccggtgctgcggctccacctgcctgagctgctggcaacactgctgccgcaacgactggcactgaggcgagcagtagggcgt

SEQ ID NO: 8807 - DNA, 400 bp, Zea mays
  Clone ID: LIB3061-105-Q1-N6-H5
caaattagaatgggggaagggaactttttttttgggggggggcccatactttatccaaaaaatttggggggggggggggggctaataatcaatttaaagggggggccccccaagggggggttgggggggggggggtggggggtttgtcaaaggagggggggcaaaggggaacaatggggggggttggaaggggggggggggggtggccgaaaattggttgtgaaagggggggaacggggggggggtcaaaaagggagcacgactgggtggagctgggtggttaaagggggggagtttttgggggtggaaataagcggggggggttagggggggcaatggggtaaagggaaaaagggggtgttggtgagagtgggcgggtgctaggggggtaaaggggaaa

SEQ ID NO: 8808 - DNA, 565 bp, Zea mays
  Clone ID: LIB3061-105-Q1-N6-H6
aaaatctggaaatgtaacttcttatttctggttggccacatacatcatccaaaaactttattattgaattacaactaataagcaatctaaaaagggcaccaccaatgatgtgttgttggtaggaggccgctcggtctgtcaaagcaagttggacaaagggcaacaattgttgtagttgtaagagggttgcggggttagccgcaaactgctggtagaaaggcagcaactgttgctgtgtcaagaaggaagcacggtttgctgcagctagctggctaaatggtagtagtatttgctgctgcaaataagcagcggggttcagtgcggccaattggttaaatggaagaagttgttgttgctgagagtaggcagtagctagctggctgaatggtaatagttgttgctgcaaataagcagcagggttcagtgtagacagttggttgaatggaagaaattgttgttgctgagagtagggagaaaggtttgccagagctacttggttgatcacaggtagcacgagttgctgcagctgctgtgccctgatggtttgtaccaatgactgcaccaa

SEQ ID NO: 8809 - DNA, 135 bp, Zea mays
  Clone ID: LIB3061-105-Q1-N6-H7
ccgccctttttggtggggtttttttttattaattttttttttgtttttttttttttttttttttttttttttctttttcttattttttctttttcctttttttttctttattcggctttattttctttttttttt

SEQ ID NO: 8810 - DNA, 540 bp, Zea mays
  Clone ID: LIB3061-106-Q1-K6-A6
cccggcctcagcctcatccccagccacacccatgcccgtgccaacagccgcatccaagcccgtgccagctgcagggaacctgcggcgttggcagcaccccgatcctgggccagtgcgtcgagtttctgaggcatcagtgcagcccgacggcgacgccctactgctcgcctcagtgccagtggttgcggcagcagtgttgccagcagctcatgcaggtggagccgcagcaccggtaccaggcgatcttcggcttggtcctccagtccatcctgcagcagcagccgcaaagcggccaggtcgcggggctgttggcggcgcagatagcgcagcaactgacggcgatgtgcggcctgcagcagccgactccatgcccctacgctgctgccggcggtgtcccccactgaagaaactatgtgctgtagtatagccgctggctagctagctagttgagtcatttagcggcgatgattgagtaataatgtgtcacgcatcaccatgggtggcagtgtcagtgtgagcaatgacctgaatgaacaattg

SEQ ID NO: 8811 - DNA, 666 bp, Zea mays
  Clone ID: LIB3061-106-Q1-K6-A8
ttcttgttggctgggggcttcagggaggggcggggccacttcgccaataacatcttcaaagggatcgacgcccggttcctgagcgaagccctgggcgtcagcatgcacgtcgccgagaagctgcagagccggcgtgaccagcgaggcgagatcgtccgcgtggagccggagcacgggttgcgggagctgaatccgtcgccgtcgtcgtcgtcgttttcgttcccatcgtcacaaggccagtaccaaacgtgccagcgcgacgtcgacaggcacaacgtctgcgccatggaggtgaggcacagcgtcgaacggctggaccaggccgacgcctacagccctggggctgggaggatcacacgcctcaccagccacaagttccccgtcctcaacctcgtacagatgagcgcggtgcgggtagacctgtaccaggacgccatcatgtcgccgttctggaacttcaacgcccacagcgccatgtacggcatcaggggcagtgcaagggtccaggtcgccagcgacaacgggaccacggtgttcgacgacgtgctccgtgcggggcagctgctcatcgtaccccagggctacctcgtcgccaccaaggcgcagggagaaggcttccagtacatcgccttcgagacgaaccctgacaccatggtcagccacgtt

SEQ ID NO: 8812 - DNA, 674 bp, Zea mays
  Clone ID: LIB3061-106-Q1-K6-A9
cttctgcttgctctggggggaaggagagagagagagcgagagagatctagtagagaggctagctaggtggtcctcgaacgaagatgttggcggtgttcagcgggcaggtggtggaggtgccggcggagctggtggcggcgggcagccggacgccgtcgcccaagacgaaggcgtcgcagctggtggggcgcttgctggccgcctccgagccggccgtgtccgtgcagctcggcgaccacggccacctcgcctactcccacaccaaccaggcgctcctccgccccaggtcgttcgcggcgaaggacgaggtgttctgcctgttcgagggggtgctggacaacctgggtcgtctgagccagcagcacgggctgtcaagcaagggcgccaacgaggtgctcctcgtcatcgaggcctacaagacgctgcgcgaccgcgcgccctacccggccagcttcatgctcgcccagctcaccggctcctacgccttcgtcctcttcgacaagtccaccaactccctgctcgtcgcatccgaccccgagggcagggtgccgctcttctgggggatcaccgccgacggctgcgtcgccttctccgacgacatcgacatgctcaaaggctcatgcggcaagtcgctcgcgccgttcccgcaaggctgcttctactccaacgccctc

SEQ ID NO: 8813 - DNA, 653 bp, Zea mays
  Clone ID: LIB3061-106-Q1-K6-B1
gcaacatagaaagcacaatagtgtaccaacaatggcagctaaaatattttgcctccttatgctccttggtctttctgcaagtgctgctacggcgaccattttcccacaatgctcacaagctcctatagcttcccttcttcccccgtacctctcaccaacggtgtcttcggtatgtgaaaacccaattcttcaaccctacaggatccaacaggcaatcgcagctggcatcttacctttatcacccttgttcctccaacaatcatcagccctattacagcagttacctttggtgcatttattggcacaaaacatcagggcacaacaactacaacaacttgtgctagcaaaccttgctgcctactctcagcaacagcagtttcttccattcaaccaactagctgcattgaactctgcttcttatttgcaacaacaacaactaccattcagccagctatctgctgcctacccccagcaatttcttccattcaaccaactgacagcattgaactctcctgcttatttacagcagcaacaactactaccattcagccagctagctggtgtgagccctgctaccttcttgacacaaccacagttgttgccgttctaccagcacgctgcgcctaacgctggcaccctcttacaactgcaac

SEQ ID NO: 8814 - DNA, 626 bp, Zea mays
  Clone ID: LIB3061-106-Q1-K6-B3
ctgccgccgccggtccacctgccaccggcggtccatgtgccgccgccggttcatctgccgccgccaccatgccactaccctactcaaccgccccggcctcagcctcatccccagccacacccatgcccgtgccaacagccgcatccaagcccgtgccagctgcagggaacctgcggcgggggcagcaccccgatcctgggccagtgcgtcgagttcctgaggcatcagtgcagcccgacggcgacgccctactgctcgcctcagtgccagtcgttgcggcagcagtgttgccagcagctcaggcaggtggagccgcagcaccggtaccaggcgatcttcggcttggtcctccagtccatcctgcagcagcagccgcaaagcggccaggtcgcggggctgttggcggcgcagatagcgcagcaactgacggcgatgtgcggcctgcagcagccgactccatgcccctacgctgctgccggcggtgtcccccactgaagaaactatgtgctgtagtatagccgctggctagctagctagttgagtcatttagcggcgatgattgagtaataatgtgtcacgcatcaccatgggtggcagtgtcagtgtgagcaatgacctgaatgaac

SEQ ID NO: 8815 - DNA, 298 bp, Zea mays
  unsure (1)..(298): unsure at all n locations; Clone ID: LIB3061-106-Q1-K6-B5
ggaaccatcaagcgcctagggggcggtgttggtgactcaaacataaatcttagcgcactttgttcgacattctagtgatttgagctccgttctagtgtgctagtcttttgagctcaagtctgggtcttgtgtgtgcgtattcgctgtgatctttagagtcgtgcttatttgctggtcagttcgttgctctntaattctctgtgaacataaaaagtaagggcgagaggctccaagttgtggagattcctcgcaaacgggattgaaaaaagaaaagaaagaacaccgtggtattcaagtt

SEQ ID NO: 8816 - DNA, 462 bp, Zea mays
  unsure (1)..(462): unsure at all n locations; Clone ID: LIB3061-106-Q1-K6-B7
gatacaataggcaatcacagcaggcgtagtacctttatcacaccctgttactacaacaactcgaagacctattacatcagtgaccttcggggcatttgtgggagcacaacataagcgcacatcatctacaacagcttgtgctaggaaaccttgctgactactctgagcatcagaagagggtgggattcgaccaactggctgcctggaactctagctgcttatgctgcacaacgactacgatgcaagcagctagctgcatgcctaccgcncagcaagctacttccattcaaccaacaggcagcattgaactctgttgcttatcaacaacagcaacagctactaccattcatgcagctagctgatgtgagcaatgctgccttctagacacaacagcagctgttggcgttctacctactcgctgtacctaacgctggcacactcttacaactgcaacaactgctg

SEQ ID NO: 8817 - DNA, 674 bp, Zea mays
  unsure (1)..(674): unsure at all n locations; Clone ID: LIB3061-106-Q1-K6-C1
atcatcattcatcttagtagtataggcgccaaatcaaatctgcaacatcaattatctaactccaaaaaccatgaagctggtgcttgtggttcttgctttcattgctttagtatcaagtgtttcttgtacacagacaggcggctgcagctgtggtcaacaacaaagccatgagcagcagcgtgggtccacaacaacatcatccacaaaaacaacaacatcaaccaccaccacaacatcaccagcagcagcaacaccaacaacaacaagttcacatgcaaccacaaaaacatcagcaacaacaagaagttcatgttcaacaacaacaacaacaaccgcagcaccaccaccaacaacaacaacaacagcaccaacaacaacatcaatgtgaaggccaacaacaacatcaccaacaatcacaaggccatgtgcaacaacacgaacagagccatgagcaacaccaaggacagagccatgagcaacaacatcaacaacaattncagggtcatgacaagcagcaacaaccacaacagcctcagcaatatcagcagggccaggaaaaatcacaacagcaacaatgtcattgccaggagcagcaacagactacaaggtgcagctataactactatagcagtagctcaaatctaaaaaattgtcatgaattcctaaggcagcaa

SEQ ID NO: 8818 - DNA, 619 bp, Zea mays
  Clone ID: LIB3061-106-Q1-K6-C10
gaccaatgcaagtagaagcgcttaaagggattccctgcaagcaggttgctactggtctaagttttactgtgattcttacaagggatggacaagtatatacttgtggaagcaatacacatggccaacttggtcacggtgacaccatagacagggccactccaaagcttatagaattgtttgaaggccccactcatgtggtgcagattgcagccggcgcaagctacacttttgctgtaacagatgatgggactgttcattcgtttgggtcttgcactaatttctgccttggacatggggatcagcatgacgaacttcttcctcgtgcaatccaatcatttaagaggaggaacattcatgtagtccgtgtttctgctggagatgagcatgctgtggctcttgatgcactaggacacgtttatacttggggcagaggatactgtggagccttaggtcatggtgatgagaacgataaaactagcccagaattgatcggcagcttgaagggccaagttgctgtgcaggtatgtgcaaggaagaggaagacgtttgtcctcacggacgagggctcatttgttgcgtttggatggatgggttttgggagtctagggtttcttgaccg

SEQ ID NO: 8819 - DNA, 506 bp, Zea mays
  unsure (1)..(506): unsure at all n locations; Clone ID: LIB3061-106-Q1-K6-C11
gaagaggtgatcagcacaggagtgctgtcgcgattcattgagtttcttacacgtgaggaccatccccaactccagtttgaggctgcatgggcactcaccaacattgcatcaggcacatcagagaacactaaggtggtcgttgagagtggtgctgtgcgcctgtgcccatctttgtcaagctgctcaactccctcaagcgaggatgttcgtgaataggcatgcactaaattacaagagatgtgtcttattatgacccggggcagatccagaatttttctatgacccaagccaaatctaccaaattttcttctttttattttatcttaactattttgtaccatattaaatagagacttatatagagttacatggatcaagccctgggccacagatcgggtggcctgtggtgtagatctgccactgattatgactatggatgagactnttgtgatgtaattgatgagactatggatntaaatattgntatgtgattgtgtgtgagataa

SEQ ID NO: 8820 - DNA, 648 bp, Zea mays
  Clone ID: LIB3061-106-Q1-K6-C2
attttcagcattcaaaaacacaccaagcgaagcgcactagcaacgacctaacaccaatggctaccaagatattagccctccttgcgcttcttgcccttttagtgagcgcaacaaatgcgttcattattccacagtgctcacttgctcctagtgccattattccacagttcctcccaccagttacttcaatgggcttcgaacatccagccgtgcaagcctacaggctacaactagcgcttgcggcgagcgccttacaacaaccaattgcccaattgcaacaacaatccttggcacatctaaccctacaaaccattgcaacgcaacaacaacaacaacaacagtttctgccatcactgagccacctagccgtggtgaaccctgtcacctacttgcaacagcagctgcttgcatccaacccacttgctctggcgaacgtagctgcataccagcaacaacaacagctgcaacagtttatgccagtgctcagtcaactagccatggtgaaccctgccgtctacctacaactactttcatctagcccgctcgcggtgggcaatgcacctacgtacctacaacaacagttgctgcaacaaattgtaccagctctgactcagctagctgtggcaaaccctgctgcctacttacaac

SEQ ID NO: 8821 - DNA, 657 bp, Zea mays
  Clone ID: LIB3061-106-Q1-K6-C3
gccgtccgtccgtccgtccgtccaggcgtccagtcgcgcgggcagcagtccgtccgtccgtccagccgtccagtcgcgcgggcagcagacgcagacgagcggtcgtccgtccaggcgcaggcgagcggccgtccgtccaggcgtccgtccgtccaggcgtccgtccaagcgaactggtggggtggtccagcggccgtccgtccaggcgttggattccaagaactggtacttttctatgctcctcttcattgtgctactagatcaggggaacagatgcttgaggtagtagatcgtattttctggagttcggtcgtccgtcgcattttctggagttcagcggctcggcggctcgcttcgcattttctgctgcccacaaatctgatgctgagtttttaaacaagcctttggagaactataaggaaatgttcactgtctttggaaacaatatggctacaggaaagtatgcaaaaggatcaagtgaagctctaggtactgaagatagaaacagtatggctgaaacagagattgatgagggagatgttaatgctgttcctagtcctatagatgatattggggcttcatcctcagctcctagacctaggaagaaggcaaaggttactagtaatgaagaggcagggctgattggagcattcaaag

SEQ ID NO: 8822 - DNA, 121 bp, Zea mays
  Clone ID: LIB3061-106-Q1-K6-C4
aaaaaaaataaaaaaaaacacaaaaagcgaagagcaaaaacaacaaaaaaaacaaacaaaaaaaaaaaaaggggcgggccgggccggccgacccaagcggacccaacgcgcccaacccacg

SEQ ID NO: 8823 - DNA, 618 bp, Zea mays
  Clone ID: LIB3061-106-Q1-K6-C8
gcgcgccttccgcaacgtcgatatcctcagggacttctgtctggagcagaacatcaagtacttctatgatatcaaggacctcagcgatttcagggctaatccagactacaagggtgtctgccacattgcacttgctcaggaaggccactgccgaccaggcgaggttctcctgggtactgattctcatacgtgcaatgctggagcctttggtcaatttgcaaccggaattggaaacactgatgcaggttttgtgatgggcactggaaaggctcttctcaaggtgccacctactatcaggtttgtattagatggagaaatgccgccttatttacttgcgaaggatctgattttgcaaattattggtgagatttcagtatctggtgcaacctacaaatcgatggagtttgttggatcaactgtagaaagtctaaccatggaagaacgtatgacactatgcaacatggttgttgaagctggtggaaagaacggtgtcgtgcctgctgatgaaactacatttaaataccttgagggtaggacatcagttgattatcaacctgtctacagtgatgctgaggccagattttttagtgactacccggttgatgtatcgaaactgga

SEQ ID NO: 8824 - DNA, 497 bp, Zea mays
  Clone ID: LIB3061-106-Q1-K6-C9
cagcatttcaacagctgcaacagttggtgccagtgctcagtcaactagccatggtgaaccctgccgtctacctacaactactttcatctagcccgctcgcggtgggcaatgcacctacgtacctacaacaacagttgctgcaacaaattgtaccagctctgactcagctagctgtggggggggctgctgcctacttacaacagttgcttccattcaaccaactggctgtgtcaaactctgctgcgtacctacaacagcgacaacagttacttaatccattggcagtggctaacccattggtcgctaccttcctgcagcagcaacaacaattgctgccatacaaccagttctctttgatgaaccctgccttgcagcaacccatcgttggaggtgccatcttttagattacatatgagatgtactcgacaatggtgccctcataccgacatgtgtttcctagaaataatcaatatattgattgagatttatctcgatat

SEQ ID NO: 8825 - DNA, 640 bp, Zea mays
  Clone ID: LIB3061-106-Q1-K6-D1
agcgtctggcgcctcgccaggcgctgcgccgccgtggaggggcgcgtcggcagcacggactccgcggtgcgggcgttgcacgtcgggggagtcgtctgcgccgtgtgcgggtcgaagattcgggccctcaagagaggctgccgtggcgtggagcgcacccgctcggtcgactcgagcaagccggtctcgaggtcgctggctgctgagttcgaccaggaggctgacggggaggaagaggacaatgctggagagaccagcgatccagatgacggcagtgtgcagtacctgaggaggaggctcaaggaggagatgctgctgaaggaggttgcgctcgaggagctggagaaggagaggcatgccgcagcgtctgcagccgacgaggccatgtccaagattgcgtgcctgcgtagcgagaaggcgctggtggagagggaggcgcggcaattccaggagatgatgcagcagaagcagatgtatgaccggcaggtgatcgagtcacttcagtgggtgatcatgaagtctggaatgcaaggctgggagccagaggccataactgatcgagccttgtcggagacaagcgaggatgacagagataagaagtagctagctcttggttattggagttgaatggaaccactga

SEQ ID NO: 8826 - DNA, 392 bp, Zea mays
  Clone ID: LIB3061-106-Q1-K6-D10
cagacaaagatttgtgagggtgatccgcgctgagaagagatggctaagatcgccgcggcggcggcggcggcgctgtgcttcgcggccctggtggccgtggccgtctgccaaggcgaggtcgagcggcagaggctcagggacctgcagtgctggcaggaggtccaggagagcccgctcgaggcgtgccgccaggtcctcgaccggcagctaaccggcggcggcggcggcggcggcgttggcccgttccggtggggcaccgggctccggatgcggtgctgccagcagctccaggacgtgagccgcgagtgccgctgcgccgccatccggagcatggtcaggggatacgaggaggccatgccgccgctggagaaaggctggtggccatgggggcg

SEQ ID NO: 8827 - DNA, 671 bp, Zea mays
  unsure (1)..(671): unsure at all n locations; Clone ID: LIB3061-106-Q1-K6-D3
ggtgtattgaagggtcgacaatggttgcgacgatcggtagtccatagcagcggcgggcgcaacttcgacccggttttcttcccatatatctgtcaaatccttctccggttaccctccatcggcagcaatttccgccatagataccggcgatcgagggcctcggacaacccaatcgacggaggggcgcggcggcaggagagggcaaacccttttcttctcagtactctacttgtctgcgcctggatcccctccgcaggaagataagacatgggtcaagcactcggcttgattcaagtggatcaatcgacagtagccatcaaggaaacttttgggaagtttgacgaggtcctagagcctggatgccacttcttgccatggtgcatagggaagcaaattgctgggtatctgtcactgcgtgtgcagcagcttgatgtccgctgcgaaacaaagacaaaggataatgtcttcgtcaatgttgtggcatctgtgcaatatcgtgcccttgccgataaggcatctgatgcattttacaggcttagtaacaccagggagcaaatccagtcatatgtttttgatgtcatcagggcaagtgttccgaagatgaacttggatgatgcctntgagcagaagaatgaaatcgccaaagctgtagaaaatgaacttgaaaaggc

SEQ ID NO: 8828 - DNA, 75 bp, Zea mays
  Clone ID: LIB3061-106-Q1-K6-D5
actagttctagatcgcgagcggccgacgtgtgtttcctagaaataatcaatatattgattgagatttatctcgat

SEQ ID NO: 8829 - DNA, 648 bp, Zea mays
  Clone ID: LIB3061-106-Q1-K6-D8
ggtatgtgaaaacccaattcttcaaccctataggatccaacaggcaatcgcagctggcatcttacctttatcacccttgttcctccaacaatcatcagccctattacagcagttacctttggtgcatttattggcacaaaacatcagggcacaacaactacaacaacttgtgctagcggggggtgctgcctactctcagcaacaacagtttcttccattcaaccaactagctgcattgaactctgcttcttatttgcaacaacaacaactaccattcagccagctatctgctgcctacccccagcaatttcttccattcaaccaactgacagctttgaactctcctgcttatttacagcagcaacaactactaccattcagccagctagctggtgtgagccctgctaccttcttgacacaaccacaattgttgccgttctaccagcacgctgcgcctaacgctggcaccctcttacaactgcaacaattgctgccattcaaccaacttgctttgacaaacccaacagcattctaccaacaacccatcattggtggtgccctcttttagatttcttatgagttatagttcaataataaaagtttttgtctgatgtttgtggcttcccagatataagaaagtacatttct

SEQ ID NO: 8830 - DNA, 551 bp, Zea mays
  Clone ID: LIB3061-106-Q1-K6-E1
agcagtttcctttggtgcatttattggggcagggatcagggcacaacaactacaacaacttgtgctagcaaaccttgctgcctactctcagcaacagcagtttcttccattcaaccaactagctgcattgaactctgcttcttatttgcaacaacaacaactaccattcagccagggagcggctgcctacccccagcaatttcttccattcaaccaactgacagcattgaactctcctgcttatttacagcagcaacaactactaccattcagccagctagctggtgtgagccctgctaccttcttgacacaaccacagttgttgccgttctaccagcacgctgcgcctaacgctggcaccctcttacaactgcaacaattgctgccattcaaccaacttgctttgacaaacccagcagcattctaccaacaacccatcattggtggtgccctcttttagatttcttatgagttatagttcaataataaagttttttgtctgatgtttgtggcttcccagaaataagaaagtacatttctagattcttatg

SEQ ID NO: 8831 - DNA, 663 bp, Zea mays
  Clone ID: LIB3061-106-Q1-K6-E10
gcacaatattgtaccaacaatggcagccaaaatgttttgcttccttatgctccttggtctttctgcaagtgctgctaccgcaaccattttcccacaatgctcacaagctcctatagcttcctttcttcccccatacctctcaccagcggtgtcttcagtatgtgaaaacccaattcttgaaccctacaggatccaacaggcaatcgcagcaggcatcttacctttatcacccttgttcctccaacaaccgtcagccctattacagcagttacctttggtgcatttgttggcacaaaacatcaaggcacaacaactacaacaacttgtgctaggaaaccttgctgcctactctcagcaacagcagtttcttccattcaaccaactggctgcattgaactctgctgcttatttgcaacaacaactaccattcagtcagctagctgctgcctacccccagcaatttcttccattcaaccaactggcagcattgaactctgctgcttatttacaacagcaacagctaccaccattcagccagctagctgatgtgagccctgttgccttcttgacacaacaacagttgttgccgttctacctgcacgctgcgcctaacgctggcaccctcttacaactgcaacaattgctgccattcaaccaacttgc

SEQ ID NO: 8832 - DNA, 661 bp, Zea mays
  Clone ID: LIB3061-106-Q1-K6-E7
tggaagatctcataagaagtcagaaagagagatggaactaaaaaggagatttgagcagatcttgaaagatgctgctgacaaatatcaaggactgaacttatatctcaagaacttggatgatagcattggagatgatcaacttcgtgaattgttctcaaattttggcaaaattacttcatgcggggtgatgcgtgatcaaaatggtcttagcaaaggctctggatttgttgctttctcaactcgtgaggaagcatctcaggctttaactgaaatgaatggcaaaatgatatctggaaaaccattgtatgttgcatttgcgcagcgcaaagaagatagaaaagcgatgttgcaggcacagttttctcagatgcgccctgctgtaccaatgacacccactctagccccgcgccttccaatgtaccctcctatggctcctcagcaactcttctatggacaagcgccacctgctatgataccccctcagccaggatttggtttccagcaacaacttgttccaggcatgaggcctgggggtcctcatatgccaaattattttgttccagttgtccaacaccaacagggccaacagggtccacgcccaggtattaggcgtggagctggagcccatggtcagcaacctgtgccaccatttcagcagcag

SEQ ID NO: 8833 - DNA, 639 bp, Zea mays
  unsure (1)..(639): unsure at all n locations; Clone ID: LIB3061-106-Q1-K6-E9
gccactgtatctggtaccttggtgatgaaaaaatgtatgctggtagtagctaggtagggtatttagggagtacttttatcatgaatcgatccgattctctgtggcagggccccccgatcacgagcatggacagaactgccaataatgcggtattggatatcgagagccttcctcaaccgggtgataaatgctgctctgggagtccgaagatgatcagggccttgtcgcgtaagggttcgaaccggatggagaggaggggcggcggcggcggcgagcaggagcaagaggatttggcgaaaaaacttgtcatcaaagttgtgccgtctcaactggagcagcagcccctgggtcagaacaaggcgctggtcgctccacattgcacacctgttcttgttgattctggggaagggaggagcaaaagattcattagccggttcacgtccatcaaccctcggaagattctcctcttgttcgcaacgctgtcgagcgtggggacaacgatactgatctacttcacgctggcgatcaacagcaaagcggaggcctagtcgcctggagacacccaccaccaccatttgcgtcggcgagcgggcggcggcagtacattccgagcttgagttnttatttttctctattttt

SEQ ID NO: 8834 - DNA, 491 bp, Zea mays
  Clone ID: LIB3061-106-Q1-K6-F3
gcaacatataaagtggaatacagtagcaacaatagagcaacaatggcggccaagatattttccatccttatgctccttgctctttctgcatgtgttgctaacgcgaccatttttcctcaatactcacaagctcctatagctgcccttcttcccccataccttccatcaatgaccgcttggtttgtgaaaacccagcccttcaaccctacaggctccaacaagcaatcgcaacaagcaacttacctttatcacccctgttctttcaacaatcgccagccctatctttggtgcagtcattggtacaaaccatcagggcacaacagctgcaacaactcgtgctaccagtgatcagccaagtagctctggcaaacctttctccctactctcagcaacaacaatttcttccattcaaccaactgtctacactgaaccctgctgcttatttacaacaacaacaactactaccattcagccagctagctactgcctac

SEQ ID NO: 8835 - DNA, 676 bp, Zea mays
  Clone ID: LIB3061-106-Q1-K6-F5
gaacacatcaagcgaagcacattaggggcaggggaacaacaatggctaccaagatattatccctccttgcgcttcttgcgctttttgcgagcgcaacaaatgcgttcattattccacaatgctcacttgctccaagttccattattacacagttcctcccaccagttacttcaatggggggggaacacccagctgtgcaagcctataggctacaacaagcaattgcggcgagcgtcttacaacaaccaatttcccagttgcaacaacaatccttggcacatctaacaatacaaaccatcgcaacgcaacagcaacaacaattcctaccagcactgagccacctagccatggtgaaccctgccgcctacttgcaacagcagttgcttgcatcaaacccacttgctctggcaaacgtagttgcaaaccagccacaacaacagctgcaacagtttctgccagcgctcagtcaactagccatggtgaaccctgccgcctacctacaacagcaacaactgctttcatctagcccgctcgctgtggccaatgcacctacatacctgcaacaacaattgttgcaacagattgtaccagctctgactcagctagttgtggcaaaccctgctgcctacttgcaacagctgcttccattcaaccaactgactatgtcgaactctgc

SEQ ID NO: 8836 - DNA, 631 bp, Zea mays
  Clone ID: LIB3061-106-Q1-K6-F7
cccagctttgcaagcctataggctggggggagggggtgcggcgagcgtcttagaacaaccaattgcccaattacaacaacaatccttggcacatctaaccatacaaaccatcgcaacgcagcagcaacaagcactgagccacctagccgtggtgaaccctatcgcctacttgcaacaggagcggcttgcatccaacccacttgctttggcaaacgtagctgcataccaacaacaacaacagttgcaacagtttctaccagcgctcagtcaactagccatggtgaaccctatcgcctacctacaacagcaacaacttctttcatctagcccgctcgctatgggcaatgcacctacatacctgcaacaacagttgttgcaacaacagttgctgcaacaaattgtaccagctcttactcagctagctgtggcaaaccctgctgcctacttgcaacaactacttccattcaaccaactgactgtgtcgaactctgctgcgtacctacaacagcgacaacagttacttaatccactagcggtggctaacccattggtcgctgccttcctacagcagcaacaattgctgccatacaaccagttctctttgatgaaccctgccttggcgtggcagcaa

SEQ ID NO: 8837 - DNA, 659 bp, Zea mays
  unsure (1)..(659): unsure at all n locations; Clone ID: LIB3061-106-Q1-K6-G12
gcggctgtcagccaccgccgccgggtgatgctaccgccgccggtgcatctgccacctccggttcacctgccacctccggtgcatctcccaccgccggtccacctgccgccgccggtccacctgccaccgccggtccatgtgccgccgccggttcatctgccgccgccaccatgccactagggtgctcaaccgccccggcctcagcctcatccccagccacacccatgcccgtgccaacagccgcatccaagcccgtgccagctgcagggaacctgcggcgttggcagcaccccgatcctgggccagtgcgtcgagtttctgaggcatcagtgcagcccgacggcgacgccctactgctcgcctcagtgccagtcgttgcggcagcagtgttgccagcagctcaggcaggtggagccgcagcaccggtaccaggcgatcttcggcttggtcctccagtccatcctgcagcagcagccgcaaagcggccaggtcgcggggctgttggcggcgcagatagcgcagcaactgacggcgatgtgcggcctgcagcagccgactccatgcccctacgctgctgncggcggtgtcccccactgaagaaactatgtgctgtagtatagcccgtggctagctagctagttgagtcatttagcggcgat

SEQ ID NO: 8838 - DNA, 673 bp, Zea mays
  Clone ID: LIB3061-106-Q1-K6-G3
attgagaccaactagcaacatagaaagcacagtagtgtaccaacaatggcagccaaaatattttgcctccttatgctccttggtctttctgcaagtgctgctacggcgaccattttcccgcaatgctcgcaagctcctatagcttcccttcttcccccgtacctctcaccagcggtgtcgggggtatgtgaaaacccaattcttcaaccctacaggatccaacaggcaatcacagctggcatcttacctttatcacccttgttcctccaacaatcatcagccctattacatcagttacctttggtgcatttattggcacaaaacatcagggcacaacaactacaacaacttgtgctagcaaaccttgctgcctactctcagcaacagcagtttcttccattcaaccaactagctgcattgaactctgcttcttatttgcaacaacaacaactaccattcagccagctacctgctgcctacccccagcaatttcttccattcaaccaactggcagcattgaactctcctgcttatttacagcagcaacaactactaccattcagccagctagctggtgtgagccctgctaccttcttgatacaaccacagttgttgccgttctaccagcacgctgcgcctaacgctggcaccctcttacaactgcaacaattgc

SEQ ID NO: 8839 - DNA, 516 bp, Zea mays
  Clone ID: LIB3061-106-Q1-K6-G4
cgcagttttcacagacagcttccacagtgaccagagcactagagcagagcaacaaccgacaagagcagagtgagatcgtcgtcagcgagcccagcagatacgagagagaggatggcggacatcgcgttgctggtggcggagcagttcgagaagacggcaaggcgaggcgcccccggcggggacagcggtagcgacagcgggaccggcggcgagacgaggaacttcggggccgtggccaaggtgtggagctcttgggtggagtccgcctccgccgccgcgtccggggtcagattcaccgtcgcggtgcagctggagcccaagaccgggctcgcgctggccgccgccgacggcctcttctccgcctagcgtcctgcttccatgtcttcctcctgagcagtgccagtggtcgagcgagtcctgctcctgcaccccgtactatgtttgtgcgacctgtacatttcgttcgtcgttgcgcggttgcgcctgcgctctaatccggaacaaaatactattcat

SEQ ID NO: 8840 - DNA, 159 bp, Zea mays
  unsure (1)..(159): unsure at all n locations; Clone ID: LIB3061-106-Q1-K6-G5
cagaattttaaatacatttctagaagaaaacgcattattgaagtataactcataagcaatcgaaaagagggcaccaccaatgatgggttgntggtagaacgctgttgggtttgtcaaagcaagttggttgaatggcagcattgaactctgctgcttatt

SEQ ID NO: 8841 - DNA, 580 bp, Zea mays
  Clone ID: LIB3061-106-Q1-K6-H9
ccttgtttctccaacaatcatcaggggggttgcgtgagttacctttggtgcatttattggcacaaaacatcagggcacaacaactacaacaacttgtgctagcaaaccttgctgcctactctcagcaacagcagtttcttccattcaaccaactagctgcattgaactctgcttctggttgagggcaacaacaactaccattcagccagctacctgctgcctacccccagcaatttcttccattcaaccaactggcagcattgaactctcctgcttatttacagcagcaacaactactaccattcagccagctagctggtgtgagccctgctaccttcttgatacaaccacagttgttgccgttctaccagcacgctgcgcctaacgctggcaccctcttacaactgcaacaattgctgccattcaaccaacttgctttgacaaacccagcagcgttctaccaacaacccatcattggtggtgccctcttttagatttcttatgagttatagttcaataataaagttttttgtctgatgtttgtggcttcccagaaataagaaagtacatttctagattc

SEQ ID NO: 8842 - DNA, 542 bp, Zea mays
  Clone ID: LIB3061-106-Q1-N6-A11
agatctataatacttatttactgaggggtcgcacatatcagcatgagaactttattattacagtataaatcataaaaaatctttaagatggcaccaccaatggtgggcgattgcaataaggtggtaggattcgtcaaagcatgttggctaaatggcagcaattgttgttgttgtaagaaggcaacaatgtttgccacattatgtgggtagaatggcagcaattgttgctgttgcaagaaggcattaatgtttcccacaacctgtgggtaaaatggcaacaattgttgttgtcgcaagaaagaagcaatgttttccacagcttgcaaatggaatggcagaagctgttgttgcagtaagaaggcatcagggctcccgacaagttggttaaatggtagtagttgttgtgcctgcaagtagacagcagggttcaccccagctagttgattgaatggaagaaattgttgttgctggagataagcagcaaggttcgctgcaactacttgattgattgttggtagcaactgttgttgtagttgttgtgt

SEQ ID NO: 8843 - DNA, 603 bp, Zea mays
  Clone ID: LIB3061-106-Q1-N6-A2
agaaatgtactttcttatttctgggaagccacaaacatcatccaaaaaacttcattattgaagtataactcataagcaatctaaaagagggcaccaccaatgatgggttgttggtagaacgctgttgggtttgtcaaagcaagttggttgaatggcagcaattgttgcagttgtaagagggtgccagcgttaggcgcagcgtgcaggtagaacggcaacaactgttgttgtgtcaagaaggcaacagggctcacatcagctagctggctgaatggtggtagctgttgctgttgtaaataagcagcagagttcaatgctgccagttggttgaatggaagaaattgctgggggtaggcagcagctagctgactgaatggtagttgttgttgcaaataagcagcagagttcaatgcagccagttggttgaatggaagaaactgctgttgctgagagtaggcagcaaggtttcctagcacaagttgttgtagttgttgtgccttgatgttttgtgccaacaaatgcaccaaaggtaactgctgtaatagggctgacggttgttggaggaacaaggtgataaaggtaagatgcctgctgcgattgcct

SEQ ID NO: 8844 - DNA, 542 bp, Zea mays
  Clone ID: LIB3061-106-Q1-N6-A6
caattgttcattcaggtcattgctcacactgacactgccacccatggtgatgcgtgacacattattactcaatcatcgccgctaaatgactcaactagctagctagccagcggctatactacagcacatagtttcttcagtgggggacaccgccggcagcagcgtaggggcatggagtcggctgctgcaggccgcacatcgccgtcagttgctgcgctatctgcgccgccaacagccccgcgacctggccgctttgcggctgctgctgcaggatggactggaggaccaagccgaagatcgcctggtaccggtgctgcggctccacctgcctgagctgctggcaacactgctgccgcaacgactggcactgaggcgagcagtagggcgtcgccgtcgggctgcactgatgcctcagaaactcgacgcactggcccaggatcggggtgctgccaacgccgcaggttccctgcagctggcacgggcttggatgcggctgttggcacgggcatgggtgtggctggggatgaggctgaggccgggcg

SEQ ID NO: 8845 - DNA, 191 bp, Zea mays
  unsure (1)..(191): unsure at all n locations; Clone ID: LIB3061-106-Q1-N6-B11
aaaatagatctctaatgcttagttactgagaggtcgcacatatcagcatgagaactttattattacagtgtaaatcataaaaaatctagaagatggcaccaccattgttttggtggttgcaataaggtggttggggggggggggggatgttggctaaatggtagcaattgttgttgttgtnagaaggcaac

SEQ ID NO: 8846 - DNA, 536 bp, Zea mays
  unsure (1)..(536): unsure at all n locations; Clone ID: LIB3061-106-Q1-N6-B2
ggccacatggcgtcccttttcaaggacccgagcaagctctcagcgtacagggaccgccgnttcaagggcacacaggaggagtntgaggcaacgctgcgtgcgtcgaccacgctgtgcattgggaatatgtccttctacaccacggaggagcagggctgcgagctcttctcccgcgctggcgagatcaagaagatcatcatggggctcgacaagaactctaagaccccatgcggtttctgcttcgtactgtcctactccagggaggatgctgaagatgctgtcaaatacatcagtggaacgatgcttgacgatcgtccaatccgtgttgatttcgattggggctttgaagaaggcaggcaatggggccgtggacgaagtggtggacaagtgagagatgagtnccgtacagattatgatcctggtngaggtggttgcggtnagatggttcagagggaactagnngctcanagagaactagttgactatggtggatctttccaaccaaatgcaccacctccctctgagagaggtgagcg

SEQ ID NO: 8847 - DNA, 430 bp, Zea mays
  Clone ID: LIB3061-106-Q1-N6-B7
aggaaacaatgccgtttttgtagggctccttttttgtgttctttttatttgtttatctaaaaaaggcacctaattttttttgtttgttgccgggacacgacagggttgatcaaaaagaaccggttgtgtggcatcaattgttgctgctgtaagaaggcaccccccaatgggtgggccactggcaaaggattaagtgactgttgaaactgatgtgggtacgcagcagaattcgacatagttagttgggggaatggaagcaggtgtcgcaagtaggcaacaaggtttgccacagttagctgagttagagctggaacaatctgatgcaacaattcttgttgaaggtatgtaggtgcattggccacaaatagcgggctaaatgaaagcagttgttgctgttgaagggaagaaattgggggtgaccatggcctag

SEQ ID NO: 8848 - DNA, 604 bp, Zea mays
  unsure (1)..(604): unsure at all n locations; Clone ID: LIB3061-106-Q1-N6-C10
gaatacaaacacaccaataaattttatacagaataaaaatggtgggttgaattattcggtacatcacacgttactaaactacatgcttctttggctacacaacacaacactgtcctccaactttgctcttccgtcctcccccgttcatcacaaatcacaaagtataaaatacacttaccgagaagaatttcaatataagtacaacatatatgcaggcaacagtgtccaaaatggtggtcttggcctcttggccttgaggtcaaccactaggcgccgcaattggtatgtcttcgatactcttttggaacattatctcggtaggttttaagcacccacgaatgtactcctgcccaagttgtgctcgctcgttgtccccgaacccgaatacaatgcccttatttgtcactgcgacagtgtgatacagtccggtgcttatttgggagacgtagtgatcctgcaggctctcaagaacgcggggcctcattactttgtctgatgttcctcggtcaagaaaccctagactcccaaaacccatccatccaaacgcaacaactgagccctcgtncgtgaggacaaacgtcttcctcttccttgcacatacctg

SEQ ID NO: 8849 - DNA, 504 bp, Zea mays
  Clone ID: LIB3061-106-Q1-N6-C11
atctcacacacaatcacataacaatatttaaatccatagtctcatcaattacatcacaaaagtctcatccatagtcataatcagtggcagatttacaccacaggccacccgatctgtggcccagggcttgatccatgtaactctatataagtctctatttaatatggtacaaaatagttaagataaaataaaaagaagaaaatttggtagatttggcttgggtcatagaaaaattctggatctgccccgggtcataataagacacatctcttgtaatttagtgcatgcctattcacgaacatcctcgcttgagggagttgagtagcttgacaaagatgggcacaggcgcacagcaccactctcaacgaccaccttagtgttctctgatgtgcctgatgcaatgttggtgagtgcccatgcagcctcaaactggagttggggatggtcctcacgtgtaagaaactcaatgaatcgcgacaccactcctgtgctgatcacctcttc

SEQ ID NO: 8850 - DNA, 594 bp, Zea mays
  Clone ID: LIB3061-106-Q1-N6-C2
atcgagaaaatctcatcaatatattgattatttctaggaacacatgtcggtatgagggcaccattgtcgagtacatctcatatgtaatctaaaagaggcacctccaacgatgggttgctgcaaggcagggttcatcaaagagaactggttgtatggcagcaattgttgttgctgctgcaggaaggtagcgaccaatgggttagccactgccaatggattaagtaactgttgtcgctgttgtaggtacgcagcagagtttgacacagccagttggttgaatggaagcaactgttgtaagtaggcagcagggtttgccacagctagctgagtcagagctggtacaatttgttgcagcaactgttgttgtaggtacgtaggtgcattgcccaccgcgagcgggctagatgaaagtagttgtaggtagacggcagggttcaccatggctagttgactgagcactggcataaactgttgcagctgttgttgttgctggtatgcagctacgttcgccagagcaagtgggttggatgcaagcagctgctgttgcaagtaggtgacagggttcaccacggctaggtggctcagtgatggcag

SEQ ID NO: 8851 - DNA, 300 bp, Zea mays
  Clone ID: LIB3061-106-Q1-N6-C4
gtgggtttttttttttttttttttttttgtggtggtttttttttttttttttttttgtctttttttttttcgtgcgcttggggggccccgggtggcccgggccgcgcccggcgggctttctttttctccccatggtccgcctgttgggggggggggggtgcctgggtcatggggggctcccgcgcgggattggtggtggttgccctccccttacgggttcggcccgggcgttccggccgtcacgctgggcgtcctggtgggtgccgtgctttgccctgtctgcctttcgttccctggccc

SEQ ID NO: 8852 - DNA, 536 bp, Zea mays
  Clone ID: LIB3061-106-Q1-N6-D1
gcagataaatagcaatgaacatttgcaaggtagagcgatcaagtacagatgttgttcttattagataagtacacaggtagtttaaaagaagatggtatatttacaggtggatttcagatatttcccctgaagagctttgcatggtcaaggaacatccgagttttcgtaacttggcattctctgtttggttactaagagctgatcagaggacgatgaactcaaagcaaacaacagggccttcctcagtggttccattcaactccaataaccaagagctagctacttcttatctctgtcatcctcgcttgtctccgacaaggctcgatcagttatggcctctggctcccagccttgcattccagacttcatgatcacccactgaagtgactcgatcacctgccggtcatacatctgcttctgctgcatcatctcctggaattgccgcgcctccctctccaccagcgccttctcgctacgcaggcacgcaatcttggacatggcctcgtcggctgcagacgctgcggcatgcctctcct

SEQ ID NO: 8853 - DNA, 75 bp, Zea mays
  Clone ID: LIB3061-106-Q1-N6-D5
atcgagataaatctcaatcaatatattgattatttctaggaaacacatgtcggccgctcgcgatctagaactagt

SEQ ID NO: 8854 - DNA, 584 bp, Zea mays
  Clone ID: LIB3061-106-Q1-N6-D7
agaaatgtactttcttatttctgggaagccacaaacatcagacaaaaaactttattattgaactataactcataagaaatctaaaagagggcaccaccaatgatgggttgttggtagaacgctgctgggtttgtcaaagcaagttggttgaatggcagcaattgttgcagttgtaagagggtgccagcgttaggcgcagcgtgctggtagaacggcaacaactgtggttgtatcaagaaggtagcagggctcacaccagctagctggctgaatggtagtagttgttgctgctgtaaataagcaggagagttcaatgctgccagttggttgaatggaagaaattgctgggggtaggcagcaggtagctggctgaatggtagttgttgttgttgcaaataagaagcagagttcaatgcagctagttggttgaatggaagaaactgctgttgctgagagtaggcagcaaggtttgctagcacaagttgttgtagttgttgtgccctgatgttttgtgccaataaatgcaccaaaggtaactgatgtaatagggctgatgattgttggaggaacaaggtgataaagta

SEQ ID NO: 8855 - DNA, 507 bp, Zea mays
  Clone ID: LIB3061-106-Q1-N6-E10
agaaatgtactttcttatttctgggaagccacaaacatcatccaaaaaacttcattattgaagtataactcataagcaatctaaaagagggcaccaccaatgatgggttgttggtagaaccctgttgggtttgtcaaagcaagttggttgaatggcagcaattgttgcagttgtaagagggtgccagcgttaggcgcagcgtgcaggtagaacggcaacaactgttgttgtgtcaagaaggcaacagggctcacatcagctagctggctgaatggtggtagctgttgctgttgtaaataagcagcagagttcaatgctgccagttggttgaatggaagaaattgctgggggtaggcagcagctagctgactgaatggtagttgttgttgcaaataagcagcagagttcaatgcagccagttggttgaatggaagaaactgctgttgctgagagtaggcagcaaggtttcctagcacaagttgttgtagttgttgtgccttgatgttt

SEQ ID NO: 8856 - DNA, 229 bp, Zea mays
  unsure (1)..(229): unsure at all n locations; Clone ID: LIB3061-106-Q1-N6-E11
ttttcttttttatttttttttttctccaaacagccttttggccctatatattattcccttctccattgtcaatgcgttcatatcaggtacattggctcacactggccacccatggtcgatgggntgacactgccgttactcatctgccgctaaacgagtgaactagctgtagccctataggtagctagtcagcggctccattacattattactacagaacatagtttcc

SEQ ID NO: 8857 - DNA, 587 bp, Zea mays
  unsure (1)..(587): unsure at all n locations; Clone ID: LIB3061-106-Q1-N6-E9
gaacttctctgccgatctgtcttcaacagatctcctgttatatacatgatctgctgcacataattgaagactaaaaagtcacatcaacgattccaccaatatacatacacgcgaggaagaatgacacccactgaagcagtctctcactcagtcaatggatacagacacctgagcggcaggctgcatctaatctcgccgcggcagctacctcacaaacaaaaatagagaaaaataaaaactcaagctcggaatgtactgccgccgcccgctcgccgacgcaaatggtggtggtgggtgtctccaggcgactaggcctccgctttgctgttgatcgccagcgtgaagtagatcagtatcgttgtccccacgctcgacagcgttgcgaacaagaggagaatcttccgagggttgatggacgtgaaccggctaatgaatcttttgctcctcccttccccagaatcaacaagaacaggtgtgcaatgtggagcgaccagcgccttgttctgacccaggggctgctgctccagttgagacggcacaactttgatgacaagttttttcgccaaatcctcttgctnctgctcgcc

SEQ ID NO: 8858 - DNA, 585 bp, Zea mays
  Clone ID: LIB3061-106-Q1-N6-F3
ggaaatgtaacttcttatttctaggaggccacatacatcagccaaaaaacttcattattgaattacaactaataagcaatctaaaagatggcaccgccaatgatgtgttgttggtagaaggctgctgggtttgtcaaagcaagttggacaaagggcagcaactgttgcagttgtaagagggttgcggggttagccacaaactgctggtagaacggaagcaattgttgttgtttcaaaaaggaagtggggcttgttgtagctagctggccaaatggtagtagtatttgctgctggaaataagcagaggggttcagtgcggccaattggttaaatggaagaaattgttgctgctgagagtaggcagtagctagctggctgaatggtagtagttgttgttgttgtaaataagcagcagggttcagtgtagacagttggttgaatggaagaaattgttgttgctgagagtagggagaaaggtttgccagagctacttggctgatcactggtagcacgagttgttgcagctgttgtgccctgatggtttgtaccaatgactgcaccaaagatagggctggcgattgttga

SEQ ID NO: 8859 - DNA, 585 bp, Zea mays
  unsure (1)..(585): unsure at all n locations; Clone ID: LIB3061-106-Q1-N6-F8
cattgttcattcagtcattgctcacactgacctgccccctggtgatgcgtgacacattattactcaatcatcgccgctaaagactcaactagctagctagccagcggctacctacagcacatagtttcttcagtgggggacaccgccggcagcagcgtaggggcatggagtcggctgctgcaggccgcacatcgccgtcagttgctgcgctatctgcgccgccaacagccccgcgacctggccgctttgcggctgctgctgcaggatggactggaggaccaagccgaagatcgcctggtaccggtgctgcggctccacctgcctgagctgctggcaacactgctgccgcaacgactggcactgaggcgagcagtagggcgtcgccgtcgggctgcactgatgcctcagaaactcgacgcactggcccaggatcggggtgctgccaacgccgcaggttccctgcagctggcacgggcttggatgcggctgttggcacgggcatgggtgtggctggggatgaggctgaggccggggcggntgagtagggtagtggcatggtggcggcggcagatgaaccggcggcgg

SEQ ID NO: 8860 - DNA, 563 bp, Zea mays
  Clone ID: LIB3061-106-Q1-N6-F9
ggaacagatggagtactttttttcttttcatttcaattgttcattcaggtcattgctcacactgacactgccacccatggtgatgcgtgacacattattactcaatcatcgccgctaaatgactcaactagctagctagccagcggctatactacagcacatagtttcttcagtgggggacaccgccggcagcagcgtaggggcatggagtcggctgctgcaggccgcacatcgccgtcagttgctgcgctatctgcgccgccaacagccccgcgacctggccgctttgcggctgctgctgcaggatggactggaggaccaagccgaagatcgcctggtaccggtgctgcggctccacctgcctgagctgctggcaacactgctgccgcaacgactggcactgaggcgagcagtagggcgtcgccgtcgggctgcactgatgcctcaggaactcgacgcactggcccaggatcggggtgctgccaacgccgcaggttccctgcagctggcacgggcttggatgcggctgttggcacgggcatgggtgtggctggggatgaggc

SEQ ID NO: 8861 - DNA, 589 bp, Zea mays
  unsure (1)..(589): unsure at all n locations; Clone ID: LIB3061-106-Q1-N6-G12
ggaacaatacttttttcttttcatttcaattgttcattcaggtcattgctcacactgacactgccacccatggtgatgcgtgacacattattactcaatcatcgccgctaaatgactcaactagctagctagccagcggctatactacagcacatagtttcttcagtgggggacaccgccggcagcagcgtaggggcatggagtcggctgctgcaggccgcacatcgccgtcagttgctgcgctatctgcgccgccaacagccccgcgacctggccgctttgcggctgctgctgcaggatggactggaggaccaagccgaagatcgcctggtaccggtgctgcggctccacctgcctgagctgctggcaacactgctgccgcaacgactggcactgaggcgagcagtagggcgtcgccgtcgggctgcactgatgcctcagaaactcgacgcactggcccaggatcggggtgctgccaacgccgcaggttccctgcagctggcacgggcttggatgcggctgttggcacgggcatgggtgtggctggggatgaggctgaggccggggcggntgagtagggtagtggcat

SEQ ID NO: 8862 - DNA, 497 bp, Zea mays
  Clone ID: LIB3061-106-Q1-N6-G4
gttccggttagagcgcagcgcaccgcgcacgacgaacgaatgtacaggtcgcacaaacatagtacggggtgcaggagcaggactcgctcgaccactggcactgctcaggaggaagacatggaagcaggacgctaggcggagaagaggccgtcggcggcggccagcgcgagcccggtcttgggctccagctgcaccgcgacggtgaatctgaccccggacgcggcggcggaggcggactccacccaagagctccacaccttggccacggccccgaagttcctcgtctcgccgccggtcccgctgtcgctaccgctgtccccgccgggggcgcctcgccttgccgtcttctcgaactgctccgccaccagcaacgcgatgtccgccatcctctctctcgtatctgctgggctcgctgacgacgatctcactctgctcttgtcggttgttgctctgctctagtgctctggtgactgtggaagctgtctgtgaaaactgcg

SEQ ID NO: 8863 - DNA, 136 bp, Zea mays
  Clone ID: LIB3061-106-Q1-N6-G5
ggttgtgttgtttttttttttggggtggtctttggctgttttgggaaaaggtagtttggttgtttgagggggaagtatttaaggggggggggggggggttttataaaattttaataaaaaaatggggtgggggggg

SEQ ID NO: 8864 - DNA, 430 bp, Zea mays
  unsure (1)..(430): unsure at all n locations; Clone ID: LIB3061-106-Q1-N6-H1
cttttcttttttttttttttttctttttgcggtggctttctttttttttttctttcgtttttttctccttcctttttttctttggcctcttttggtccttttttcgccgggtgggcgctctcttgcgctccccccctttcggggttttccgggggggtgncccccttcttgtgtttctccccccccctttcgcccctggcccccccgggttttttttgggggtttggggggccccccccccccctctgtgggtggctttgggctcctgccctggttgccccccccctcttggtgcctggggggggtcccccctcccccttggtggggggggtgcgccccccctggtttcttgcgggcccgtgggtcccccccggtttcccggccccgtccccctgtgggctcccccctttcctttttttggggttttttg

SEQ ID NO: 8865 - DNA, 107 bp, Zea mays
  Clone ID: LIB3061-106-Q1-N6-H11
agaatctagaaaagtactttcttatttctgggacgccacaaacatcatccaaaaacttcattattgaactataactcataagcaatctaaaacagggcaccaccaat

SEQ ID NO: 8866 - DNA, 587 bp, Zea mays
  Clone ID: LIB3061-106-Q1-N6-H6
catccaaaaaatttattattgaattacaactaataagcaatctaaaagaggcaccaccaatgatgtgttgttggtaggaggctgctgggtttgtcaaagcaagttggacaaagggcaacaattgttgtagttgtaagagggttgcggggttagccgcaaactgctggtagaaaggcagcaactgttgctgtgtcaagaaggaagcacggcttgctgcagctagctggctaaatggtagtaatatttgctgctgcaaataagcagcgaggttcagtgcggccaattggttaaatggaagaagttgttgttgatgagagtaggcagtagctagctggctgaatggtaatagttgttgctgcaaataagcagcagggttcagtgtagatagttggttgaatggaagaaattgttgttgctgatagtagggagaaaggtttgccagagctacttggttgatcacaggtagcacgagttgctgcagctgctgtgccttgatggtttgtaccaatgactgcaccaaagatagggctggcgattgttgaaacaagggtgataaaggtatgttgcttgctgcgattgcttgttgg

SEQ ID NO: 8867 - DNA, 653 bp, Zea mays
  unsure (1)..(653): unsure at all n locations; Clone ID: LIB3061-107-Q1-K6-A10
tcgccctctccagcgctccaccccgcgtcgcggacccccgacccgccccccgcctcgtcctgttcgcgtccccctttccccgcgtgtgcgttggccggctggttccggatgagggggttgctgtcggtggaggccgctggcgcggcgtcgtcgtcggcctcggcctcggtgctcaacggcgccgtggactggtggcgcgacgtcaacgagtcgccgctgtggcaggaccgcatcttccacgcgctcgccgtgctctacggcatcgtctccgccgtcgcgctggtccaattgatcagaatcgagtgcagggtgccagagtatgggtggacgacgcagaaagtgttccatttcctaaacttcctcgtgaacggcgtgaggtctgccgtgttcgtgctgcggcggaatgtgcaactcgtagagcctgagataatacagcatgtgcttctagatatgcctgggcttgcattcttcacaacatatgcacttctagtgctcttctgggcagagatttattatcaggcacgtgcaatgtccactgatgggcttagaccaactttctattggatcaatagcgtggtttatgcaattcagataatcctnatggttggttttgtggtnggaaaccagttcgaattatggtcatcttgtcaaaa

SEQ ID NO: 8868 - DNA, 619 bp, Zea mays
  Clone ID: LIB3061-107-Q1-K6-A11
gcgttcgctccaacaagcaatcgcagcaagcaacatacctttatcacccttgttgtttcaacaatcgccagccctatctttggtgcagtcattggtacaaaccatcagggcacagcagctgcagcaactcgtgctacctgtgatcaaccaagtagctctggcaaacctttctccctactctcagcaacaacaatttcttccattcaaccaactgtctacactgaaccctgctgcttatttgcagcaacaactattaccattcagccagctagctactgcctactctcagcaacaacaacttcttccatttaaccaattggccgcactgaaccccgctgcttatttgcagcagcaaatactactaccatttagccagctagctgcagcaaaccgtgcttccttcttgacacagcaacagttgctgcctttctaccagcagtttgcggctaaccccgcaaccctcttacaactacaacaattgttgccctttgtccaacttgctttgacagaccgagcggcctcctaccaacaacacatcattggtggtgccctcttttagattgcttattagttgtaattcaataataaagttttttggatgatgtatgtggccaaccag

SEQ ID NO: 8869 - DNA, 606 bp, Zea mays
  Clone ID: LIB3061-107-Q1-K6-B1
tttgcttatggattgtggggaatggaaccactctgttcaacagcaattctgtttggcaaaatattgtcaaggacacaagggatagaggttgttttttaaatgccactgatgagaaggagttgttgaatgcaattttcaagcttgctgttgagtatcctcacgcggacaatttagctggcgaggagacaaggcagcgattgagtaccaggatgagtctattcaatgtcgctgaggcaacaattacaagatcctagaagaaaacccgtggcagctctacactacaataagggtgataaatatgtctcgcccaatggaagatatcatatttagacatgatcaaggtagcaagatgttgaccccatgggtccttttggtggaataatgatagagtgcggcaccaatcaacctattgagaaaatgctttcaacttgaaaaatcccccccggggtttttttcaattttttaaaagggtgcccccaaaagagttttttttttttccccccccccctttttttttttgggtgtttcttttgttctcttggttgttttttttcccctttttttcttttctctcttttttggtttggttttttttttttttgtctt

SEQ ID NO: 8870 - DNA, 632 bp, Zea mays
  unsure (1)..(632): unsure at all n locations; Clone ID: LIB3061-107-Q1-K6-B10
gcananacggcgtcttcgtactcgcctatctccgcgacccaaagcgttcccccttctcccattcttctctcatttctcaccaccgccgccgctaccccctttcgacaacaccatgagggagtgcatctcgatccacatcggccaggccggtatccaggtcggaaacgcgtgctgggagctgtactgcctcgagcatggcattcaggctgatggtcagatgcccggtgacaagaccattgggggaggtgatgatgctttcaacaccttcttcagtgagactggcgctgggaagcacgtcccccgtgctgtttttgttgaccttgagcccactgtcatcgatgaggtgaggactggcacctatcgccagctcttccatcctgagcagctcatcagtggcaaggaggatgcagccaacaacttcgctcgtggtcactacaccattggcaaggagattgttgacctgtgccttgaccgcatcaggaagcttgcagataattgcactggtctccagggcttcctcgtcttcaacgctgttggtggaggaacgggctctgggcttggttctctcctcctggagcgcctgtctgttgactatggcaagaagtccaagctcggtttcaccgtgtacccat

SEQ ID NO: 8871 - DNA, 584 bp, Zea mays
  Clone ID: LIB3061-107-Q1-K6-B3
gcgttcgctcgtcaccggtggcgaactcttcgacaaaatcgcctcgcgtggaaggctgaaagaggatgacgcaaggaagtacttccagcagctgatcaacgctgtcgattactgccatagccgaggcgtctaccaccgcgatctcaagcctgaaaatctcctgcttgatgctagcggcacgctcaaggtttcggattttggactgagcgcactatctcaacaagtccgagaggatggtctgctgcacacaacctgtggaactcccaactatgttgctcccgaggttataaacaataagggctatgatggagctaaggctgatctgtggtcatgtggagtgattctctttgtcctcatggcggggtacctcccatttgaagattcgaacctgatgtcgctctacaagaagatcttcaaagcggatttcagttgcccgtcctggttctccacaagcgcaaagaagctcatcaagaagatacttgatcctaatgctaacaatagaataactattgcagagctcattaacaacgagtggttcaagaaggggtatcagcctcccagatttgaaacagcagatgttaatc

SEQ ID NO: 8872 - DNA, 654 bp, Zea mays
  unsure (1)..(654): unsure at all n locations; Clone ID: LIB3061-107-Q1-K6-B4
gcgttcgtacaacatagnaagcacaatagtgtaccaacaatggcaaccaaaatttttgcttccttatgctccttggtctttctgcaagtgctgctaccgcgaccattttcccgcaatgctcacaagctcctatagcttcccttcttcccccatacctctcaccagcggtgtcttcagtatgtgaaaacccaattcttcaaccctacaggatccaacaggcaatcgcagcaggcatcttacctttatcacccttgttcctccaacaaccgtcagccctattacagcagttacctttggtgcatttgttggcacaaaacatcagggcacaacaactacaacaacttgtgctagcaaaccttgctgcctactctcagcaacagcagtttcttccattcaaccaactggctgcattgaactctgctgcttatttgcaacaacaactaccattcagccaactagctgttgtctacccccagcaatttcttccattcaaccaactagcaacattgaactctgctgcttatttacaacagcaacagctaccaccattcaaccagctagctaatgtgagccctgctgccttcttgacacaacaatagttgttgtcgttctacctgcacgctgcgcctaacgctggcaccctcttacactgca

SEQ ID NO: 8873 - DNA, 627 bp, Zea mays
  Clone ID: LIB3061-107-Q1-K6-B5
gcgttcgcagcaacacagttcctaccgcactgagccacctacctggtgaaccctgtcgcctacttgcaacagcagctgcttgcatccaacccacttgctctagcaaacgtagttgcaaaccagcaacaacaacaactgcaacagtttctgccagcgcttagtcaactagccatggtgaaccctgccgcctacctacaacagcaacaactgctttcatctagcccgctcgctgtggccaatgcacctacatacctgcaacaagaattgttgcaacagattgtaccagctctaactcagctagctgtggcaaaccctgttgcctacttgcaacagctgcttccattcaaccaactaactatgtcgaactctgttgcgtacctacaacagcgacaacagttacttaatccattggcagtggctaacccattggtcgctgccttcctacagcagcaacaattgctgccatacaaccggttctctttgatgaatcctgtcttgtcgaggcagcaacccatcgttggaggtgccatcttttagattacatatgagatgtactcgataatggtgccctcataccggcatgtgtttcctagaaataatcaattattggttgagatttatctcgat

SEQ ID NO: 8874 - DNA, 624 bp, Zea mays
  unsure (1)..(624): unsure at all n locations; Clone ID: LIB3061-107-Q1-K6-B6
gcnctcactcgaccatcgcctcgccgcagcacacacgaggccggcggcgccatggccatgaagctggacatgtccgcgctcgagaccaacttcgccaacctgaccgcctccgccggcgacgacacgtacttctccgccgaggcccccgacgtgccgtccatggtgctccccatctgcgacgacttcgacggcttccaggcggccaccaaggatatggtgaagaataagaaggggacgaccacgcttgccttcatcttcgacaagggcgtcatcgtcgccgctgattccagggccagcatgggcggttatatatcctcacaaaccgtgaggaaaattattgaaataaatccttacatgctggggacaatggctggaggtgctgctgattgccaattttggcataggaacctaggaaccaagtgtcgtctccatgagctttcaaacaagcgaaggatctctattgctggtgcttccaaactgttggctaacatcctttattcatatcgtgggatgggactgtcgattggtacaatgatcgctggatgggatgagaagggtcctggcttgtactatgttgacagtgagggtgcgcggctcgtggggaacagttctctgttggctctg

SEQ ID NO: 8875 - DNA, 610 bp, Zea mays
  Clone ID: LIB3061-107-Q1-K6-B7
cctctctgtcttcgctcggcgatctatcaaggaggtgagggggagatggcggagaatccgcagctgtttgggaacgggatgccggtgccgttctacggcgagatgttcgtcctcgtccgcgacggcgtcgagttccacgtcgacaagatcccgtcagctcctggaggtcatgtgaaaacaaaaggcacaatttacctgtccaatataaggatggtgtttgttgccagcaagcctgttggcaacttctttgcttttgatatgccactgttgtttgtgcatggtgagaagttcaatcagcccatatttcactgcaacaacatctctggattcgttgaaccagtcgttccagacaatcagaacagggccctgtactcaactcacaccttcaagatcttgttcaaggaaggcggctgtggtactttcgttcctctcttccttaacctgactgcatctgtgcggcgctacaatgagtttgaagcccagtctgctgctaacatggcaccgcgtgtggatcctctgcaagccgcgcagactcctgtcgatgatatgatgcgtcatgcgtatgttgacccaaatgatcctaccaagatttaccttcagcaacctgccc

SEQ ID NO: 8876 - DNA, 606 bp, Zea mays
  Clone ID: LIB3061-107-Q1-K6-C11
caactcgttcggttgctcggacttcagcctcgagaacgactccaggacccctgacataacttcggtgcctgcgcccgttgccaccttggccgccgttggcgagtctgtgttcgtccagaacaccgccggccatgctgtggcgtctcctgcgacggggaacactggtgttgatctcgccgagttggagccgtatatgaatttcctgatggacggtggttcagacgactcgatcagcactctcttgagctgtgatggatcccaggacgtggtcagcaacatggacctttggagcttcgaggacatgcccatgtctgctggtttctactgaggctgaggcccagcgactggtgcttgtgtacatagggggggacaaagggtaagagcctgcagtaacagagattggctctttctggtacttgcaatttctatcccttcaactctttcttccgcccccgtgtttcaggaataatgttctggagatgaagaaacgcttgcgtggggcgtgcctgcagcacgcgtgtagtagctgcggtattagtatatatgcttagatgttcagtcacttcctttaagtacaatttggcgctggacatgtaccttatttta

SEQ ID NO: 8877 - DNA, 629 bp, Zea mays
  unsure (1)..(629): unsure at all n locations; Clone ID: LIB3061-107-Q1-K6-C7
gcgttcggcctcgccaagcaaggcttcctttcctctcccttcccgtccaaaatggaagcagagtacccccaccagcaggcggccccctcttactccacgaccgccaccgtcttctggccgtacgcgactcgccgcagaaagagagccgaggacggcagcgacctctcgctggcgtcggatatggatctcgacgccgacgcgcagcgcgccgcagataagctgaaagcagtgtcagaggaacttggacatgagatccgggtttttttcaagtgagaactttgctctacaaccgagcaagctgcctagtgcagatcatgaggaaggtgacgacttttatgagcttcagcctgctgattactacaacttgatttcaaacaggatgggagagctatctaaaatgctaaagactcgcaagatgcgggaagcagaacttgctgctcagcgagcaaagcgaacaaaggcagtaatgagggtgcgattccctgatggctacatacttgaggctgactttcttccatcagagaggattcatagntctagtggacctgctcatgaaagtacttgctagaccagatctgccattctatctctatacagtacctccaaaaagcgaatactggacacatcac

SEQ ID NO: 8878 - DNA, 608 bp, Zea mays
  unsure (1)..(608): unsure at all n locations; Clone ID: LIB3061-107-Q1-K6-C8
gcttaattgaatccaatgtacgtaacatgatggaatccatactcaatgagagaatgattcagaatccagaatttcttcgccagttaacatctcctgaacattgcagcaattaatttcattccagcagtctttgatgtcacaacttggccaacaacaagctggacaggagcggacacaatcaggctctggtgcaggcaatgtcaacctcaacaccttgatgaacatgttcagcgggcttggtgctggtggtggcctaggtgttccaaatgctcctaatgtgccgccagaagaactgtacgccacacaattagctcagctccaagaaatgggtttctttgacacacaagagaacatccgagccttggccgctaccgctggaaatgttcatgctgcagtggagcgacttcttggaaatatgggctaatagaatatgatgatcataactgtactcagatattgtgatttttagttggcattgtgagatcatgtctggctcattggttttacacccgagggtgagaggcggcgtctagattntgtgttcaagnatgaatanagagtgtaccgggnggaacctttcatatacatatnggtctggtgtcatggtt

SEQ ID NO: 8879 - DNA, 653 bp, Zea mays
  unsure (1)..(653): unsure at all n locations; Clone ID: LIB3061-107-Q1-K6-C9
ttagaccaactatcaacatagnaaagcacaatagtgtaccaacaatggcagccaaaatattttgcctccttatgctccttggtatttctgcaagtgctgctacggcgaccattttcccgcaatgctcacaagctcctatagcttcccttcttcccccgtacctctcaccagcggtgtcttcggtatgtgaaaacccaattcttcaaccctacaggatccaacaggcaatcgcagctggcatcttacctttatcacccttgttcctccaacaatcatcagccctattacagcagttacctttggtgcatttattggcacaaaacatcagggcacaacaactacaacaacttgtgctagcaaaccttgctgcctactctcagcaacagcagtttcttccattcaaccaactagctgcattgaactctgcttcttatttgcaacaacaacaactaccattcagccagctacctgttgcctacccccaacaatttcttccattcaaccaactggcagcattgaactctcctgcttatttacagcagcaacaactactaccattcagccagctagnctggtgtgagccctgctaccttcttgacacaaaccacagttgttgccgttctaccagcacgctgcgcctaacgctggcaccc

SEQ ID NO: 8880 - DNA, 448 bp, Zea mays
  unsure (1)..(448): unsure at all n locations; Clone ID: LIB3061-107-Q1-K6-D10
ttggtgtggcacaagttaatacctctacgcagaacttggcctagaggcgggatctcaggagtgcgagaatgagagctacaagaagctgattgcaggacattgaagcccagccaagcattgcgggtcagaaagtgctgaaatccttcttgcacaagatctacaggcagaagtagggtgctcgtgggtaaacgagctcaggagtcgttactccttcgcatgcttgacataaccggacttcctcacctggttgctctagtatgatgtggagcgtctagttaaaaaaaatcgatgtagtatgaagcaccttgctgctctgaatattaacaggcaattaaggcaaggtgctgtttcggtttggtggaccgcatgttgcagataataaattagttgttttgtcnaaaaaaaacaaagcttcatacatatgatgataaaaaaaaaaaaaataacg

SEQ ID NO: 8881 - DNA, 486 bp, Zea mays
  Clone ID: LIB3061-107-Q1-K6-D11
aacattgctgccttttacccacggttgtgggcaaacattaacgccttcttgcaacaacaacaattgctgccattctacccacaggatgtggcaaacattgtcgccttcttacaacaacagcaattgctgccatttagccaactcgctttgacgaatcctaccaccttattgcatcagcccaccattggtggtaccatcttctagattttttatgctttatactgtaataataaatttctcatactgatatgtgcaacttctcagtaataaaagattaaaaaataaaaaaaaaaagaaaaaaaaaaaaaaaaaaaaaaaaaaaaaaaaaaaaaaaaaaaaaaaaaaaaaaaaaaaaaaaaaacaagcaaactataaaaaaacctatatacctaactcttaaaaacaaaaaaaatgtaaaaggggggcgccactgtttaagactgaaaaaattctggtcgatttgcaagcaacaattattattttttt

SEQ ID NO: 8882 - DNA, 475 bp, Zea mays
  unsure (1)..(475): unsure at all n locations; Clone ID: LIB3061-107-Q1-K6-D12
gttgtagttgttgtgccctgntgttttgtgccaataaatgcaccaacttgtgctagcaaaccttgctgcctactctcagcaacagcagtttcttccattcaaccaactaggttcattgaactctgcttcttatttgcaacaacaacaactaccattcagccagctacctgctgcctacccccagcaatttcttccattcaaccaactagcagcattgaactctcctgcttatttacagcagcaacaactactaccattcagccagctagctggtgtgagccctgctaccttcttgacacaaccacagttgttgccgttctaccagcacgttgcgcctaacgctggcaccctcttacaactgcaacaattgctgccattcaaccaacttgctttgacaaacccagcagtgttctaccaacaacccatcattggtggtgccctcttttagatttcttatgagttatagttcaataat

SEQ ID NO: 8883 - DNA, 640 bp, Zea mays
  unsure (1)..(640): unsure at all n locations; Clone ID: LIB3061-107-Q1-K6-D3
gcgttcgtagcaacatagnaaagcacatagtgtaccaacaatggcagccaaaatattttgcttccttatgctccttggtctttctgcaagtgctgctaccgcaaccattttcccacaatgctcacaagctcctatagcttcctttcttcccccatacctctcaccagcggtgtcttcagtatgtgaaaacccaattcttcaaccctacaggatccaacaggcaatcgcagcaggcatcttacctttatcacccttgttcctccaacaaccgtcagccctattacagcagttacctttggtgcatttgttggcacaaaacatcaaggcacaacaactacaacaacttgtgctaggaaaccttgctgcctactctcagcaacagcagtttcttccattcaaccaactggctgcattgaactctgctgcttatttgcaacaacaactaccattcagtcagctagctgctgcctacccccagcaatttcttccattcaaccaactggcagcattgaactctgctgcttatttacaacagcaacagctaccaccattcagccagctagctgatgtgagccctgttgccttcttgacacacaacattgttgccgttctacctgcacgctgcgcctaacgctggcac

SEQ ID NO: 8884 - DNA, 625 bp, Zea mays
  Clone ID: LIB3061-107-Q1-K6-D4
gcgttcgttcacggcttgcattctctacgttttattgcccataaactgtcaagattgctccacatactttgtttattcatccaccgctgtaatctggtaaaagggtaacacgatgcctctcccggttggtcattgggttgttggttggctacagatcggtcgttacccgaggcacgtgatcagcctgttcttccggctgctgtatccgtggtactggccttcctcttgctggaacttcgtgatgacctgtgccatgaccgtgtactactacatcctgaacctgctggtgtcgtgttgggagaacctgaggcggcccagtcaccggagaacgcacggtgaatgaagacgcggcagcccatccagtggcaccttgtgttgttgttgttgttcatttttctttcgtttgcgcgagtggtgtagtagttagtagcagcggcttatgtgttcgtcgcgaaacaacattccctgtataatataaactgctgtacttgttcagttgatgttcatataggaagagccgaagaggaacggctggtaatggaggggagcgtgtgcatttctcgcttcgtttctggggcatttacttatctgcagcgtccttccaccattgatctccaaatccgtg

SEQ ID NO: 8885 - DNA, 574 bp, Zea mays
  unsure (1)..(574): unsure at all n locations; Clone ID: LIB3061-107-Q1-K6-D5
cccagcgtccgaacacatanaagtggaatccagtagcaacaatagagcaacaatggcgaccaagatactttccctccttatgctccttgctctttctgcatgtgttgctaacgcgacaattttccctcaatgctcacaagctcctatagcttcccttcttcccccataccttccatcaatgatagcttcagtatgtgaaaacccagctcttcaaccctataggctccaacaagcaatcgcagcaagcaacatacctttatcacccttgtttcaacaatcgccagccctatctttggtgcagtcattggtacaaaccatcaaggcacagcagctgcagcaactcgtgctacctgtgatcaaccaagtagctctggcaaacctttctccctactatcagcaacaacaatttctgccattcaaccaacttgctttgacaaacccagcagcattctaccaacaacccatcattnggtggtgccctcttttagatttcttatgagttatagttcaataataaagttttttgtctgatgtttgtggcttcccagaaaaagaaatacatttctagattctt

SEQ ID NO: 8886 - DNA, 634 bp, Zea mays
  unsure (1)..(634): unsure at all n locations; Clone ID: LIB3061-107-Q1-K6-D6
ggacttcanaaacacacctagcgaacgcactagcaacgacctaacaacaatggcttccaagacattatccctccttgcgcttcttgccctttttgtgagtgcaacaaatgcgttcattattccacaatgctcacttgctccgagtgccattattccacagttcctccctccagttacttcaatgggcttcgaacacccagctgtgcaagcctataggctacaacaagcgcttgcggcgagcgtcttagaacaaccaattgcccaattacaacaacaatccttggcacatctaaccatacaaaccatcgcaacgcagcagcaacaagcactgagccacctagccgtggtgaaccctatcgcctacttgcaacaacagctgcttgcatccaacccacttgctttggcaaacgtagctgcataccaacaacaacaacagttgcaacagtttctaccagcgctcagtcaactagccatggtgaaccctatcgcctacctacaacagcaacaacttctttcatctagcccgctcgctatgggcaatgcacctacatacctgcaacaacagttgttgcaacaacagttgctgcaacaaattgtaccagctcttactcagctagctgtggcaaaccctgct

SEQ ID NO: 8887 - DNA, 560 bp, Zea mays
  Clone ID: LIB3061-107-Q1-K6-D7
gcgttcgcactagcaaaatacatagtgaagtacactagcaacatcttagcaccaatgggagccaagattttttccctccttgccctccttgctctttcagcaagcgctgctacctctactattattccacaatgctcacaacaatacctctctccggtgacagccgcgggatttcaacacccaactatacaatcctacatgctacatgaggccatcgtagcaagcatcttacggtcattagcattaaccctccaacagccatatgccctattgcaacaaccatccttagtgcatctgtatctccaaagaatcgcgacacaacaactacaacaacagttgctaccaacaatcaatcaagtagttgcagcgaaccttgctgcttatctccagcaacaacaatttcttccattcaatcaactagctggggtgaaccctgctgtctacttgcaggcacaacaactactaccatttaaccaacttgtcgggagccctgatgccttcttactgcaacaacagcttctgccattccatctgcaagctgtggaaaacattgcttcttt

SEQ ID NO: 8888 - DNA, 658 bp, Zea mays
  unsure (1)..(658): unsure at all n locations; Clone ID: LIB3061-107-Q1-K6-E12
gcaacatagnaaagcacaatagtgtaccaacaatggcagccaaaaattttgcctccttatgctccttggtctttctgcaagtgctgctacggcgaccattttcccgcaatgctcgcaagctcctatagcttcccttcttcccccgtacctctcaccagcggtgtcttcggtatgtgaaaacccaattcttcaaccctacaggatccaacaggcaatcacagctggcatcttacctttatcacccttgttcctccaacaatcatcagccctattacatcagttacctttggtgcatttattggcacaaaacatcagggcacaacaactacaacaacttgtgctagcaaaccttgctgcctactctcagcaacagcagtttcttccattcaaccaactagctgcattgaactctgcttcttatttgcaacaacaacaactaccattcagccagctacctgctgcctacccccagcaatttcttccattcaaccaactggcagcattgaactctcctgcttatttacagcagcaacaactactaccattcagccagctagctggtgtgagccctgctaccttcttgatacaaccacagttgttgccgttctaccagcacgctgcgcctaacgctggcaccctcttacaaactgcacaattg

SEQ ID NO: 8889 - DNA, 654 bp, Zea mays
  unsure (1)..(654): unsure at all n locations; Clone ID: LIB3061-107-Q1-K6-E6
gcgttcgcagnaaacacaccaagcgaacgcactagcaacgacctaacaacaatggctaccaagatattagccctccttgcgcttcttgccctttttgtgagcgcaacaaatgcgttcattattccacaatgctcacttgctcctagtgccattattccacagttcctcccaccagttacttcaatgggcttcgaacacctagctgtgcaagccaacatgcaacaacaagcgcttgcggcgagcgtcttacaacaaccaattgcccaattgcaacaacaatccttgccacatctaacaatacaagccatcacaacgcaacagcaacaacagttcctaccagcactgagccacctagccatggtgaaccctgccgcctacttgcaagagcagctgcttgcatccaacccacttgctctggcgaacgtagttgcaaaccagcaacaacaacagctacaacagtttctgccaacgctcagtcaactagccatggtgaaccctgccgcctacgtacaacaacaacaactgctttcatctagcccgctcgctgtgggcaatgcacctacatacctgcaacaacaattgttgcaacagattgtaccagctctgactcaactagctgtggcaaaccctgttgcctacttgcaacagctgctt

SEQ ID NO: 8890 - DNA, 566 bp, Zea mays
  Clone ID: LIB3061-107-Q1-K6-F10
aagaagactacttcttttcttcagctttataatgctgagaggaaggcttcattttgttggtaggctttttgtgaagctctgggaagccatctgaaatattgacaaaactgaatgcaatggctggattttctccaaatgaagaaattgagctgtacgaggaaattaagtttgagccaaatgtgatgtgcgaacatattgacaagaaacttactttccgctctagtcagcttgaagacggagacattatctgtttccaaaaggctcctgttccagatggtgatgcacaagtgcgctatccagatgttccttcattcttggagtatgttcacaataggcaggttgtgcactttcggtgtctggacaaaccaaaggatgatgatttttctttggaattgtcgaagcttcatacatatgatgatgttgttgagagagttgcacatcaacttgggttggatgatccatcaaagatacggcttacgtctcacaattgttattctcagcaacctaaaccacagcctattagatataggggggtagcacatctactggatatgcttgttcattat

SEQ ID NO: 8891 - DNA, 605 bp, Zea mays
  unsure (1)..(605): unsure at all n locations; Clone ID: LIB3061-107-Q1-K6-F11
cgttcgtaacaagcaacatagnaaagtggaatccagtagcaacaatagagcaacaatggcgaccaagatattttccctccttatgctccttgctctttctacatgtgttgctaacgcgacaattttccctcaatgctcacaagctcctatagcttcccttcttcccccataccttccatcaattatagcttcaatatgtgaaaacccagctcttcaaccatataggcttcaacaagcaatcgcagcaagcaacatacctttatcgcccttgttgtttcaacaatcgccagccctatctttggtgcagtcattggtacaaaccatcagggcacaacagctgcagcaactcgtgctacctctgatcaaccaagtagctctggcaaacctttctccctactctcagcaacaacaatttcttccattcaaccaactgtctacactgaaccctgctgcttatttgcagcaacaactattaccatttagccagctagctactgcctactctcagcaacaacaacttcttccatttaaccaattggccgcactgaaccccgctgcttatttgcagcagcaaatactactaccatttagccagctagctgcag

SEQ ID NO: 8892 - DNA, 637 bp, Zea mays
  Clone ID: LIB3061-107-Q1-K6-F5
tatcgatcgggtactcgggtcggtcttgccgtgcgtgcgtggctgcgcgaaccagcccacgctcccactccccgcccgccaccgccgggtccctctagggttttgccgcgatgtcgctccggccgagcgagcgggagcagatgcggaagggcaactacaagcagacggtggacgccgaggagagccgccgccgccgcgagggccagatggtcgacatccgcaaggccaagcgagaggaaagcctccagaagaagcgccgcgatgggttccccgccgccggcgccgtgccgccgatgggccactccaccgcactccagcagaagctcgatggcttgccggcgatggtacaggccgttcactccaacgaccccactgtgcagcttgaggccaccacgcagttcaggaagctgctctccatagagcgtagtcccccaattgaagaggtgatcagcacaggagtcgtgccccgattcattgagttccttacacgtgaggaccatccacaactccagtttgaggctgcatgggcgctcaccaacattgcatcaggcacatcagagaacactaagtggtggttgagagtggtgctgtgcccatctttgttaagctcctcaactccaatacgaggatgttcgtg

SEQ ID NO: 8893 - DNA, 628 bp, Zea mays
  Clone ID: LIB3061-107-Q1-K6-F6
cgtggggttctccggggttcggtttcgtgggtgagcggatcgagatggcggcgtcggatgttgagtaccgctgcttcgtcggcggcctcgcctgggccacggacgaccactccctccacaacgccttcagcacctacggcgaggtcctcgagtccaagatcatcctcgatcgggagacgcagaggtcccgcggcttcggcttcgtcaccttctccacggaggaggcgatgcggaacgccatcgagggcatgaacggcaaggagctggacggccgcaacatcaccgtcaacgaggcccagtcccgcggcggccgtggaggcggcggcggcggcgggtacggtggtggccgtggaggcggcggctacggcggtggcgggcgccgtgatggcggcggcggctacggcggtggcggcggctacggtggtggcggcggcggctacggtggtggtggcggcggctacggcggtggcaaccgtggcggcggctacggcaactccgacgggaactggaggaactgagcggtggggcccgcgcggccaagttatcctgttcgctaccgtgttgtttaccctagtccagagtgtttatcttcgttcgtctcgtgtttgttgttgcccatctgtgtttt

SEQ ID NO: 8894 - DNA, 648 bp, Zea mays
  unsure (1)..(648): unsure at all n locations; Clone ID: LIB3061-107-Q1-K6-F8
gcgttcgncaaaacagttatcttatgttgtcatcagataactaggtgttgatagaatgcttgtccaaccttgtattgtgtgctttgttggtgaatacctttgcagggtcaggatagtgttgttttggaaatgaatataaatggtcggtgtctacatttggatacagtgagtttgagaatgtggtatgttttattttgttcttgttgcatacctgatttttttggttctttttatttctacatattagatattagcatgagaagtttgtatatctgtatagtaacttatgtcagatctaatgtactatgagtcattctttattagatattgagatattacctgcatgttagacatcagtgtgtgagacttttatgtggcttttcccctttccttgtacaaatcctatagtaggcttttatgtggcacaaacctgcagtaagatgcgccttattcccttttgctttgtaatctgcttgttattaatatgcctcgttgactacacagttcagcctaaatccccaaccattatagaagatgttctggacttctacgtctaaagttaactaacggtctaggatctgcttccatttacacttttttacttcaagagagtaagtagttgccagagcactttttccacatatttgt

SEQ ID NO: 8895 - DNA, 635 bp, Zea mays
  Clone ID: LIB3061-107-Q1-K6-G10
gcgttcgctagtgggcgcaccaccccgcttgtgcatcccatcccacgtacctgcgtccaactgttgccaccggcgcccggcggtgaccgaccgaccgccagccccattatttcctttcgctttctctagcataccttgccaccaccagctgcccgggtccatgctaaagcagggagggtgccgtgcgagttcccgggcctgaagatcgggttccacgtggaggagtactcgaaccccgtctacttcgcggtgctggtggagtacgaggacggcgacggcgacgtggtgcaggtggacctgatggagtccaagacggcgcgcggcccgccgacggggcggtggacgccgatgcgcgagtcctggggctccgtctggcgcatggacaccaaccaccgcatgcagccgcccttctccatccgcatccgcaacgagtccggcaagacgctcgtcgccaacaacgtcatcccggccaactggcgccccaacaccttctaccgctccttcgtccagtacagctaaccgatcgggaatccgtgccctgcccgcaattggagctggctggctggggcgctactcggctcggtcaccatcgtctacagtactatactatgctctactaccactagactgctgct

SEQ ID NO: 8896 - DNA, 550 bp, Zea mays
  unsure (1)..(550): unsure at all n locations; Clone ID: LIB3061-107-Q1-K6-G3
gntttccgcgtctctcccgctgcttctccaactccgccgccgccttgcctcgctcccctccggccgtcccgtcggccgtcgcccgcaagctctgcatcgcttctccagcttcagccccagccgccgcctccggatctgttctgtccgcctggtggggtggccttcaccgatccaacaaagggcgagttcgtcggcgcttcaaagctacgagattctttgccgtcgagttcactccatccccgcaacgagaaagctccaactcccccaccgtgcacaagaaaaacctagcggctataacccctaatcctaccagtaatccccaacatgcctcgtctctgccgccgcgcagctcctaccagaagaaggagaccgcgggaccagcgcgccgggagatgggttacaaggcgatgccgcgccggaacgtactttgggctctcaacaatgccgaggccaacggcgggacgacgtctgtgccgcggatggaggcggcgcccatgatcaagttcagtgggaggcaggatgtggagcgcctgctaaaatgaagggcaaa

SEQ ID NO: 8897 - DNA, 629 bp, Zea mays
  Clone ID: LIB3061-107-Q1-K6-G4
gcgttcgtaagacacatagtgtaccaacaatggcagccaaaaattttgcctccttatgctccttggtctttctgcaagtgctgctacggcgaccattttcccgcaatgctcgcaagctcctatagcttcccttcttcccccgtacctctcaccagcggtgtcttcggtatgtgaaaacccaattcttcaaccctacaggatccaacaggcaatcacagctggcatcttacctttatcacccttgttcctccaacaatcatcagccctattacatcagttacctttggtgcatttattggcacaaaacatcagggcacaacaactacaacaacttgtgctagcaaaccttgctgcctactctcagcaacagcagtttcttccattcaaccaactagctgcattgaactctgcttcttatttgcaacaacaacaactaccattcagccagctacctgctgcctacccccagcaatttcttccattcaaccaactggcagcattgaactctcctgcttatttacagcagcaacaactactaccattcagccagctagctggtgtgagccctgctaccttcttgatacaaccacagttgttgccgttctaccagcacgctgcgcctaacgctg

SEQ ID NO: 8898 - DNA, 632 bp, Zea mays
  unsure (1)..(632): unsure at all n locations; Clone ID: LIB3061-107-Q1-K6-G5
gcgttcgcttatcaagnanaagaagntgatgctggaatttcntgatatattgatatggagaaggagcttcaagaggtcataacgttaaccgaagagattttggcaactgcaaagcaaactgagagtgcccagaatgttgcaggtctatcaccgccaagctattcagctggagtgcagtctgagggactggatgacctttcacattcccataagtttgccgttggtactagagttcaagctgtgtggagtgaagatggagaatggtataatgcaaccgttgaagctttgacaccaaatggatactatgtagcctacgatggctggggaaacagtgaagaggtggacccagataatgtgaggctgcttgaggaagaagcagctgatgccttgggacaagctgaaaaggaagctgaagctacaaaaatggcaataaagaggaaaattgaacaagcagcaacatctgattttcaggcgcgtagcttgccggccaaacttcgtatcgaaccaagtgaccctgaggatgttaaagctgcaaagcgtaagaaaaacatgctttcaaatcaaaatcccgctttgagcagcttgaatttgcccaaaacaaaaggcagaatgcatggcagcagtttcaaacc

SEQ ID NO: 8899 - DNA, 401 bp, Zea mays
  Clone ID: LIB3061-107-Q1-K6-G6
gcgttcgtttaccattcagccagctagctactgcctactctcagcaacaacaacttcttccatttaaccaattggccgcactgaaccccgctgcttatttgcagcagcaaatactactaccatttagccagctagctgcagcaaaccgtgcttccttcttgacacagcaacagttgctgcctttctaccagcagtttgcggctaaccccgcaaccctcttacaactacaacaattgttgccctttgtccaacttgctttgacagaccgagcggcctcctaccaacaacacatcattggtggtgccctcttttagattgcttattagttgtaattcaataataaagttttttggatgatgtatgtggccaaccagaaataagaagttacatttccagatttt

SEQ ID NO: 8900 - DNA, 616 bp, Zea mays
  unsure (1)..(616): unsure at all n locations; Clone ID: LIB3061-107-Q1-K6-G8
gcgttcggggctttacagtttttggcttggtctaaacaaantacaggacttggatgggattctaagctaaggactgtgattgcaagtgatgaatactggaagaaaaatacaaagaactgaaatatggccctccagaaaatgaagatttcatgacacaaatgtttgaacatattgcagtggatggatctacatcatgcgctctaggtgaattttatgatgtggaaaatcatgagactgaggttgatggtattgatggagttgattttggcacatttgaggcagactgtgatgctcaatatgatgaatttgtgtttccttttgctagtggcagcaagtcaactcagtcgaagagaggcgtctcaactcagtcaaagaaaagagctagtcctactgttgttaatagcccactgaagcgctcaaagaatcccatggttaaggtcatgaataagattcataatactttggagatcaattgcaatatttcaaacaaagtaatccttggtatgccgtcacaaaagccttttgcattgcctttgtcatgaccttcttctctgtattcgacgttcctgtcttttggccaatacttctctgttattggattgtgctttttgtcctg

SEQ ID NO: 8901 - DNA, 590 bp, Zea mays
  Clone ID: LIB3061-107-Q1-K6-H10
acacatagaagcacaatagtgtaccaacaatggcagccaaaatttttgcctccttatgctccttggtctttctgcaagtgctgctacggcgaccattttcccgcaatgctcgcaagctcctatagcttcccttcttcccccgtacctctcaccagcggtgtcttcggtctgtgaaaacccaattcttcaaccctacaggtatccaacaggcaatcacagctggcatcttacctttatcacccttgttcctccaacaatcatcagccctattacatcagttacctttggtgcatttattggcacaaaacatcagggcacaacaactacaacaacttgtgctagcaaaccttgctgcctactctcagcaacagcagtttcttccattcaaccaactagctgcattgaactctgcttcttatttgcaacaacaacaactaccattcagccagctacctgctgcctacccccagcaatttcttccattcaaccaactggcagcattgaactctcctgcttatttacagcagcaacaactactaccattcagccagctagctggtgtgagccctgctaccttcttgaacaaccac

SEQ ID NO: 8902 - DNA, 503 bp, Zea mays
  unsure (1)..(503): unsure at all n locations; Clone ID: LIB3061-107-Q1-K6-H5
cactagcacatnanaagcacatagtgtaccaacatggcagccaaaatttttgcttccttatgctccttggtctttctgcaagtgttgctaccgcnaccattttcccacaatgctcacaagctcctatagcttcccttcttcccccatacctctcaccagcggtgtcttcaatgtgtgaaaacccaattgttcaaccctacaggatccaacaggcaatcgcaacaggcatcttaccattatcacccttgttcctccaacaaccgtcagccctattacagcagttacctttggtccatttggtggcacaaaacatcagggcacaacaactacaacaacttgtgctagcaaaccttgctgcatactctcagcaacatcagtttcttccattcaaccaactggctgcattgaactctgctgcttatttgcaacaacaattaccattcagccagctagttgctgcctacccccagcaatttcttccattcaaccaactagcagcattg

SEQ ID NO: 8903 - DNA, 609 bp, Zea mays
  Clone ID: LIB3061-107-Q1-N6-A3
ttttttttttttttttttttttttttttttttttttttttttttttttttttttttttttttttttttttttttttttttttttttttttttttttttttttttttttttttttttttttccaaaaaattttttttctttatttataatcccttccaattaaaagggttaattaaggtatttgctaacactgccccccagggggggggggaaaatttcttttttaatggccgttaaaggaaaaaactaccgggttgggtattttgtcaggggttcctttacttttttcctccagcccattttttcctaaaaaaaaaaaacccccggaattttttttaaaagggaaggaacctgtttttttaattttaaggccaaaaatcccccgaagtttttggtttacctgggccccaataaaccccgaaagttccccttgggtttttttttaaaaaaagaactccaaacccaccccttttttcccttggaaccggggaaggggttccacctgcctaatttgggggaaaaattttttttgaaacccttggaatttgggaaagcctaaggggttcccccccgggtttaattgggccttaaaaaacttaacccattgccc

SEQ ID NO: 8904 - DNA, 558 bp, Zea mays
  Clone ID: LIB3061-107-Q1-N6-A5
aagaatctagaaatgtactttcttatttctgggacgccacaaacatcatccaaaaaacttcattattgaactataactcataagcaatctaaaagagggcaccaccaatgatgggttgttggtagaacactgttgggtttgtcaaagcaagttggttgaatggcagcaattgttgcagttgtaagagggtgccagcgttaggcatagcgtgcaggtagaacggcaacaactgttgttgtgtcaagaaggcagcagggctcacatcagctagctggctgaatggtagtagttgttgctgctgtaaataagcagcagagttcaatgctctagttggttgaatggaagaaattgctgggggtaggcagcaactagctggctgaatggtaattgttgttgcaaataagcagcagagttcaatgcagccagttggttgaatggaagaaactgatgttgctgagagtatgcagcaaggtttgctagcacaagttgttgtagttgttgtgccctgatgttttgtgccaccaaatggaccaaaggtaactgctgtaatagggctga

SEQ ID NO: 8905 - DNA, 558 bp, Zea mays
  Clone ID: LIB3061-107-Q1-N6-A8
agaaatgtactttcttatttctgggaagccacaaacatcagataaaaaactttattattgaactataactcataagaaatctaaaagagggcaccaccaatgatgggttgttggtagaacactgctgggtttgtcaaagcaagttggttgaatggcagcaattgttgcagttgtaagagggtgccagcgttaggcgcaacgtgctggtagaacggcaacaactgtggttgtgtcaagaaggtagcagggctcacaccagctagctggctgaatggtagtagttgttgctgctgtaaataagcaggagagttcaatgctgctagttggttgaatggaagaaattgctgggggtaggcagcaggtagctggctgaatggtagttgttgttgttgcaaataagaagcagagttcaatgaacctagttggttgaatggaagaaactgctgttgctgagagtaggcagcaaggtttgctagcacaagttgttgtagttgttgtgccctgatgttttgtgccaataaatgcaccaaaggtaacctgttgtaatagggctgatga

SEQ ID NO: 8906 - DNA, 590 bp, Zea mays
  Clone ID: LIB3061-107-Q1-N6-B5
atcgagataaatctcaaccaatatattgattatttctaggaaacacatgccggtatgagggcaccattatcgagtacatctcatatgtaatctaaaagatggcacctccaacgatgggttgctgcctcgacaagacaggattcatcaaagagaaccggttgtatggcagcaattgttgctgctgtaggaaggcagcgaccaatgggttagccactgccaatggattaagtaactgttgtcgctgttgtaggtacgcaacagagttcgacatagttagttggttgaatggaagcagctgttgcaagtaggcaacagggtttgccacagctagctgagttagagctggtacaatctgttgcaacaattcttgttgcaggtatgtaggtgcattggccacagcgagcgggctagatgaaagcagttgttgctgttgtaggtaggcggcagggttcaccatggctagttgactaagcgctggcagaaactgttgcagttgttgttgttcctggtttgcaactacgtttgctagagcaagtgggttggatcaagcagctgctgttgcaagtaggcgacagggttcaccatggcta

SEQ ID NO: 8907 - DNA, 464 bp, Zea mays
  Clone ID: LIB3061-107-Q1-N6-D10
gtgctagagcggcaaaccttttttttttttttttttttttttttttttttttttttttttttttttttttgacaaaacaactaatttattatttggaacatgggggccaccaaaccgaaacagcaccttgccttaattgcctgttaatattcaaagttttttggggcttcatactaaatcgattttttttaactagacgctccaaattatactagagcaaccaggtgaggaagtccggttatgtcaagcatgcgaaggagtaacgactcctgagctcgtttatccaaaagcaccctacttttgcctgtaaattttgggcaagaaggatttcagcactttttgaaccgcaatgcttgggtgggcttaaatgtctgcaatcagctttttgtagctttcattctcgtactcctgaaataccgcctttaggtcaagttctttgtagaggttcttaacttttgccacac

SEQ ID NO: 8908 - DNA, 475 bp, Zea mays
  Clone ID: LIB3061-107-Q1-N6-D12
attattgaactataactcataagaaatctaaaagagggcaccaccaatgatgggttgttggtagaacactgctgggtttgtcaaagcaagttggttgaatggcagcaattgttgcagttgtaagagggtgccagcgttaggcgcaacgtgctggtagaacggcaacaactgtggttgtgtcaagaaggtagcagggctcacaccagctagctggctgaatggtagtagttgttgctgctgtaaataagcaggagagttcaatgctgctagttggttgaatggaagaaattgctgggggtaggcagcaggtagctggctgaatggtagttgttgttgttgcaaataagaagcagagttcaatgaacctagttggttgaatggaagaaactgctgttgctgagagtaggcagcaaggtttgctagcacaagttggtgcatttattggcacaaaacatcagggcacaacaactacaac

SEQ ID NO: 8909 - DNA, 385 bp, Zea mays
  unsure (1)..(385): unsure at all n locations; Clone ID: LIB3061-107-Q1-N6-E4
acaacctcgtttttttttttttttttttttttttttttttttttttttttttttttttttttttttttttttttttttttttttttttttttttttttttttttttttttttttttttttttttttttttttttttttttttttttttttttttgggggggggtttttttttttttttttttttttttttttttttttttttttgggggggggnnggtnnnnnnttttttttgttttttttggggggnntttttgggggggggggggnnntttgggggngtttttttttttttgttttgggggggggggnnnnnnnnggggggtttttgnggggggggttttttnnnnnnnnttttgtttttggggnnntttttttttttttttt

SEQ ID NO: 8910 - DNA, 597 bp, Zea mays
  Clone ID: LIB3061-107-Q1-N6-G10
aaaggaaaatggcgtttatacattacaatatacttttcgattaatcaccgatcggaatgaagatgatgatgatgataaattataaaagcaacagtgggcgggagagcgtagcttgtacgcctgcctcctccattttcccacacggctttagtttttttgtcttcttgcttgccggctcgcaatcagggtcacgcacggcatgacatgccagcctgaccccacaaacatcgcacacgacgcctgacctaaaaagcgcgccccggatgcaacaactcccaggaccatgatcacgatacaactgcaacggcacggtgaccggagacacctcccctcccaaggccgccgacgacgactagctgttccgttccgccgtacttggtggtagtagactagtagtaacagcagcagtctagtggtagtagagcatagtatagtactgtagacgatggtgaccgagccgagtagcgccccagccagccagctccaattgcgggcagggcacggatcccgatcggttagctgtactggacgaaggagcggtagaaggtgttggggcgccagttggccgggatgacgttgttggcgacgagcgtcttg

SEQ ID NO: 8911 - DNA, 290 bp, Zea mays
  unsure (1)..(290): unsure at all n locations; Clone ID: LIB3061-107-Q1-N6-G2
ttttggtttttttgttttttttttttggcccggcgctcggtgntgttttttcgcgntgtcttcgnctctcgtgcgccgcgctgcgcttcctctggcngcgctccgtgctnggctggccggggcctnggggtgcgtttttctttgttggggtggggtcgcctttcttgctgngncccctcggctggggggcctnnccgggcngcgnncccgtgtctggcgggtgcngccctgggggcctttcngcttntgccggggtgcntgctcccggcgctggggngcgcggcgccggt

SEQ ID NO: 8912 - DNA, 595 bp, Zea mays
  Clone ID: LIB3061-107-Q1-N6-G8
aacaatcgctggacagtttgattttgtcctctaggtcctggatcacaatgcgtttgcaaggatccaacaggtccacaacttgtccacaaagggacagtacaacagaggatccggaaatttgatctactagctatgctccatgccattgtacataaactaccgacacgtaaaacagaaatcatcaaccaatgcaaaagtctggtcagcttctctgcaatctccactctccactagcgaatatggtgtgcgttcactatcagtagccctggtactcaaaataccaccatgccagcaggatgcctcaaagatagcacatgcactgctctcgaggtcccacaccctccctccgtctttactccttagatgcactggcggcagggcctttctttccgccatacctctgctttcctatgctgaatgggacatacttgtacttgatcatatgcacaatttgtcgcttcattgtcaggacaaaaagcacaatccaataacagagaagtattggccaaaagacaggaacgtcgaatacagagaagaaggtcatgacaaaggcaatgcaaaaggcttttgtgacggcataccaaggattactttg

SEQ ID NO: 8913 - DNA, 599 bp, Zea mays
  Clone ID: LIB3061-107-Q1-N6-H10
agaaatgtactttcttatttctgggaagccacaaacatcagacaaaaaactttattgattgaactataactcataagaaatctaaaagagggcaccaccaatgatgggttgttggtagaacgctgctgggtttgtcaaagcaagttggttgaatggcagcaattgttgcagttgtaagagggtgccagcgttaggcgcagcgtgctggtagaacggcaacaactgtggttgtatcaagaaggtagcagggctcacaccagctagctggctgaatggtagtagttgtcgctgctgtaaataagcaggagagttcaatgctgccagttggttgaatggaagaaattgctgggggtaggcagcaggtagctggctgaatggcagttgttgttgttgcaaataagaagcagagttcaatgcagctagttggctgaatggaagaaactgctgttgctgagagtaggcagcaaggtttgctagcacaagttgttgtagttgttgtgccctgatgcttcgcgccaataaatgcaccaaaggtaactgatgtaatagggctgatgattgttggaggaacaagggtgataaaggtaagatgccagctg

SEQ ID NO: 8914 - DNA, 539 bp, Zea mays
  unsure (1)..(539): unsure at all n locations; Clone ID: LIB3061-107-Q1-N6-H2
accggggtttggggtttttgttcacaaacgcagttatatataacagcattgctactatctcacgatgcatgctttattccacatactactatagtactatgcatcacacgctctaacatgcgctagcagctttgccaacattattattgttcgctggggggccctgcatgggctattgggctggctgcctccttgacgcgcacatgcatctagcacactggaaaacttgcacctatctacaacggccggcgctgctcatggatgatatatactacgcttgctgcatagccatcttgcgccgccgggcatgcatgcatgcggcacgacgtacggcgatacctagacgcgccatctaaatggccggcccgccggccggccggggcacttgccggtggtaaaggtaaggtcgtcgtcgtctttttcttgtctgcttttggattggggctccgatcccaagccaagggcgctgcgcgggtcaatccgcgtcggtgccgncgctctgcctgcccgngtccatgaggcaaggctcgacgccgccg

SEQ ID NO: 8915 - DNA, 538 bp, Zea mays
  unsure (1)..(538): unsure at all n locations; Clone ID: LIB3061-108-Q1-K6-A1
gnaaatggnaatccagtagcaacaacagnacaacaatggcgaccaanatttttccctccttatgctccttgctctttctgcatgtgttgctaacgcgacaattttccctcaatgctcacaagctcctatagcttcccttcttcccccataccttccatcaatgatagcttcagtatgtgaaaacccagctcttcagccctataggctccaacaagcaatcgcagcaagcaacatacctttatcacccttgntgtttcaacaatcgccagccctatctttggtgcagtcattggtacaaaccatcagggcacagtatctgcagcaactcgtgctacctgtgatcaaccaagtagctctggcnaacctttcactcctctgggagcgncaacaataactacccttcaacctactgtgtacactgaaccctgctgcttattggcagcatcaactattaccattcagacagctagctactgcctactgtgagtatcaacaacttattccatggaaccaattgtgccgtctgaaccccgctgct

SEQ ID NO: 8916 - DNA, 608 bp, Zea mays
  unsure (1)..(608): unsure at all n locations; Clone ID: LIB3061-108-Q1-K6-B10
tcggcaacatagnaagcacaatagtgtaccaacaatggcagccaaaatttttgcttccttatgctccttggtctttctgcaagtgttgctaccgcaaccattttcccacaatgctcacaagctcctatagcttcccttcttcccccatacctctcaccagcggtgtcttcaatgtgtgaaaccccaattgttcaaccctacaggatccaacaggcaatcgcaacaggcatcttaccattatcacccttgttcctccaacaaccgtcagccctattacagcagttacctttggtccatttggtggcacaaaacatcagggcacaacaactacaacaacttgtgctagcaaaccttgctgcatactctcagcaacatcagtttcttccattcaaccaactggctgcattgaactctgctgcttatttgcaacaacaattaccattcagccagctagttgctgcctacccccagcaatttcttccattcaaccaactagcagcattgaactctgctgcttatttacagcagcaacaactactaccattcagccagctagctgatgtgagccctgctgccttcttgacacaacaacagttgttgccgttcta

SEQ ID NO: 8917 - DNA, 593 bp, Zea mays
  unsure (1)..(593): unsure at all n locations; Clone ID: LIB3061-108-Q1-K6-B12
ctccttttgctcggnacgcacacaccgcccgtccccgatctccgatcccctcgtcgatccaaagatgcagatcttcgtcaagaccctcactggaaagactatcaccctcgaggtggagtcttctgacaccattgacaacgtcaaggccaagatccaggacaaggagggcatccccccggaccagcagcggctcatctttgctggcaagcagctcgaggacgggcgcacacttgccgactacaacatccagaaggagagcaccctccaccttgttctccgcctcaggggaggcatgcagatcttcgtcaagaccctcactggaaagactatcaccctcgaggtggagtcttctgacaccatcgacaacgtcaaggccaagatccaggacaaggagggcatccctccagaccagcagcggctcatttttgccggcaagcagctcgaggacgggcgcacgctggccgactacaacattcagaaggagagcaccctccacttggtgctgcgtctcaggggcggcatgcagatcttcgtgaagactctgaccggcaagaactatcacccttgaggtcgagtcttctgataccattgat

SEQ ID NO: 8918 - DNA, 595 bp, Zea mays
  unsure (1)..(595): unsure at all n locations; Clone ID: LIB3061-108-Q1-K6-B6
ttganaccaacagcacatanaagtggaatccagtagcaacaatagagcaacaatggcgaccaagatactttccctccttatgctccttgctctttctgcatgtgttgctaacgcgacaattttccctcaatgctcacaagctcctatagcttcccttcttcccccataccttccatcaatgatagcttcagtatgtgaaaacccagctcttcaaccctataggctccaacaagcaatcgcagcaagcaacatacctttatcacccttgtttcaacaatcgccagccctatctttggtgcagtcattggtacaaaccatcaaggcacagcagctgcagcaactcgtgctacctgtgatcaaccaagtagctctggcaaacctttctccctactatcagcaacaacaatttcttccattcaaccaactatctacactgaaccctgctgcttatttgcagcaacaactattaccattcagccagctagctactgcctactctcatcaacaacaacttctttcatttaaccaattggccgcactgaacctcgctgcttatttgcagcagcaaatattactaccatttagccagctagct

SEQ ID NO: 8919 - DNA, 554 bp, Zea mays
  unsure (1)..(554): unsure at all n locations; Clone ID: LIB3061-108-Q1-K6-C1
gcgttcgccgncatcgtcccttcgtccccacgagcaccgataatccgccggcgttgagatgttggtttatcaggatctcctatctggcgacgagctcctgtcggattcattcacctacaaggagctcgagaacggcgtcctgtgggaggtcgagggaaagtgggtcacccaaggtcctgttgatgtggacattggtgccaatccatccgccgagggtggtgaggacgaaagcgttgatgacacagctgtgaaggtggttgatattgttgacacattccgtctacaggagcaacctccttttgacaagaaatcatttgcgtcttacatcaaaaaatacatcaagaatctcactgctgtgttggagccagagaaagcggatcatcatcaagaagggngncgagggtgcaaccacgtttctccttagcaagctgaaggaccttcaattttttgatggtgagtccatgcaagatgatgcgtctgtggtatncgcctattacaaggatggtgccactaatccgacattcctntatttctctcatggtcttaaggagatc

SEQ ID NO: 8920 - DNA, 576 bp, Zea mays
  unsure (1)..(576): unsure at all n locations; Clone ID: LIB3061-108-Q1-K6-C5
tcgcatgcttgtggncatgatgctcacacaacgatgcttcttggggcagctaaattgcttcatgctcgngaggatgatctgaagggtaccgtgaagcttgtcttccagccaggnagaagaaggctacggcggcgcttaccatgttctcagagaaggtgtcctggatgacgtgtctgccattttcggcttgcatgtggatccaggacttcctgtaggcaccgtttcgtccaggccagggccgtttctagcagcagcaggtagatttctggtgacggtcactggaaaaggcggacatgctgcagggccacaggatgctgtggatcccattgttgcggcatcctctgccatcgtcagccttcagcttcttgttgcccgcgaaattgatcccctccaggctgcagtggtcttttttcacgttcatgaaaggaggtgatgcttacaacgtcattccagagtcagcatccttcggcgggaccttcaggagcttgacaacagaaggcttttcgtatctcatgaagaggatcaaagagatcatagaaggtcatgccgccgtccaccgctgcaccgccgccgtcg

SEQ ID NO: 8921 - DNA, 602 bp, Zea mays
  unsure (1)..(602): unsure at all n locations; Clone ID: LIB3061-108-Q1-K6-C6
gtgacagntagtgtgacttcagatggattgactgtattttattgaaaataaacttggagggaagcatcaccgtttcaaacgagggtacaagaatgtaatagacgaggctattcgtctgaactctattggtgagngagtcacatttggctcatggtaaacaagtgggcatggagcgctgaaagagaaccactggcttgatgatggagcataccttatggtcaaacttttgaataaacttgctgctgctagaacactgggttcaagtattggtagtaaagttttgactgatttggttgagggccttgaagaagctgatgtgacagttgaaataaggttaaagattgatcagaatcatgcagatttgaaaggagggtccttccgtgactatggagaatccgtcttgagacatttagagaatgcaatcagcaaagacccaaatctccataaagccccggtgaaccatgagggcgtaagggtttcaggatatggtgggtggttcttgctgaggctctctctgcatgatcctgttcttcccctaaacattgaggcacagagtaacgatgatgcgattaagctggggcttgcgggtcttgctgctgtga

SEQ ID NO: 8922 - DNA, 523 bp, Zea mays
  unsure (1)..(523): unsure at all n locations; Clone ID: LIB3061-108-Q1-K6-D1
gcgttcggcagctgcttgcatccaaccccttgctctggcgaacgtagctgcataccagcaacaacaacagctgcaacagtttatgccagtgctcagtcaactagccatggtgaaccctgccgtgnacctacaactactttcatctagcccgctcgcggtgggcaatgcacctacgtacctacaacaacagntgctgcaacaaattgtaccagctctgactcagctagctgtggcaaaccctgctgcctacttacaacagttgcttccattcaaccaactggttgtgtcaaactctgctgcgtacctacaacagcgacaacagtnacttaatccattggcagtggctaacccattggtcgctaccttcctgcagcagcaaatcacttnggtgcgatacaaacagttccctttgatgaaccctgncttgcagcaacccatcnttggaggtgccatcttttagattacatatgagatgttctcgacaatggtgccctcataccgacatgtgtcttcctagaaataa

SEQ ID NO: 8923 - DNA, 433 bp, Zea mays
  unsure (1)..(433): unsure at all n locations; Clone ID: LIB3061-108-Q1-K6-D12
atgcaccaacttgtgctagcaaaccttgctgcctactctcagcagcagcagtttcttccattcaaccaactaggttcattgaactctgcttcttattgcaacacattttttttttagcncgctacctgctgcctgcgggggggggtttcttccattcaaccaactagcagcattgaactctcctgcttatttacagcagcaacaactactaccattcagccagctagctggtgtgagccctgctaccttcttgacacaaccacagttgttgccgttctaccagcacgttgcgcctaacgctggcaccctcttacaactgcaacaattgctgccattcaaccaacttgctttgacaaacccagcagtgttctaccaacaacccatcattggtggtgccctcttttagatttcttatgagttatagttcaataat

SEQ ID NO: 8924 - DNA, 393 bp, Zea mays
  Clone ID: LIB3061-108-Q1-K6-D5
cagcgtttttttcagccagctacctgctgcctcacccccagcaatttcttccattcaaccaactggcagcattgaactctcctgcttatttacagcagcaacaactactaccattcagccagctagctggtgtgagccctgctaccttcttgatacaacctcatttgttgccgttctaccagcacgctgcgcctaacgctggcaccctcttacaactgcaacaattgctgccattcaaccaacttgctttgacaaacccagcagcgttctaccaacaacccatcattggtggtgccctcttttagatttcttatgagttatagttcaataataaagttttttgtctgatgtttgtggcttcccagaaataagaaagtacatttctagattctt

SEQ ID NO: 8925 - DNA, 393 bp, Zea mays
  Clone ID: LIB3061-108-Q1-K6-E12
gtcgacccagcgtccgggttcaacaccagccggggtggaccttgaccgtgacgcaggggaagcaggtgcagaagtgggacaggatctccaggcggccttcgagtgggctgaccaccccaccgctgtgatccccgacatgcagaagcttggcatcaaggataagaacgaagcagcgaggatcgttgcgctcgttaagaatcaaactactgccgctgccgctactgctgccagtgctgacaacgacgacgacgaggcctgatcaatgcaacgacacatcatgatctgctgctgcacttaattactatgttcgtatacaaataaatacacccggcgtacgcggtgttccttatatggtctaaaatgtagccagtaaattttaaactactttatttc

SEQ ID NO: 8926 - DNA, 602 bp, Zea mays
  unsure (1)..(602): unsure at all n locations; Clone ID: LIB3061-108-Q1-K6-F11
cgttcgtaccaacatagnaaagcacaatagtgtaccaacaatggcagccaaaatattttgcctccttatgctccttggtctttctgcaagtgctgctacggcgaccattttcccgcaatgctcgcaagctcctatagcttcccttcttcccccgtacctctcaccagcggtgtcttcggtatgtgaaaacccaattcttcaaccctacaggatccaacaggcaatcacagctggcatcttacctttatcacccttgttcctccaacaatcatcagccctattacatcagttacctttggtgcatttattggcacaaaacatcagggcacaacaactacaacaacttgtgctagcaaaccttgctgcctactctcagcaacagcagtttcttccattcaaccaactagctgcattgaactctgcttcttatttgcaacaacaacaactaccattcagccagctacctgctgcctacccccagcaatttcttccattcaaccaactggcagcattgaactctcctgcttatttacagcagcaacaactactaccattcagccagctagctggtgtgagccctgctaccttcttgatacaaccac

SEQ ID NO: 8927 - DNA, 591 bp, Zea mays
  unsure (1)..(591): unsure at all n locations; Clone ID: LIB3061-108-Q1-K6-F2
ctcccgtttcgtttctccccctcgctccccagccgcatctcgagcgcgctctcggcggccgtccacgtctcggtcccacgcgctgctcgcttgctcgccggcggggcgcgagggcggtggcctangtcgtacccagcgaagcgcggcgtgccacggggtgggggttggctcgggaccatcgagcctgtccggaattttttctggcgcgtgatttgccgctgagaaagcatcggaaaagggaacggggatttactctcagtagccgcgagctacccaccgtcccctggtcgattcagtgcaaatcctccaggtttctgggtcttaatggcttcctcagatatctctgttgatattcgtcctgacataaactcatttgatcattttttaagcatgcgatacattgcaacagatncaccctggctgaaattanatggaataagagttcagcctgtgccaccattcagcagtttgagctacaaacctgaaccagcgctcattcatnattgcctacctgatgaactaatgctcgagattnttacaagaaggagccnatatactttagggaaggctgcatgtgtctgccgcaagtgg

SEQ ID NO: 8928 - DNA, 352 bp, Zea mays
  unsure (1)..(352): unsure at all n locations; Clone ID: LIB3061-108-Q1-K6-G1
cgtttcgccctaggtctgacgctgtggcgcggcgccgtcagcaacagctccacgcgtagcgtgatccgctcactccgccgtcaccgacccgggcccgcgcgtcggttgcttcgctcggtggagacgacgatctccgcctggtggtatcagacgtcgttactttcaagacggcgaggcaacgtactaaacgggcagtaagggaagcaggaactcgtcggggtaagggcgaacgcgggtactgatgcagctccaagcatcagctgcgtgtccttcgagccggcaagtagcacgggacctcagtatctcgattatgtggctgactggctgcaggggagacgggctagggnaacac

SEQ ID NO: 8929 - DNA, 391 bp, Zea mays
  Clone ID: LIB3061-108-Q1-K6-G3
aactaccattcagccagccacctgctgcctacccccagcaatttcttccattcaaccaactagcagcattgaactctcctgcttatttacagcagcaacaactactaccattcagccagctagctggtgtgagccctgctaccttcttgacacaaccacagttgttgccgttctaccagcacgttgcgcctaacgctggcaccctcttacaactgcaacaattgctgccattcaaccaacttgctttgacaaacccagcagtgttctaccaacaacccatcattggtggtgccctcttttagatttcttatgagttatagttcaataataaagttttttatctgatgtttgtggcttcccagaaataagaaagtacatttctagattctaa

SEQ ID NO: 8930 - DNA, 517 bp, Zea mays
  Clone ID: LIB3061-108-Q1-K6-G9
aatcaatcaagtagttgcagcgaaccttgctgcttacctccagcaacaacagtttcttccattcaatcaactagctggggtgaaccctgctatctacttgcaggcacaacagctactaccatttaaccaacttgtcgggagcccttatgccttcttactgcaacaacagcttctgccattccatctgcaagctgtggcaaacattgttgctttcttgagacaacaacatttgttgccattttacccacaagttgtgggaaacattaatgccttcttgcaacagcaacaattgctaccattctacccacagaatgtggcaaacattgttgccttcttacaacaacaacaattgctaccatttagccaacatgctttgacgaatcctaccaccttattgcaaccgcccaccattggtggtgccatcttctagattttttatgatttatactgtaataataaagttctcatgctgatatgtgcgacctctcagtaataaagtattagagatctatatttt

SEQ ID NO: 8931 - DNA, 576 bp, Zea mays
  Clone ID: LIB3061-108-Q1-K6-H1
ctccgttcccctattacctagttagtccagtccgcctgctgcctgcctcaacggatcgacgcgacaggagggagggaggaaggagacggtcgatcagagtctgagacggaggccgatccaccaccgcagcgacgagcgggaggagatgaagatcatcattgacacggatcccggcatcgatgacagcgtggccatcctgatggcattccagatgccgggcgtccaggtcctagggctcaccaccatcttcggaaactgcaccacagagcatgccacacgcaacgccttgatcctgtgcgagaaggcaagccatctagaggtcccagtagctgagggcagccatgagcctctcaagggaggaaagccgcacgttgttgacttcgttcatggacctgatggcctcgggaacgtagatcttcctgatcccactatcaagaaagtggaggaaagtgctaccgacttcttggttgataaggtctcgcgatttcctggagaggtctctgtgctcgccttgggtactctgacaaacatagcattggccatcaagaaggatccctcattcgtgaaaaacttaag

SEQ ID NO: 8932 - DNA, 481 bp, Zea mays
  Clone ID: LIB3061-108-Q1-N6-A1
tcggttagcggattacaatctgaacaacagaccaacaatggcgaggcaggactcatacactattcagcaacttgctctttgtgtatgagctgataacgcgacaataagagtcaccgctaacaagctgctataggtaggatgccgctcggtacgctaaatcagtggtggatagggcatcagaaaacgcagctgtaaaagggtatagggttcaacacgcaactgctggaagaaagataccttcagcagccttgttgataaaaaaatacggcagccctatatctaggtgcactaaatgggtacaaaccatgatggcacagaaaatgaaggaacttcagctacctcaaatcaaccaatgaaataaggcaaacctgtctacatactctaagcaacaacaatttgtatcattaaaccaactgtctacaatgaaccctggtgcttatttgcaacaacaactattaccaaaaaaaacagctagctactg

SEQ ID NO: 8933 - DNA, 500 bp, Zea mays
  Clone ID: LIB3061-108-Q1-N6-A3
tcagcgttcggtttggttgaattagaagtttttgatttgtgtgtttgtatgacggggaccatgatcgtaacacctgtctcctaccaatatggtgagagaactgtggttccctatccaaaatttgatccggtccggattgtctaagtctgagattatgatttgagagagaactcctagagattgggcctcatggaagagctttataagtgttgattctcttcgatgctattacaatgggttgtgtttgatcgatactagctgtgatgtctctaaataaaaacgctgttgtgtgcaatatatgctgggttggaagattatgaccatttagaggctggcgtgatctataatgctgtactattagatgcggtgcttgaggtatatgctctttttgatgcatggataggctactggaactgaatgagagacatattgtgctcaataatgagattcctggtggaaagaacatgaaccgttctggtgctttgggagttttatgagga

SEQ ID NO: 8934 - DNA, 369 bp, Zea mays
  Clone ID: LIB3061-108-Q1-N6-A8
tcagcgttcgttgtcgcggggaaggtaagcgtacattgaataacactaccggacgcgttagtgtctgataattgcaatgagtacaatttaaattcttaaacgaggatgcattggagggcacgtatggagcacagacagccgaggccattggcagctccaatagcgactatgaaagtaggaggagataaaatagctaatgtttggaccttgagccgtggctgtcagcactcttaacggttagaaccgaccgggtcgaccgttctacccgggaagctctggtcagcataacttggcgggtagagcgttcgaggccgttacttttaagaaattagagtgctcaaagcaagccatccatgtggatacattagc

SEQ ID NO: 8935 - DNA, 396 bp, Zea mays
  Clone ID: LIB3061-108-Q1-N6-C1
tcagcgttcgtcgtcttaggcccttcgtctccactagcaatcgtaattcgacggcgcttgagcatgttgggttatcaggatctcttatctggcgattagctgctgaaggcttcattcacctactatgagctggatatcggcgtcctgcgtgaggtggacggaaagtgggtcacccatagtcctgtacgtgtggacattggtgctccttcatacctcgagggtaggtgaaggagagaagcgtttatgacacacatgcttgggatgggggtattccagacacacttcgtccttagtggcctcctcctttagacatgaaaggatcttcgtcttgctaagaaaaacttggttgcaccctctacaccgtttgtgaactcatacggtttctctggctacaac

SEQ ID NO: 8936 - DNA, 330 bp, Zea mays
  Clone ID: LIB3061-108-Q1-N6-D1
tcggctgctgcttgctttcgacccatttgttttggggcaagtcgtggcttaccagcaacaacaacaggtgctacagtttatgccagagctcaatcgactagccatggagaaccctgaacgttacctacaactcgtttattttccggatcactgtgggcattgacgccaccattcctacaacaccagttgttgtaacataagaaatcgagctctgactcaactggctgtgtgcaagcctgctgcctacttacaacaggtgcttccattcaaccaactggctgtggcaaactgtggtgcgtacctacaacagtgaccactggcacttaattc

SEQ ID NO: 8937 - DNA, 432 bp, Zea mays
  Clone ID: LIB3061-108-Q1-N6-E1
ttagctttcggtttcagaaaaggcctatcttgttcctgggatggcagacaattattcaaataacttatgcttgttggattatttataagtgctgttaacgaggcatcgtccatgattggttacaggctgatatatgttggttttttcaaagatacgtgtgagaatggcagtctttagtgtgtgaaaacgaaggtgttaaaccttagagcatccaagcagtaaaacgagcacaactgttaccttgataacaatggaacatggctcaaatcgagctagcctatttcaatggttacatttggtgcttttgttgtaacaaaacataaatgctcatcaacatacaacaactttggctaagaaaccttgcttactactctcatcaacagcatgatgtttcattcaaccaactggctgcattgaaatttgatggttatt

SEQ ID NO: 8938 - DNA, 566 bp, Zea mays
  Clone ID: LIB3061-108-Q1-N6-E10
tcggtgggttggtaaaagaagttgtagataatttcataagctttccagattgttaaagagtgcattcatatgatttgtgaaactccagttatgtttgttttactgtggctgattctgtttacctgacaaaaagagtgggtctgtacactggtgggtttcatctagtaaatggccgaattggctcttccaactatggatacttttgtagagggataaaagttcttacttccagcagaatttcataatttttggttcagtagttaggtgagatatacgaattttaaagttaaccatactgctgactaaaacagattcagtcagttatcttgtcagatgttttagaacttgtagatggcagattttaattattctattgcaatactgcaagttgtagagcattccgtgtagatactcctagagtattcgtttgatatcaccgctgttttaattttaaagatacaaaattaacaaacagcgttgctgctgtatggcatgtggttcagggtggcagtctttccactgcgtcttgggtttaaaaccacgagtgttttgatgattgatggcaa

SEQ ID NO: 8939 - DNA, 387 bp, Zea mays
  Clone ID: LIB3061-108-Q1-N6-E12
ttagcgttcggtttcaacagacacgcggggtgaccttgaatgggtaccagggaagctgtgcgaacagggacacgccgtgcaggtggatcttggagtggactgtaccccttaacggtgggatccgatgattgcataagcttggcttgaatgatgataacgagcagcgaggatcgctgtgctcgttaagaatgaaactactgtcgttggcgtttctgctggcagagctgacatcgacgattacgaggtctgattaatgccacgacacatcatgatctggtgctgaacttaattactatgatcgcattcaaatgaatacactggagatactgcggcgtttcttatatggtttaaaatgtagccaggaaattgtaaactactttattttag

SEQ ID NO: 8940 - DNA, 236 bp, Zea mays
  Clone ID: LIB3061-108-Q1-N6-E8
tcgtacaaccacagtgtgctgccgtactaccgggacgctgcgcctaacgctggcaccctcttacaactgcaccatttgctgccatacaactcaacttggtctgccacaccgatgggtggtctgccagaacgctcatatgggtggcgcccctcgtttagatgtatggatagagttatgagtgcaattgtaaggggtgccagctgtaggctcaggcttcccataaataagaaacaaca

SEQ ID NO: 8941 - DNA, 423 bp, Zea mays
  Clone ID: LIB3061-108-Q1-N6-G6
tcagcgttcggtggatcattctttattgtgtcgttatgcgagaactggtaatgacacgcattagtgccggatcttaaaaacatgttaggcgtgtgaatcttagaggttgtgcaagttgcactgacaatcaggtgcggatactgaaatcttttagctgctggtaggacaaaaggccacttgtacaacagcctggagtgatgaaactggttacacagatctcatggaaaaccccgggggccgcagccacaatgcaagatttcatcgaagagatgacaaatgctggcgtgatggaagaaatggtcaacgtatgctttagatatcaactctggaagaacaggacattgatgtaggaaattgaataggagggtgacatggtcctaagtggaatcactggggagaccgcctttgagctcccggatgctg

SEQ ID NO: 8942 - DNA, 513 bp, Zea mays
  Clone ID: LIB3061-108-Q1-N6-G7
tcagcgttcgaattactgactttggatctgaaatcctcccagtagctgtactagttcatagtgtgcaggcatgcatttttacgggctattgggaggatgttggaacaatcaaacattctttgatgcaaacttggccctcactgagcagccttccaagtttgatttttatgatccaaaaacacctttcttcactgcaccccgatgcttgcctccgacgcaattggacaagtgcaagatgaaagatgcatttatctcagatggttgcttactgagagaatgcaacatcgagcattctgtgattggagtctgctcacgtgtcagctctggatgtgaactcaaggactccgtgatgatgggagcggacacctatgaaactgaagaagaagcttcaaagctactgttagctgggaaggtcccagttggaataggaaggaacacaaagataaggaactgtatcattgacatgaatgctaggattgggaagaacgtggtgatcacaaacagtaagggcat

SEQ ID NO: 8943 - DNA, 480 bp, Zea mays
  Clone ID: LIB3061-108-Q1-N6-H1
tcgttccgatcacctattacctagttagcccagaacggctgctggctgtctctacggttcgacgcgtcaggagggagggaggatggtcccgggaaccagagtttgagacgtggccgatgcaccgcttagcgactagcgggaggagatgaagtatcataattggcacggcttctggtgtgggtgaccgcgtggccatactgaaggcgtttcacatgtcgggcgcgcagctcctaaggctcaccaccatcttgggcaactggaccgcacatgatgccccacacaacggcttgatcctgtgcgagaggcatgacatctactaggttcaagtacctgtaggtagacatgagcctgtcacagaaggaaagccgctcgttgctgactacgctcttggacctcgtggactgctgaagccagactttcgctgatcccactgtccagaacgtggaggaaagtgctaccgactccttaggagataaggtg

SEQ ID NO: 8944 - DNA, 545 bp, Zea mays
  unsure (1)..(545): unsure at all n locations; Clone ID: LIB3061-109-Q1-K6-A1
tgcaacaagccaacatagnaaagtggnaatacaaagtagcaaaaatagnagcaacctaatggcggccaanatatttttccatttccttatgctccttgcntcttttctgcatgtgnttgctttaacgcgaccatttttcctcaatactcacaagcctcctattagctgccccttcttcccccattaccttccaatcaatgaccgcttntagtatgtngaaaacccagcccttcaaccctacaggatccagcaagcaatcgcaacaagcaacttacctttatcacacctgttctttcaacaatcgccagccctatctttggtgcagtcattggtacaaaccatcagggcagaacagttgcagcaactcgtgctaccagtgatcagccaagtagctctggcaaacctttccccctactctcagcaacaacaattgctgccattcaaccaacttgctttgacaaacccaacagcattctaccaacaacccatcattggtggtgccctcttttagatttcttatgagttatagttcaataataaatcta

SEQ ID NO: 8945 - DNA, 606 bp, Zea mays
  unsure (1)..(606): unsure at all n locations; Clone ID: LIB3061-109-Q1-K6-A11
ccaactagcaacatagnaaagcacaatagtgtaccaacaatggcagccaaaatttttgcttccttatgctccttggtctttctgcaagtgttgctaccgcaaccattttcccacaatgctcacaagctcctatagcttcccttcttcccccatacctctcaccagcggtgtcttcaatgtgtgaaaccccaattgttcaaccctacaggatccaacaggcaatcgcaacaggcatcttaccattatcacccttgttcctccaacaaccgtcagccctattacagcagttacctttggtccatttggtggcacaaaacatcagggcacaacaactacaacaacttgtgctagcaaaccttgctgcatactctcagcaacatcagtttcttccattcaaccaactggctgcattgaactctgctgcttatttgcaacaacaattaccattcagccagctagttgctgcctacccccagcaatttcttccattcaaccaactagcagcattgaactctgctgcttatttacagcagcaacaactactaccattcagccagctagctgatgtgagccctgctgccttcttgacacaacaacagttgttgc

SEQ ID NO: 8946 - DNA, 609 bp, Zea mays
  unsure (1)..(609): unsure at all n locations; Clone ID: LIB3061-109-Q1-K6-A12
tagcaacatagnaaagcacaatagtgtaccaacaatggcagctaaaaattttgcctccttatgctccttggtctttctgcaagtgctgctacggcgaccattttcccacaatgctcacaagctcctatagcttcccttcttcccccgtacctctcaccaacggtgtcttcggtatgtgaaaacccaattcttcaaccctacaggatccaacaggcaatcgcagctggcatcttacctttatcacccttgttcctccaacaatcatcagccctattacagcagttacctttggtgcatttattggcacaaaacatcagggcacaacaactacaacaacttgtgctagcaaaccttgctgcctactctcagcaacagcagtttcttccattcaaccaactagctgcattgaactctgcttcttatttgcaacaacaacaactaccattcagccagctatctgctgcctacccccagcaatttcttccattcaaccaactgacagcattgaactctcctgcttatttacagcagcaacaactactaccattcagccagctagctggtgtgagccctgctaccttcttgacacaaccacagttgttgccgttc

SEQ ID NO: 8947 - DNA, 526 bp, Zea mays
  Clone ID: LIB3061-109-Q1-K6-A8
cttagtgcttgtttgagaataatggaggggactgagaggcccaaaatcctttagggccaaaatcctttagagcttgttcggttattttcaattcataggtattggaagagattgatatagattggaggagatttgatgtactagagattgaaactccctcaatccatatagattggagtaaaaccgaatatatctttagggcttgttcggttttaggtgaattcctctctaatccttctcaatccatttctaatcaaacagaccttactattcaaatagtaagggattttggctccttgagtccccttcattacatctggtcctaaacgagcctttaggggatagactgtttggtttgttgtgtaaggtgttataggatgactagcttttttgtataagtttagtttaattcgagtgactaaggttagatatattgtgatgtccttagctataaaactaaacagtcgtcctttaatatgtcaaggagtccgagttgaaattcatcgtggttctttctctatgtccc

SEQ ID NO: 8948 - DNA, 391 bp, Zea mays
  Clone ID: LIB3061-109-Q1-K6-A9
gcgttcttcgaacacatttcaacaacctaccacaatggctaccaagaattatccctgcttgcgcttcttgcgctttttgcgagcgcaacaaatgcgttcattattccacaatgctcacttgctccaagttccattattacacagttcctcccaccagttacttcaatgggcttcgaacacccagctgtgcaagcctataggctacaacaagcaattgcggcgagcgtcttacaacaaccaatttcccagttgcaacaacaatccttggcacatttaacaatacaaaccatgctaactcaacatcaacaacaatccctaccaatactgaaccacctagccatgcagaaccctgccgcctactctgaaacaggagtcgcttgcatcaaaccca

SEQ ID NO: 8949 - DNA, 208 bp, Zea mays
  Clone ID: LIB3061-109-Q1-K6-B1
ggcaaacatgtcgccttcttacaacaacaacaattgctgccatttaaccaacttgctttgacgaatcctaccaccttattgcagcagcccaccattggtggtgccatcttctagatttttttatgctttatactgtaataataaagttctcatactgatatgtgcaacttctcagtaataaaagattagagatctatattttaagttc

SEQ ID NO: 8950 - DNA, 449 bp, Zea mays
  unsure (1)..(449): unsure at all n locations; Clone ID: LIB3061-109-Q1-K6-B11
gtttcttccattcaaccaactagctgcattgaactctgcttcttatttgcaacaacaacaactaccattcagccagctacctgctgcctacccccagcaatttcttccattcaaccaactggcagcattgaactctcctgcttatttacagcagcaacaactactaccattcagccagctagctggtgtgagccctgctaccttcttgatacaaccacagttgttgccgttctaccagcacgctgcgcctaacgctggcaccctcttacaactgcaacaattgctgccattcaaccaacttgctttgacaaacccagcagcgttctaccaacaacccatcattggtggtgccctcttttagatttcttatgagttatagttcaataataaagttttttgtctgatgtttgtggcttcccagaaataagaaagtacatttctaaacnaaa

SEQ ID NO: 8951 - DNA, 596 bp, Zea mays
  unsure (1)..(596): unsure at all n locations; Clone ID: LIB3061-109-Q1-K6-B12
ccccgcgtccgcgccaattgcnaccagnaaatccatcgagaggccgtcgacagggggaattaatggcgtcgtcgtctagcagcagccaccgccgcctcatcctcgcagccgccgtcctgctctccgtgctcgcggctgccagcgccagcgccgggacctcctgcgtgccggggtgggccatcccgcacaacccgctcccgagctgccgctggtacgtgaccagccggacctgcggcatcgggccgcgcctcccgtggccggagctgaagaggagatgctgccgggagctggcggacatcccggcgtactgccggtgcacggcgctgagcatcctcatggacggcgcgatcccgccgggcccggacgcgcagctggagggccgcctagaggacctgccgggctgcccgcgggaggtgcagaggggattcgccgccaccctcgtcacggaggccgagtgcaacctggccaccatcagcggcgtcgccgaatgcccctggattctcggcggcggaacgatgccctccaagtaactgcgaagagcatagtgcatgaggaatgagcttgtagctagctcatatgtctgaataataagcaca

SEQ ID NO: 8952 - DNA, 491 bp, Zea mays
  unsure (1)..(491): unsure at all n locations; Clone ID: LIB3061-109-Q1-K6-B2
cccggtcgacccagcgtccgacctccggctactganacttcgccaagcaaaccgtgacagcttgccctgcgttcgcgtggctgcggtgtgagaaggagggcgtcgaggactgcgccgagttgctcgccggccacaatatcgtgggtagcggcggggagcagttcggaggagacgcgcggtgcgtcaggatcaacatgctggacagggacaacgtgttcgacatgctcgtccagcgcctctcctctataaactgaacggagtgaatgcatggagtggcacagcagcctgcattgccacaaataaaatgaacccagaaggatttggtgtctttttcttttgtcagtttggtatcttgggtcctggtagagaaactttgtttcggtttgctttngatgctttggactgaactgtgtgtcaactcagtngactgttatggattcaggaataaaataagagagagaagggtttctgtgctagaaaaaaaannaaaa

SEQ ID NO: 8953 - DNA, 502 bp, Zea mays
  Clone ID: LIB3061-109-Q1-K6-B4
acacaatgcacagttctccagcgctcagtcaactagcctggtgaaccctgccgcctacctacaacagcaacaactgatttcatctagccctctcgctgtggttaatgcacctacatacctgcaacaacagttgctgcaacagattgtaccagctctgactcagctagctgtggcaaaccctgctgcctacttgcaacagctgcttccattcaaccaactgactgtgtcgaactctgctgcgtacctacaacagcgacaacagttacttaatccactagcggtggctaacccattggtcgttgccttcctacagcagcaacaattgctgccatacaaccagttctctttgatgaaccctgccttgttgtggcagcaacccatcgttggaggtgccatcttttagattacatatgagatgtactcgataatggtgccctcatagcggcatgtgtttcctagaaataatcaatatattgattgagatttatctcgatatatttct

SEQ ID NO: 8954 - DNA, 604 bp, Zea mays
  unsure (1)..(604): unsure at all n locations; Clone ID: LIB3061-109-Q1-K6-B6
tccacgttcacgtcgcttgaggaggtgagcagtcggatctggctaggtgctgcaagcgagaccgtgccatgttccacctccgcgcacttttctcgtgagcgccctctaccatcccgcctcctcctggtaacgcgctgctcaaggttactagatctggtgagtcaccgttcagagttgggttcctgttcctggggcgcttcttcttacgttcgcaggcggagcgtccgtggaggaggcagcggggtattgatggaagtggtacccttgatggacagacactggttccccttggctggacagatttcaaactgaatatgaggttgtctctatcagcagcaagggaagaaaacttgacggttaatcctggaagatggcgagtgctctatcttggagacttggaagatggcgaatcttggaagaacaatcaaaagaatggaaacaccttgccacagtaatagcgccagaacagtcgtcgatggcttcaagctcctacttgtgtttccggtgtttggctgttgcggctgtaaaaggctggagtcagcatgtacggctgtaccatgctgggatcangcggcggctgtaccctgctggactaggcggcggc

SEQ ID NO: 8955 - DNA, 575 bp, Zea mays
  unsure (1)..(575): unsure at all n locations; Clone ID: LIB3061-109-Q1-K6-C12
gnatcagcaagcggcagtgcgtagagaggatcgtcgaacanaacagcatgaagatggtcatcgttctcgtcgtgtgcctggctctgtcagctgccagcgcctctgcaatgcagatgccctgcccctgcgcggggctgcagggcttgtacggcgctggcgccggcctgacgacgatgatgggcgccggcgggctgtacccctacgcggagtacctgaggcagccgcagtgcagcccgctggcggcggcgccctactacgccgggtgtgggcagacgagcgccatgtaccagccgctccggcaacagtgctgccagcagcagatgaggatgatggacgtgcagtccgtcgcgcagcagctgcagatgatgatgcagcttgagcgtgccgctgccgccagcagcagcctgtacgagccagctctgatgcagcagcagcagcagctgctggcagcccagggtctcaaccccatggccatgatgatggcgcagaacatgccggccatgggtggactctaccagtaccagtaccagctgcccagctaccgcaccaacccctgtggcgtctccgctgccatt

SEQ ID NO: 8956 - DNA, 565 bp, Zea mays
  unsure (1)..(565): unsure at all n locations; Clone ID: LIB3061-109-Q1-K6-C2
caaaaaccaccaagncgaacgcactagcaacgacctaacaccaatggctaccaagatattagccctccttgcgcttcttgcccttttagtgagcgcaacaaatgcgttcattattccacagtgctcacttgctcctagtgccattattccacagttcctcccaccagttacttcaatgggcttcgaacatccagccgtgcaagcctacaggctacaactagcgcttgcggcgagcgccttacaacaaccaattgcccaattgcaacaacaatccttggcacatctaaccctacaaaccattgcaacgcancaacaacaacancaacagtttctgccatcactgagccacctagccgtggngaaccctgatcacctacttgcaacagcagctgcttgcatccaacccacttgctntggcgaacgtagctgcataccagcaacaacaacagctgnaacagtttatgccagtgctcagtcaactagccatggtgaaccctgccgtntacctacaactactttcatctagcccgctcgcggtgggcaatgcacctacgtacctacaaca

SEQ ID NO: 8957 - DNA, 566 bp, Zea mays
  unsure (1)..(566): unsure at all n locations; Clone ID: LIB3061-109-Q1-K6-C4
gcgttctctgnaccctgctgcttatttgcagcaacaactattaccattcagccagctagctactgcctactctcagcaacaacaatttcttccattcaaccaactgtctacactgaaccctgctgcttatttgcagcaacaactattaccatttagccagctagctactgcctactctcagcaacaacaacttcttccatttaaccaattggccgcactgaaccccgctgcttatttgcagcagcaaatactactgccatttagcgagctagctgcagcaagtcgtgcttccttcttgacacagcaacagttgctgcctttctacaagcagtttgcggctaaccccgcaaccctcttacaactacaacaattgttgccctttgtccaacttgctttgacaaacccagcagcctcctaccaacaacacatcattggtggtgccctcttttagattgattattagttgtaattcaataataaagttttttggatgatgtatgtggccaaccagaaataagaagttacatttccagattctaaaaaaaaaaaaaanaaaaaaaanaaaa

SEQ ID NO: 8958 - DNA, 259 bp, Zea mays
  unsure (1)..(259): unsure at all n locations; Clone ID: LIB3061-109-Q1-K6-C5
tcgctgaagcacatgaactctacaacaccctttctttaccagagcatcagaantgtggtttctgaggctacactgagattgaaaatgtcaatgctgtatttcttacacatcaaaatgaagaaatacagcattgacattttgatgtgtaagaactacaaaaaagtggagatgttctacgaaaaatgaaatatgctaacttgcattctgttcaatgatttgaaaggtaattggtgtatataagcagagttctctgacagac

SEQ ID NO: 8959 - DNA, 604 bp, Zea mays
  unsure (1)..(604): unsure at all n locations; Clone ID: LIB3061-109-Q1-K6-C7
caacanagcaacgcccaggcacaaacgacacgaaccaggcaaccagctgccgagggaggaaccctagcggaacaggtgacggcggcgcgctaccggtgacgggggatacggcggcatcgtccccctcggcccctcctccatccccggcgcggcggagccagcagccggcctgcagtttttcagctttataatggatcccaacatgaagcagcttcaagaggctctggttgatattgagaccgatgcagaaaaagttcttctggctagacatcagttggtggaaaatgataagataagaaatggtaacagggaggctctgacagcccttcggaaacaagccaggacgtccaagactagcgtgccatctccctttgaggtcataatgaaagagatggaaggaagctctggcaagcagctgataaaggagatatgcccaacgtgtggagatcatgaccccaaggaacatacttggctaatgtttcctggatcagatatgtttgcccgtgttccatttcatgtggcacacactgttgtggaaaaagaccaagaacgcctggatttggataccaagaaactgcaaagctttgtcaaggagaaatcactt

SEQ ID NO: 8960 - DNA, 600 bp, Zea mays
  unsure (1)..(600): unsure at all n locations; Clone ID: LIB3061-109-Q1-K6-C8
caacatagnaagcacaatagtgtaccaacaatggcagccaaaaattttgcctccttatgctccttggtctttctgcaagtgctgctacggcgaccattttcccgcaatgctcgcaagctcctatagcttcccttcttcccccgtacctctcaccagcggtgtcttcggtatgtgaaaacccaattcttcaaccctacaggatccaacaggcaatcgcagctggcatcttacctttatcacccttgttcctccaacaatcatcagccctattacaacagttacctttggtgcatttattggcacaaaacatcagggcacaacaactacaacaacttgtgctagcaaaccttgctgcctactctcagcaacagcagtttcttccattcaaccaactaggttcattgaactctgcttcttatttgcaacaacaacaactaccattcagccagctacctgctgcctacccccagcaatttcttccattcaaccaactagcagcattgaactctcctgcttatttacagcagcaacaactactaccattcagccagctagctggtgtgagccctgctaccttcttgacacaaccacagttgttgc

SEQ ID NO: 8961 - DNA, 602 bp, Zea mays
  unsure (1)..(602): unsure at all n locations; Clone ID: LIB3061-109-Q1-K6-C9
gtcgaacacattagcaacaacctaacaacaatggctaccaagnaattatccctccttgcgcttcttgcgctttttgcgagcgcaacaaatgcgttcattattccacaatgctcacttgctccaagttccattattacacagttcctcccaccagttacttcaatgggcttcgaacacccagctgtgcaagcctataggctacaacaagcaattgcggcgagcgtcttacaacaaccaatttcccagttgcaacaacaatccttggcacatctaacaatacaaaccatcgcaacgcaacagcaacaacaattcctaccagcactgagccacctagccatggtgaaccctgccgcctacttgcaacagcagttgcttgcatcaaacccacttgctctggcaaacgtagttgcaaaccagccacaacaacagctgcaacagtttctgccagcgctcagtcaactagccatggtgaaccctgccgcctacctacaacagcaacaactgctttcatctagcccgctcgctgtggccaatgcacctacatacctgcaacaacaattgttgcaacagattgtaccagctctgactcagctagttgtggc

SEQ ID NO: 8962 - DNA, 603 bp, Zea mays
  Clone ID: LIB3061-109-Q1-K6-D10
ctccaacaagcaatcgcagcaagcaacatacctttatcacccttgtttcaacaatcgccagccctatctttggtgcagtcattggtacaaaccatcaaggcacagcagctgcagcaactcgtgctacctgtgatcaaccaagtagctctggcaaacctttctccctactatcagcaacaacaatttcttccattcaaccaactatctacactgaaccctgctgcttatttgcagcaacaactattaccattcagccagctagctactgcctactctcatcaacaacaacttcttccatttaaccaattggccgcactgaacctcgctgcttatttgcagcagcaaatattactaccatttagccagctagctgcagcaagccgtgcttccttcttgacacagcaacagttgctgcctttctaccagcagtttgcggctaaccccgcaaaccttcttacaactgcaacaattgctgccattcaaccaacttgctttgacaaacccaacagcgttctaccaacaacccatcattggtggtgccctcttttagattgcttatgagttatacttcaataatgaagttttttggatgatgtttgtgga

SEQ ID NO: 8963 - DNA, 599 bp, Zea mays
  unsure (1)..(599): unsure at all n locations; Clone ID: LIB3061-109-Q1-K6-D11
nattganaaccaactagcaacatagnaaagcacaatagtgtaccaacaatggcagccaaaatttttgcctccttatgctccttggtctttctgcaagtgctgctacggcgaccattttcccgcaatgctcgcaagctcctatagcttcccttcttcccccgtacctctcaccagcggtgtcttcggtatgtgaaaacccaattcttcaaccctacaggatccaacaggcaatcgcagctggcatcttacctttatcacccttgttcctccaacaatcatcagccctattacaacagttacctttggtgcatttattggcacaaaacatcagggcacaacaactacaacaacttgtgctagcaaaccttgctgcctactctcagcaacagcagtttcttccattcaaccaactaggttcattgaactctgcttcttatttgcaacaacaacaactaccattcagccagctacctgctgcctacccccagcaatttcttccattcaaccaactagcagcattgaactctcctgcttatttacagcagcaacaactactaccattcagccagctagctggtgtgagccctgctaccttcttg

SEQ ID NO: 8964 - DNA, 600 bp, Zea mays
  unsure (1)..(600): unsure at all n locations; Clone ID: LIB3061-109-Q1-K6-D2
attggaaacccaactagcaacatagnaaagcacaatagtgtaccaacaatggcagccaaaaattttgcttccttatgctccttggtctttctgcaagtgttgctaccgcaaccattttcccacaatgctcacaagctcctatagcttcccttcttcccccatacctctcaccagcggtgtcttcaatgtgtgaaaacccaattgttcaaccctacaggatccaacaggcaatcgcaacaggcatcttaccattatcacccttgttcctccaacaaccgtcagccctattacagcagttacctttggtccatttggtggcacaaaacatcagggcacaacaactacaacaacttgtgctagcaaaccttgctgcatactctcagcaacatcagtttcttccattcaaccaactggctgcattgaactctgctgcttatttgcaacaacaattaccattcagccagctagttgctgcctacccccagcaatttcttccattcaaccaactagcagcattgaactctgctgcttatttacagcagcaacaactactaccattcagccagctagctgatgtgagccctgctgccttcttgacac

SEQ ID NO: 8965 - DNA, 609 bp, Zea mays
  unsure (1)..(609): unsure at all n locations; Clone ID: LIB3061-109-Q1-K6-D4
ggnaactcccgggctcgagagnacgggacgatgatgggagggcgcgctctgctgctgctcctggtctcggcgctgctcgttcagatccgcgcctctgacccgctgctgtacgagccgtttgatgaggacttcgagggtagatggatcgtctccaagaaggatgaataccaaggtgtatggaagcatgccaagagtgatgggcatgaggactatggcctccttgttagtgacaaggcaaggaaatacgccataatcaaggagcttgatgagccagttaccttaaatgatgggacagtggtcctgcagtttgaagtgagacttcagaatggccttgaatgtggaggtgcctacattaagtacatccgccctcaggatgctggatgggatgccaaggagtttgataatgagactccatacactattatgtttggtccagataaatgtgggtcaaccaacaaggttcatttcatccttaagcacaagaatcctaagactggaaagtatgttgagcatcacctcaaattcccaccttctgtcccatacgacaagctctctcatgtctacacagctatcttgaagccagacaatgaggtcagaattttgatcgat

SEQ ID NO: 8966 - DNA, 517 bp, Zea mays
  Clone ID: LIB3061-109-Q1-K6-D7
tttttactagcaaatacatagtagaatacactagcaacatgttaacaccaagggagccaagatttttccctccttgccctccttgctctttcagcaagcgctggtacctctactattattccacaatgctcacaacaatacactctctacggttacagccgcgggatttcaacacccaagggggggggggtacatgctacatgaggccatcgtatcaagcatattacggtcattagcattaaccctccaacagacatatgccctattgcaacaaccatccttattgcatctgtatctccaaagaatcttgacacaacaactacaacaacagttgctaccaacaatcacttcaagtagttgcagtgaaccttgctgcttatctccagcaacaacaatttcttccattcaatcaactagctgtggtgaaccctgctgtctacttgcatgcacaacaactactaccatttaaccaacttgattgcagccctgatgccttcttactgcaacaacatcttct

SEQ ID NO: 8967 - DNA, 432 bp, Zea mays
  Clone ID: LIB3061-109-Q1-K6-D8
ttccaaatcaaatctgcaacatcaattatctaactccaaaaacctgaagctggtgcttgtggttcttgctttcattgctttagtatcaagtgtttcttgtacacagacaggcggctgctgctgtggtcaacaacaaagccatgagcagcaacatcatccacaacaacatcatccacaaaagcggcgacatcaaccaccaccacaacatcaccagcagcagcaacaccaacaacaacaagttcacatgcaaccacaaaaacatcagcaacatcaacgaattcatgttcaacaacaacaacaacaaccgcagcaccaccagcaacatcaacttcaacagcaccaacaacaacatcaatgtgaaggccaacaacaccatcaccaacaatcacacggccatgttcaacaacacgaactgcagccttgagcaccacc

SEQ ID NO: 8968 - DNA, 588 bp, Zea mays
  Clone ID: LIB3061-109-Q1-K6-D9
tacatctgttatgtttgggtgctcttgcattctcgcaagtgctatagaggagcaacggtaccaggacgcgtcaaggttgacaaagctatctgggaccacttttgtaattgccaactcttcactgattattttcctatatgttgctccagaataaatggatcatagtgcggtggtcatgggattgggatctgctccgtatttgcagggtgaagccttcgtgtctcctcgagggaaagtcactgacctttcttgggacgtggaccactgacggcccccgtcatcccccatgacggtgatcctagggtgaagccttcgtgtttcctcgagggaaatctaccagtgcgggattgatttagtcagcaccattggacacagggtttagttccattgcctggacccatcaatgaatcatggtgccaaggtcttgatggttcgacttcaaggtactgatattctccaggactattgttagcatcccttgtggtccatctgcattagcagtgaagaaagtcgcatggggacttgcttgatatgttgttattgctcagatttgtctttcgtactggcaccacatcatagacatggctg

SEQ ID NO: 8969 - DNA, 543 bp, Zea mays
  unsure (1)..(543): unsure at all n locations; Clone ID: LIB3061-109-Q1-K6-E10
ctagcaacatagnaaagcacaatagtgtaccaacaatggcagccaaaaattttgcttccttatgctccttggtctttctgcaagtgttgctaccgcaaccattttcccacaatgctcacaagctcctatagcttcccttcttcccccatacctctcaccagcggtgtcttcaatgtgtgaaaccccaattgttcaaccctacaggatccaacaggcaatcgcacacaggcatccttaccattatcacccttgttcctgcaacaaccggcacacctattacagcagttaccttaggtccatttcgtggcacacaacatcacggcacaacaactacaacaacttgtgctagcacaaccttgctttatactttcagaaacatcctgtacttccattcaaccaactgtctgcattgaactatactgcttatttgcaacaacaattaccatccatccagttaggagctgcctacccaccacattttcttgcattcaacacaactagcatgtttgaactctgctgcttatgtacagcactcacaactac

SEQ ID NO: 8970 - DNA, 607 bp, Zea mays
  unsure (1)..(607): unsure at all n locations; Clone ID: LIB3061-109-Q1-K6-E11
gcaagcacatanaagtagaatccattagcaacaatagagcaacaatggcgaccaagatattttccctccttatgctccttgctctttctacatgtgttgctaacgcgacaattttccctcaatgctcacaagctcctatagcttcccttcttcccccataccttccatcaattatagcttcagtatgtgaaaacccagctcttcaaccatataggcttcaacaagcaatcgcagcaagcaacatacctttatcgcccttgttgtttcaacaatcaccagccctatctttggtgcagtcattggtacaaaccatcagggcacaacagctgcagcaactcgtgctacctgtgatcaaccaagtagctctggcaaacctttctccctactctcagcaacaacaatttcttccattcaaccaactgtctacactgaaccctgctgcttatttgcagcaacaactattaccatttagccagctagctactgcctactctcagcaacaacaacttcttccatttaaccaattggccgcactgaaccccgctgcttatttgcagcagcaaatactactgccatttagcgagctagctgcagcaagtcgtgcttc

SEQ ID NO: 8971 - DNA, 588 bp, Zea mays
  unsure (1)..(588): unsure at all n locations; Clone ID: LIB3061-109-Q1-K6-E5
caactagcaacatagnaaagcacaatagtgtaccaacaatggcagccaaaatattttgcttccttatgctccttggtctttctgcaagtgctgctaccgcaaccattttcccacaatgctcacaagctcctatagcttcctttcttcccccatacctctcaccagcggtgtcttcagtatgtgaaaacccaattcttcaaccctacaggatccaacaggcaatcgcagcaggcatcttacctttatcacccttgttcctccaacaaccgtcagccctattacagcagttacctttggtgcatttgttggcacaaaacatcaaggcacaacaactacaacaacttgtgctaggaaaccttgctgcctactctcagcaacagcagtttcttccattcaaccaactggctgcattgaactctgctgcttatttgcaacaacaactaccattcagtcagctagctgctgcctacccccagcaatttcttccattcaaccaactggcagcattgaactctgctgcttatttacaacagcaacagctaccaccattcagccagctagctgatgtgagccctgttgccttcttga

SEQ ID NO: 8972 - DNA, 601 bp, Zea mays
  Clone ID: LIB3061-109-Q1-K6-E6
cacccaagcgaacgcactagcaacaacctaacaacaatggctaccaagatattatccctccttgcgcttcttgcgctttttgcgagcgcaacaaatgcgtccattattccacaatgctcacttgctcctagttccattattccacagttcctcccaccagttacttcaatggccttcgaacacccagctgtgcaagcctataggctacaacaagcgattgcggcgagcgtcttacaacaaccaattgcccaattgcaacaacaatccttggcacatctaacaatacaaaccatcgcaacgcaacagcaacaacagttcctaccagcactgagccacctagccatggtgaaccctgtcgcctacttgcaacagcagctgcttgcatccaacccacttgctctagcaaacgtagttgcaaaccagcaacaacaacaactgcaacagtttctgccagcgcttagtcaactagccatggtgaaccctgccgcctacctacaacagcaacaactgctttcatctagcccgctcgctgtggccaatgcacctacatacctgcaacaagaattgttgcaacagattgtaccagctctaactcagctag

SEQ ID NO: 8973 - DNA, 591 bp, Zea mays
  unsure (1)..(591): unsure at all n locations; Clone ID: LIB3061-109-Q1-K6-E7
gcaacatagnaaagcacaatagtgtaccaacaatggcagccaaaatattttgcttccttatgctccttggtctttctgcaagtgttgctaccgcaaccattttcccacaatgctcacaagctcctatagcttcccttcttcccccatacctctcaccagcggtgtcttcaatgtgtgaaaccccaattgttcaaccctacaggatccaacaggcaatcgcaacaggcatcttaccattatcacccttgttcctccaacaaccgtcagccctattacagcagttacctttggtccatttggtggcacaaaacatcagggcacaacaactacaacaacttgtgctagcaaaccttgctgcatactctcagcaacatcagtttcttccattcaaccaactggctgcattgaactctgctgcttatttgcaacaacaattaccattcagccagctagttgctgcctacccccagcaatttcttccattcaaccaactagcagcattgaactctgctgcttatttacagcagcaacaactactaccattcagccagctagctgatgtgagccctgctgccttcttgacacaacaac

SEQ ID NO: 8974 - DNA, 607 bp, Zea mays
  unsure (1)..(607): unsure at all n locations; Clone ID: LIB3061-109-Q1-K6-E9
gcaacatagnaaagcacaatagtgtaccaacaatggcagccaaaaattttgcctccttatgctccttggtctttctgcaagtgctgctacggcgaccattttcccgcaatgctcgcaagctcctatagcttcccttcttcccccgtacctctcaccagcggtgtcttcggtatgtgaaaacccaattcttcaaccctacaggatccaacaggcaatcgcagctggcatcttacctttatcacccttgttcctccaacaatcatcagccctattacaacagttacctttggtgcatttattggcacaaaacatcagggcacaacaactacaacaacttgtgctagcaaaccttgctgcctactctcagcaacagcagtttcttccattcaaccaactaggttcattgaactctgcttcttatttgcaacaacaacaactaccattcagccagctacctgctgcctacccccagcaatttcttccattcaaccaactagcagcattgaactctcctgcttatttacagcagcaacaactactaccattcagccagctagctggtgtgagccctgctaccttcttgacacaaccacagttgttgccgttc

SEQ ID NO: 8975 - DNA, 514 bp, Zea mays
  Clone ID: LIB3061-109-Q1-K6-F10
gttaaaccggtaagggtgatgccttgctgttcttcagcctccaccctgatgcaacgacagactctgacagcttgcacggtagctgccccgtaatcgaaggccagaagtggtccgcaactaaatggatccatgtgaggtcatttgacctccctgtgaagcagccgggttcctctgacggatgcgaggacgacaatatcctctgcccccagtgggcagctgtgggtgagtgtgccaagaaccctaactacatggtggggaccaaggaagctcctggcttctgccggaagagctgcaaagtatgcgcagagtaaggtagtagcctgctgtctgatatgtgtcatggcgtgttgcgtagtagtctgctgtttggataccgactggagtatagcatgtatgaagtagaacccggaagaaggaatcgtacgacagccgagttatctgataacttgtctcttgtgggaaatgaaagcgttccttaattaagcgaaaaaaaaaaaaaaaaggtggccgctct

SEQ ID NO: 8976 - DNA, 594 bp, Zea mays
  unsure (1)..(594): unsure at all n locations; Clone ID: LIB3061-109-Q1-K6-F12
gggnnnaaaatggttgcngnngtagcagcactttgcagnaaggaccaattcttcaaccctacaggatccaacaggcaatcgcagcaggcatcttacctttatcacccttgttcctccaacaaccgtcagccctattacagcagttacctttggtgcatttgttggcacaaaacatcaaggcacaacaactacaacaacttgtgctaggaaaccttgctgcctactctcagcaacagcagtttcttccattcaaccaactggctgcattgaactctgctgcttatttgcaacaacaactaccattcagtcagctagctgctgcctacccccagcaatttcttccattcaaccaactggcagcattgaactctgctgcttatttacaacagcaacagctaccaccattcagccagctagctgatgtgagccctgttgccttcttgacacaacaacagttgttgccgttctacctgcacgctgcgcctaacgctggcaccctcttacaactgcaacaattgctgccattcaaccaacttgctttgacaaacccaacagcgttctaccaacaacccatcattggtggtgccctctttt

SEQ ID NO: 8977 - DNA, 484 bp, Zea mays
  unsure (1)..(484): unsure at all n locations; Clone ID: LIB3061-109-Q1-K6-F2
gccagctgcagggnaacctgcggcgttggcagcaccccgatcctgggccagtgcgtcgagttcctgaggcatcagtgcagcccgacggcgacgccctactgctcgcctcagtgccagtcgttgcggcagcagtgttgccagcagctcaggcaggtggagccgcagcaccggtaccaggcgatcttcggcttggtcctccagtccatcctgcagcagcagccgcaaagcggccaggtcgcggggctgttggcggcgcagatagcgcagcaactgacggcgatgtgcggcctgcagcagccgactccatgcccctacgctgctgccggcggtgtcccccactgaagaaactatgtgctgtagtatagccgctggctagctagctagttgagtcatttagcggcgatgattgagtaataatgtgtcacgcatcaccatgggtggcagtgtcagtgtgagcaatgacctgaatgaacaattgnnnatg

SEQ ID NO: 8978 - DNA, 587 bp, Zea mays
  unsure (1)..(587): unsure at all n locations; Clone ID: LIB3061-109-Q1-K6-F3
catgtacaaagnatctgataataatgggttcgctccgtgatggcaagaccaacagcagcagtggccggcggtggtgcgcggtgaccggcggccggggcttcatggcgaggcacctggtggccgcgctgctgcgctccggcgagtggcttgtgcgggtcaccgacctcgccccggatgtcgtgctcggcctcggcgacaccgaggacgtcctcgatgacgccctccgtgatggccgcgccgtctatgcctcagcggatgtctgcaacctagaccagcttattcaagcttttgaaggggttgaggttgttttccacacagctgctgcggatccaagcaagaacgaccagcaacttcactataaggtcaacgttgaggggacaaagaacgtggttgatgcgtgcatgatttgcaaggtgaaaaggcttatccacaccagctctattgctgnntgtgttcgacggagttaatgggcttctcgatgcaaatgaatcattgccatacccaaacaagtttcctgatgcgtatggacaaaccaaggcagaagcagaaaaganagtcatgaaggctaatggcattagtggccttct

SEQ ID NO: 8979 - DNA, 604 bp, Zea mays
  unsure (1)..(604): unsure at all n locations; Clone ID: LIB3061-109-Q1-K6-F4
gtcgtcagcctagcaattagctcatcgactccanattggagaactcgacaccatgaaggtgctgatcgttgcccttgctctcctggcgctcgctgcgagcgccgcctccagtacaagcggcggctgtggctgccagacaccaccgtttcatctaccgcctccgttctatatgccgcctgcggtgtatctgccgccgcagcagcagccgcagccatggcaataccccactcaaccaccgcagctaagcccgtgccagcagttcggatcctgcggcgtcggcagcgtcggcagcccgttcctgggccagtgcgtcgagttcctgaggcaccagtgcagcccggcggcgacgccctacggctcgccacagtgccaggcgctgcagcagcagtgctgccaccagatcaggcaggtggagccgctgcaccggtaccaggcgacatacggtgtggtcctgcagtccttcctgcagcagcagccgcagggcgagctcgcggcgctgatggcggcccaggtagcgcagcagctgacggcgatgtgcggtctgcagctgcagcacccaggtccctgcccttgcaacgcagctgccgggcgtgtctactacttg

SEQ ID NO: 8980 - DNA, 610 bp, Zea mays
  unsure (1)..(610): unsure at all n locations; Clone ID: LIB3061-109-Q1-K6-F5
ccaactagcaacatagnaagcacaatagtgtaccaacaatggcagctaaaatattttgcctccttatgctccttggtctttctgcaagtgctgctacggcgaccattttcccacaatgctcacaagctcctatagcttcccttcttcccccgtacctctcaccaacggtgtcttcggtatgtgaaaacccaattcttcaaccctacaggatccaacaggcaatcgcagctggcatcttacctttatcacccttgttcctccaacaatcatcagccctattacagcagttacctttggtgcatttattggcacaaaacatcagggcacaacaactacaacaacttgtgctagcaaaccttgctgcctactctcagcaacagcagtttcttccattcaaccaactagctgcattgaactctgcttcttatttgcaacaacaacaactaccattcagccagctatctgctgcctacccccagcaatttcttccattcaaccaactgacagcattgaactctcctgcttatttacagcagcaacaactactaccattcagccagcttagctggtgtgagccctgctaccttcttgacacaaccacagttgttgc

SEQ ID NO: 8981 - DNA, 597 bp, Zea mays
  unsure (1)..(597): unsure at all n locations; Clone ID: LIB3061-109-Q1-K6-F7
catgggcttcngacacccagctgtgcaagcctataggctacaacaagcaattgcggcgagcgtcttacaacaaccaatttcccagttgcaacaacaatccttggcacatctaacaatacaaaccatcgcaacgcaacagcaacaacaattcctaccagcactgagccacctagccatggtgaaccctgccgcctacttgcaacagcagttgcttgcatcaaacccacttgctctggcaaacgtagttgcaaaccagccacaacaacagctgcaacagtttctgccagcgctcagtcaactagccatggtgaaccctgccgcctacctacaacagcaacaactgctttcatctagcccgctcgctgtggccaatgcacctacatacctgcaacaacaattgttgcaacagattgtaccagctctgactcagctagttgtggcaaaccctgctgcctacttgcaacagctgcttccattcaaccaactgactatgtcgaactctgctgcgtacctacaacagcgacaacagttacttaatccactagcagtggctaacccattggtcgctgccttcctacagcagcaacaattgctgcc

SEQ ID NO: 8982 - DNA, 594 bp, Zea mays
  Clone ID: LIB3061-109-Q1-K6-F9
gcaaggggatccgatggacaagtacgagcccgttcgcgagatcggggcgggcaacttcggggtggccaagctgatgaggaacaaggacacgagggagctggtggccatgaagttcatagagcgaggaaacaggatcgacgagaacgtgttccgcgagatcgtgaaccaccgctccctccgccaccccaacatcatccggttcaaggaggtggtgctgactcccacgcaccttgcgatcgtgatggagtacgctgcgggcggggagctgttcgagcgcatctgcgacgccgggcggttccacgaggacgaggcgcgctacttcttccagcagctggtttgcggcgtcagcttctgccacgccatgaacatctgccaccgggacctcaagctggagaacacgctgctggacggcagcccggcgccgcgcctcaagatctgcgacttcggctactccaagtcctcggtgctgcactcgcgaccgaagtcaacggtgggcacgccggcgtacatcgcgcccgaggtgctgtcgcggcgagagtacgacgggaagcacgccgacgtctggtcgtgcggagtcacgctctacgtcatgct

SEQ ID NO: 8983 - DNA, 504 bp, Zea mays
  unsure (1)..(504): unsure at all n locations; Clone ID: LIB3061-109-Q1-K6-G10
cccgtccaaaatcctgtggcgcaccatccgcgggatgattccgcacaagaccanagggggaggcggctctggcgaggctcaagacgtacgagggcgtaccgccgccgtacgacaagactaagcgcctggtcatccctgacgctcttaaggttctgaggctgcaaccaggacacaagtactgcctccttggggagctttctaaggaggtcggatggaactaccatgacaccatcagggagcttgaggagaagaggaaggagaaggccaaggtggcctatgagaggaggaagcagctggccaagctgcgcctaaaggctgaggctacagccgaggaaaagctagggtcacagctggacattcttactccgatcaagtactgaatctgtggtttcgtgcctatcagttttgtggaacatctgatccatcgttttaaaagttgtgacagtataatcttgagtgctattctgaacacattttgtagccggtgaatgtattgtttgtttt

SEQ ID NO: 8984 - DNA, 576 bp, Zea mays
  Clone ID: LIB3061-109-Q1-K6-G11
gcgaagcgaagcttcaagctagtctcggcggctctagaagacgatgggcaaggacgacgtgatcgagagcggcgctggcggcggcgagttcgctgccaaggactacacggaccctcccccggcgccgctgatcgacgcagcggagctggggtcctggtcgctgtaccgcgccgtgatcgccgagttcatcgccacgctgctgttcctgtacatcacggtggccaccgtgatcgggtacaagcaccagacggacgcgtcggcgtcgggcgccgacgcggcgtgcggcggcgtgggcgtgctgggcatcgcctgggccttcggcggcatgatcttcgtcctcgtctactgcaccgccggcatctcggggggccacatcaaccccgccgtcaccttcggcctcttcctggcgcgcaaggtctccctggtgcgcgcgctgctctacatcgtggcgcagtgcctcggcgccatctgcggcgtcggcctcgtcaaggcgttccagagcgcctacttcgacaggtacggcggcggcgccaactcgctcgcctccggctactcccgcggcaccggcctcggcgc

SEQ ID NO: 8985 - DNA, 566 bp, Zea mays
  Clone ID: LIB3061-109-Q1-K6-G12
ggcatcttaccattatcacccttgttcctccaacaccgtcagccctattacagcagttacctttggtccatttggtggcacaaaacatcagggcacaacaactacaacaacttgtgctagcaaaccttgctgcatactctcagcaacatcagtttcttccattcaaccaactggctgcattgaactctgctgcttatttgcaacaacaattaccattcagccagctagttgctgcctacccccagcaatttcttccattcaaccaactagcagcattgaactctgctgcttatttacagcagcaacaactactaccattcagccagctagctgatgtgagccctgctgccttcttgacacaacaacagttgttgccgttctacctgcacgctatgcctaacgctggcaccctcttacaactgcaacaattgctgccattcaaccaacttgctttgacaaactcaacagtgttctaccaacaacccatcattggtggtgccctcttttagattgcttatgagttatagctcaataatgaagttttttggatgatgtttgtggcgtcc

SEQ ID NO: 8986 - DNA, 549 bp, Zea mays
  unsure (1)..(549): unsure at all n locations; Clone ID: LIB3061-109-Q1-K6-G3
gccttctttttggacaagaaccggtggttgcttttttccaacaggttgggggttaaccccgaaaccttttaccacctccaaaattggtggcctttggtcaacttggtttggccgacaccagggggcttcttccaaccacccattattgggggggcccttttttaggatggtttattagtggtaattaattattaaggtttttgggtgaaggatgggggccacccagaaataaaaaggttcctttcccaaanaaaaaanaaaaaaanaaaaaanaaaaataaaaaagaaaaaaaaaaaataaaaaaaaaaaaaaaaaaaaaaaaaaaaaaagggggggcgtttttaaagatncaagtttacctaccggtgcttgccaactcttaacttttnttttggggcacctaattnaaattaactggccggngttttaaaaccttgggaatggaaaaaccnnggggttacccaattaaaacggtttggaaagaatcccccttttnccagtttggctaataacgaaaaagccccgcncgatcggcnttcccaaaaatt

SEQ ID NO: 8987 - DNA, 602 bp, Zea mays
  unsure (1)..(602): unsure at all n locations; Clone ID: LIB3061-109-Q1-K6-G6
gngnaccaacaagcaacatagnaagtggaatacagtagcaaaaatagagcaacaatggcggccaagatattttccatccttatgctccttgctctttctgcatgtgttgctaacgcgaccatttttcctcaatactcacaagctcctatagctgcccttcttcccccataccttccatcaatgaccgctttagtatgtgaaaacccagcccttcaaccctacaggatccagcaagcaatcgcaacaagcaacttacctttatcacacctgttctttcaacaatcgccagccctatctttggtgcagtcattggtacaaaccatcagggcagaacagttgcagcaactcgtgctaccagtgatcagccaagtagctctggcaaacctttccccctactctcagcaacaacaatttcttccattcaaccaactgtctatactgaaccctgctgcttatttgcagcaacaacaactactaccattcagccagctagctactgcctactctcagcagcaacaatttcttccatttaaccaattggccgcactgaacccctctgcttatttccagcagcaaatactactaccatttggccagctagc

SEQ ID NO: 8988 - DNA, 600 bp, Zea mays
  Clone ID: LIB3061-109-Q1-K6-G8
gcggcagtgcgtagatggatcgtcgaacaaaacagcatgaagatggtcatcgttctcgtcgtgtgcctggctctgtcagctgccagcgcctctgcaatgcagatgccctgcccctgcgcggggctgcagggcttgtacggcgctggcgccggcctgacgacgatgatgggcgccggcgggctgtacccctacgcggagtacctgaggcagccgcagtgcagcccgctggcggcggcgccctactacgccgggtgtgggcagacgagcgccatgtaccagccgctccggcaacagtgctgccagcagcagatgaggatgatggacgtgcagtccgtcgcgcagcagctgcagatgatgatgcagcttgagcgtgccgctgccgccagcagcagcctgtacgagccagctctgatgcagcagcagcagcagctgctggcagcccagggtctcaaccccatggccatgatgatggcgcagaacatgccggccatgggtggactctaccagtaccagtaccagctgcccagctaccgcaccaacccctgtggcgtctccgctgccattccgccctactactgattcatgatatttgggaaatct

SEQ ID NO: 8989 - DNA, 579 bp, Zea mays
  unsure (1)..(579): unsure at all n locations; Clone ID: LIB3061-109-Q1-K6-G9
caacaagcaacatagnaaagtggatacagtagcaaaaatagacaacaatggcggccaagatattttccatccttatgctccttgctctttctgcatgtgttgctaacgcgaccatttttcctcaatactcacaagctcctatagctgcccttcttcccccataccttccatcaatgaccgctttagtatgtgaaaacccagcccttcaaccctacaggatccagcaagcaatcgcaacaagcaacttacctttatcacacctgttctttcaacaatcgccagccctatctttggtgcagtcattggtacaaaccatcagggcagaacagttgcagcaactcgtgctaccagtgatcagccaagtagctctggcaaacctttccccctactctcagcaacaacaatttcttccattcaaccaactgtctatactgaaccctgctgcttatttgcagcaacaacaactactaccattcagccagctagctactgcctactctcagcagcaacaatttcttccatttaaccaattggccgcactgaacccctctgcttatttccagcagcaaatactactaa

SEQ ID NO: 8990 - DNA, 551 bp, Zea mays
  unsure (1)..(551): unsure at all n locations; Clone ID: LIB3061-109-Q1-K6-H1
ggcaggtcggcgaggagggcaggcagtaccgagnaccgaccgtgcgggggctcgggacgggaacgggacaggaccccaaaatctcagatccttcctgcccgcccgcccgtgcccgtcgacgcgtcgttcttgccggccgcgcctcacctccgccctctcctcctccaggggatttgatacgccacaggctgcgcgatggtgctgtgggtcttcggctacggctccctcatctggaaccccggcttcgacttcgacgacaaaatcctcggcttcatcaagggctacaagcgcacctttaatctcgcttgcattgaccacagaggcacaccggagcatccggcgaggacctgcacncttgaaaccgacgacnaggccatatgctggggaattgcatattgtgtcaagggtggtccagaaaagagctaaaagcanngcagtacttggagagaagagagtgtgagtacnaccagaagatatccatttttttctacaaggaaggagatcccttgaaaccagctgtgacaggcgttttagtgttcgtttgcactcca

SEQ ID NO: 8991 - DNA, 577 bp, Zea mays
  unsure (1)..(577): unsure at all n locations; Clone ID: LIB3061-109-Q1-K6-H10
caactagcaacatagnaaagcacaatagtgtaccaacaatggcagccaaaaattttgcttccttatgctccttggtctttctgcaagtgttgctaccgcaaccattttcccacaatgctcacaagctcctatagcttcccttcttcccccatacctctcaccagcggtgtcttcaatgtgtgaaaccccaattgttcaaccctacaggatccaacaggcaatcgcaacaggcatcttaccattatcacccttgttcctccaacaaccgtcagccctattacagcagttacctttggtccatttggtggcacaaaacatcagggcacaacaactacaacaacttgtgctagcaaaccttgctgcatactctcagcaacatcagtttcttccattcaaccaactggctgcattgaactctgctgcttatttgcaacaacaattaccattcagccagctagttgctgcctacccccagcaatttcttccattcaaccaactagcagcattgaactctgctgcttatttacagcagcaacaactactaccattcagccagctagctgatgtgagccctgct

SEQ ID NO: 8992 - DNA, 589 bp, Zea mays
  Clone ID: LIB3061-109-Q1-K6-H2
gggatgagctttatctcaacttgttcttgagtttgttccagagacagtaaacaggattgcaaggcagtacaatcgaatgaatcagcggatgcccctcatttatgtcaaactgtacacgtatcagatatgccgagcgcttgcttatatacataactgcattggcatctgccaccgtgatatcaaaccgcagaatgttcttgttaacccacatacacaccaactcaaaatttgcgatttcggaagtgctaaagtattggtcagaggagagccaaacatctcctacatatgctcaaggtattatcgagcaccagagctcatatttggtgcaacggaatatactactgctattgatttgtggtcaacaggctgtgtcatggcagagctgcttctaggacaggctctgtttcctggagaaagtggagtcgaccaactagttgagatcatcaaggttttgggtactccaacaagggaagagatcaagtgcatgaacccaaactatacggagttcaagttcccacaaattaaagctcatccgtggcacaaggtttttcaaagaaggcttccacctgaagcagtggaccttgttagc

SEQ ID NO: 8993 - DNA, 607 bp, Zea mays
  unsure (1)..(607): unsure at all n locations; Clone ID: LIB3061-109-Q1-K6-H5
gtgaaccccattgttcaaccctacagatccaacaggcaatcgcaacaggcatcttaccattatcacccttgttcctccaacaaccgtcagccctattacagcagttacctttggtccatttggtggcacaaaacatcagggcacaacaactacaacaacttgtgctagcaaaccttgctgcatactctcagcaacatcagtttcttccattcaaccaactggctgcattgaactctgctgcttatttgcaacaacaattaccattcagccagctagttgctgcctacccccagcaatttcttccattcaaccaactagcagcattgaactctgctgcttatttacagcagcaacaactactaccattcagccagctagctgatgtgagccctgctgccttcttgacacaacaacagttgttgccgttctacctgcatgctatgcctaacgctggcaccctcttacaactgcaacaattgctgccattcaaccaacttgctttgacaaacccaacagtgttctaccaacaacncatcattgggggtgccctcttttagattgcttatgagttatagttcaataatgaaagtttttggatgatgtttgt

SEQ ID NO: 8994 - DNA, 605 bp, Zea mays
  Clone ID: LIB3061-109-Q1-N6-A4
tcgttcccctgttcggttttaggagacctgcgccgttcctccggccacgcgagcacgccgaaatggtcggccacagttccattagtaccaagtggtgggtcgcgcgctgccgaccccaaccgatgagcgcctcctgatctaccgcatgaagatctgggccaataacgtaggttcgcgccaagtcgaagttctggtacttactgacaaagcttttgaaggcgaataagaacaatggccagatgctcggcctctacgagcatcttcgagcgcaaccctaccaccattaagaactacggcctctggctgcggtaccagagcacgacggggtaccacaacatgtacaaggagtaccgggacaccaccctgaacagttccggggagcatatgtacaacgagatggactcgctctcccgggggaggtgcccctgcattcagatcatcaagactgggacggtccacttcaagctgtgcaagtaggacaacactaagcagttccacaactccgagatcaagttaccgcttgtgttccgcaaggtgagggcggccaccaggaagctcatgaccaccttcaaggcgtccaggcccaacctgttcatgtgatgggc

SEQ ID NO: 8995 - DNA, 555 bp, Zea mays
  Clone ID: LIB3061-109-Q1-N6-A8
tcgcttagtgcttgtttgagagtaatggaggggactgagaggcccaaaatcctttatggccaaatcctttatagcttgttcggttattttcaattcataggtattggaagagattgatatagattggaggagatttgatgtactagagattgaaactccctcaatccatatagattaggagtaaaaccgaatatatctttagggcttgttcggttttaggaagaattcctctctaatccttctcaatccatttctaatcaaacagaccttactattcaaatagtaagggattttggctccttgagtgcccttcattacatctggtcctaaacgagcctttaggggatagactgtttggtttgttgtgtaaggtgttataggatgactagcttttttgtataagtttagtttaattcgagtgactaaggttagatatattgtgatgtccttagctataaaactaaacagtcgtcctttaatatgtcaaggagtccgagttgaaattcatcgtggctctttctctatgtcccacaaaaaatttaaaggattttggcc

SEQ ID NO: 8996 - DNA, 541 bp, Zea mays
  Clone ID: LIB3061-109-Q1-N6-B12
tcgtccacgcgatcgcgcaaattgcaccaagaatccatcgagtggctcgtcacacagggcgaaattaatggcctcttcaattatcagcacccaccgaacgactcatactaacagccgccgtcctgctctccgtgctcgcggcatgccagcgccagcgccacaacctcctgcgtgccggggtgggccattccgcacaacccggtagcgatctgccgctggtacgtgaccagccggacctgcggcatcccgccgatcctgcccaggccggagctgaacatggatgctggcgggagctggaatgacatcccggcctactgccggtgcacggggctgagcattctgatggactgcacgatcccgcccggccccgacgcgcagctggagggccttctagaggacctgcccggctgcccgcgggaggtgcagatgggattcacctccaccctcgttacggtagtcgagtgcaacctgggcaccatcagcggcgtcgccgaatgcccctggattctcggccacggaacgatgccctacaagtaactgc

SEQ ID NO: 8997 - DNA, 477 bp, Zea mays
  Clone ID: LIB3061-109-Q1-N6-B4
tcgtttcatcaaaaagctactaggtataaccatcgctcaatctattggccatggctaagactgacatgtacctacgagggcaccatctgtagtgcacatatccctttcgatgtagaaaatggaccctcctacctggggcagctgtcgctgcaacggatggttccagaatatgaaacaggcttgtcttggcgacaaatccgtggtgtgctagcttgcaacgagaatgcattcacatgtggaatacaacatgcgctgagggcggaacaactgactgcggtgacctactgacagcggcaacagttacttaatgcactagcggggggtaagccatggagcagtgcctgcctacaggcagcaacaattgctgccatacaaccagttctctttggtgaaccctgccttggtgtcggaggaacccatcgtgggaggggccatacctcagattgcatattagatgaactcgatgatggtgccctc

SEQ ID NO: 8998 - DNA, 456 bp, Zea mays
  Clone ID: LIB3061-109-Q1-N6-B8
tcgatttgtctcttcaccataagcataggaaatgaaagcagactctaggtgttcaggcatgtcaacaatcttaggggcgctagcccgaacaaaagcgaaaagcgcgggtaaggaaagaaagacactgcgcgatctgaggggcacaaacctttgtgacctaagtcagatctgagggtgttgaccttggtctgtacaaaccaaactgatactctgcaaggatattaaatcaacaggttaattgaacagatgacacttgacacgagtacctgctggtacggtattattcaagtgtaccctgccgaataccctacacaaacattaacaacattattgcctgcattggcgcagctctagccatgactcgagatacataaacatttctctgctcatcttatggacagtatgctctaactatgctggcttcaagaactgcaatgtacccaagagttgctagca

SEQ ID NO: 8999 - DNA, 599 bp, Zea mays
  Clone ID: LIB3061-109-Q1-N6-B9
tcggtggtgcccaaagagccaggcacgtgtagaggcgcgtgcatatgctccactgcaactcatctcccctcctcctactgtcatgactgtaaccaatggtacacacacattagcaatatggctcaacagggcaatatatggaacaccacctaccgaggcgcgttatcgtagcttaaccatcaacgcaggaggtacatgtttgcaagaacacacattgataacgctaggcctggatcacaggtttcacgagctctcaagctcaggccttgtacacggcgcacgccttcttggagaacctgacaggcttggtcctcctggcgtccacgacgacggggcacgtcacgtgcgccctgtgcgtaacccgcacgagcctgccgatcacgtagccccgggaggtgaggtcgaagtccagcgtcaggggcaccgtccccccgcccgtgctcgtggacagcgtcaggccgcccccggcgccgtacagcgggaccttctcgccgtggatcaccggcgtcaccgtacggtggctcttcctcgggtggtagtacctgcggacctggccgactgctattgagatctctgaataaatcagacggatggggccg

SEQ ID NO: 9000 - DNA, 534 bp, Zea mays
  Clone ID: LIB3061-109-Q1-N6-C4
tcgctgaaccctgctgcttatttgcagcaacaactattaccattcagccagctagctactgcctactctcagcaacaacaatttcttccattcaaccaactgtctacactgaaccctgctgcttatttgcagcaacaactattaccatttagccagctagctactgcctactctcagcaacaacaacttcttccatttaaccaattggccgcactgaaccccgctgcttatttgcagcagcaaatactactgccatttagcgagctagctgcagcaagtcgtgcttccttcttgacacagcaacagttgctgcctttctacaagcagtttgcggctaaccccgcaaccctcttacaactacaacaattgttgccctttgtccaacttgctttgacaaacccagcagcctcctaccaacaacacatcattggtggtgccctcttttagattgattattagttgtaattcaataataaagttttttggatgatgtatgtggccaaccagaaataagaagttacatttccagattct

SEQ ID NO: 9001 - DNA, 259 bp, Zea mays
  Clone ID: LIB3061-109-Q1-N6-C5
tcgctgtaagcacatgaagctctacaacaccctttctttaccagatgcatcagtagatgtggtttctgaggctacactgagattgaaaatgtcaatgctgtatttcttacacatcaaaatgaagaaatacagcattgacattttgatgtgtaagaactacaaaaaagtggagatgttctacgaaaaatgaaatatgctaacttgcattctgttcaatgatttgaaaggtaattggtgtatataagcagagttctctgac

SEQ ID NO: 9002 - DNA, 593 bp, Zea mays
  Clone ID: LIB3061-109-Q1-N6-C7
tcgcaacatagcacgcccaggcacaaacgacacgaaccaggcaaccagctgccgagggaggaaccctagcggaacaggtgacggcggcgcgctaccggtgacgggggatacggcggcatcgtccccctcggcccctcctccatccccggcgcggcggagccagcagccggcctgcagtttttcagctttataatggatcccaacatgaagcagcttcaagaggctctggttgatattgagaccgatgcagaaaagttcttctggctagacatcagttggtggaaaatgataagataagaaatggtaacagggaggctctgacagcccttcggaaacaagccaggacgtccaagactagcgtgccatctccctttgaggtcataatgaaagagatggaaggaagctctggcaagcagctgataaaggagatatgcccaacgtggtggagatcatgaccccaaggaacatacttggctaatgtttcctggatcagatatgtttgcccgtgttccatttcatgtggcacacactgttgtggaaaaagaccaagaacgcctggatttggataccaagaaactgcaaagctttgtcaa

SEQ ID NO: 9003 - DNA, 608 bp, Zea mays
  unsure (1)..(608): unsure at all n locations; Clone ID: LIB3061-109-Q1-N6-D10
tcgctccaacaagcatcgcagcaagcaacatacctttatcacccttgtttcaacaatcgccagccctatctttggtgcagtcattggtacaaaccatcaaggcacagcagctgcagcaactcgtgctacctgtgatcaaccaagtagctctggcaaacctttctccctactatcagcaacaacaatttcttccattcaaccaactatctacactgaaccctgctgcttatttgcagcaacaactattaccattcagccagctagctactgcctactctcatcaacaacaacttcttccatttaaccaattggccgcactgaacctcgctgcttatttgcagcagcaaatattactaccatttagccagctagctgcagcaagccgtgcttccttcttgacacagcaacagttgctgcctttctaccagcagtttgcggctaaccccgcaaaccttcttacaactgcaacaattgctgccattcaaccaacttgctttgacaaacccaacagcgttctaccaacaacccatcattggtggtgccctcttttagattgcttatgagttatacttcaataatngaagtttttggatgatgtttgtggcttc

SEQ ID NO: 9004 - DNA, 472 bp, Zea mays
  Clone ID: LIB3061-109-Q1-N6-F2
tcggtcagctgcagggtaacctgcggtgacggcagtacctcgaatctgaaccagtgcgtcaagttatctgagacatcagaccatgccacccgtggacgccctactgctcattttaacgccagtatttgcggtaaaagagttaactagatatcaagccagtggatctactacaccggatccaggctatattggggtagaccctccagaccatcctgcaggaatagccgtaaagtggtcaaggcccgacactgccggcggtgcatatagctcatgaactgacaagaatgtgcggactgcacagtctactgcatgcccctacgctggtaccggcggagcaccccactgaagaaactatgccctgtgatatagctccatcgctatctagctagttgagacatttagccgcgatgactgagtaataatgcgagcacgcatgaccatggcgtggcagcggcactgtgagcaaagaaac

SEQ ID NO: 9005 - DNA, 597 bp, Zea mays
  Clone ID: LIB3061-109-Q1-N6-F3
tcgtatgtacaaagatctgaataatatgggttcgctccgtgttggcatagaccaaagcagcagtggccggcggtggtgcgcggtgaccggcggccggggcttcatggcgaggcacctggtggccgcgctgctgcgctccggcgagtggcttgtgcgggtcaccgacctcgccccggatgtcgtgctcggcctcggcgacaccgaggacgtcctcgatgacgccctccgtgatggccgcgccgtctatgcctcagcggatgtctgcaacctagaccagcttattcaagcttttgaaggggttgaggttgttttccacacagctgctgcggatccaagcaagaacgaccagcaacttcactataaggtcaacgttgaggggacaaagaacgtggttgatgcgtgcatgatttgcaaggtgaaaaggcttatccacaccagctctattgctgttgtgttcgacggagttaatgggcttctcgatgcaaatgaatcattgccatacccagacaagtttcctgatgcgtatggacaaacaaagcagaagcagaaaagaagtcatgaaggctaatgggcttagtgggcttctaacttgttgca

SEQ ID NO: 9006 - DNA, 548 bp, Zea mays
  Clone ID: LIB3061-109-Q1-N6-F4
tcggtcgtcagcctagcaattagctcatcgactccagattggagaactcgtaaccatgaaggtgctgatcgttgcccttgctctcctggcgctcgctgcgagcgccggctccagtacaagcggcggctgtggctgccagacaccaccgttacatctaccgactccgatctatatgccgcctccggtctatctgccgtcgcaccagcagccgcagccatggcaataccccactcaaccaccgcagttaagcccgggccagcagctcggatcctgcggcgtcagcagcgtcagcagcccgttcctgggccagtgcgtggagttcctgaggcaccagagcatcccggcggcgacgccctacgggtcggcacagtgccacgcgctgcagcagcagtgctgccaccagatcaggcaggaggagccgctgcaccggtaccaggcgacatacggtgtggtgctgcagtacttactgcaacagcagccgcagggcgagctcgcggcgctgatggaactccaggtagcgcaccagctgacggctatgtgcggtctgc

SEQ ID NO: 9007 - DNA, 415 bp, Zea mays
  unsure (1)..(415): unsure at all n locations; Clone ID: LIB3061-109-Q1-N6-G10
tattcgttttttcgtacaagatactgtggtgcaccatcctgcgaaagatttcgcacaagacctaaagggggagggggctatctcttggatcaagacgtacagaggcgtacagacctcgtacgaccagaaataacagcctgagcattcgtgncggctcttaaaagttctaaggttgcaacctagacacaagtactgtgtactttgagagctttctaacgaggtgggcaggaactaccatcactccatcaggaagcttgacgtgtacatgaatgagatagccaaggtggcctatgagaggaggaagcatctatccaacctgctcctaaaggctcacgctacagcacgagtaaaagctatggttacagcttgacattcttactaccatcaaggactgacactggcgtttcgtgcctat

SEQ ID NO: 9008 - DNA, 592 bp, Zea mays
  Clone ID: LIB3061-109-Q1-N6-G11
tcggcgaagcgaagctacaagctcgtgctccgtggctctagaagacgatgggcaaggacgacgtggatctagacggagctcgcggtggtgagtttcgctgacaacgactatcgactgaccttgccgggaaccaatccaaaacaaatctgagctggcgccctgggcactgtaccgtgcaacaaactacgggtacatggaccaactactgttactgaacatgatcgaggacagatggcattgttccaagtaacagaccgacgcccgtgggtcgggcgccattgctgcacgcgcaagccccggtcatgatgcgcatctcctgagagatccgagggcttatctggcgccagccctctagatcactggatgtagaagggccacatggaaccccccacgagggggcccacccacatgatccagcaggcgtccctggctcgcgctctgttgtaatgacgggggcaccgcactctcctgcatctgttgatgccggctcctgagaccgtgatagagggcatatgcaccatgaacaggggaagccccatatgaggggagccagaaccgtgacgtgggagtcgcctgcgttgcgcttagagtc

SEQ ID NO: 9009 - DNA, 542 bp, Zea mays
  Clone ID: LIB3061-109-Q1-N6-G6
tcggtgaccaacaagcaacatagtatgtggaatacagtagcaaaaatagagcaacaatggtcggccaagatattttccatccttatgctccttgctctttctgcatgtgttgctaacgcgaccatttttcctcaatactcacaagctcctatagctgcccttcttcccccataccttccatcaatgaccgctttagtatgtgaaaacccagcccttcaaccctacaggatccagcaagcaatcgcaacaagcaacttacctttatcacacctgttctttcaacaatcgccagccctatctttggtgcagtcattggtacaaaccatcagggcagaacagttgcagcaactcgtgctaccagtgatcagccaagtagctctggcaaacctttccccctactctcagcaacaacaatttcttccattcaaccaactgtctatactgaaccctgctgcttatttgcagcaacaacaactactaccattcagccagctagctactgcctactctcagcagcaacaatttctttcatttaaccaatt

SEQ ID NO: 9010 - DNA, 412 bp, Zea mays
  Clone ID: LIB3061-109-Q1-N6-H4
tcgttgtggctttttgcgggcatacccgaccacctactggttctgagacatcgtgtggacctctctgttgactgacgctagcttccacaatgaggcagacacagcgcaagctggcacagagacgcttgacccatgtgattacaactagctcgggacattactgccgtcttcccttgccgtactgtaaggaagcttatattgcggcgaggcgtacactgggtgaacataagatgcacacacctaacctacaaggcagatgaaatgcctctgcggtcaggtgcactcgcctaggctacctgccgcacacagacccattctccttgtatcctctgcgtgtgcatctgactctcacacataccctaccttgccgcacttatataccgctcactagacctgcatggtacacaggcct

SEQ ID NO: 9011 - DNA, 578 bp, Zea mays
  unsure (1)..(578): unsure at all n locations; Clone ID: LIB3061-110-Q1-K6-A1
nagnccaacaagcaacatagnaagtggnaatccagtagcaacaatagagcaacaatggcgaccaagatattttccctccttatgctccttgctctttctacatgtgttgctaacgcgacaattttccctcaatgctcacaagctcctatagcttcccttcttcccccataccttccatcaattatagcttcaatatgtgaaaacccagctcttcaaccatataggcttcaacaagcaatcgcagcaagcaacatacctttatcgcccttgttgtttcaacaatcgccagccctatctttggtgcagtcattggtacaaaccatcagggcacaacagctgcagcaactcgtgctacctctgatcaaccaagtagctctggcaaacctttctccctactctcagcaacaacaatttcttccattcaaccaactgtctacactgaaccctgctgcttatttgcagcaacaactattaccatttagccagctagctactgcctactctcagcaacaacaacttcttccatttaaccaattggccgcactgaaccccgctgcttatttgcagcagcaaatact

SEQ ID NO: 9012 - DNA, 188 bp, Zea mays
  Clone ID: LIB3061-110-Q1-K6-A10
tacatagtggaagtacactagccaacatgcttagcgaccaatgggtagcgcaatatttttcgccctccttgaccctccttgactcttatcagcaagcagctgcgtacctcagactttgtattccacactgcatcacacacaatacctcctcttcggtgacagtcgcgcggtgatttctaatacccaac

SEQ ID NO: 9013 - DNA, 578 bp, Zea mays
  unsure (1)..(578): unsure at all n locations; Clone ID: LIB3061-110-Q1-K6-A2
naagnaaagcacaatagtgtaccaacaatggcagccaaaaattttgcctccttatgctccttggtctttctgcaagtgctgctacggcgaccattttcccgcaatgctcgcaagctcctatagcttcccttcttcccccgtacctctcaccagcggtgtcttcggtatgtgaaaacccaattcttcaaccctacaggatccaacaggcaatcacagctggcatcttacctttatcacccttgttcctccaacaatcatcagccctattacatcagttacctttggtgcatttattggcacaaaacatcagggcacaacaactacaacaacttgtgctagcaaaccttgctgcctactctcagcaacagcagtttcttccattcaaccaactagctgcattgaactctgcttcttatttgcaacaacaacaactaccattcagccagctacctgctgcctacccccagcaatttcttccattcaaccaactggcagcattgaactctnctgcttatttacagcagcaacaactactaccattcagccagctagnctggtgtgaggccctgctaccttct

SEQ ID NO: 9014 - DNA, 526 bp, Zea mays
  Clone ID: LIB3061-110-Q1-K6-A6
ttgcatatgccagtatggggttcatgttgtctctgctaaaatgtaatgaagtgtgatgatgatactttcgtgagacttgattcagtagtcactgaaattaaaaaggtaccaggtggggagaagtctttacatggggagtatgaatatacaacacaagccactacgccatgggaaatgggctgtaacctatgaggagtggccacaaaaggtgtatccgttatatgcaaatggccctggatatgttatatcatctgatattgctgattttatcatgtcagaattcatgaaacaaaagttgatgctcttcaaaatggaagatgtgagcttgggtgtgtgggttgagcagttcaataagacaagacccgttgaatacgttcacagcgacaaattttgtccaaatggatgcgtccctgactactatactgctcattaccaatcgccaaagctaatgctttgcatgtggcagaagttactggaaggaaaaaccgactgtttgcatgcgagataacaatgatggccgtagttc

SEQ ID NO: 9015 - DNA, 592 bp, Zea mays
  unsure (1)..(592): unsure at all n locations; Clone ID: LIB3061-110-Q1-K6-A9
caactagcaacatagnaaagcacaatagtgtaccaacaatggcagccaaaatattttgcttccttatgctccttggtctttctgcaagtgctgctaccgcaaccattttcccacaatgctcacaagtctcctatagcttcctttcttcccccatacctctcaccagcggtgtcttcagtatgtgaaaacccaattcttcaaccctacaggatccaacaggcaatcgcagcaggcatcttacctttatcacccttgttcctccaacaaccgtcagccctattacagcagttacctttggtgcatttgttggcacaaaacatcaaggcacaacaactacaacaacttgtgctaggaaaccttgctgcctactctcagcaacagcagtttcttccattcaaccaactggctgcattgaactctgctgcttatttgcaacaacaactaccattcagtcagctagctgctgcctacccccagcaatttcttccattcaaccaactggcagcattgaactctgctgcttatttacaacagcaacagctaccaccattcagccagctagctgatgtgagccctgttgccttcttgacac

SEQ ID NO: 9016 - DNA, 606 bp, Zea mays
  unsure (1)..(606): unsure at all n locations; Clone ID: LIB3061-110-Q1-K6-B3
gagcattcanaaacacaccaagcgaacgcactagcaacgacctaacaacaatggctaccaagatattagccctccttgcgcttcttgccctttttgtgagcgcaacaaatgcgttcattattccacaatgctcacttgctcctagtgccattattccacagttcctcccaccagttacttcaatgggcttcgaacacctagctgtgcaagccaacatgcaacaacaagcgcttgcggcgagcgtcttacaacaaccaattgcccaattgcaacaacaatccttgccacatctaacaatacaagccatcacaacgcaacagcaacaacagttcctaccagcactgagccacctagccatggtgaaccctgccgcctacttgcaagagcagctgcttgcatccaacccacttgctctggcgaacgtagttgcaaaccagcaacaacaacagctacaacagtttctgccaacgctcagtcaactagccatggtgaaccctgccgcctacgtacaacaacaacaactgctttcatctagcccgctcgctgtgggcaatgcacctacatacctgcaacaacaattgttgcaacagattgtaccagctctga

SEQ ID NO: 9017 - DNA, 600 bp, Zea mays
  unsure (1)..(600): unsure at all n locations; Clone ID: LIB3061-110-Q1-K6-B6
ccaacagcacatanaagtggaatccagtagcaacaacagagcaacaatggcgaccaagatattttccctccttatgctccttgctctttctgcatgtgttgctaacgcgacaattttccctcaatgctcacaagctcctatagcttcccttcttcccccataccttccatcaatgatagcttcagtatgtgaaaacccagctcttcagccctataggctccaacaagcaatcgcagcaagcaacatacctttatcacccttgttgtttcaacaatcgccagccctatctttggtgcagtcattggtacaaaccatcagggctcagcagctgcagcaactcgtgctacctgtgatcaaccaagtagctctggcaaacctttctccctactctcagcaacaacaatttcttccattcaaccaactgtctacactgaaccctgctgcttatttgcagcaacaactattaccattcagccagctagctactgcctactctcagcaacaacaacttcttccatttaaccaattggccgcactgaaccccgctgcttatttgcagcagcnaatactactaccatttaaccagctagctgcagcaaa

SEQ ID NO: 9018 - DNA, 593 bp, Zea mays
  unsure (1)..(593): unsure at all n locations; Clone ID: LIB3061-110-Q1-K6-B8
gtngaaaacccaattcttcaacccttacagnatccaacaggcaatcgcagcaggcatcttacctttatcacccttgttcctccaacaaccgtcagccctattacagcagttacctttggtgcatttgttggcacaaaacatcaaggcacaacaactacaacaacttgtgctaggaaaccttgctgcctactctcagcaacagcagtttcttccattcaaccaactggctgcattgaactctgctgcttatttgcaacaacaactaccattcagtcagctagctgctgcctacccccagcaatttcttccattcaaccaactggcagcattgaactctgctgcttatttacaacagcaacagctaccaccattcagccagctagctgatgtgagccctgttgccttcttgacacaacaacagttgttgccgttctacctgcacgctgcgcctaacgctggcaccctcttacaactgcaacaattgctgccattcaaccaacttgctttgacaaacccaacaacgttctaccaacaacccatcattggcggtgccctcttttagattgcttatgagttatagttcaataatgaag

SEQ ID NO: 9019 - DNA, 67 bp, Zea mays
  unsure (1)..(67): unsure at all n locations; Clone ID: LIB3061-110-Q1-K6-B9
ctgaatcctaaanaataggaanaattaacagataattgacttaccaaaaagcgagtcccatatgttg

SEQ ID NO: 9020 - DNA, 293 bp, Zea mays
  unsure (1)..(293): unsure at all n locations; Clone ID: LIB3061-110-Q1-K6-C10
aactttgttgccattttacccacaagttgtggngaaacattaatgccttcttgcaacagcaacaattgctaccattctacccacagaatgtggcaaacattgttgccttcttacaacaacaacaattgctaccatttagccaacatgctttgacgaatcctaccaccttattgcaaccgcccaccattggtggtgccatcttctagattttttatgatttatactgtaataataaagttctcatgctgatatgtgcgacctctcagtaataaagtattagagatctatatttt

SEQ ID NO: 9021 - DNA, 572 bp, Zea mays
  unsure (1)..(572): unsure at all n locations; Clone ID: LIB3061-110-Q1-K6-C12
ccagnatcaccttccgggccttgtacgtccgccggaccggcccaagcagcagggagatgattcagccggggagaccttacgatgagctgggcagaagactcaccagtgactacccggtgtacgatggccgtggctccgacgccgcccttgtcgctcgcatgcaggggatcaccgtcctcgtcggtaacgcgcaccagctgttcaccatcgtgttcgagaccgggaggttcaagggctccacgctcctcatcaacgggatggtgacggaagggtccgacgagtgggcggtctacggcgggactggagcgtttgcgatggccaccggcgtcatcagaaggaagaacctttttgccggtggcggtgacagtggcgggaactccgacgagcttagcatggaagtgttctgcccggtgttcggctcaccgcagcagccgccaaaggacgacgaggatggctccgccgtcaccaagattggactatggggtgggccgggaggatcggcacatgacatcacgacgacagaggcaccaaggcgtctgaacagcgtcaccattcgcgccggtattgccgtc

SEQ ID NO: 9022 - DNA, 565 bp, Zea mays
  unsure (1)..(565): unsure at all n locations; Clone ID: LIB3061-110-Q1-K6-C2
cgtcagcctagcaattagctcatcgactccagatggagaactcgacacccatgaggtgctgatcgttgcccttgctctcctggcgctcgctgcgagcgccgcctccagtacaagcggcggctgtggctgccagacaccaccgtttcatctaccgcctccgttctatatgccgcctccgttctatctgccgccgcagcagcagccgcagccatggcaataccccactcaaccaccgcagctaagcccgtgccagcagttcggatcctgcggcgtcggcagcgtcggcagcccgttcctgggccagtgcgtcgagttcctgaggcaccagtgcagcccggcggcgacgccctacggctcgccacagtgccaggcgctgcagcagcagtgctgccaccagatcaggcaggtggagccgctgcaccggtaccaggcgacatacggtgtggtcctgcagtccttcctgcagnagcagccgnagggcgagctcgcggngctgatggcggcccaggtngcgcagcagctgacggcgatgtgcggcctgcagctgnagcagccaggtccctgc

SEQ ID NO: 9023 - DNA, 567 bp, Zea mays
  unsure (1)..(567): unsure at all n locations; Clone ID: LIB3061-110-Q1-K6-C4
cggccgcgtgggccttctatcagtaccatcaatcatcattcatcttagtagtataggcaccaaatcaaatctgcaacatcaattatctaactccaaaaaccatgaagctggtgcttgtggttcttgctttcattgctttagtatcaagtgtttcttgtacacagacaggcggctgcagctgtggtcaacaacaaagccatgagcagcaacatcatccacaacaacatcatccacaaaaacaacaacatcaaccaccaccacaacatcaccagcagcagcaacaccaacaacaacaagttcacatgcaaccacaaaaacatcagcaacaacaagaagttcatgttcaacaacaacaacaacaaccgcagcaccaacaacaacaacaacaacaacagnaccaacaacaacatcaatgtgaaggccaacaacaacatcaccaacaatcacaaggccatgtgcaacaacacgaacagagccatgagcaacaccnaggacagagccatgagcaacaacatcaacaacaattccagggtcatgacaagcagnaacaaccacaacagcctcagc

SEQ ID NO: 9024 - DNA, 589 bp, Zea mays
  Clone ID: LIB3061-110-Q1-K6-C5
attgagaccaactagcaacatagtaaagcacaatagtgtaccaacaatggcagccaaaaattttgcttccttatgctccttggtctttctgcaagtgttgctaccgcaaccattttcccacaatgctcacaagctcctatagcttcccttcttcccccatacctctcaccagcggtgtcttcaatgtgtgaaaccccaattgttcaaccctacaggatccaacaggcaatcgcaacaggcatcttaccattatcacccttgttcctccaacaaccgtcagccctattacagcagttacctttggtccatttggtggcacaaaacatcagggcacaacaactacaacaacttgtgctagcaaaccttgctgcatactctcagcaacatcagtttcttccattcaaccaactggctgcattgaactctgctgcttatttgcaacaacaattaccattcagccagctagttgctgcctacccccagcaatttcttccattcaaccaactagcagcattgaactctgctgcttatttacagcagcaacaactactaccattcagccagctagctgatgtgagccctgctgcct

SEQ ID NO: 9025 - DNA, 598 bp, Zea mays
  unsure (1)..(598): unsure at all n locations; Clone ID: LIB3061-110-Q1-K6-C6
cttcatgcaagtgatgcgtgatcaaaaggtcttagcaaagctctggatttgttgctttctcaactcgtgaggaagcatctcaggctttaactgaaatgaatggcaaaatgatattctggaaaaccattgtatgttgcatttgcgcagcgcaaagaagatagaaaagcgatgttgcaggcacagttttctcagatgcgccctgctgtaccaatgacacccactctagccccgcgccttccaatgtaccctcctatggctcctcagcaactcttctatggacaagcgccacctgctatgataccccctcagccaggatttggtttccagcaacaacttgttccaggcatgaggcctgggggtcctcatatgccaaattattttgttccagttgtccaacaccaacagggccaacagggtccacgcccaggtattaggcgtggagctggagcccagggtcagcaacctgtgccaccatttcagcagcagattgttccaagaggaccgatgtaccgttacccaactggtcgcaacatgcctgaagctccggcgatgccagnggttgctggaggtatgatgcaggcatacgatatgggcggct

SEQ ID NO: 9026 - DNA, 601 bp, Zea mays
  Clone ID: LIB3061-110-Q1-K6-C7
cttgcgctttttgcgagcgcaacaaatgcgtccattattccacaatgctcacttgctcctagttccattattccacagttcctcccaccagttacttcaatggccttcgaacacccagctgtgcaagcctataggctacaacaagcgattgcggcgagcgtcttacaacaaccaattgcccaattgcaacaacaatccttggcacatctaacaatacaaaccatcgcaacgcaacagcaacaacagttcctaccagcactgagccacctagccatggtgaaccctgtcgcctacttgcaacagcagctgcttgcatccaacccacttgctctagcaaacgtagttgcaaaccagcaacaacaacaactgcaacagtttctgccagcgcttagtcaactagccatggtgaaccctgccgcctacctacaacagcaacaactgctttcatctagcccgctcgctgtggccaatgcacctacatacctgcaacaagaattgttgcaacagattgtaccagctctaactcagctagctgtggcaaaccctgttgcctacttgcaacagctgcttccattcaaccaactaactatgtcgaactctg

SEQ ID NO: 9027 - DNA, 190 bp, Zea mays
  Clone ID: LIB3061-110-Q1-K6-D10
gctcgctatgcctacgatgatttatatgagggaccacctccttatctaagtcatcctcatataaatcatcgtaggcatagcgagcatacctcgcgctctactgcaagaaatgctccatgcggtgacgaaacacgtcataatgtatgtgacgatgacttatctaaggcgggggatcacatgtccgttttca

SEQ ID NO: 9028 - DNA, 599 bp, Zea mays
  Clone ID: LIB3061-110-Q1-K6-D11
caattatctaactccaaaaccatgaagctggtgcttgtggttcttgctttcattgctttagtatcaagtgtttcttgtacacagacaggcggctgcagctgtggtcaacaacaaagccatgagcagcaacatcatccacaacaacatcatccacaaaaacaacaacatcaaccaccaccacaacatcaccagtagcagcaacaccaacaacaacaagttcacatgcaaccacaaaaacatcagcaacaacaagaagttcatgttcaacaacaacaacaacaaccgcagcaccaccaccaacaacaacaacaacagcaccaacaacaacatcaatgtgaaggccaacaacaacatcaccaacaatcacaaggccatgtgcaacaacacgaacagagccatgagcaacaccaaggacagagccatgagcaacaacatcaacaacaattccagggtcatgacaagcagcaacaaccacaacagcctcagcaatatcagcagggccaggaaaaatcacaacagcaacattgtcattgccaggagcagcaacacgactacaagcgcagctttaactactatagtcatagcttcaaatctaaaaa

SEQ ID NO: 9029 - DNA, 593 bp, Zea mays
  unsure (1)..(593): unsure at all n locations; Clone ID: LIB3061-110-Q1-K6-D2
tccgcanaaacacaccaagcgaactacctagcaacgacttaacaacaatggctaccaagatattagccctccttgcgcttcttgccctttttgtgagcgcaacaaatgcgttcattattccacaatgctcacttgctcctagtgccattataccacagttcctccgaccagttacttcaatgggcttcgaacacctagctgtgcaagcctacaggctacaacaagcgcttgcggcgagcgtcttacaacaaccaattaaccaattgcaacaacaatccttggcacatctaaccatacaaaccatngcaacacaacagcaacaacagttcctaccagcactgagccaactagatgtggngaaccctgtcgcctacttgcaacagcaggtgcttgcatccaacccacttgctctggcaaacgtagctgcataccaacaacaacaacaattgcaacagtttctgccagcgctcagtcaactagccatggtgaacnctgccgcctacctacaacagcaacaactgctttcatctagccctctcgttgtgggtaatgcacctacatacctgcaacaacatttgctgcaacagattgta

SEQ ID NO: 9030 - DNA, 600 bp, Zea mays
  unsure (1)..(600): unsure at all n locations; Clone ID: LIB3061-110-Q1-K6-D5
cgacgcgcccccgggcatgggcgaaccgcagtgttgccatgggcgtggccctcgcgttcgtggccatgaccgcgctctgttgcgcgccgggcgccgcggagttgcccaggctggaccacccggccaggagcgacggatcgctgaagctgctcgtcgtcggggactggggacgcaaggggactcacaaccagtcccgggtcgccgaccagatgggaagggtcggggagaagctcgatatcgactttgttatatccaccggggacaacttctacaaggacggcctcaagggcgtgcgcgaccaggcatttgaagaatcgttcgtggatatctacacagctcaaagcttacagaagccatggtactcagttctaggaaatcatgattacaggggcaatgcgctcgcacagcttagcccagtcttgaggaagatcgacgaccgattcatttgcatgagatcgttcatcgttaacgcagaacttgtggacttcttctttgtcgacaccactccgttccaactggagtattggactcaccctggcaaggatcgntatgactggagaggggtggcgcctcgaggcaagtacatagccaattttgctg

SEQ ID NO: 9031 - DNA, 589 bp, Zea mays
  Clone ID: LIB3061-110-Q1-K6-D8
gtgatcaaccaagtagctctggcaaacctttctccctactctcagcaacaacaatttcttccattcaaccaactgtctacactgaaccctgctgcttatttgcagcaacaactattaccattcaactagccatggtgaaccctatcgcctacctacaacagcaacaacttctttcatctagcccgctcgctatgggcaatgcacctacatacctgcaacaacagttgttgcaacaacagttgctgcaacaaattgtaccagctcttactcagctagctgtggcaaaccctgctgcctacttgcaacaactacttccattcaaccaactgactgtgtcgaactctgctgcgtacctacaacagcgacaacagttacttaatccactagcggtggctaacccattggtcgctgccttcctacagcagcaacaattgctgccatacaaccagttctctttgatgaaccctgccttgtcgtggcagcaacccatcgttggtggtgccatcttttagattacatatgagatgtactcgataatggtgccctcatagcggcatgtgtttcctaaaaataatcaatatattgattg

SEQ ID NO: 9032 - DNA, 597 bp, Zea mays
  Clone ID: LIB3061-110-Q1-K6-D9
acgcaacattccaaaaccatgggttgcaagatgctgcagaatgcaagccatggatcatctataaatggctagctcccacatatgaactagtctctatcatcatccaatccagatcagcaaagcggcagtgcgtagagaggatcgtcgaacagaacagcatgaagatggtcatcgttctcgtcgtgtgcctggctctgtcagctgccagcgcctctgcaatgcagatgccctgcccctgcgcggggctgcagggcttgtacggcgctggcgccggcctgacgacgatgatgggcgccggcgggctgtacccctacgcggagtacctgaggcagccgcagtgcagcccgctggcggcggcgccctactacgccgggtgtgggcagccgagcgccatgttccagccgctccggcaacagtgctgccagcagcagatgaggatgatggacgtgcagtccgtcgcgcagcagctgcagatgatgatgcagcttgagcgtgccgctgccgccagcagcagcctgtacgagccagctctgatgcagcagcagcagcagctgctggcagcccagggtctcaaccccatggccatgatgatggcgc

SEQ ID NO: 9033 - DNA, 582 bp, Zea mays
  Clone ID: LIB3061-110-Q1-K6-E1
tgagcattcagaaacacacctagcgaacgcactagcaacgacctaacaacaatggctaccaagatattatccctctttgcgcttcttgccctttttgtgagcgcaacaaatgcgttcattattccacaatgctcacttgctcctagtgccattattccacagttcctccctccagttacttcaatgggcttcgaacacccagctgtgcaagcctacaggctacaacaagcgcttgcggcgagcgtcttacaacaaccaattgcccaattacaacaacaatccttggcacatctaaccatacaaaccatcgcaacgcaacagcaacaacaatttctaccagcactgagccaactagctgtggtgaaccctgtcgcctacttgcaacagcagttgcttgcatccaacccacttgctctggcaaacatagttgcataccaacaacaacaacaattgcaacagtttctaccagcgctcagtcaactagccatggtgaaccctgccgcctacctacaacagcaacaactgatttcatctagccctctcgctgtggttaatgcacctacatacctgcaacaacagttg

SEQ ID NO: 9034 - DNA, 600 bp, Zea mays
  unsure (1)..(600): unsure at all n locations; Clone ID: LIB3061-110-Q1-K6-E10
gtcagcctagcaattagctcatcgactccanattggagaactcgacaccatgaaggtgctgatcgttgcccttgctctcctggcgctcgctgcgagcgccgcctccagtacaagcggcggctgtggctgccagacaccaccgtttcatctaccgcctccgttctatatgccgcctccgttctatctgccgccgcagcagcagccgcagccatggcaataccccactcaaccaccgcagctaagcccgtgccagcagttcggatcctgcggcgtcggcagcgtcggcagcccgttcctgggccagtgcgtcgagttcctgaggcaccagtgcagcccggcggcgacgccctacggctcgccacagtgccaggcgctgcagcagcagtgctgccaccagatcaggcaggtggagccgctgcaccggtaccaggcgacatacggtgtggtcctgcagtccttcctgcagcagcagccgcagggcgagctcgcggcgctgatggcggcccaggtagcgcagcagctgacggcgatgtgcggcctgcagctgcagcagccaggtccctgcccttgcaacgcagctgccggcggtgtctactactg

SEQ ID NO: 9035 - DNA, 528 bp, Zea mays
  Clone ID: LIB3061-110-Q1-K6-E11
cggatcctgcggcgtcggcagcgtcggcagcccgttcctgggccagtgcgtcgagttcctgaggcaccagtgcagcccggcggcgacgccctacggctcgccacagtgccaggcgctgcagcagcagtgctgccaccagatcaggcaggtggagccgctgcaccggtaccaggcgacatacggtgtggtcctgcagtccttcctgcagcagcagccgcagggcgagctcgcggcgctgatggcggcccaggtagcgcagcagctgacggcgatgtgcggcctgcagctgcagcagccaggtccctgcccttgcaacgcagctgccggcggtgtctactactgaggaaactatgtactgtagtaataatgtaatggagccgctgactagctacctagctcgctagtttactcatttagcggcgatgagtaacgtagtgtcacccatcaccatgggtggcagtgtgagcaatgacctgaatgaaccattgaaatggaaaggaataatatataaggaaaaaagatgattgg

SEQ ID NO: 9036 - DNA, 578 bp, Zea mays
  unsure (1)..(578): unsure at all n locations; Clone ID: LIB3061-110-Q1-K6-E2
gnacagnaacatcatccacaacaacatcatccacaaaaacaacaacatcaaccaccaccacaacatcaccagcagcagcaacaccaacaacaacaagttcacatgcaaccacaaaaacatcagcaacaacaagaagttcatgttcaacaacaacaacaacaaccgcagcaccaccaccaacaacaacaacaacagcaccaacaacaacatcaatgtgaaggccaacaacaacatcaccaacaatcacaaggccatgtgcaacaacacgaacagagccatgagcaacaccaaggacagagccatgagcaacaacattaacaacaattccagggtcatgacaagcagcaacaaccacaacagcctcagcaatatcagcagggccagggaaaaatcacaacagctacaatgtcattgccaggagcagcaacagactacaaggtgcagctataactactatagcagtagctcaaatctaaaanattgtcatgaattccctaagcagcagngcagccctttggtaaatccttttctccaatcacgtttngtacaaccaagtagctgncaggtattgcagcaac

SEQ ID NO: 9037 - DNA, 481 bp, Zea mays
  unsure (1)..(481): unsure at all n locations; Clone ID: LIB3061-110-Q1-K6-E3
cacaaaacatcagggncacaacaactacaacaactcgtgctagcaaaccttgctgcctactctcagcaacaacagtttctgccattcaaccaactagctgcattgaactctgctgcttatttgcagcaacaacaactactaccattcagccagctagctgctgcctacccccggcaatttcttccattcaaccaactggcagcattgaactctcatgcttatgtacaacaacaacaactactaccattcagccagctagctgctgtgagccctgctgccttcttgacacagcaacatttgttgccgttctacctgcacactgcgcctaacgttggcaccctcttacaactgcaacaattgctgccattcgaccaacttgctttgacaaacccagcagtgttctaccaacaacccatcattggtggtgccctcttttagattgcttatgagttatagttcaataataaagttttttttgctg

SEQ ID NO: 9038 - DNA, 312 bp, Zea mays
  unsure (1)..(312): unsure at all n locations; Clone ID: LIB3061-110-Q1-K6-E5
tccgtggtcgcaagctcctatagcttcccttcttcccccgtacctctcaccaaggtgtcttcggtattgtgaaaacccaattcttcaaccctacagnatccaacaggcaatcgcagctggcatcttacctttatcacccttgttcctccaacaatcatcagccctattacagcagttacctttggtgcatttattggcacaaaacatcagggcacaacaactacaacaacttgtgctagcaaaccttgctgcctactctcagcaacagcagtttctttccattcaaccaacttgctgcatttgaactctgct

SEQ ID NO: 9039 - DNA, 570 bp, Zea mays
  unsure (1)..(570): unsure at all n locations; Clone ID: LIB3061-110-Q1-K6-E8
caacaagcaacatagnaaagtggnaatccagtagcaacaatagagcaacaatggcgaccaagatactttccctccttatgctccttgctctttctgcatgtgttgctaacgcgacaattttccctcaatgctcacaagctcctatagcttcccttcttcccccataccttccatcaatgatagcttcagtatgtgaaaacccagctcttcaaccctataggctccaacaagcaatcgcagcaagcaacatacctttatcacccttgtttcaacaatcgccagccctatctttggtgcagtcattggtacaaaccatcaaggcacagcagctgcagcaactcgtgctacctgtgatcaaccaagtagctctggcaaacctttctccctactatcagcaacaacaattgctgccattcaaccaacttgctttgacaaacccagcagcgttctaccaacaacccatcattggtggtgccctcttttagatttcttatgagttatagttcaataataaagttttttgtctgatgtttgtggcttcccagaaataagaaagtacatttctagntt

SEQ ID NO: 9040 - DNA, 603 bp, Zea mays
  Clone ID: LIB3061-110-Q1-K6-E9
ccgattcccaggcaggcaggtcggcgaggagggcaggaagaccgaagaccgagccgtgcgggggctcgggacgggaacgggacaggaccccaaaatctcagatccttcctgcccgcccgcccgtgcccgtcgacgcgtcgttcttgccggccgcgcctcacctccgccctctcctcctgcagggggatcggatacgccacaggctgcgcgatggtgctgtgggtcttcggctacggctccctcatctggaaccccggcttcgacttcgacgacaaaatcctcggcttcatcaagggctacaagcgcacctttaatctcgcttgcattgaccacagaggcacaccggagcatccggcgaggacctgcacgcttgaaaccgacgacgaggccatatgctggggaattgcatattgtgtcaagggtggtccagaaaaagagctaaaagcaatgcagtacttggagagaagagagtgtgagtacgaccagaagatatccattgatttctacaaggaaggagatcccttgaaaccagctgtgacaggcgtcttagtgttcgtttccactccagatccaattggcaacaagtactatcttgggccctgc

SEQ ID NO: 9041 - DNA, 599 bp, Zea mays
  unsure (1)..(599): unsure at all n locations; Clone ID: LIB3061-110-Q1-K6-F10
cagnaaacacaccaagcgaacgcactagcaacaacctaacaacaatggctaccaagatattatccctccttgcgcttcttgcgctttttgcgagcgcaacaaatgcgtccattattccacaatgctcacttgctcctagttccattattccacagttcctcccaccagttacttcaatggccttcgaacacccagctgtgcaagcctataggctacaacaagcgattgcggcgagcgtcttacaacaaccaattgcccaattgcaacaacaatccttggcacatctaacaatacaaaccatcgcaacgcaacagcaacaacagttcctaccagcactgagccacctagccatggtgaaccctgtcgcctacttgcaacagcagctgcttgcatccaacccacttgctctagcaaacgtagttgcaaaccagcaacaacaacaactgcaacagtttctgccagcgcttagtcaactagccatggtgaaccctgccgcctacctacaacagcaacaactgctttcatctagcccgctcgctgtggccaatgcacctacatacctgcaacaagaattgttgcaacagattgtaccagctcta

SEQ ID NO: 9042 - DNA, 600 bp, Zea mays
  unsure (1)..(600): unsure at all n locations; Clone ID: LIB3061-110-Q1-K6-F11
ggcattgaactcactaacgctaaaaanaatgccacatattgtatcctggggatgaatcactagaggggaaagttctccgcttgaagcaacaatatacattgtgttcagcctcactacaggacatcatttctcgttttgagagtagagctggcgagtctctcaactgggaggacttcccctccaaagttgcagtgcagatgaatgacactcatccaacactatgcattcctgagttaatgagaatactgatggatgttaagggattaagctggagtgaggcatggagtattacagaaagaaccgtggcatacactaaccatacagtgcttcctgaagctctagagaagtggagcttggacataatgcagaaacttttacctcgacatgttgagataatagaaacaattgatgaagagctgataaacaacatagtctcaaagtatggaaccacagatactgaactgttgaaaaagaagctgaaagagatgaggattctggataatgttgaccttccagcttccatttcccaactatttgttaaacccaaagacaaaaaggaatctcctgcaaaatcaaagcaaaagttacttgttaaatctt

SEQ ID NO: 9043 - DNA, 581 bp, Zea mays
  unsure (1)..(581): unsure at all n locations; Clone ID: LIB3061-110-Q1-K6-F3
canaaacacacctagcgaacgcactagcaacgacctaacaacaatggcttccaagacattatccctccttgcgcttcttgccctttttgtgagtgcaacaaatgcgttcattattccacaatgctcacttgctccgagtgccattattccacagttcctccctccagttacttcaatgggcttcgaacacccagctgtgcaagcctataggctacaacaagcgcttgcggcgagcgtcttagaacaaccaattgcccaattacaacaacaatccttggcacatctaaccatacaaaccatcgcaacgcagcagcaacaagcactgagccacctagccgtggtgaaccctatcgcctacttgcaacaacagctgcttgcatccaacccacttgctttggcaaacgtagctgcataccaacaacaacaacagttgcaacagtttctaccagcgctcagtcaactagccatggtgaaccctatcgcctacctacaacagcaacaacttctttcatctagcccgctcgctatgggcaatgcacctacatacctgcaacaacagttgttgcaacaacagttgctgc

SEQ ID NO: 9044 - DNA, 607 bp, Zea mays
  unsure (1)..(607): unsure at all n locations; Clone ID: LIB3061-110-Q1-K6-F4
attgagaccaactagcaacatagnaaagcacaatagtgtaccaacaatggcagccaaaaattttgcctccttatgctccttggtctttctgcaagtgctgctacggcgaccattttcccgcaatgctcgcaagctcctatagcttcccttcttcccccgtacctctcaccagcggtgtcttcggtatgtgaaaacccaattcttcaaccctacaggatccaacaggcaatcgcagctggcatcttacctttatcacccttgttcctccaacaatcatcagccctattacaacagttacctttggtgcatttattggcacaaaacatcagggcacaacaactacaacaacttgtgctagcaaaccttgctgcctactctcagcaacagcagtttcttccattcaaccaactaggttcattgaactctgcttcttatttgcaacaacaacaactaccattcagccagctacctgctgcctacccccagcaatttcttccattcaaccaactagcagcattgaactctcctgcttatttacagcagcaacaactactaccattcagccagctagctggtgtgagccctgctaccttcttgacacaaccac

SEQ ID NO: 9045 - DNA, 612 bp, Zea mays
  unsure (1)..(612): unsure at all n locations; Clone ID: LIB3061-110-Q1-K6-F5
tccgggatcggatcgacacccagccagcgcgtggtgagtagaacacccccaagagccaggactgagactgaccatggngagaagcgtgcagggacgcggcggctgcgggccagcagctgcggcaggacgaagagggcggaggaggagggcgtcacgcggagaaggagctcgtcggtgacccaataacccacgactcggtcgtctcggcgaagctgtacgaggacgtgccggcgacgccgatgatggcgctcaaccacatctcccgcctgtgcgaatccgtcgacgcgtccgtccggttctacgtcaaggcgctcggcttcgtgctcatccagcgcccgccggcgctcgacttctccggcgcatggctcttcaactacggcgtgggtatccacttcgtgcagcgcgacgacgcgcggcgggcccccgacgtgaggccggaggaggcggagctggaccccatggacaaccacgtgtcgttccagtgcgaggacatgggcgccatggagcggcggctgcgggagatgcgcgtgcggtacatgaagcggaccatcaacgaggaggaagggtcgcccatcgaccagctcttcttcagggacccggacggcttcatga

SEQ ID NO: 9046 - DNA, 582 bp, Zea mays
  unsure (1)..(582): unsure at all n locations; Clone ID: LIB3061-110-Q1-K6-F6
tagcaacatagnaaagcacaatagtgtaccaacaatggcagccaaaaattttgcctccttatgctccttggtctttctgcaagtgctgctacggcgaccattttcccgcaatgctcgcaagctcctatagcttcccttcttcccccgtacctctcaccagcggtgtcttcggtatgtgaaaacccaattcttcaaccctacaggatccaacaggcaatcgcagctggcatcttacctttatcacccttgttcctccaacaatcatcagccctattacaacagttacctttggtgcatttattggcacaaaacatcagggcacaacaactacaacaacttgtgctagcaaaccttgctgcctactctcagcaacagcagtttcttccattcaaccaactaggttcattgaactctgcttcttatttgcaacaacaacaactaccattcagccagctacctgctgcctacccccagcaatttcttccattcaaccaactagcagcattgaactctcctgcttatttacagcagcaacaactactaccattcagccagctagctggtgtgagccctgctaccttc

SEQ ID NO: 9047 - DNA, 375 bp, Zea mays
  Clone ID: LIB3061-110-Q1-K6-F7
tcagccagctatctgctgcctacccccagcaatttcttccattcaaccaactgacagctttgaactctcctgcttatttacagcagcaacaactactaccattcagccagctagctggtgtgagccctgctaccttcttgacacaaccacaattgttgccgttctaccagcacgctgcgcctaacgctggcaccctcttacaactgcaacaattgctgccattcaaccaacttgctttgacaaacccaacagcattctaccaacaacccatcattggtggtgccctcttttagatttcttatgagttatagttcaataataaagttttttgtctgatgtttgtggcttcccagaaataagaaagtacatttctag

SEQ ID NO: 9048 - DNA, 595 bp, Zea mays
  unsure (1)..(595): unsure at all n locations; Clone ID: LIB3061-110-Q1-K6-F8
tagcaacatagnaaagcacaatagtgtaccaacaatggcagccaaaaattttgcctccttatgctccttggtctttctgcaagtgctgctacggcgaccattttcccgcaatgctcgcaagctcctatagcttcccttcttcccccgtacctctcaccagcggtgtcttcggtatgtgaaaacccaattcttcaaccctacaggatccaacaggcaatcacagctggcatcttacctttatcacccttgttcctccaacaatcatcagccctattacatcagttacctttggtgcatttattggcacaaaacatcagggcacaacaactacaacaacttgtgctagcaaaccttgctgcctactctcagcaacagcagtttcttccattcaaccaactagctgcattgaactctgcttcttatttgcaacaacaacaactaccattcagccagctacctgctgcctacccccagcaatttcttccattcaaccaactggcagcattgaactctcctgcttatttacagcagcaacaactactaccattcagccagctagctggtgtgagccctgctaccttcttgatacaaccac

SEQ ID NO: 9049 - DNA, 541 bp, Zea mays
  unsure (1)..(541): unsure at all n locations; Clone ID: LIB3061-110-Q1-K6-G1
tganaagtggnaatccagtagcaacaatagagcaacaatggcgaccaagatttttccctccttatgctccttgctctttctacatgtgttgctaacgcgacaattttccctcaatgctcacaagctcctatagcttcccttcttcccccataccttccatcaattatagcttcaatatgtgaaaacccagctcttcaaccatataggcttcaacaagcaatcgcagcaagcaacatacctttatcgcccttgttgtttcaacaatcgccagccctatctttggtgcagtcattggtacaaaccatcagggcacaacagctgcagcaactcgtgctacctctgatcaaccaagtagctctggcaaacctttctccctactctcagcaacaacaatttcttgcattcaaccaactgtctacactgaaccctgctgcttatttgcagcaacaactattaccattgagccagctagctactgcctactctgaggaacaacaactggtggcattgaaccaatgggggcggactggaaccccgctgg

SEQ ID NO: 9050 - DNA, 582 bp, Zea mays
  unsure (1)..(582): unsure at all n locations; Clone ID: LIB3061-110-Q1-K6-G11
gcaacatacatagtngaatacactagcaacatcttagcaccaatggcagccaagattttgccatccttgccctccttgctctttcagcaagcgttgctaccgcgactattattccacaatgctcacaacaatacctctctccggtgacagccgcgagatttgaatacccaactatacaatcctacaggctacaagaggccatcgcagcaagcatcttacggtcgttagcattgaccgtccaacaaccatatgccctattgcaacaaccatccttaatgaatctatatctccaaagaatcgcagcacaacaactacaacaacagttgcttccaacaatcaatcaagtagttgcagcgaaccttgctgcttacctccagcaacaacaatttcttccattcaatcaactagctggggtgaaccctgctgcttacttgcaggcacaacagctactaccattcaaccaacttgtcaggagccctgctgccttcttactgcagcaacagttgcttccattccatctacaagttgtggcaaacattgctgctttcttgcaacaacaacaacaattgctgccattttacc

SEQ ID NO: 9051 - DNA, 568 bp, Zea mays
  unsure (1)..(568): unsure at all n locations; Clone ID: LIB3061-110-Q1-K6-G3
agagatttgcgttacgccaccctaacctgttaaagatatgacactgccttatctgagggacatcacaaccgtcttccctagtttcgtcttcaacacggcggtggaagattagtcgttcgaattgaaggcaataaagcagtattggggattgcttgaggtgcacaaggttcctgaaacctgacggctgttggtcgccttcaaccactgagaatccgatgtgttctgagcatcaaggcagccacccgaccatcactcctgctataaattataatataaattataaggctcatccggggtggcagatcggcagcgggaacttagggggtgtttgggaacaaagtttttctacagttttgaaagaatactgcagtattctcaaatactgcagtattatatacagaatggtgtttggcaagctagctaaaatctcagtttttaaaactgaagtattgcaaatactatagnagttttaagctattctaaacttaagtctggacctcagtttttaaaactgcggtattgtaaactgcggtattgtcatgactaaagtatactgtagtatttcaaa

SEQ ID NO: 9052 - DNA, 501 bp, Zea mays
  Clone ID: LIB3061-110-Q1-K6-G6
gtagctctggcaaacctttctccctactctcagcaacaacaatttcttccattcaaccaactgtctacactgaaccctgctgcttatttgcagcaacaactattaccatttagccagctagctactgcctactctcagcaacaacaacttcttccatttaaccaattggccgcactgaaccccgctgcttatttgcagcagcaaatactactgccatttagcgagctagctgcagcaagtcgtgcttccttcttgacacagcaacagttgctgcctttctacaagcagtttgcggctaaccccgcaaccctcttacaactacaacaattgttgccctttgtccaacttgctttgacaaacccagcagcctcctaccaacaacacatcattggtggtgccctcttttagattgattattagttgtaattcaataataaagatttttggatgatgtatgtggccaaccagaaataagaagttacattttcagattctaatgtg

SEQ ID NO: 9053 - DNA, 585 bp, Zea mays
  Clone ID: LIB3061-110-Q1-K6-G8
gcttcccttcttcccccataccttccatcaatgatagcttcagtatgtgaaaaacccagctcttcagccctataggctccaacaagcaatcgcagcaagcaacatacctttatcacccttgttgtttcaacaatcgccagccctatctttggtgcagtcattggtacaaaccatcagggcacagcagctgcagcaactcgtgctacctgtgatcaaccaagtagctctggcaaacctttctccctactctcagcaacaacaatttcttccattcaaccaactgtctacactgaaccctgctgcttatttgcagcaacaactattaccattcagccagctagctactgcctactctcagcaacaacaacttcttccatttaaccaattggccgcactgaaccccgctgcttatttgcagcagcaaatactactaccatttagccagctagctgcagcaaaccgtgcttccttcttgacacagcaacagttgctgcctttctaccagcagtttgcggctaaccccgcaaccctcttacaactacaacaattgttgccctttgtccaacttgctttgacagaccgagc

SEQ ID NO: 9054 - DNA, 576 bp, Zea mays
  unsure (1)..(576): unsure at all n locations; Clone ID: LIB3061-110-Q1-K6-H1
gcaacatagnaaagcacaatagtgtaccaacaatggcagccaaaaattttgcctccttatgctccttggtctttctgcaagtgctgctacggcgaccattttcccgcaatgctcgcaagctcctatagcttcccttcttcccccgtacctctcaccagcggtgtcttcggtatgtgaaaacccaattcttcaaccctacaggatccaacaggcaatcgcagctggcatnttacctttatcacccttgttcctccaacaatcatcagctctattacaacagttacctttggtgcatttattggcacaaaacatcagggcacaacaactacaacaacttgtgctagcaaaccttgctgcctactctcagcaacagcagtttcttccattcaaccaactaggntcattgaactctgcttcttatttgcaacaacaacaactaccattcagccagctacctgctgcctacccccagcantttcttccattcaaccaactagcagcattgaactctcctgcttatttacagcagcaacaactactaccattcagccagctagctggtgtgagccctgctac

SEQ ID NO: 9055 - DNA, 577 bp, Zea mays
  unsure (1)..(577): unsure at all n locations; Clone ID: LIB3061-110-Q1-K6-H10
nggnacaactagcaacatagnaaagcacaatagtgtaccaacaatggcagccaaaatattttgcctccttatgctccttggtctttctgcaagtgctgctacggcgaccattttcccgcaatgctcgcaagctcctatagcttcccttcttcccccgtacctctcaccagcggtgtcttcggtatgtgaaaacccaattcttcaaccctacaggatccaacaggcaatcacagctggcatcttacctttatcacccttgttcctccaacaatcatcagccctattacatcagttacctttggtgcatttattggcacaaaacatcagggcacaacaactacaacaacttgtgctagcaaaccttgctgcctactctcagcaacagcagtttcttccattcaaccaactagctgcattgaactctgcttcttatttgcaacaacaacaactaccattcagccagctacctgctgcctacccccagcaatttcttccattcaaccaactggcagcattgaactctcctgcttatttacagcagcaacaactactaccattcagccagctagctggtgtg

SEQ ID NO: 9056 - DNA, 591 bp, Zea mays
  Clone ID: LIB3061-110-Q1-K6-H11
tttgcagcttcacaaacacaccaagcgaacgcactagcaacgacctaacaacaatggctaccaagatttagccctccttgcgcttcttgccctttttgtgagcgcaacaaatgcgttcattattccacaatgctcacttgctcctagtgccattattccacagttcctcccaccagttacttcaatgggcttcgaacacctagctgtgcaagccaacatgcaacaacaagcgcttgcggcgagcgtcttacaacaaccaattgcccaattgcaacaacaatccttgccacatctaacaatacaagccatcacaacgcaacagcaacaacagttcctaccagcactgagccacctagccatggtgaaccctgccgcctacttgcaagagcagctgcttgcatccaacccacttgctctggcgaacgtagttgcaaaccagcaacaacaacagctacaacagtttctgccaacgctcagtcaactagccatggtgaaccctgccgcctacgtacaacaacaacaactgctttcatctagcccgctcgctgtgggcaatgcacctacatacctgcaacaacaattgttgcaaca

SEQ ID NO: 9057 - DNA, 532 bp, Zea mays
  Clone ID: LIB3061-110-Q1-K6-H4
cagcctcatccccagccacacccatgcccgtgccaacagccgcatccaagcccgtgccagctgcagggaacctgcggcgttggcagcaccccgatcctgggccagtgcgtcgagtttctgaggcatcagtgcagcccgacggcgacgccctactgctcgcctcagtgccagtcgttgcggcagcagtgttgccagcagctcaggcaggtggagccgcagcaccggtaccaggcgatcttcggcttggtcctccagtccatcctgcagcagcagccgcaaagcggccaggtcgcggggctgttggcggcgcagatagcgcagcaactgacggcgatgtgcggcctgcagcagccgactccatgcccctacgctgctgccggcggtgtcccccactgaagaaactatgtgctgtagtatagccgctggctagctagctagttgagtcatttagcggcgatgattgagtaataatgtgtcacgcatcaccatgggtggcagtgtcagtgtgagcaatgacctgaatgaacaattg

SEQ ID NO: 9058 - DNA, 245 bp, Zea mays
  unsure (1)..(245): unsure at all n locations; Clone ID: LIB3061-110-Q1-K6-H5
ccaactagcaacatagnaaagcacaatagtgtaccaacaatggcagccaaaaattttgcttccttatgctccttggtctttctgcaagtgttgctaccgcaaccattttcccacaatgctcacaagctcctatagcttcccttcttcccccatacctctcaccagcggtgtcttcaatgtgtgaaaacccaattgttcaaccctacaggatccaacaggcaatcgcaacaggcatcttaccatta

SEQ ID NO: 9059 - DNA, 596 bp, Zea mays
  Clone ID: LIB3061-110-Q1-K6-H7
cgatcggcctccctcccccaaaacctccactcgatcccaaacaaaccaacaaatccatccatcgcacatggacgcgttcttctcggcctcctccgcgtcggcgccctacggctacggcgccggcggatggagctacgactcgctcaagaacttccgccagatcacccctgccgtccagacccgcgcaattagcatttcgtatttttttaaaaatatatatcagtcgctggtttcgtgcgttccagaaattctcctgcgggttgcgtgtagctgatgcgtaattccctgacgtaatctatgattcgcgcgcgtcgtgttccttgcatttagaactgcaactgtgcggatgccaccgattcgattgattcgtcactttaagaacatgatccggttagaacagcaagatatgataaatcgatttgaatccaaatctgaccatctggttcggcttggttgcctgcaggtctacctcaccctgtgcgcggcgctggcctcgtcggcggtgggcgcttacctgcacgtggtctggaacatcggcgggacgctgacaatgctcggttgcgtcggcagcatcgcctggctcttctcggtgcccg

SEQ ID NO: 9060 - DNA, 598 bp, Zea mays
  Clone ID: LIB3061-110-Q1-K6-H8
gtctgcactactggcgtgccggtcggtgcaaccgctttccgtgccccttcctccacagcgagctccccgaggctgcgccgcccaagcgccccactggacccggggggaacgtatggcgcaaccccaacaccggaggacgaggaggtggccatcacaatagatgggggaagggcccaggagggggcagcgggattgcgagccacaagccgcctgagaggccctgcaagtactttctcgccggtaccgaatgtagctatggcgagaggtgccgctatccgcacagctactgcataagcgatagtatcgcgatgcttaccttgctcaagggacacgagcagggtgtcacgggcattgcactgcccgctgggtcagacaagctttattccgggagtaaggatggaactgttcgcatgtgggattgccaaactgggcagtgtgctggtgtcatcaccatgggtcgtgaggttgggtgtatgatcattgaaggtccgtggttatttgttggaatacctgatgcagtgaaggtacgtaatacttcaaaattgtgcatttctcattgtttcagatttcagaagttgaggcaacttagcactagctc

SEQ ID NO: 9061 - DNA, 424 bp, Zea mays
  Clone ID: LIB3061-110-Q1-N6-A12
gcctgcgtgtaccgggccgctattacacggccgacccacgcgttcgatttaaccaattggccgcactgtaagcccgctgcttatttgcagcatcaaatactactgccatttaccgagctagactgcactcaagtcgtgcttcctctcttgacacagcaacagaagctggcttcctacaatcattttgcggctaaccggaggaccctcttacaactacaacaattggtgcccttggcacaacttgctttgacaaacccaggaggctggctaccaacaacacattattggtggagcgctcttttagattgattattaagagggattcaataataaagttttttggatgatgtatgtgcgccaaccattaaataagaagatacattcccagattctcagtgcggccaattggttaaatcggacgcat

SEQ ID NO: 9062 - DNA, 477 bp, Zea mays
  Clone ID: LIB3061-110-Q1-N6-A8
tcggtcaaacttgcccgatcactatctttgaacaaattagtccaatcaggtagtccatacagtgcgaatggaacgatacttaactcatcccaaacctcgagggctacagcattggtcgagtgctatgcttcatagagctctcaacacagtcctatgctgtgtgcatgaccgtaaccgacctacaccagactcaagcacctgctattctaaaaaacgtgaatgcgagtacgcaacgaaagctcattaactgcagactggaagcaagaaaggatcctgaaccaaagagttggaggatacttgataaccttctctacgatctagccactgcatggaaagttgatttgccaatgtaaccacaactaccagctctcgaatctgcagcgctgtggctaatatgttgcgcaactggaatggcacgaaccatgcaccaagagcaaccaggcttgcaatatactatatttttgccaaagaagaaat

SEQ ID NO: 9063 - DNA, 420 bp, Zea mays
  Clone ID: LIB3061-110-Q1-N6-B2
cacgcctgcagtgtaccgggccgctattacacggtcgacctcagcgttcgaacagtaaactgcaacaaatagatccatctttgactgaaataactgtggcgaaccctggtgccttacttacaacacatgctatcattcaaccaacagattgcgccaaacactggtgggtgcctacaagaacgacaacagaaactgaactcattggcagggactaacccattgggctcttccttgctggagcaacacaacattgctgcctacaaccagttatcttttgtgaaccctgccttgcggccacccatacgatggaggagccaccttttagattacataagaaacggactcgacaatggtgccctcatacccacatgtgtttgactaaaaataatgaatatattgattgagatctaaaaaagaaac

SEQ ID NO: 9064 - DNA, 387 bp, Zea mays
  unsure (1)..(387): unsure at all n locations; Clone ID: LIB3061-110-Q1-N6-C10
gcctgcgtgaaccgggcccctattaccacggtcgacctcagcgttcgaacttagatgtcattctacccacctgttgtggtgaaacggtaatgccttttagcatcagcaactattgcttccattctacccacaaaagaggtaaacattggtgcctctcttacaacaacagcagtagctacgatgtaggcatacatgcataagcactgaatggctacacacgcttnattagacaagccgctccgaccattaggaagggcagaccattcgttctgagcatctatttctatggagtttagtactggtaatcaataagagtgtctgatgcatgatatgtgcgacctctcacacataaagtgttagagatctatattttaaaaaaaaaacaag

SEQ ID NO: 9065 - DNA, 596 bp, Zea mays
  Clone ID: LIB3061-110-Q1-N6-C7
tcgcttgcgctatttgcgagcgcaacaaatgcgtccattattccacaatgctcacttgctcctagttccattattccacagttcctcccaccagttacttcaatggccttcgaacacccagctgtgcaagcctataggctacaacaagcgattgcggcgagcgtcttacaacaaccaattgcccaattgcaacaacaatccttggcacatctaacaatacaaaccatcgcaacgcaacagcaacaacagttcctaccagcactgagccacctagccatggtgaaccctgtcgcctacttgcaacagcagctgcttgcatccaacccacttgctctagcaaacgtagttgcaaaccagcaacaacaacaactgcaacagtttctgccagcgcttagtcaactagccatggtgaaccctgccgcctacctacaacagcaacaactgctttcatctagcccgctcgctgtggccaatgcacctacatacctgcaacaagaattgttgcaacagattgtaccagctctaactcagctagctgtggcaaaccctgttgcctacttgcaacagctgcttccattcaccaactaactatgtcg

SEQ ID NO: 9066 - DNA, 413 bp, Zea mays
  Clone ID: LIB3061-110-Q1-N6-C8
tcggtctggctatggctgctggttcatgatatggcatcaggtgaagttacggtacaggtggtgctcatgggaggaggctatggaagcggtggtggacagggagaggcgacaggccttgcggtggtacacacactatggacacagctagcatcccatgcaacaagacagactcatgtctggtgacatatttgtataacatgtatctaactcttaaaaagacctaaaatgtccgctggccatgacgcctccataaccgcgagccgagatctcagatccatacatcagtgtgcaccaccaccgttgaccaccgtgcgtcaccaccgtcaacagcttttccatagactcctctgtgagcaccaccttgtccgtatacttcacctgatccatattctgaaccacacccgtaatcagac

SEQ ID NO: 9067 - DNA, 558 bp, Zea mays
  Clone ID: LIB3061-110-Q1-N6-D9
cgcaacattccaaaaccatgggttgcaagttgctgcagaatgcaagccatggatcatctataaatggctagctcccacatatgaactagtctctatcatcatccaatccagatcagcaaagcggcagtgcgtagagaggatcgtcgaacagaacagcatgaagatggtcatcgttctcgtcgtgtgcctggctctgtcagctgccagcgcctctgcaatgcagatgccctgcccctgcgcggggctgcagggcttgtacggcgctggcgccggcctgacgacgatgatgggcgccggcgggctgtacccctacgcggagtacctgaggcagccgcagtgcagcccgctggcggcggcgccctactacgccgggtgtgggcagccgagcgccatgttccagccgctccggcaacagtgctgccagcagcagatgaggatgatggacgtgcagtccgtcgcgcagcagctgcagatgatgatgcagcttgagcgtgccgctgccgccagcagcagcctgtacgagccagctctgatgcagcaacaacagcagctgctggc

SEQ ID NO: 9068 - DNA, 568 bp, Zea mays
  Clone ID: LIB3061-110-Q1-N6-E1
tcgtgagcatttagaaacaccctaacgaaacgcactaacaacgacctagcaacactggctaccaagatgtctccatctttgcgccatttgctcttttagtgagcacatcaaacgcgtaaattatggcagatgcctcactaggtcctagtgccttaattacacatggtcttcttgcagctactgcagttggcttaggacagccagctccacaggcctacacgctgctagaggctctagcagctggcgtctttcaacaaccaactgcccaattacaacaacaatccttgggacatatgaccatacataccatcggaacgcagcagggacagccacatctagcatcactgaacctactacatgctgtgaaccctgctgcctacttgcgtactagcaggtgcattgacactcacaacccagtggctctggcaaacatagttgcgttccaacaacaacagcagttgcgacaaccatctaccagcgctcagaccactagccatgactgaccctgccgcctacctacaacagctacaactgttttcatctagccctctcgctgtggttaatgcac

SEQ ID NO: 9069 - DNA, 449 bp, Zea mays
  unsure (1)..(449): unsure at all n locations; Clone ID: LIB3061-110-Q1-N6-E11
tcagcgttcgtggatcctgcggcgcaagcagcgtttgtagtccgtttctgggccttgctttgagtggctgatgcacgatgtcgcccggactggacgccctacggatgggcgcaactccaggcgctgtagcagctgagctggcaccatatcaagctgggggagtcgctgcaccgttaccagcctacttactgcgtggccctgctgtccttcctgcagaaacagccggaaggtgagctcgcggggctggtggcctggcctaggtgagagctagcagctggacacgatgatgcgcgagcctgctagctgtacctgggcacgtccttagnccttgcaagctagctgtgggggtggtgttctactgaggaatctatgaactgaccgaatgatgtcatggacccgctgactagctacctatgtctgtagttgactcatttatggtgcttgagtaa

SEQ ID NO: 9070 - DNA, 602 bp, Zea mays
  Clone ID: LIB3061-110-Q1-N6-E4
tcggatcagcaaagcggcagtgcgtagagaggatcgtcgaacagacagcatgaagatggtcatcgttctcgtcgtgtgcctggctctgtcagctgccagcgcctctgcaatgcagatgccctgcccctgcgcggggctgcagggcttgtacggcgctggcgccggcctgacgacgatgatgggcgccggcgggctgtacccctacgcggagtacctgaggcagccgcagtgcagcccgctggcggcggcgccctactacgccgggtgtgggcagccgagcgccatgttccagccgctccggcaacagtgctgccagcagcagatgaggatgatggacgtgcagtccgtcgcgcagcagctgcagatgatgatgcagcttgagcgtgccgctgccgccagcagcagcctgtacgagccagctctgatgcagcagcagcagcagctgctggcagcccagggtctcaaccccatggccatgatgatggcgcagaacatgccggccatgggtggactctaccagtaccagctgcccagctaccgcaccaacccctgtggcgtctccgctgccattccgccctactactgattcatgatatttggga

SEQ ID NO: 9071 - DNA, 441 bp, Zea mays
  Clone ID: LIB3061-110-Q1-N6-F1
tcagcgttcgacagtacacacacactgcccgaactccatttagcgctcattcgtaaatcaagccatactatgtgtctccgaatgagcaacctatcaccttcaggcccaaaaacaagatctgggtcaatgggcaatggcaatgatcaaaaaggctggtgggcagggaggtcctgcgaagaaacaacactgtgcttgcatgcttgaacgaccctttgattactaccgttaacatgacctacatgttgaaggctgacactgtgcacggtacaggggaagcaccatgaggctaaggtgaaagacttcgagaccctactatacagtgagaacgaagttgcctgtgtataggctgtgccgaacctctgagtagatacatatggggacctggttggcccttaatatattgtggaaactacgggcgtcttcactgaccacaaaatggct

SEQ ID NO: 9072 - DNA, 421 bp, Zea mays
  Clone ID: LIB3061-110-Q1-N6-F5
tcggtatcggatcgacacccagcctgcgcgtggcgagtagaacaccgctaaaaggccaggactgacactgaccatgggagaagcgtgcagggacgcgtgtggctgtggacctgcagcctgcggtacgacgaaaaggcccgaggaggtgggtcttcacccacaagaatgagctcgccggtgtacccaatctcccctagtcggcggatggcacaagctcacgaaggacctgctggcgatctacttgatggtgctggaaccacatgtgcacggtgtgctagtgcggggacgcgtgcattctgatgtacgtcaaggcgctcgggttgacgctcatccagcgctcgccggtgctcgacttgttcatgacatggctcttgaacttcaggaagagcttgcacttggggcaccgtgactactcgcggat

SEQ ID NO: 9073 - DNA, 475 bp, Zea mays
  Clone ID: LIB3061-110-Q1-N6-F6
tcgtagcaacaaaagaagcccattattgtacgaacagtggcagaccaaaatattaagacttcttatgcgacctgtaccttatgaaagagctgatacaggcaccatcaagatggggcgtcggagcaacacatggttggcctgctaaaccaggacctctgaccagcagcgattgctgcatgtgaaaaacggagccttcaaccgtaccagagccatcaggcaacggcaactgctgtggtagctttatgaacgttgatgcttcaacaccaattagctgtatgacaacaggtacctgtggcgcatgtatatgacacagaacatcaagggacaacaactacaacaactggagctaacaaaccttgctggctactctcagcaacagtcaatggcttccattcaaccaactaagtacattgaactctgcttgttatttgcagcaacaacggctaccactgcagtcagctacctgctgcctacc

SEQ ID NO: 9074 - DNA, 518 bp, Zea mays
  unsure (1)..(518): unsure at all n locations; Clone ID: LIB3061-110-Q1-N6-G10
tcgggccgtctttctaccgtacgggactttctccgaacgactaacctgcggcggcgccagcgcctgagaccagcggtcattcgggtgggacccaatttgctcttgctaatgggaccaccctctgtctactgggttggcctcgccgaagccctcctgactccagctgcgttaaatacgatagttcttgcccttcaaacttgcctttggcaaagaaccgtctaccaagctagaaggggggcgccgagactcctacacttttccccttggagtggttatccatcagtgaccattttagccctgtcttactatcagccaccttttgaaatttcaaatgcaaatggtgggtcggaacctattctttctattagctacctctcatgagcgaacactgaatagcccttgccttactggagcgcaccgctattgtcatggaacactgcatgcacctatagcatacgctgcacttncaggaagcttaaatatgggcaacaactgactatactcacctgttgggtggt

SEQ ID NO: 9075 - DNA, 609 bp, Zea mays
  Clone ID: LIB3061-110-Q1-N6-G3
tcgaagtaatttgcgttacgccaccctaaccgtttgaaaatctcaactgccttatctgtgggacatcccaaccgtacaaccccgtagtgtttaaaacacgggggcggacgattagttggaactattgaaagctactatagcagtttgggggacttgcttgttgtaaacaagggatctgaaactgtcggctgacgccatgccttctatcactctgaatccgttggtggaatgcagcatcaatgctttcacccgtccataaatactgttttccataataccctaaattataaggctgatcctgtgtggccccatcgggagccggatacttaaggggtgtttgggaacaaagattttctacaggtttggaaagaatactgcactattctcaaatactgcagtattatgtacagagtggcgtttggcaagctagctaaaatctcattttttaaaactgacatatcgcaaatactatagtaggtctaagctattctaaacttaagtctggacctcagtttttaaaactgccgtattgaaaactgcggtattgtcatgactaaaggatactgtagtatttctaacaggttagggtggcgtaacgcaaattccttc

SEQ ID NO: 9076 - DNA, 214 bp, Zea mays
  Clone ID: LIB3061-110-Q1-N6-G9
gggcgcacgcgtggaccggtctataggatacaagctcactgcacggcgtgcatagctatgtcatatatgtgttatattgtcaccttaaatgtaattaactggatagctggtttacagcgtgaaatactgataaaatcataatgttacacaacatactagccttgaacatcatgcgtatatcgtgaggtgcctaattagtgaacagactcacatt

SEQ ID NO: 9077 - DNA, 446 bp, Zea mays
  Clone ID: LIB3061-110-Q1-N6-H2
tcgtcatatcagcaaacggcagtgcgttatagaggatcttttttttttttttttttaaaaccaaatcttttttcggaggctgcttttattggtcatcccccacctgctatggggtgcacgtgtccctgcctctttacgtttctggatggcttgggctgggctggggccattctcacaactttaataggcaccggtggggtggaccggtacgcggaacacctcagggggtcgcagggcagcccgctggctggggctccctactgcgccagggcgcccgcggacgagctctttttaccaatcattatggccacagggctgacaccctcagatgacgatgatggacgtgcagtcctgctcacagcagcttcagatgatgatgctgcttgagcgtgccgctgccgccagcagcatcctgtactagccagctctgatgcagcagcagcagc

SEQ ID NO: 9078 - DNA, 609 bp, Zea mays
  unsure (1)..(609): unsure at all n locations; Clone ID: LIB3061-111-Q1-K6-A1
ctgcntcttccaccaccgcctgtgagtatccccgaggcccggntgggggacgagatgcctcgtctcgccctatgcttgccactcccgccggcaacgacacgcgcgaggaggatgagatcaccaccgcggaggctcatgtgngagaaagacgccgcgcggatggacgctgccctcctcatgcggactacgcccaagatggacgagtttcacaccgggggcgatctggactcaactggaagtggaagcggcatctcggggccaagcgcctccaaaagacagctacaaagaaggggatcgtggcggcaacgagtcagcaggtccagcatccatgcttatccttttcctttgtgtttctatttgatctgtttttttgcccgcgccagcaacagagaagaatgtggtcgtggctgtaatgggtcagcaggtacaccatccacgctcatcatttcctttgtgtttctgtttgatctatttttttaaaatttctttatcagtttgattagcatccacttgcatccgctcatagtttgattcgtgttcgttggatgggcctcaaaataccagttgcttcgactacactctctgaatttcgcagatcaagataaaacc

SEQ ID NO: 9079 - DNA, 616 bp, Zea mays
  unsure (1)..(616): unsure at all n locations; Clone ID: LIB3061-111-Q1-K6-A11
naacaacatanaagtggnatacagtagcaacaatagagcaacaatggcggccaagnaattttccatccttatgctccttgctctttctgcatgtgttgctaacgcgaccatttttcctcaatactcacaagctcctatagctgcccttcttcccccataccttccatcaatgaccgcttcagtttgtgaaaacccagcccttcaaccctacaggctccaacaagcaatcgcaacaagcaacttacctttatcacccctgttctttcaacaatcgccagccctatctttggtgcagtcattggtacaaaccatcagggcacaacagctgcaacaactcgtgctaccagtgatcagccaagtagctctggcaaacctttctccctactctcagcaacaacaatttcttccattcaaccaactgtctacactgaaccctgctgcttatttacaacaacaacaactactaccattcagccagctagctactgcctactctcagcagcaacaatttcttccatttaaccaattggccgcactgaacccctctgcttatttccagcagcaaatactactaccatttggccagctagctacaacaagccccacttcctttttg

SEQ ID NO: 9080 - DNA, 628 bp, Zea mays
  unsure (1)..(628): unsure at all n locations; Clone ID: LIB3061-111-Q1-K6-A2
anagctcggcgttgntatgtggttatactacttatcacaaattggtggaggaatcattagcacgactgaagaaaaaagagattgccttctttgccccactggattttctgccaacatggctgcaattacagccctggggagtattacctctcttttgtcccctggaagaaaacctgcagagcacgagagaattgccatcttctcagatgcgctgaaccatgcttcaatcattgatgggattcgccttttggagcggcagcaagaagcattagtgtttgtgtacaagcactgtgacatgttccatctcgatttcctgctgtccagttgctcattggaaaagaaagttgttgtcacagatagcctgttcagcatggatggtgatttcgctccatttcctgaacttattaaattacgcagaaagtatggttatttgttggtcatcgatgatgctcatgggacacttgtttgcggtgagaatggtggtggtgcagctgagctgtttgaatgtgaaaaggacattgacataggtgttggcaccttaagcaaggctgccggctgccagggtggttttataacatgcagcactcaatggaaaagctgattcagtcgcgaggtcgctcgttcatat

SEQ ID NO: 9081 - DNA, 625 bp, Zea mays
  unsure (1)..(625): unsure at all n locations; Clone ID: LIB3061-111-Q1-K6-A3
actagcaacatagnaagcacaatagtgtaccaacaatggcagccaaaatattttgcctccttatgctccttggtctttctgcaagtgctgctacggcgaccattttcccacaatgctcacaagctcctatagcttcccttcttcccccgtacctctcaccagcggtgtcttcggtatgtgaaaacccaattcttcaaccctataggatccaacaggcaatcgcagctggcatcttacctttatcacccttgttcctccaacaatcatcagccctattacagcagttacctttggtgcatttattggcacaaaacatcagggcacaacaactacaacaacttgtgctagcaaaccttgctgcctactctcagcaacaacagtttcttccattcaaccaactagctgcattgaactctgcttcttatttgcaacaacaacaactaccattcagccagctatctgctgcctacccccagcaatttcttccattcaaccaactgacagctttgaactctcctgcttatttacagcagcaacaactactaccattcagccagctagctggtgtgagccctgctaccttcttgacacaaccacaattgttgccgttctaccagcacgctgc

SEQ ID NO: 9082 - DNA, 555 bp, Zea mays
  unsure (1)..(555): unsure at all n locations; Clone ID: LIB3061-111-Q1-K6-A4
cagnattttgccatccttgccctccttgctctttcagcaagcgttgctaccgcgactattattccacaatgctcacaacaatacctctctccggtgacagccgcgagatttgaatacccaactatacaatcctacaggctacaagaggccatcgcagcaagcatcttacggtcgttagcattgaccgtccaacaaccatatgccctattgcaacaaccatccttaatgaatctatatctccaaagaatcgcagcacaacaactacaacaacagttgcttccaacaatcaatcaagtagttgcagcgaaccttgctgcttacctccagcaacaacaatttcttccattcaatcaactagctggggtgaaccctgctgcttacttgcaggcacaacagctactgccattcaaccaacttgctttgacaaacccagcagcgttctaccaacaacccatcattggtggtgccctcttttagatttcttatgagttatagttcaataataaagatttttgtctgatgtttgtggcttcccagaaaaagaaatacatttct

SEQ ID NO: 9083 - DNA, 633 bp, Zea mays
  unsure (1)..(633): unsure at all n locations; Clone ID: LIB3061-111-Q1-K6-A5
gcgaatttcgaccaagnaagccgcataacctccgtccatcccatccccgctcgcctctcctctcctcgccccgctctagacgatcgatggccgcgacggcggcggaggagatggagaggatggtggaggcggaatgggaggaggggaagcaggggatgaggaagaggaagcggtacgggctggtggagtaccgggcgctgccggcttacctgcgggacaacgagtacatccaccgccactaccgctgcgagtggccgctcccgcaggtgctgctctccgccttctccatccacaacgagaccctcaacgtctggacgcatcttataggatttttcatctttctcgctctgaccatatacacagcaacacaagttccaaatgcagtagatatccggagcttgcagcatttgccagatgtactgagaaaggctgatattcataagattcaggcagagcttgtgtcatgtcttccgtcgttacctcacctttcagatctacaaaagctgaaggatgagctgaagacctcttggaattctatggaggttcttccatctctgtcccgttggcatctcttggagttactcgcaaattgtctgccacacagatttacccatcccaatgaaacaagtttgt

SEQ ID NO: 9084 - DNA, 651 bp, Zea mays
  unsure (1)..(651): unsure at all n locations; Clone ID: LIB3061-111-Q1-K6-A9
gngcttatctgtgttgagttgggcaaagagaggaagtataccaatgtcccaaaagctaagatgatcacttatctcttgaaattagtttcacgaaagatggaaagatgggcaactcaaggatgataatgcaaatgttatgttattagagcaggataacaaagatgaaacacaaatgaaggaatctgaggaacaagaacaatcacgaccactcaaaactgcaaactctgactcatcaatacgtagagaggctcatgcctgttgttcagtggtgtgcagcaatgttgcatgccaagccacacggaatgcaggagataattattgcaaacgttgctcttgctgcatttgcaataaatatgatgataacaaagaccctagcttgtggttggtttgcagctctgataatccatacagtggttgttcatgtggtgtctcttgtcacctaaactgtgctctaaagaataaaaaggctggcattgtcaataatggctgcaacaagttagactgtagtttctactgtgttagctgtgggaaaatcaactggctaatgaggtatccttctgactgttttggttcattaacatgccataggaaattatgaactctgttaacctaattcctctttaggcctgaccatccaaaactagtatcgcc

SEQ ID NO: 9085 - DNA, 625 bp, Zea mays
  unsure (1)..(625): unsure at all n locations; Clone ID: LIB3061-111-Q1-K6-B1
tgctgccaggtcgccacccggcgcgccgggccgacgccaccgggacggggccgctcctgccggacgccactcgcgcggtggtggcggagttcgtcgccacagccatgttcgtgttcgccgccgaagctccgtctacggcctctggaagctgtacaaggacacggcaacgccgggcggcctgctcgcggtggccatcgcgcacacgctggcgctggtggccgcggtggcggtagcgagcaacgcgtcgggtgggcacgtcaaccctgcggtcacgttcggcctgctcgtgggccgtcgcatctctttcggccgtgccgcggtatactggctcgcgcagatgctcggcgccgtggtcgcgtcgttgctgctaacgctcgtctccggcggcacgcgtcccgtgggcttcgggctcgtccgcggcgtccacgagcggcacgcgctcctgctagaggccgtcatgacgttcgggctcatgtacgccgtgtacgccaccgcggtggatcaccggagccggggcggcgcggtcgcgatcgcgcccctcgccatcggcttcgtcctgngcgcgaacatcctcgccggcggcccgttcgacggcgccgcgatgaacccggcgcgggcgttcggg

SEQ ID NO: 9086 - DNA, 639 bp, Zea mays
  unsure (1)..(639): unsure at all n locations; Clone ID: LIB3061-111-Q1-K6-B11
gnaaaagtaaaactagtttcgccatgttggcgcatattcaagtgaagacaacttcgtacggggcgatcccaaagcccaattgaatgaatcagcagcgaggccgaagcctttgaggagattttaaatgactgtggggacgtctgtgccttctctagcgcgaggggaattgcagctattttggagaaggcaggttgcgaacatgtgaaaactttggcgcaagccgaagctgctttatgtattgatgatacgaaggacccctcggccgaagcaagcttagttggtggaaaattcttcactgacatctgggaaaatggtgggcgagggatggcccacgaaataataaagaagagcgaaaaagatactcatgatgctaaggaagcaacgaaggcagctgaaaaagctgtggaactcgaaaggcggatagagcccttcgagtcattggtcgacccagaggcaaaggaatcaacagaaattattaacatggccgaaagcattatggacgaagtcgttactcaactgctgaccgaagctgcagacaaagttttgaaagaagaagatagatattgtaaaaatattgctagaatattaatgtaacatttgttggactatgcttgtaatattggtgctcataggttctta

SEQ ID NO: 9087 - DNA, 620 bp, Zea mays
  unsure (1)..(620): unsure at all n locations; Clone ID: LIB3061-111-Q1-K6-B12
tgnaaatttgcaaatacttgggatggctgctttattgagttctgacgaaagaaatggaccgtgttttagggattgatggtgtacagctcatcggcatcaataaccgtaatctcgagacatttgaagttgatattacaaacacaaaaggcttctggaaggtgaacgaggacaggttatagctcaaaaggatgtaattgttgtaggagaatctgcgctgttcactcctgatgatatttcgttcgttcaaaacgctggggtcaaagcggttctcgtcggggaatccctcatcaagcaggaggatccagggaaagcaatctctgggcttttcggcaaagatatctcgcatgctggtgctacctagagacgacgcagaagagcaacagaataagccagaaacgctactccgggttgcatcattttgtgtaggggagaaaatcgagcgttgcaatctgaaatccaccctttcgcagagttttgatcggtcgttttgtttacctgacctgccaacttccccatgctgctatttttttttgtgaccgagccatctcaataattacagattttagtgcacaagatgtatatgttcaaaaattggatgtagttgcaagcagcttgatttt

SEQ ID NO: 9088 - DNA, 385 bp, Zea mays
  unsure (1)..(385): unsure at all n locations; Clone ID: LIB3061-111-Q1-K6-B3
tagnacgcgagcggtcgccctttttttttttttttctaacaaaactgagttctattttacaaaaattcatcaaaattataggactctgtcagatattgttaacattttatttcctaaataatatgatataggactcagttttgttagaaaaaaaaaaaaaaaaaaaaaaaaaaaggagagagggagaaaaaaaaaaaaaaaaaaaaaaaaaaaaaaaaaaaaaggaaaaaaaaaaacaaacaaaaaaaatcctaaagtgaaaaagttataaaaaatagaaggggggtttttttaaaaatggccaggtgttttaaaacctcaggcagtggggaaaaccctgttttttggggcgcctccattcctttttgcggcggtggcccccttt

SEQ ID NO: 9089 - DNA, 610 bp, Zea mays
  unsure (1)..(610): unsure at all n locations; Clone ID: LIB3061-111-Q1-K6-B4
ctgtctagcanaaaagcctcgctttgccaaaatgtgattggaatggccacattgcaggatcctcatctgccggcacaaaagcagactataaattgctattcaggatgtccatcgtctgcagaactttctagaatatggtccttcgtttcagatattcctaatgtagcacctgagccaaactgtgagcaaggaataagcatgatgagcatcagcgacagtggtgtcagtaatcaagataatgctgcaggggacagtattttgttagatatagctagtgcaacacttgtaagtgatattggtacttgtgacaagcttttggtaggttcctcttcaggagctggagtgaacctacttccactggctactggtcaaacagaaacagctggatctgtggattccacaccagataaggttccctatacgccagataaagatatgttcagtaaggacagcatatatgaagatttttgtgtggatgacgctgaccttgctttcgaaaattatgaagaactctttggtacctctcatattcaaacagaacaactctttgatgatgctggaatagacatttactttgaaatgaaggaagcacctgctgggaattccactg

SEQ ID NO: 9090 - DNA, 642 bp, Zea mays
  Clone ID: LIB3061-111-Q1-K6-C11
tgcgcttcttgcgctttttgcgagcgcaacaaatgcgttcattattccacaatgctcacttgctccaagttccattattacacagttcctcccaccagttacttcatgggcttcgaacacccagctgtgcaagcctataggctacaacaagcaattgcggcgagcgtcttacaacaaccaatttcccagttgcaacaacaatccttggcacatctaacaatacaaaccatcgcaacgcaacagcaacaacaattcctaccagcactgagccacctagccatggtgaaccctgccgcctacttgcaacagcagttgcttgcatcaaacccacttgctctggcaaacgtagttgcaaaccagccacaacaacagctgcaacagtttctgccagcgctcagtcaactagccatggtgaaccctgccgcctacctacaacagcaacaactgctttcatctagcccgctcgctgtggccaatgcacctacatacctgcaacaacaattgttgcaacagattgtaccagctctgactcagctagttgtggcaaaccctgctgcctacttgcaacagctgcttccattcaaccaactgactatgtcgaactctgctgcgtacctacaacagcgacaacagttacttaat

SEQ ID NO: 9091 - DNA, 649 bp, Zea mays
  unsure (1)..(649): unsure at all n locations; Clone ID: LIB3061-111-Q1-K6-C12
atttgagcttcagaaaacacctgagcgaacgcactagcaacgacctaacaacaatggctaccaagnaattatccctctttgcgcttcttgccctttttgtgagcgcaacaaatgcgttcattattccacaatgctcacttgctcctagtgccattattccacagttcctccctccagttacttcaatgggcttcgaacacccagctgtgcaagcctacaggctacaacaagcgcttgcggcgagcgtcttacaacaaccaattgcccaattacaacaacaatccttggcacatctaaccatacaaaccatcgcaacgcaacagcaacaacaatttctaccagcactgagccaactagctgtggtgaaccctgtcgcctacttgcaacagcagttgcttgcatccaacccacttgctctggcaaacatagttgcataccaacaacaacaacaattgcaacagtttctaccagcgctcagtcaactagccatggtgaaccctgccgcctacctacaacagcaacaactgatttcatctagccctcntcgctgtggttaatgcacctacatacctgcaacaacagttgctgcaacagattgtaccagctctgactcagctagctgtggcaaaccctgctgcctacttgcaac

SEQ ID NO: 9092 - DNA, 398 bp, Zea mays
  unsure (1)..(398): unsure at all n locations; Clone ID: LIB3061-111-Q1-K6-D1
tccgcccgngcatatcacagtgacagacacgatggtgagcgccagaattgttgtcctcctcgccaccctcctatgcgctgccgccgcagtcgcgtcgtcctgggaggacgacaaccaccaccaccacgggggccacaagtccgggcaatgcgtgcggcggtgcgaggaccggccctggcaccagcgcccccggtgcctggagcagtgcagggaggaggagcgggagaagcggcaagagcggagcaggcacgaggccgacgaccgcagcggcgagggctcgtcggaggatgagcgagagcaggagaaggagaaacagaaggaccggcggccgtacgtgttcgaccggcgcagctttcgtcgcgtggtccggagcgagcaggggtccctgagggtgctcc

SEQ ID NO: 9093 - DNA, 637 bp, Zea mays
  unsure (1)..(637): unsure at all n locations; Clone ID: LIB3061-111-Q1-K6-D11
caccctcttggcgnaagcgaaaccaccgtacaccgctgcctccctctccctgtctcgtctcgtcgaaccagccgaggaagccaacgcagacccagcgatcctcgtcgcgcgtcctcctcccccaggagggaaggatggcggagcccaaagcggcggcggcggcgaggaagacgcgggtgggcccgtacgaggtcggcaagaccatcggcgagggcagcttcgccaaggtcaagcacgcgcgcgactcccgcaccggcgccgtccgcgccatcaaggtgctcgaccgcaaccacgtcctccgccacaggatggtcgagcagatcaagcgggagatttcgactatgaagctgatcaaacatcccaatgtggtacagctgcatgaggttatggcgagcaaaacgaagatatacatggttcttgaatttgttgatggaggcgagctattcgataagatcgtcaattctggaaggctaggagaggatgaagctaggatatactttcatcaacttataaatgcagttgattattgccatagccgaggagtgtaccatagagacctgaagccagagaatttgcttctggattcaaatggagctcttaaagtttcagacttcggcctaagtgcatttgcaccaca

SEQ ID NO: 9094 - DNA, 504 bp, Zea mays
  Clone ID: LIB3061-111-Q1-K6-D12
cccggcgcttcgcgtggagctcgattgcgacacagccccagaccgcgatgcagatctcggctgcgacgcggctgccaacggcagcgcgccggcgtccgcgcgcgaggacggtcgtcggctgtcgggcgtgcgtggtgccgtgatctgcgacgaacggcgcgggcgaccgggtctgtgagactgcgacggagtgacgccggccaaggacgtcgcgtgggttgcggccggcgcttcgccgttagccagatctgctacgtagcagaagggcaggcacgcgcagatcctctggctgtcctgtcggcctcttctgcagctgttccagacagtggaagcaactattagacaagccaagtttaacagtacagtacacgtgaatacttcgccctcaagtcctgaacccacacagccaacaaatacgtgtagtactcatcagatatatggcacaggagatgacgatgttgctggttccgcagacgttgatgctgagtaacgttgcagtgcttt

SEQ ID NO: 9095 - DNA, 635 bp, Zea mays
  unsure (1)..(635): unsure at all n locations; Clone ID: LIB3061-111-Q1-K6-D2
ccanacagcaaacggcagtgcgtagagaggatcgtcgaacagaacagcatgaagatggtcatcgttctcgtcgtgtgcctggctctgtcagctgccagcgcctctgcaatgcagatgccctgcccctgcgcggggctgcagggcttgtacggcgctggcgccggcctgacgacgatgatgggcgccggcgggctgtacccctacgcggagtacctgaggcagccgcagtgcagcccgctggcggcggcgccctactacgccgggtgtgggcagccgagcgccatgttccagccgctccggcaacagtgctgccagcagcagatgaggatgatggacgtgcagtccgtcgcgcagcagctgcagatgatgatgcagcttgagcgtgccgctgccgccagcagcagcctgtacgagccagctctgatgcagcagcagcagcagctgctggcagcccagggtctcaaccccatggccatgatgatggcgcagaacatgccggccatgggtggactctaccagtaccagctgcccagctaccgcaccaacccctgtggcgtctccgctgccattccgccctactactgattcatgatatttgggaaatctcctctatccatctctctctatctatatat

SEQ ID NO: 9096 - DNA, 303 bp, Zea mays
  unsure (1)..(303): unsure at all n locations; Clone ID: LIB3061-111-Q1-K6-E2
tgcttatttgcnagcagcaatactactaccatttagccagctagctgcagcaaaccgtgcttccttcttgacacagcaacagttgctgcctttctaccagcagtttgcggctaaccccgcaaccctcttacaactacaacaattgttgccctttgtccaacttgctttgacagacccagcggcctcctaccaacaacacatcattggtggtgccctcttttagattgcttattagttgtaattcaataataaagttttttggatgatgtatgtggccaaccagaaataagaagttacatttcc

SEQ ID NO: 9097 - DNA, 627 bp, Zea mays
  unsure (1)..(627): unsure at all n locations; Clone ID: LIB3061-111-Q1-K6-F12
gtcagcctagcaattagctcatcgactccanatggagactcgacccatgaagtgctgatcgttgcccttgctctcctggcgctcgctgcgagcgccgcctccagtacaagcggcggctgtggctgccagacaccaccgtttcatctaccgcctccgttctatatgccgcctccgttctatctgccgccgcagcagcagccgcagccatggcaataccccactcaaccaccgcagctaagcccgtgccagcagttcggatcctgcggcgtcggcagcgtcggcagcccgttcctgggccagtgcgtcgagttcctgaggcaccagtgcagcccggcggcgacgccctacggctcgccacagtgccaggcgctgcagcagcagtgctgccaccagatcaggcaggtggagccgctgcaccggtaccaggcgacatacggtgtggtcctgcagtccttcctgcagcagcagccgcagggcgagctcgcggcgctgatggcggcccaggtagcgcagcagctgacggcgatgtgcggcctgcagctgcagcagccaggtccctgcccttgcaacgcagctgccggcggtgtctactactgaggaaactatgtactgtagtaataatgtaat

SEQ ID NO: 9098 - DNA, 614 bp, Zea mays
  unsure (1)..(614): unsure at all n locations; Clone ID: LIB3061-111-Q1-K6-F3
gncgtgcactaccaagcgttcctgattcccaaaggtggaaggtgatgcccctgttcagtaacctgcactacagcccggactacttcgaggacccacacaagttcgacccttcccgattcaaggtggcgccgcggtccgttacgttcctgccgttcgggagcggcgtgcacgcgtgccccggcaacgacctggccaagctcgagatgctcgtcctcatccaccgcctcgtcaccacctacaggtgggaggtggtggggtcgagcgacgacgtgacctacagcccgttcccggtgccgaaacgcggcctcctggcgaggctcagcagggccaccaccggcagcgcggtcgtcggccgtgcgccgcctctgtacattggaggacctgcaggcgctagctatagctagctcctcggaccaaaaggcaatgcatgcacccaagcacccacgagatagataggcccggcaggcggcaggggacgacgacacacacatgcagacatcgtccagtcacgtggcagtagcaagctagtactactactactgtgtgtgctgccattctgcatgcattgcgttcctctcattctcgtgttccttcatggcatgtgtttccttcct

SEQ ID NO: 9099 - DNA, 628 bp, Zea mays
  unsure (1)..(628): unsure at all n locations; Clone ID: LIB3061-111-Q1-K6-F5
tctccggggcccacagnagaatggagctttcaggtggaccagtgttaaccgagtttgaatccttaaggaatgcaaactttcaaaatgcgttcttttctaacaagggttggtttggaatgcactgatcttgaggcgatattggtcaaggatcgcgttcttacaaatgagtgtgttgataaaataattggttttgctttgagccatcaacttaagaactgtacaaatccagacccccctttgagtaatgtgcagtttgttctatccagcgaaagccttaagcatggtattgacatgttggaaagtatccagtctggctcgaagagcagcactaaaaggaaatcactgaaggatattgctactgtaatatgagtttgaaaagaggcttcttgcagatgttatccctccacatgaaatcggtgttacctttgaggacattggagctttagaaagtgtcaaagatactctgaaggagttagtgatgcttcctttgcaaagacctgaactttttaaccgaggacaacttatgaagccgtgtaaaggaattttactttttggcccacctggtactggaaagacatgcttgctaaggctgtggcanactgagctggtgctaatttcattaaacata

SEQ ID NO: 9100 - DNA, 649 bp, Zea mays
  unsure (1)..(649): unsure at all n locations; Clone ID: LIB3061-111-Q1-K6-G11
nttgnaaaccaacaagcaacatagnaaagtggatacagtagcaacaatagagcaacaatggcggccaagnaattttccatccttatgctccttgctctttctgcatgtgttgctaacgcgaccatttttcctcaatactcacaagctcctatagctgcccttcttcccccataccttccatcaatgaccgcttcagtttgtgaaaacccagcccttcaaccctacaggctccaacaagcaatcgcaacaagcaacttacctttatcacccctgttctttcaacaatcgccagccctatctttggtgcagtcattggtacaaaccatcagggcacaacagctgcaacaactcgtgctaccagtgatcagccaagtagctctggcaaacctttctccctactctcagcaacaacaatttcttccattcaaccaactgtctacactgaaccctgctgcttatttacaacaacaacaactactaccattcagccagctagctactgcctactctcagcagcaacaatttcttccatttaaccaattggccgcactgaacccctctgcttatttccagcagcaaatactactaccatttggccagctagctacaacaagccccacttcctttttgaaacaacaacaattgcttc

SEQ ID NO: 9101 - DNA, 515 bp, Zea mays
  Clone ID: LIB3061-111-Q1-K6-G12
ggcaaactagttgcaaaccagccacaacaacagctgcaacagtttctgccagcgctcagtcaactagccatggtgaaccctgccgcctacctacaacagcaacaactgctttcatctagcccgctcgctgtggccaatgcacctacatacctgcaacaacaattgttgcaacagattgtaccagctctgactcagctagttgtggcaaaccctgctgcctacttgcaacagctgcttccattcaaccaactgactatgtcgaactctgctgcgtacctacaacagcgacaacagttacttaatccactagcagtggctaacccattggtcgctgccttcctacagcagcaacaattgctgccatacaaccagttctctttgataaaccctgtcttgtcgaggcagcaacccatcgttggaggtgccatcttttagattacatatgagatgtactcgataatggtgccctcattccggcatgtgtttcctagaaataatcaatatattgattgggg

SEQ ID NO: 9102 - DNA, 643 bp, Zea mays
  unsure (1)..(643): unsure at all n locations; Clone ID: LIB3061-111-Q1-K6-G2
gnganaccaatancaacatagnaaaggcacaatattgtaccaataatggcagcncaaaatattttgcctcattatgctccttggtctttctgcaagtgctgctacggcgagcattttcccgcaatgctcacaagctcctatagcttcccttcttcccccatacctctcaccagcgatgtcttcagtatgtgaaaatccaattcttctaccctacaggatccaacaggcaatcgcagcaggcatcttacctttatcacccttgttcctccaacaatcatcagccctattacagcagttacctttggtgcatttattggcacaaaacatcagggcacaacaactacaacaactcgtgctagcaaaccttgctgcctactctcagcaacagcagttacctttggtgcatttgttggcacaaaacatcagggcacaacaactacaacaactcgtgctagcaaaccttgctgcctactctcagcaacaacagtttctgccattcaaccaactagctgcattgaactctgctgcttatttgcagcaacaacaactactaccattcagccagctagctgctgcctacccccggcaatttcttccattcaaccaactggcagcattgaactctcatgcttatgtacaacaa

SEQ ID NO: 9103 - DNA, 627 bp, Zea mays
  unsure (1)..(627): unsure at all n locations; Clone ID: LIB3061-111-Q1-K6-G4
ttcgtccgcagnaacacacctagcgcaacgcactagcaacgacctaacaacaatggcttccaagacattatccctccttgcgcttcttgccctttttgtgagtgcaacaaatgcgttcattattccacaatgctcacttgctccgagtgccattattccacagttcctccctccagttacttcaatgggcttcgaacacccagctgtgcaagcctataggctacaacaagcgcttgcggcgagcgtcttagaacaaccaattgcccaattacaacaacaatccttggcacatctaaccatacaaaccatcgcaacgcagcagcaacaagcactgagccacctagccgtggtgaaccctatcgcctacttgcaatattttttgcttgcatccaacccacttgctttggcaaacgtatctgcataccaacaacaacaacagttgcaacagtttctaccagcgctcagtcaactagccatggtgaaccctatcgcctacctacaacagcaacaacttctttcatctagcccgctcgctatgggcaatgcacctacatacctgcaacaacagttgttgcaacaacagttgctgcaacaaattgtaccagctcttactcagctagctgtggc

SEQ ID NO: 9104 - DNA, 355 bp, Zea mays
  unsure (1)..(355): unsure at all n locations; Clone ID: LIB3061-111-Q1-K6-G5
cggcagtttaagcatccatggggggggcgtgcgttctccacctcatccaatgctctgccctggtcttggctgcgcaggggggttcacccaacacagtcaagacgccatgcagctgctgccatttcagatccttttttttttgttggcccgatgaaactccaaatcccggggggggggggcggaagttctgacaacttttatattcaaaaaagagaatcatgagcgcaatatatccatgacaagttagttgttaagagatgttcacgtgggaactttgtgtagtttctacaatacgacactcaccagtgattcacttcggcgcngtggggctcttgtgtatttgttacaggaaggg

SEQ ID NO: 9105 - DNA, 619 bp, Zea mays
  unsure (1)..(619): unsure at all n locations; Clone ID: LIB3061-111-Q1-K6-H1
ttctccgcttttgcatgcatggcaggttgtctcnctgactaaagacatggaccaaatacgtaacatttctcgtcctgtggatgttcctgatgttggtctcctatgtgatctgttatggtcggaccctgataaggagattgataggtggggtgagaatgacaggggtgtttcctacacctttggagctgacgtagttgccgagtttcttcagaaacatgatctagatttgatctgcagggcccaccaggtcgtagaggatggttatgaatttttcgcaaaacgccagcttgtaacaatattctcagcaccgaactactgtggagagttcgacaatgctggtgcactgatgagcattgacaactccctagtatgctcgttccagatactcaagccttctgagaagaaaggaaaagcaggaaatgggaacatgccaaagcccggtacacctcccaggaagataaaaataagtgttacccatatttagccaggttctcgctatcaatctgcatttgcgaagttgtgattaagtgctcccccaaacttgtggtaagttttttttttggtgagcttaacacgattttaaactgtggaccatcgtgcctcatgtctttctgatctg

SEQ ID NO: 9106 - DNA, 591 bp, Zea mays
  unsure (1)..(591): unsure at all n locations; Clone ID: LIB3061-111-Q1-K6-H10
gtcgtgggcacaggctcatttgggatcgtcttccaggctaagtgtctggaaacagaganccttcgcctcaagaagtgctgcaagatcggcgttacaagaaccgggagctgcaacttatgcgtgccatggagcaccccaacgtcatctgcctgaagcactgcttcttctcgacaacgagcagggacgaattgtttttaaaccttgtcatggaattcgtccctgagactctataccgagtcctgaagcactacagcaatgcgaaccagaggatgcctcttatctacgtcaagctctacatgtatcagctttttagaggcctagcttatattcataatgtaccaggagtctgccatagggatgtgaagccacaaaacgttttggttgatcctctcacccaccaggtcaagctctgtgactttggtagtgcaaaagttctgattcctggtgaaccgaacatatcttacatatgnctctcgttactatcgtgcccctgagctcatatttggtgcgacggagtatacaagttcaatagacatatggtcagctgngttgtgttctagctgagttgcttcttggacagccactatttcc

SEQ ID NO: 9107 - DNA, 625 bp, Zea mays
  unsure (1)..(625): unsure at all n locations; Clone ID: LIB3061-111-Q1-K6-H2
tccgtttacagnacggagttcctgntgttcacacttgggtgccttgcgcttctggcctttattcctctaagacggcttataacagcttttggaacggtacaacatcctttgagccggctaaaagaattggaagagttgggctcctcccaaatgtaaattcttcatttggctagcctctctcaatcggtgttggacggctgacagattggcccggcgaggtatggatcatcatgacaaatgcctattttgcgatcaacaggaagaaacagtccagcatattttgctctcttgtgtgttctccagaaacatttggtggcgggtgtggtgtaaagtggggatgcaacatctggcacctgggcctgaggacatgattttccaagattggtggagcaatgctgaaggccaggttcctaaagagaagagaaaaggttttaacacgttggtaatccttgtggcttggtggctgtggaaacatcgaaacacttgtgtcttcgagggagcttccccgagcactagagatatcctgcagcacatccatgaggatgctatgctgtggggtatggccggngctagagggcttaagggcttatggccttaagtctaggagggtctgctgttgtgtcat

SEQ ID NO: 9108 - DNA, 614 bp, Zea mays
  Clone ID: LIB3061-111-Q1-K6-H6
gtgattggggagagcccccatgatcgaaatcgcagcgcgctccgtgaacctcagagagaacaaaccgcctccaggctggctggatgatatcaccgacggcgctgtggaatacatgcctgaggatgaggtgaagagtgtggctgccgagcagctgaagatctccatggagaggattgccctgctcaaggcagccaggccaaaggtcccacccgcaaagaccgatcaagaggaggaagaggagcgaaagcagagcgaggaactagatgggtttggaaaccccaaggcccctcgacgctctccaagctcaccgcggaggaggctgagcaccgcgctctccaggctgccgtgcttcaggagtggcaccagctatgcaaagagagagccatgaaagcgcagtgaggtcgatttggaccgtgtggatcttacgcgcatgtataattttgtattttttcttcgtctcccattctttgcgtgtctatactgctggtttcactcactgtataccgtcgccgatttgttcattgtattctcaaatacttgtgcacgaaaaaactgttttgtaacatactactgttagggcgtttttaagcttcggtgtgaagatcgattgtaca

SEQ ID NO: 9109 - DNA, 494 bp, Zea mays
  unsure (1)..(494): unsure at all n locations; Clone ID: LIB3061-111-Q1-K6-H9
cccgggcttnatttgttacaacaacaactaccattcagccagctacctgctgcctacccccagcaatttcttccattcaaccaactggcagcattgaactctcctgcttatttacagcagcaacaactactaccattcagccagctagctggtgtgagccctgctaccttcttgatacaaccacagttgttgccgttctaccagcacgctgcgcctaacgctggcaccctcttacaactgcaacaattgctgccattcaaccaacttgctttgacaaacccagcagcgttctaccaacaacccatcattggtggtgccctcttttagatttcttatgagttatagttcaataataaagttttttgtctgatgtttgtggcttcccagaaataagaaagtacatttctnannaaaaaaaaaaaaaaaaaaaaaaaaaaaaaaaaaaaaaaaaaaaaaaaaaaaaaaaaaaaaaaaaaaaaaaggggcggcccgtt

SEQ ID NO: 9110 - DNA, 535 bp, Zea mays
  Clone ID: LIB3061-111-Q1-N6-A4
tcgcagtatttttgccatccttgccctccttgctctttcagcaagcgttgctactcgcgactattattccacaatgctcacaacaatacctctctccggtgacagccgcgtagattgaatacccaactatacaatcctacaggctacaagaggccatcgcagcaagcatcttacggtcgttagcattgaccgtccaacaaccatatgccctattgcaacaaccatccttaatgaatctatatctccaaagaatcgcagcacaacaactacaacaacagttgcttccaacaatcaatcaagtagttgcagcgaaccttgctgcttacctccagcaacaacaatttcttccattcaatcaactagctggggtgaaccctgctgcttacttgcaggcacaacagctactggcattcaaccaacttgctttgacaaacccagcagcgttctaccaacaacccatcattgggggtgccctcttttagatttcttatgaggtatagttcaataataaagatttttgtctgatgtttgtggc

SEQ ID NO: 9111 - DNA, 333 bp, Zea mays
  Clone ID: LIB3061-111-Q1-N6-A6
tcggtttccgtaccttgattccctgtgcaaaggtctcatcgatgttttaaactacaacacatctgtatatttttgtcgagagcatcagtttcttagacaccacctatgtatcatgtgtttgttgccatctagtgtcattttgaaagatctaacttgtgatatacttggattgagtggtatggttgaaaatagtgaaagtcctttaacaaaaaatcaaaggtacgaaaaccggacgcgtgggcggcccctgtaaagatggcaccgttacctgcacgcgcacccgatttcctaattcttagttgggttaaacttagtccaaatcatgggcctagg

SEQ ID NO: 9112 - DNA, 397 bp, Zea mays
  Clone ID: LIB3061-111-Q1-N6-B3
tagatcgcgagcggtcgccctttttttttttttttttaacaaaactgagtctattttacaaaaattcatcaaaattataggactctgtcagatattgttaacattttatttcctaaataatatgatataggactcagttttgttagaaaaaaaaaaaaaaaaaaaaaaaaaaaaaaaaaaaaaaaaaaaaaaaaaaaaaaaaaaaaaaaaaaaaaaaaaaaaaaaaaccggcacccccaaaaaaaacaagggggcaaccttgttaaaaaaaccgcccccctggggtcaaaaaaaaaaaattggggcgcgcccccaaggggaaaccccctccctttgcccccaaaataacatccggggggcgcccgtgttaaccccttttttcttagaaaaaaggtta

SEQ ID NO: 9113 - DNA, 602 bp, Zea mays
  Clone ID: LIB3061-111-Q1-N6-C6
tcgccaactagcaacatataagcacaatagtgtaccaacaatggcagccaaaatattttgcctccttatgctccttggtctttctgcaagtgctgctacggcgaccattttcccgcaatgctcgcaagctcctatagcttcccttcttcccccgaacctctcaccagcggtgtcttcggtatgtgaaaacccaattcttcaaccctacaggatccaacaggcaatcacagctggcatcttacctttatcacccttgttcctccaacaatcatcagccctattacatcaattacctttggtgcatttattggcacaaaacatcagggcacaacaactacaacaacttgtgctagcaaaccttgctgcctactctcagcaacagcagtttcttccattcaaccaactagctgcattgaactctgcttcttatttgcaacaacaacaactaccattcagccagctacctgctgcctacccccagcaatttcttacattcaaccaactggcagcattgaactctcctgcttatttacagcagcaacaactactaccattcagccagctagctggtgtgagccctgctaccttcttgatacaaccac

SEQ ID NO: 9114 - DNA, 541 bp, Zea mays
  Clone ID: LIB3061-111-Q1-N6-C7
gcctgtcgacgatgatgggcgccggcgggctgtacccctacgcggagtacctgaggcagccgcagtgcagcccgctggcggcggcgccctactacgccgggtgtgggcagccgagcgccatgttccagccgctccggcaacagtgctgccagcagcagatgaggatgatggacgtgcagtccgtcgcgcagcagctgcagatgatgatgcagcttgagcgtgccgctgccgccagcagcagcctgtacgagccagctctgatgcagcagcagcagcagctgctggcagcccagggtctcaaccccatggccatgatgatggcgcagaacatgccggccatgggtggactctaccagtaccagctgcccagctaccgcaccaacccctgtggcgtctccgctgccattccgccctactactgattcatgatatttgggaaatctcctctatccatctctctctatctatatatgtaataatgcagtaagacgacacacattatcatgtgtggtatgaccaataatatatgcatggtcataat

SEQ ID NO: 9115 - DNA, 506 bp, Zea mays
  Clone ID: LIB3061-111-Q1-N6-D12
tcgtccggggctatgtgtggagcctgaacgttacacagacccataccggcatgcagatctcgcatgacacccagctgacaaggcagagcgccaagggaacgaacgcgaggactgtggtcaggctgtagaccatatcagtggatgccttgaaacagcgacgagacgtggcgctcgaaccgagtgcttgcatactgtaactgagagacaccaaccaaaggcgtatcttggggtgaagcccacactataccgctagccatatctgacaagcataaaaacgtacgccccacacagtaccggggaaggtccaacaggaactctacatgcaactgggatagacaccaaaagcgactcttagacaacaaaagcggaacagcacagctcagcggaatacgtgtccaaaaaactctgaacccactcagccaacaaatactggggaaccatcatcatatatatggtccagtgacatgaatatgatgagggctacacatacttggatgctgagtaac

SEQ ID NO: 9116 - DNA, 591 bp, Zea mays
  Clone ID: LIB3061-111-Q1-N6-D2
tcgccatatcagcaaacggcagtgcgttatagaggatcgtcgaacagtaacagcatgaagatggtcatcgttctcgtcgtgtgcctggctctgtcagctgccagcgcctctgcaatgcagatgccctgcccctgcgcggggctgcaaggcttgtacggcgctggcgccggcctgacgacgatgatgggcgccggcgggctgtacccctacgcggagtacctgaggcagccgcagtgcagcccgctggcggcggcgccctactacgccgggtgtgggcagccgagcgccatgttccagccgctcccgcaacagtgctgccagcagcagatgaggatgatggacgtgcagtcccccccgcagcagctgcagatgatgatgcagcttgagcgtgccgctgccgccagcagcagcctgtacgagccagctctgatgcagcagcagcagcagctgctggcagcccagggtctcaaccccatggccatgatgatggcgcaaaacatgccggccatgggtggactctaccagtaccagctgcccagctaccgcaccaacccctgtggcgtgtccgctggcattacgccctactactga

SEQ ID NO: 9117 - DNA, 468 bp, Zea mays
  Clone ID: LIB3061-111-Q1-N6-E3
tcggctgagcgaggctaggacgggccttcagacaagggctccggcatagactggtcggccatagttcgactggcgagctgtgcgggcatattcctcagcgcgcgctgcgcgcggcaccatggaactatagagccgctaccccaagaatgacatgcggctggcagtagagtccctatgtgccaggagactcgcgcgacacatcaccagaaccgcgcgggtaccgcaggtcccagcctatgcgcgggtacggccatgctgctgtaactggtaactccctgtcattggagctcgctctgcacaggcacgacaagctctgctcagctaccatgagctatcctgaaaacaacatgggctacagcgagctatgctgagacctggcggatccgctcagagagctcatcgtggtgaacatgtgctggtgcatacggaagacacagcaagcgacattgtatgtatggtgtacacaat

SEQ ID NO: 9118 - DNA, 520 bp, Zea mays
  unsure (1)..(520): unsure at all n locations; Clone ID: LIB3061-111-Q1-N6-E6
tcggcaacagcagttttctttcattcaaccaactagctgcattgaactctgcttcttatttgcaacaacaacaactaccattcagccagctacctgctgcctacccccagcaatttcttccattcaaccaactggcagcattgaactctcctgcttatttacagcagcaacaactactaccattcagccagctagctggtgtgagccctgctaccttcttgatacaaccacagttgttgccgttctaccagcacgctgcgcctaacgctggcaccctcttacaactgcaacaattgctgccattcaaccaacttgctttgacaaacccagcagcgttctaccaacaacccatcattggtggtgccctcttttagatttcttatgagttatagttcaataataaagttttttgtctgnggaaaaaaaaanaaaaaaaaaaaaaaaaaaaaaaaaannanaanncncnncnnaggggataataaaaaaaaaaaaangnggggggggggggcgcggggggacc

SEQ ID NO: 9119 - DNA, 367 bp, Zea mays
  Clone ID: LIB3061-111-Q1-N6-E8
tcgggtaatgcaatgccagatggtctaatgcacactgggagttcaagcggtataatacatgacacatcctgtggggatcattctcttaatgcttgtcaagacttgcatggccttcatacccaaataaatcgcttaaactagtctacagccataccaaaatgcaactgctgtgctgattggcagtctacaaccaagacaggctcaacattttagaaccgagtcttgctactctgagctcatgctcgcatatgtgccttctgtgggaacactgtgcttgaatccatgtcaacctgtaggtgatgcctctggtggtggatcctttatcagctcagagttgaataggggaaccacttaacgattcaatgtt

SEQ ID NO: 9120 - DNA, 505 bp, Zea mays
  Clone ID: LIB3061-111-Q1-N6-E9
tcgattcattattctggaaatttctggataagcaagtacctatcgctcgtgcatcaaaaaatggaaggttcttccttcggcaacgtggatcagaggacactacgtcatgagccgcggacatccaaggacacctttctaccatgcattcctaaagctaacaatagcccatatggctagctgcacacgttggcgcactccttatatccaaagggcaaaggttgtctccatagtcgaacaaagggcaagctcaatttctaccgataatccacatgcgagagcgtcgcgatagacataatccataaaagatgtcgaccctcaggtccgaaagtcttgcctgatggtgacgcctggtttcctgatcgggaccagactcatacactgccaggtgcacactttcacgtgccaagactgctgactgactgactgaagatgcagcccctacacacggatctagatctatggccatcagcttcttggaatattgccatagctaccatctgcataa

SEQ ID NO: 9121 - DNA, 489 bp, Zea mays
  Clone ID: LIB3061-111-Q1-N6-F3
tcggtcttacactaacaaggacacagattcccaaaggtgtataggtgatacgactgagcatgcacccgtgcttctgtctagactgctaggacgacccacacaaggtacgagcctaccctgtgcaaggtatcccaatgatcgaccacatattcttatgtttgtaagcgacctacgcgcaagccccggaggcaacctatgcaatctaggaatactagaactaatagaaacgcttgcctccacatacaggtggcacagagtggggtagaactagcattgtgtacctgacacgccgactcggacgatcctctaacacgtgtctgtggcgaggctcagcaggctcaccagcctatgtatggtctgggtgcttgcgcgcatgctttgcattttaggaccagcaggtacttattattagtagctgctgggaccacaatgtacagcatgcacccaagcgcccacgagagagctagccgcggtaggcctgatgagact

SEQ ID NO: 9122 - DNA, 399 bp, Zea mays
  unsure (1)..(399): unsure at all n locations; Clone ID: LIB3061-111-Q1-N6-F6
tcgatgcacctacatacctgcaacaacaattgttgcaacagtatgtaccagctctgtactcagctagttgtggcaaaccctgctgcctacttgcaacagctgcttccattcaaccaactgactatgtcgaactctgctgcgtacctacaacagcgacaacagttacttaatccactagcagtggctaacccattggtcgctgccttcctacagcagcaacaattgctgccatacaaccagttctctttgataaaccctgtcttgtcgaggcagcaacccatcgttggaggtgccatcttttagattacatatgagatgtactcgataatggtgccctcattccggcatgtgtttcctagaaataatcaatatattgattgagatttatctcaatntntt

SEQ ID NO: 9123 - DNA, 299 bp, Zea mays
  Clone ID: LIB3061-111-Q1-N6-G6
gtgcatgccacgttatactttttttatagggttaacaaaatgcaattaactgggcgatagtttacaacggggggaaagggaaaacccttgagaaacccaaataaatagccttgcagaacattaacactttaaagcatgtggtgtaataatggaagaggctaactacacaataattctttccaacattatgtgccaccctttaaaggcgaataaaacgcgccctgaagtggattattaaatgcggcaactgtgggggatacgcgcattgtgaattgtacaccttgggaggcttctatttc

SEQ ID NO: 9124 - DNA, 610 bp, Zea mays
  Clone ID: LIB3061-111-Q1-N6-H10
tcggtcgtgggcacaggctcatttgggatcgtcttccaggctaagtgtctggaaacaggagagaccttcgccatcaagaagtgctgcaagatcggcgttacaagaaccgggagctgcaacttatgcgtgccatggagcaccccaacgtcatctgcctgaagcactgcttcttctcgacaacgagcagggacgaattgtttttaaaccttgtcatggaattcgtccctgagactctataccgagtcctgaagcactacagcaatgcgaaccagaggatgcctcttatctacgtcaagctctacatgtatcagctttttagaggcctagcttatattcataatgtaccaggagtctgccatagggatgtgaagccacaaaacgttttggttgatcctctcacccaccaggtcaagctctgtgactttggtagtgcaaaagttctgattcctggtgaaccgaacatatcttacatatgctctcgttactatcgagcccctgagctcatatttggtgcgacggagtatacaagttcaatagacatatggtcagctggttgtgttctagctgagttgcttcttggacagccactatttccaggagagagcgctgt

SEQ ID NO: 9125 - DNA, 90 bp, Zea mays
  Clone ID: LIB3061-112-Q1-K6-A1
ccagtgcttgcaacgttttcagctcttttttgagggcccccgtaatttcatttccttggtccggcgttttacaccgttttgtgttggggg

SEQ ID NO: 9126 - DNA, 644 bp, Zea mays
  unsure (1)..(644): unsure at all n locations; Clone ID: LIB3061-112-Q1-K6-A10
attgagaaccaatagcaacatagnaaagcacaatagtgtaccaacaatggcagccaaaatttttgcctccttatgctccttggtctttctgcaagtgctgctacggcgaccattttcccgcaatgctcgcaagctcctatagcttcccttcttcccccgtacctctcaccagcggtgtcttcggtatgtgaaaacccaattcttcaaccctacaggatccaacaggcaatcgcagctggcatcttacctttatcacccttgttcctccaacaatcatcagccctattacaacagttacctttggtgcatttattggcacaaaacatcagggcacaacaactacaacaacttgtgctagcaaaccttgctgcctactctcagcaacagcagtttcttccattcaaccaactaggttcattgaactctgcttcttatttgcaacaacaacaactaccattcagccagctacctgctgcctacccccagcaatttcttccattcaaccaactagcagcattgaactctcctgcttatttacagcagcaacaactactaccattcagccagctagctggtgtgagccctgctaccttcttgacacaaccacagttgttgccgttctaccagcacgttgcgcctaacgc

SEQ ID NO: 9127 - DNA, 624 bp, Zea mays
  unsure (1)..(624): unsure at all n locations; Clone ID: LIB3061-112-Q1-K6-A6
ccaacaagcaacatagnaagtggnatacagtagcaaaaatanagcaacaatggcggccaagatattttccatccttatgctccttgctctttctgcatgtgttgctaacgcgaccatttttcctcaatactcacaagctcctatagctgcccttcttcccccataccttccatcaatgaccgctttagtatgtgaaaacccagcccttcaaccctacaggatccagcaagcaatcgcaacaagcaacttacctttatcacacctgttctttcaacaatcgccagccctatctttggtgcagtcattggtacaaaccatcagggcagaacagttgcagcaactcgtgctaccagtgatcagccaagtagctctggcaaacctttccccctactctcagcaacaacaatttcttccattcaaccaactgtctatactgaaccctgctgcttatttgcagcaacaacaactactaccattcagccagctagctactgcctactctcagcagcaacaatttcttccatttaaccaattggccgcactgaacccctctgcttatttccagcagcaaatactactaccatttggccagctagctacaacaagccccgcttccttcttgac

SEQ ID NO: 9128 - DNA, 632 bp, Zea mays
  Clone ID: LIB3061-112-Q1-K6-A7
tggctctcgctgcgagcgccacctccacgcatacaagcggcggctgcggctgccagccaccgccgccggttcatctaccgccgccggtgcatctgccacctccggttcacctgccacctccggtgcatctcccaccgccggtccacctgccgccgccggtccacctgccaccgccggtccatgtgccgccgccggttcatctgccgccgccaccatgccactaccctactcaaccgccccggcctcagcctcatccccagccacacccatgcccgtgccaacagccgcatccaagcccgtgccagctgcagggaacctgcggcgttggcagcaccccgatcctgggccagtgcgtcgagtttctgaggcatcagtgcagcccgacggcgacgccctactgctcgcctcagtgccagtcgttgcggcagcagtgttgccagcagctcaggcaggtggagccgcagcaccggtaccaggcgatcttcggcttggtcctccagtccatcctgcagcagcagccgcaaagcggccaggtcgcggggctgttggcggcgcagatagcgcagcaactgacggcgatgtgcggcctgcagcagccgactccatgcccctacgctgctgccggcggtgtc

SEQ ID NO: 9129 - DNA, 624 bp, Zea mays
  Clone ID: LIB3061-112-Q1-K6-A8
cacattcaaaaacacaccaagcgaacgcactagcaacgacctaacaccaatggctaccaagatattagccctccttgcgcttcttgcccttttagtgagcgcaacaaatgcgttcattattccacagtgctcacttgctcctagtgccattattccacagttcctcccaccagttacttcaatgggcttcgaacatccagccgtgcaagcctacaggctacaactagcgcttgcggcgagcgccttacaacaaccaattgcccaattgcaacaacaatccttggcacatctaaccctacaaaccattgcaacgcaacaacaacaacaacaacagtttctgccatcactgagccacctagccgtggtgaaccctgtcacctacttgcaacagcagctgcttgcatccaacccacttgctctggcgaacgtagctgcataccagcaacaacaacagctgcaacagtttatgccagtgctcagtcaactagccatggtgaaccctgccgtctacctacaactactttcatctagcccgctcgcggtgggcaatgcacctacgtacctacaacaacagttgctgcaacaaattgtaccagctctgactcagctagctgtggcaaaccc

SEQ ID NO: 9130 - DNA, 646 bp, Zea mays
  unsure (1)..(646): unsure at all n locations; Clone ID: LIB3061-112-Q1-K6-A9
caactagcaacatagnaaagcacaatagtgtaccaacaatggcagccaaaaattttgcctccttatgctccttggtctttctgcaagtgctgctacggcgaccattttcccgcaatgctcgcaagctcctatagcttcccttcttcccccgtacctctcaccagcggtgtcttcggtatgtgaaaacccaattcttcaaccctacaggatccaacaggcaatcgcagctggcatcttacctttatcacccttgttcctccaacaatcatcagccctattacaacagttacctttggtgcatttattggcacaaaacatcagggcacaacaactacaacaacttgtgctagcaaaccttgctgcctactctcagcaacagcagtttcttccattcaaccaactaggttcattgaactctgcttcttatttgcaacaacaacaactaccattcagccagctacctgctgcctacccccagcaatttcttccattcaaccaactagcagcattgaactctcctgcttatttacagcagcaacaactactaccattcagccagctagctggtgtgagccctgctaccttcttgacacaaccacagttgttgccgttctaccagcacgttgcgcctaacgctggcaccctc

SEQ ID NO: 9131 - DNA, 515 bp, Zea mays
  Clone ID: LIB3061-112-Q1-K6-B1
gtgcttcaagctccccccggggtgagcctggtggagggcgccatgtgcgagccgctgagcgtgggcgtgcacgcgtgccgccgcgcgggggtggggcccgtgacgggcgtgctcgtggtgggcgccggccccatcggcctggtgtcgctgctggcggcgcgggccttcggcgcgccgcgcgtggtggtcgtggacgtggacgatcaccgtctggccgtggccaggttgttgggcgcggacgcggcggtgcggttgtcgccccgcgcggaggacctggcggactaggtggagcgcattctctcggccatgggcttggacatcgacgtcagtctggactgcgccgggttcagcatgaccatgtttacggtgctggacgcgacgctgccctgcggtaaggtgtgcctggtctggatggtcctcaatgagatgaccctgcccctgacggtggaggcgtctctttaggtgcactttgtgggcgtgtcccggtcaaggacacctggcaactggtcattgtc

SEQ ID NO: 9132 - DNA, 637 bp, Zea mays
  unsure (1)..(637): unsure at all n locations; Clone ID: LIB3061-112-Q1-K6-B11
gcatcttgttcttacttcaacatgtgaatgaactactaaggcttgttcgggtttcaatggaatcaataagcagctgatgatgtgttcaaaaatcggaattgcacagaatgtcacacagtgaactgctgatattggattaacatgcaatctgtgctccgtgatgctggttgcagctatgtcagtatatttttacagtgcaaaacaaattaacttgaaatcaagcattccctttcctaaattggaaattatgtgaaccaaggttctggaattcgggagcggtactgctgcatcttgtggtagtgtaaccatgcattgatgtgtgtttgtttcaatgggtcagaggagatcgattgcgattacctgcactacctgtcatgtacgggcgctcgtacgccaggcagcgtcgcgcccgtgacaggcgccgcgcacaggagcgcgatctgggagatcagcaggaacctatggaaagcagtggccaggaaggaaattagaagaatggaaagttgagggaaggaaaggagagattgattagtgattgattaagtgattgattagtgattgattagtgttaccatgtttaggcttgcctaaaataaaggctctaggacagcnagccgatggctatatatgcggcaca

SEQ ID NO: 9133 - DNA, 638 bp, Zea mays
  Clone ID: LIB3061-112-Q1-K6-B2
taatattttcagcattcaaaaacacaccaagcgaacgcactagcaacgacctaacaccaatggctaccaagatattagccctccttgcgcttcttgcccttttagtgagcgcaacaaatgcgttcattattccacagtgctcacttgctcctagtgccagtattccacagttcctcccaccagttacttcaatgggcttcgaacatccagccgtgcaagcctacaggctacaactagcgcttgcggcgagcgccttacaacaaccaattgcccaattgcaacaacaatccttggcacatctaaccctacaaaccattgcaacgcaacaacaacaacaacagtttctgccatcactgagccacctagccgtggtgaaccctgtcacctacttgcaacagcagctgcttgcatccaacccacttgctctggcgaacgtagctgcataccagcaacaacaacagctgcaacagtttatgccagtgctcagtcaactagccatggtgaaccctgccgtctacctacaactactttcatctagcccgctcgcggtgggcaatgcacctacgtacctacaacaacagttgctgcaacaaattgtaccagctctgactcagctagctgtggcaaaccctgctgca

SEQ ID NO: 9134 - DNA, 629 bp, Zea mays
  unsure (1)..(629): unsure at all n locations; Clone ID: LIB3061-112-Q1-K6-B4
attgagaaccaatagcaacatagnaaagcacaatagtgtaccaacaatggcagccaaaatttttgcttccttatgctccttggtctttctgcaagtgttgctaccgcaaccattttcccacaatgctcacaagctcctatagcttcccttcttcccccatacctctcaccagcggtgtcttcaatgtgtgaaaccccaattgttcaaccctacaggatccaacaggcaatcgcaacaggcatcttaccattatcacccttgttcctccaacaaccgtcagccctattacagcagttacctttggtccatttggtggcacaaaacatcagggcacaacaactacaacaacttgtgctagcaaaccttgctgcatactctcagcaacatcagtttcttccattcaaccaactggctgcattgaactctgctgcttatttgcaacaacaattaccattcagccagctagttgctgcctacccccagcaatttcttccattcaaccaactagcagcattgaactctgctgcttatttacagcagcaacaactactaccattcagccagctagctgatgtgagccctgctgccttcttgacacaacaacagttgttgccgttctacctgcacgc

SEQ ID NO: 9135 - DNA, 622 bp, Zea mays
  unsure (1)..(622): unsure at all n locations; Clone ID: LIB3061-112-Q1-K6-B6
anacaacagcacatanaagtggaatccagtagcaacaatagagcaacaatggcgaccaagatattttccctccttatgctccttgctctttctacatgtgttgctaacgcgacaattttccctcaatgctcacaagctcctatagcttcccttcttcccccataccttccatcaattatagcttcaatatgtgaaaacccagctcttcaaccatataggcttcaacaagcaatcgcagcaagcaacatacctttatcgcccttgttgtttcaacaatcgccagccctatctttggtgcagtcattggtacaaaccatcagggcacaacagctgcagcaactcgtgctacctctgatcaaccaagtagctctggcaaacctttctccctactctcagcaacaacaatttcttccattcaaccaactgtctacactgaaccctgctgcttatttgcagcaacaactattaccatttagccagctagctactgcctactctcagcaacaacaacttcttccatttaaccaattggccgcactgaaccccgctgcttatttgcagcagcaaatactactaccatttagccagctagctgcagcaaaccgtgcttccttcttgacac

SEQ ID NO: 9136 - DNA, 535 bp, Zea mays
  unsure (1)..(535): unsure at all n locations; Clone ID: LIB3061-112-Q1-K6-B7
ngacaggcgctgcaccctggcaacaagaacgttgcgaccgtgagcaagcagcaggggaaagtggcgtgctatgtcagatcaagagaagcaaccatatgtggaccaagctgggcagaagaagcaggactatgagaagactaaggcaaactttgataagaaggagagcacaagctcaaagaaggctaagactgaggatgaggatggctcgaagtcagaggttgatgacgaggatggcagcagtgacgaggaaaacgatgacgatgagtaaacagtctccaaggtcacgaggtagcaaatcgagtgttaggtccccaattagcttactgttttgctgcctttaaatgttaagttgtttcaaacaggtgtttatgaaggggatctattagtttcgcgatgtcgttagtttagtgcattagcaaagaaaaagccgaatgctgctagctgttctgttgcttttcttttgctaaccacttgtgtcacaactttctgtacctgcttcattgactaatctagtgactagtcagttattggttca

SEQ ID NO: 9137 - DNA, 541 bp, Zea mays
  unsure (1)..(541): unsure at all n locations; Clone ID: LIB3061-112-Q1-K6-B8
ggcgtccgggcagccgcctcctgtcgccagttcgccactctctggttgctgcacgcctctagtcggcggggccaagagtggaaagggcaggatgaagtccggcgagcggccgaagcagatgcggggcgtccggcaggaatctcggcggttccggcttctggtcatcgtcgccggcttcttcctcgtctccctgaccttcgtcgtcatctccaagcccgattccatcctgtccagcctgaacggcaagctgccggtggaccaggcgccgacgtccatcctgatccagcagaaggttaactcgccccccgccaccgcacttgagacctccaccgacgcactgcgtggagaccctagagtggtcgatgacgaagccgatccaagaccacaggggttcaagggcgaggaggaagaagagccggtactgagcgagccggacgcgacccagcggatgacggagctgacccccgacagggacggcagcggccgtaaatccaacgagnaggtgctaggcggcggaagtgaccgcgaggggaaaagtaag

SEQ ID NO: 9138 - DNA, 583 bp, Zea mays
  unsure (1)..(583): unsure at all n locations; Clone ID: LIB3061-112-Q1-K6-B9
ggngctgcacagnttgctgcgcagnctagggcaggacatggtggtgctgcttcagctgagcttgcgcagaagatgtgggtctcattgttaatgcgatgggcggtctggttgaggatgctgatggtatgaacagggagtggagcatcaagagccacgagctctctctccagctaaacagtgtcgttcttccacttggctcgcttcgggttgggctgtcgcggcacagatcactgctatttaaggtacttgctgaccgagttaacctaccatgtaagcttctgaaaggaatatgttataccgggacagatgaaggagctgttaacttggtcaaagttgattttgacagcatggaatatattattgatttgatgggagctccaggcaccttaatcccttcagacatttctgggagtcagtttcaggactccaacaatagccaattgagcagtgatgccattgaagagagtgtagcagaattgtgcttagcccttgagcagattaatggtggatatgagaacaaaaatactattggaggatgctcatctggtcacagttctattttagcgctcacgagttcacacct

SEQ ID NO: 9139 - DNA, 508 bp, Zea mays
  Clone ID: LIB3061-112-Q1-K6-C11
agcgtccggttgggcctattcatcatcacggggggcgaggcgcgtttgcatcggcctaacaacggggggtcccagcatatgatacctgtctgcgcttttcgccctcgtcgtgagcgcgacaatagcgttcatcatggcaacacgctcactgggtcctagggccgttattccacatgccggggggcgggcttcaatcgctttgggcacccactgggcaagcctacttgctacaactagcgctagctgggagagtttggccacagccaattgcccattttcagcaacaagtaacggggacatgtaacaatacaggaccattggaacgcatcagcgacaacattggctaccatccatgagcgcaatagagtgggaaaaccctgtcgtctacttggaacatcaggagaaggcatcaaacccactagatctggcaaatatagttgcctaccaactacaacatcaattgcaacagtttataccagagctaagtgaactagccatggcgaaccct

SEQ ID NO: 9140 - DNA, 639 bp, Zea mays
  Clone ID: LIB3061-112-Q1-K6-C3
cttgctcctatgccttttccacagtctcctccattcttcatgggcttcgaacacccagctgtgcaagcctacaggctacaacaagcgcttgcggcgagcgtcttacaacaaccaattgcccaattacaacaacaatccttggcacatctaaccatacaaaccatcgcaacgcaacagcaacaacaatttctaccagcactgagccaactagctgtggtgaaccctgtcgcctacttgcaacagcagttgcttgcatccaacccacttgctctggcaaacatagttgcataccaacaacaacaacaattgcaacagtttctaccagcgctcagtcaactagccatggtgaaccctgccgcctacctacaacagcaacaactgatttcatctagccctctcgctgtggttaatgcacctacatacctgcaacaacagttgctgcaacagattgtaccagctctgactcagctagctgtggcaaaccctgctgcctacttgcaacagctgcttccattcaaccaactgactgtgtcgaactctgctgcgtacctacaacagcgacaacagttacttaatccactagcggtggctaacccattggtcgctgccttcctacagcagcaacaattgctgccatac

SEQ ID NO: 9141 - DNA, 626 bp, Zea mays
  unsure (1)..(626): unsure at all n locations; Clone ID: LIB3061-112-Q1-K6-C7
gcacaatagtgtaccaacaatggcagccaaaaattttgcctccttatgctccttggtctttctgcaagtgctgctacggcgaccattttcccgcaatgctcgcaagctcctatagcttcccttcttcccccgtacctctcaccagcggtgtcttcggtatgtngaaaacccaattcttcaaccctacaggatccaacaggcaatcacagctggcatcttacctttatcacccttgttcctccaacaatcatcagccctattacatcagttacctttggtgcatttattggcacaaaacatcagggcacaacaactacaacaacttgtgctagcaaaccttgctgcctactctcagcaacagcagtttcttccattcaaccaactagctgcattgaactctgcttcttatttgcaacaacaacaactaccattcagccagctacctgctgcctacccccagcaatttcttccattcaaccaactggcagcattgaactctcctgcttatttacagcagcaacaactactaccattcagccagctagctggtgtgagccctgctaccttcttgatacaaccacagttgttgccgttctaccagcacgctgcgcctaacgctggcaccc

SEQ ID NO: 9142 - DNA, 619 bp, Zea mays
  unsure (1)..(619): unsure at all n locations; Clone ID: LIB3061-112-Q1-K6-D10
gnatgatcttatgaccactttngatgggctattgggacagatgaaggagaatccgatatttttggctttgaaatgttggaatgaatgcacaagtccacagaaatggaatcgatcttgatcagtttgaggactacttcataacgttgcgagcttggaggcttgatggccagtgcacagagctgtgtgtaaaagcacatgcattgaagggtcaatcatgtgctcaccacaggctagtggtgggtgatggctttgtgactatgacaaagggtgaaagtattagaaatttctttgagcatgctgaagaggccgaggaagaggatgaagacgatgccatggacagggatggaaatgattttgatggtgatgatgcccattcacagaagcatgccaagagccctgaactggcaagagaatttcttttggatgctgctgctgtgatattcaaagaacagattgagaaggccttcagggaaggtacagcacagcaaaatgcacgtagtgntttttgtgacccttgctttaaaacttttggaacagcgagttcatgtagcatgcaaagaaataattacgttggaaaaacagaacaaacttcttgaagaagaggagaaagaaaagcgtg

SEQ ID NO: 9143 - DNA, 541 bp, Zea mays
  unsure (1)..(541): unsure at all n locations; Clone ID: LIB3061-112-Q1-K6-D12
ccattgcgagcgccccttgccggnccaggagggttggaggcggcggcagtgggcttcgtcaccggtaagaggaaggccaccgaggtagcccaagcgtaggttctggagaaatttgttcagaaaggggatacagtggtcgatgccacatgcggccatgcgggaatgacaatgacacgctcgctctgcttaagatggtggctgacaaaacaggccgtggatgtgtttatgggatggacattcaagaatctgcgacagagaatacttcctcttttctgaaaatggccgtggatgatgaacatcatgtgtgggtttgaactatgaagcttttacctaatttcccctgaagaatgaaatagaaaggagacacttatgaattctgatttgacattattatttactattcagatacagaggatacttgtcatcttctcactgaatatttgatatatctgtacctgtcattgtatttgttttatgtggcagcagggactggtaaaactatttcctatatggtcatagtagaatggaagagattgttccc

SEQ ID NO: 9144 - DNA, 632 bp, Zea mays
  unsure (1)..(632): unsure at all n locations; Clone ID: LIB3061-112-Q1-K6-D3
caactagcaacatagnaaagcacaatagtgtaccaacaatggcagccaaaatattttgcttccttatgctccttggtctttctgcaagtgctgctaccgcaaccattttcccacaatgctcacaagctcctatagcttcctttcttcccccatacctctcaccagcggtgtcttcagtatgtngaaaacccaattcttcaaccctacaggatccaacaggcaatcgcagcaggcatcttacctttatcacccttgttcctccaacaaccgtcagccctattacagcagttacctttggtgcatttgttggcacaaaacatcaaggcacaacaactacaacaacttgtgctaggaaaccttgctgcctactctcagcaacagcagtttcttccattcaaccaactggctgcattgaactctgctgcttatttgcaacaacaactaccattcagtcagctagctgctgcctacccccagcaatttcttccattcaaccaactggcagcattgaactctgctgcttatttacaacagcaacagctaccaccattcagccagctagctgatgtgagaccctgttgccttcttgacacaacaacagttgtttgccgttctacctgcacgctgcgcct

SEQ ID NO: 9145 - DNA, 635 bp, Zea mays
  unsure (1)..(635): unsure at all n locations; Clone ID: LIB3061-112-Q1-K6-D4
nacagctcctatagcttcccttcttcccccgtacctctcaccacggtgtcttcggtatggtgaaaacccaattcttcaaccctacaggatccaacaggcaatcgcagctggcatcttacctttatcacccttgttcctccaacaatcatcagccctattacagcagttacctttggtgcatttattggcacaaaacatcagggcacaacaactacaacaacttgtgctagcaaaccttgctgcctactctcagcaacagcagtttcttccattcaaccaactagctgcattgaactctgcttcttatttgcaacaacaacaactaccattcagccagctatctgctgcctacccccagcaatttcttccattcaaccaactgacagcattgaactctcctgcttatttacagcagcaacaactactaccattcagccagctagctggtgtgagccctgctaccttcttgacacaaccacagttgttgccgttctaccagcacgctgcgcctaacgctggcaccctcttacaactgcaacaattgctgccattcaaccaacttgctttgacaaacccagcagcattctacccaacaacccatcattggtggtgnccctcttttagatttcttatga

SEQ ID NO: 9146 - DNA, 624 bp, Zea mays
  Clone ID: LIB3061-112-Q1-K6-D5
cttgtcggggtgagatgcttcaaaggtccgccctgatcgaacaaaggaatcctcaggttgtcgccacggaagttcttggtggtgggaagttttatgttcagacagtgggtgaccagagggtggcttcaattcaacagcagcttgcatctttgaaacttaaagatgcaccagtcattggtgcctttaatcctgtgaagggagagatagtcctctcacaatttagccttgacaactcctggaacagagctatgattgttaatggacctcgctctgtagaatctctaaacgacaagtttgaagtattctatatcgactatggcaaccaagaggtggttccctacagtcgtctacgacccgtggacccatctgtttcctcttctcctgctcttgctcagttatgcagccttgctttcataaaagtgcccagtcttgaggatgactttggtcaggaagcagcagagtatctaagtgaatgtttgctcagtagctcaaagcaatatcgggcaatgatcgaagaacgtgatgcttctgggggaaaatcaaagggacaaggaaccggaaatgttctcattgttactcttgttgatgcggagacagaaagtagcataaatgctaccatgcttg

SEQ ID NO: 9147 - DNA, 632 bp, Zea mays
  unsure (1)..(632): unsure at all n locations; Clone ID: LIB3061-112-Q1-K6-D6
gnaagtggnatacagtagcaacaatagagcaacaatggcggccaagnaattttccatccttatgctccttgctctttctgcatgtgttgctaacgcgaccatttttcctcaatactcacaagctcctatagctgcccttcttcccccataccttccatcaatgaccgcttcagtttgtgaaaacccagcccttcaaccctacaggctccaacaagcaatcgcaacaagcaacttacctttatcacccctgttctttcaacaatcgccagccctatctttggtgcagtcattggtacaaaccatcagggcacaacagctgcaacaactcgtgctaccagtgatcagccaagtagctctggcaaacctttctccctactctcagcaacaacaatttcttccattcaaccaactgtctacactgaaccctgctgcttatttacaacaacaacaactactaccattcagccagctagctactgcctactctcagcagcaacaatttcttccatttaaccaattggccgcactgaacccctctgcttatttccagcagcaaatactactaccatttggccagctagctacaacaagccccacttcctttttgaaacaacaacaattgcttccgttct

SEQ ID NO: 9148 - DNA, 78 bp, Zea mays
  unsure (1)..(78): unsure at all n locations; Clone ID: LIB3061-112-Q1-K6-D7
gtanaacctgttgggtttgtcaaagcagttggttgaatggcagcaattgttgcgtcccagaaaaagaaatacatttct

SEQ ID NO: 9149 - DNA, 648 bp, Zea mays
  unsure (1)..(648): unsure at all n locations; Clone ID: LIB3061-112-Q1-K6-D8
ggngnaaccctccgagcatcctagtgactcccaggctccggccatgtcggcgcagttcacaagaataaccttcagcaacctgtttgtccgtcgggctggcccaggcagcacggagctgaccgtggagggaaggccatccgaccagctgggcaggagaaacctcactgacagccccgtatttgacggccgtggccctgacgccagcctcgtggctcgcgtacagggagtcgctacccagatgggcgacgtgcgccagttgtacaccgtcgtgttccaggagaggccgctcaagggctccacgctcgtcaccgaaggcgcgatgacagaagggtcagacgagtgggcgatctacggtggaactggagtgttcgcgatggcgagaggcgtcataaggagaacgtttcttgccgacacgagcggcgggaactccgacgagcttgccgtggaggttctctgcccggtgttccgcccggcggcgtttggctcatcgtcgtcacagccagcagcaaaggacatcagctccaccgtcgtcgtcaccaaggtcggagtgtggggtggagaggggagggtcggcgcaggacatcgcgacgacggagccgccgaggcgtctgcagagcctgaccgtccgcgccggcgttgccgtggact

SEQ ID NO: 9150 - DNA, 595 bp, Zea mays
  Clone ID: LIB3061-112-Q1-K6-E10
cgcacatatctactatactatactctaggaagcaaggacaccaccgccatggcagccaagatgcttgcattgttcgctctcctagctctttgtgcaagcgccactagtgcgacccatattccagggcacttgccaccagtcatgccattgggtaccatgaacccatgcatgcagtactgcatgatgcaacaggggcttgccagcttgatggcgtgtccgtccctgatgctgcagcaactgttggccttaccgcttcagacgatgccagtgatgatgccacagatgatgacgcctaacatgatgtcaccattgatgatgccgagcatgatgtcaccaatggtcttgccgagcatgatgtcgcaaatgatgatgccacaatgtcactgcgacgccgtctcgcagattatgctgcaacagcagttaccattcatgttcaacccaatggccatgacgattccacccatgttcttacagcaaccctttgttggtgctgcattctagaatagaaatatttgtgttgtatcgaataatgagttgacatgccatccgcgtgtgactcattattaacaataaaacaaagttccctcttattatc

SEQ ID NO: 9151 - DNA, 642 bp, Zea mays
  unsure (1)..(642): unsure at all n locations; Clone ID: LIB3061-112-Q1-K6-E12
tagcaacatagnaaagcacaatagtgtaccaacaatggcagctaaaatttttgcctccttatgctccttggtctttctgcaagtgctgctacggcgaccattttcccacaatgctcacaagctcctatagcttcccttcttcccccgtacctctcaccaacggtgtcttcggtatgtgaaaacccaattcttcaaccctacaggatccaacaggcaatcgcagctggcatcttacctttatcacccttgttcctccaacaatcatcagccctattacagcagttacctttggtgcatttattggcacaaaacatcagggcacaacaactacaacaacttgtgctagcaaaccttgctgcctactctcagcaacagcagtttcttccattcaaccaactagctgcattgaactctgcttcttatttgcaacaacaacaactaccattcagccagctatctgctgcctacccccagcaatttcttccattcaaccaactgacagcattgaactctcctgcttatttacagcagcaacaactactaccattcagccagctagctggtgtgagccctgctaccttcttgacacaaccacagttgttgccgttctaccagcacgctgcgcctaacgctggcaccctc

SEQ ID NO: 9152 - DNA, 637 bp, Zea mays
  unsure (1)..(637): unsure at all n locations; Clone ID: LIB3061-112-Q1-K6-E2
gnacatcctcaatgcgcgagctcattgatcgcaatccggatcttgctcatgtcctcaatgatccaagcattatgcgccagacttttgaagcagttcggaatcctgaactcatgagggagatgatgcggaacacagacagagccatgagcaacattgagtcttctccagaaggattcaacatgctccgtcgcatgtatgaaactgtccaagagccttttctgaatgcaacaacaatgggtagcgagggtgatcgaaattcgaatccattttctgctcttctaggaaatcaggggtctaaccaagcaagagactcagctgcaaatggaacaactagagcttcagaccccacatcagggtctccagctccaaatactaatccacttccgaatccttggggctcaaatgctggctctgcccaaggagcagcaaggtcctctcctgctagcaatgttaggagtactacagcaagtggcctaggagggttgggttcagcagatttgggaagtacacatggtgccagtgggtggtggctctgatgctaccttgttgactcaagttttgcaaaacccaactatgatgcagatgatgcagaacattatgtctaatcctcagtccatgaatcagctgcttaatatga

SEQ ID NO: 9153 - DNA, 614 bp, Zea mays
  unsure (1)..(614): unsure at all n locations; Clone ID: LIB3061-112-Q1-K6-E3
cccagcgccgactttcacttgacacgccaanagttcctaacccccaaggcgacgagccgcccaanatcccgatccccactccgctggttgccggagctctagccggattcgcctcaaccttgtgcacctaccccatggagctgatcaagaccagggtcaccatcgagaaggacgtatacgacaacgtcgcgcacgcgttcgtgaagatcctacgcgacgagggcccgtcggagctgtaccgtgggctgacacccagcctgatcggcgtggtgccgtacgcggcctgtaacttctacgcctacgagacgctgaagcggctctaccgtcgcgcgaccgggcggcgtcccggcgcggacgtgggccccgtggcgacgctgctcatcgggtcggcggcgggcgccatcgccagctcggccacgttcccgctggaggtggcccgcaagcagatgcaggtgggcgctgtgggcgggaggcaggtgtaccagaacgtcctccacgctatctactgcatcctcaagaaggagggcgccggcggcctgtaccgaggtctcggccctagctgcatcaagctcatgcccgccgccggcatcgccttcatgtgctacgaggcgtgc

SEQ ID NO: 9154 - DNA, 516 bp, Zea mays
  unsure (1)..(516): unsure at all n locations; Clone ID: LIB3061-112-Q1-K6-E4
ctcggccacagcacaanaagtagaaccattacaacaatagacaacatggcgaccaaatattttccctcttagctccttgctctttctacatgtgttgctaacgcgacatttctcatgctcaaactccttagctcccttttcccctaccttccatattatagcttcattgtgaaaacccactcttcaaccatatagcttcaacaagcatcgcacagcaacatacctttatgccttgtgttcaacatcaccacctatttgggcatattggtacaaaccatagccacactgacactcgtgctacctggacaacatacttgcaactttctctacttacacacaatttcttaaccaatgctcactgacctgtgtttttgacacaactatacattaccagtactctgctacttacacacacttttcctttaaccaatgccgcctgaacccgtgttattgcacacaaaactatgcctttacgagctagctgcacagtcggcttcttctgaacacacattgctg

SEQ ID NO: 9155 - DNA, 76 bp, Zea mays
  Clone ID: LIB3061-112-Q1-K6-E6
tttcttatgattatagttcaatataaattttttgtctgatgtttgtggcttcccagaataagaaagtcatttctag

SEQ ID NO: 9156 - DNA, 597 bp, Zea mays
  unsure (1)..(597): unsure at all n locations; Clone ID: LIB3061-112-Q1-K6-E7
ctgtattatgcagcttgcattccctgnagctgtttacctagttgatgctattgagggtgngaaaagaacttattcaagcttgtaagcccgcacttgagtctgatcatatcaccaaagttattcatgattgtaaaagggacagtgaggctttgtattttcagtttggcataaaactgcataatgtgatggatacacagattgcttattctctgatagaagagcaggagcaggaaggaaaaaagatgacatctgatgattacaattacatatcttttgtcagccttcttgctgataaacgatactgtggcatactatatcctgaaaaggaagaagtccgtacccttctaaggcaggaccctaacttttggacaattaggcccttgtctgatatgatggttcgagctgccacagatgatgtccgcttccttctcagtatatatgcgaaaatgatggaaaagttaagcaaagtatctttatggcgtctggcagttcgcagtgagctgtactgtaggtgcttttgcttaagcgacaaccagtttgcagattggtcacctcttcctcctgtccctgatgacattgaggctgatgtttatgttc

SEQ ID NO: 9157 - DNA, 584 bp, Zea mays
  unsure (1)..(584): unsure at all n locations; Clone ID: LIB3061-112-Q1-K6-E9
ggnaaaaggtgataaaggtaagnagccagctgtgattgcctgttggatcctgtagggttgaagaattggcacaaaacatcagggcacaacaactacaacaacttgtgctagcaaaccttgctgcctactctcagcaacagcagtttcttccattcaaccaactagctgcattgaactctgcttcttatttgcaacaacaacaactaccattcagccagctacctgctgcctacccccagcaatttcttccattcaaccaactggcagcattgaactctcctgcttatttacagcagcaacaactactaccattcagccagctagctggtgtgagccctgctaccttcttgatacaaccacagttgttgccgttctaccagcacgctgcgcctaacgctggcaccctcttacaactgcaacaattgctgccattcaaccaacttgctttgacaaacccagcagcgttctaccaacaacccatcattggtggtgccctcttttagatttcttatgagttatagttcaataataaagttttttgtctgatgtttgtggcttcccagaataagaaagtacatttctag

SEQ ID NO: 9158 - DNA, 613 bp, Zea mays
  unsure (1)..(613): unsure at all n locations; Clone ID: LIB3061-112-Q1-K6-F1
catttgtgcttggtggatctctgnaatgtaatggnaagccaacattaaactgttagctaaggactcaccttatggtgataatctggactacatctacactgagcttcctgctgcgctgtctcatgtgcataaactctcgataacctcgggtctcttcgtttatgatcagctgcaagggttttccaaaacctcagccagattcatcaatctgaggcatctgaccatgtatttgcctctttatggggaacctaagtcaattagtgggattcttcgcttggcctacctactggaattggccccagctctagaagaattggaattgcatgtgaatggcggtggcgtggatgttgggtgggcactcagacggaatatgttaccgtactcacacaataggctcaagagggtccttatttcaggagccactgtatgggaggggctaatggagctggcatactacattcttcggagtgccaatagactcgaaagtatggtcttagatccaaagataaggattgggggtcctcagctggatggttggatgattgatattggtagggagacgatcaaaaatattttgagggagaggagtttcagagcattattactattctgt

SEQ ID NO: 9159 - DNA, 642 bp, Zea mays
  unsure (1)..(642): unsure at all n locations; Clone ID: LIB3061-112-Q1-K6-F10
gtgaaccccattgttcaaccctacagnatccaacaggcaatcgcaacaggcatcttaccattatcacccttgttcctccaacaaccgtcagccctattacagcagttacctttggtccatttggtggcacaaaacatcagggcacaacaactacaacaacttgtgctagcaaaccttgctgcatactctcagcaacatcagtttcttccattcaaccaactggctgcattgaactctgctgcttatttgcaacaacaattaccattcagccagctagttgctgcctacccccagcaatttcttccattcaaccaactagcagcattgaactctgctgcttatttacagcagcaacaactactaccattcagccagctagctgatgtgagccctgctgccttcttgacacaacaacagttgttgccgttctacctgcacgctatgcctaacgctggcaccctcttacaactgcaacaattgctgccattcaaccaacttgctttgacaaacccaacagtgttctaccaacaacccatcatnntggtggtgccctcttttagattgcttatgagttatagttcaaataatgaattttttggatgatgtttgtggcgtcccagaaataagaaagtacatttctag

SEQ ID NO: 9160 - DNA, 637 bp, Zea mays
  Clone ID: LIB3061-112-Q1-K6-F11
ggcacgagtgcgcgggcgtggtcgaggaggtgggcgccggcgtgacgcacctgtccgtgggcgaccgcgtggcgctggagccgggcgtcagctgctggcgctgccgccactgcaagggcgggcggtacaacctgtgcgaggacatgaagttcttcgccaccccgccggtgcacggctcgctggcgaaccaggtggtgcacccggccgacctgtgcttcaagctccccgacggggtgagcctggaggagggcgccatgtgcgagccgctgagcgtgggcgtgcacgcgtgccgccgcgcgggggtggggcccgagacgggcgtgctcgtggtgggcgccggccccatcggcctggtgtcgctgctggcggcgcgggccttcggcgcgccgcgcgtggtggtcgtggacgtggacgagcaccgcctggccgtggccaggtcgctgggcgcggacgcggcggtgcgggtgtcgccccgcgcggaggacctggcggacgaggtggagcgcatccgcgcggccatgggctcggacatcgacgtcagcctggactgcgccgggttcagcaagaccatgtcgacggcgctggaggcgacgcggcccggcgggaaaggtgtgcctggtcgggatgggccacaacg

SEQ ID NO: 9161 - DNA, 630 bp, Zea mays
  unsure (1)..(630): unsure at all n locations; Clone ID: LIB3061-112-Q1-K6-F2
ccaactagcaacatagnaaagcacaatagtgtaccaacaatggcagccaaaaattttgcttccttatgctccttggtctttctgcaagtgttgctaccgcaaccattttcccacaatgctcacaagctcctatagcttcccttcttcccccatacctctcaccagcggtgtcttcaatgtgtgaaaacccaattgttcaaccctacaggatccaacaggcaatcgcaacaggcatcttaccattatcacccttgttcctccaacaaccgtcagccctattacagcagttacctttggtccatttggtggcacaaaacatcagggcacaacaactacaacaacttgtgctagcaaaccttgctgcatactctcagcaacatcagtttcttccattcaaccaactggctgcattgaactctgctgcttatttgcaacaacaattaccattcagccagctagttgctgcctacccccagcaatttcttccattcaaccaactagcagcattgaactctgctgcttatttacagcagcaacaactactaccattcagccagctagctgatgtgagccctgctgccttcttgacacaacaacagttgttgccgttctacctgcacgctatgccta

SEQ ID NO: 9162 - DNA, 634 bp, Zea mays
  unsure (1)..(634): unsure at all n locations; Clone ID: LIB3061-112-Q1-K6-F3
gccgtcagcctagcaattagctcatcgactccanatggagaatcgacccatgaagtgctgatcgttgcccttgctctcctggcgctcgctgcgagcgccgcctccagtacaagcggcggctgtggctgccagacaccaccgtttcatctaccgcctccgttctatatgccgcctccgttctatctgccgccgcagcagcagccgcagccatggcaataccccactcaaccaccgcagctaagcccgtgccagcagttcggatcctgcggcgtcggcagcgtcggcagcccgttcctgggccagtgcgtcgagttcctgaggcaccagtgcagcccggcggcgacgccctacggctcgccacagtgccaggcgctgcagcagcagtgctgccaccagatcaggcaggtggagccgctgcaccggtaccaggcgacatacggntgtggtccctgcagtcccttcctgcagcagcagccgcagggcgagctcgcggcgctgatggcggcccaggtagcgcagcagctgacggcgatgtgcggcctgcagctgcagcagccaggtccctgcccttgcaacgcagctgccggcggtgtctactactgaggaaactatgtacctgtagtaataatgtaat

SEQ ID NO: 9163 - DNA, 627 bp, Zea mays
  unsure (1)..(627): unsure at all n locations; Clone ID: LIB3061-112-Q1-K6-F4
tccagntacagcaaacggcagtgcgtagagaggatcgtcgaacagaacagcatgaagatggtcatcgttctcgtcgtgtgcctggctctgtcagctgccagcgcctctgcaatgcagatgccctgcccctgcgcggggctgcagggcttgtacggcgctggcgccggcctgacgacgatgatgggcgccggcgggctgtacccctacgcggagtacctgaggcagccgcagtgcagcccgctggcggcggcgccctactacgccgggtgtgggcagccgagcgccatgttccagccgctccggcaacagtgctgccagcagcagatgaggatgatggacgtgcagtccgtcgcgcagcagctgcagatgatgatgcagcttgagcgtgccgctgccgccagcagcagcctgtacgagccagctctgatgcagcagcagcagcagctgctggcagcccagggtctcaaccccatggccatgatgatggcgcagaacatgccggccatgggtggactctaccagtaccagctgcccagctaccgcaccaacccctgtggcgtctccgctgccattccgccctactactgattcatgatatttgggaaatctcctctatccatctctctc

SEQ ID NO: 9164 - DNA, 633 bp, Zea mays
  Clone ID: LIB3061-112-Q1-K6-F5
gccgcagcacatagaagtagaatccattagcaacaatagagcaacaatggcgaccaagatattttccctccttatgctccttgctctttctacatgtgttgctaacgcgacaattttccctcaatgctcacaagctcctatagcttcccttcttcccccataccttccatcaattatagcttcagtatgtgaaaacccagctcttcaaccatataggcttcaacaagcaatcgcagcaagcaacatacctttatcgcccttgttgtttcaacaatcaccagccctatctttggtgcagtcattggtacaaaccatcagggcacaacagctgcagcaactcgtgctacctgtgatcaaccaagtagctctggcaaacctttctccctactctcagcaacaacaatttcttccattcaaccaactgtctacactgaaccctgctgcttatttgcagcaacaactattaccatttagccagctagctactgcctactctcagcaacaacaacttcttccatttaaccaattggccgcactgaaccccgctgcttatttgcagcagcaaatactactgccatttagcgagctagctgcagcaagtcgtgcttccttcttgacacagcaacagttgct

SEQ ID NO: 9165 - DNA, 653 bp, Zea mays
  unsure (1)..(653): unsure at all n locations; Clone ID: LIB3061-112-Q1-K6-F6
caagcggcgtgcgtanagagacgtcgacagaacacatgaagaggtcatcgttctcgtcgtgtgcctggctctgtcagctgccagcgcctctgcaatgcagatgccctgcccctgcgcggggctgcagggcttgtacggcgctggcgccggcctgacgacgatgatgggcgccggcgggctgtacccctacgcggagtacctgaggcagccgcagtgcagcccgctggcggcggcgccctactacgccgggtgtgggcagccgagcgccatgttccagccgctccggcaacagtgctgccagcagcagatgaggatgatggacgtgcagtccgtcgcgcagcagctgcagatgatgatgcagcttgagcgtgccgctgccgccagcagcagcctgtacgagccagctctgatgcagcagcagcagcagctgctggcagcccagggtctcaaccccatggccatgatgatggcgcagaacatgccggccatgggtggactctaccagtaccagctgcccagctaccgcaccaacccctgtggcgtctccgctgccattccgccctactactgattcatgatatttgggaaatctcctctatccatctctctctatctatatatgtaataatgcagtaagacgacacacattatca

SEQ ID NO: 9166 - DNA, 622 bp, Zea mays
  unsure (1)..(622): unsure at all n locations; Clone ID: LIB3061-112-Q1-K6-F9
gcaaagctggggattctcggtgtgttatctcacggnaaggtcaggcttacaatttgtcaacagatcacaaaccagatcttgaggaagagagggagaggattttgggtgctggtggatttgttgttgccggacgggtcaatgcaagtctgaacttatctagggcaataggtgacatggaactgaagcaaaatgacctcctgccagtggagaggcagatcgtgacagctgaacctgaattgaaaacagtccagctctcggaggatgatgaattcattgttttagcttgtgatggaatttgggattgcatgtcaagtcaagaagtagttgattttgtacataaacagctaaagaccgaggataagatatctagtgtgtgtgagaagttgctcaaccgctgtgtggcacctacatctggtggcgaaggatgtgataacatgacggttattgtggttcaattcaagaaaccagctttagctgttgctacttctagcgctgagcagtctgctaccactgcagaagggatgcggcccaaaatttgagttgcctttgtgaacagcgaggtcgatggcccagattaccccccgaagtaggcgttgagtggcacaccgtgctgtggagctct

SEQ ID NO: 9167 - DNA, 618 bp, Zea mays
  unsure (1)..(618): unsure at all n locations; Clone ID: LIB3061-112-Q1-K6-G1
ggagagcgccgggggctggtaggaatggctgatgcacaagggctcaacgatgtgctgtgtgtggcagtggatgcgatttggttcttgagtgatagggatgagctgcttgctattgtggggttgatcaaaaggttgtgtctgagggcgcaaaagatttacccgtgctgcgctccggacatcattcctcgcatcgtgtgtatcagcatgtagggggcggtcgactagccttgctgatgcagtgagcttcatgggccagaaattgcatgaacgacttcaagaatcccaaggtgatgaggtattgaaagcagaagcaagtgcaaaggtgcacaggtttacagaatgggctctaaagtgtatcgggctgcattcacgtgttcgagagaacaggggcaaaggaaaccacgacactgtaattgaggttcagcttcagttgtctgctttcaagatatttcttgatcttgctgataatgagcttaccgggaaggattttacggaggcttttgatgctgcatgcttccctcttacactcttttcaaccaccttcgaccatagatgggcatcangaatatcagcagctgcagtacaaggccttttagagttgttggtagagggtggtgc

SEQ ID NO: 9168 - DNA, 633 bp, Zea mays
  unsure (1)..(633): unsure at all n locations; Clone ID: LIB3061-112-Q1-K6-G12
gcaacatagnaagcacaatagtgtaccaacaatggcagccaaaaattttgcctccttatgctccttggtctttctgcaagtgctgctacggcgaccattttcccgcaatgctcgcaagctcctatagcttcccttcttcccccgtacctctcaccagcggtgtcttcggtatgtgaaaacccaattcttcaaccctacaggatccaacaggcaatcacagctggcatcttacctttatcacccttgttcctccaacaatcatcagccctattacatcagttacctttggtgcatttattggcacaaaacatcagggcacaacaactacaacaacttgtgctagcaaaccttgctgcctactctcagcaacagcagtttcttccattcaaccaactagctgcattgaactctgcttcttatttgcaacaacaacaactaccattcagccagctacctgctgcctacccccagcaatttcttccattcaaccaactggcagcattgaactctcctgcttatttacagcagcaacaactactaccattcagccagctagctggtgtgagccctgctaccttcttgatacaaccacagttgttgccgttctaccagcacgctgcgcctaacgctggc

SEQ ID NO: 9169 - DNA, 576 bp, Zea mays
  Clone ID: LIB3061-112-Q1-K6-G3
ctgccgtcctctttgcgtgcaatgctaagctgcctctacgtgtagcggcagaccgagacgcgcgcatgtcgcggtcgatcggaacccaacccaccatcgaatcgcctcgccatgattcaaattcaccactgaatcgcatgcggcatgtcgtcgtcgtcgtcgtcgtcgcgaggaagtaagaggtagcagcagctagcgacgacgtacgtacgtaccagacgtcctcggggaggccgtatttgatgagctcctcgttctcgttcttgtcggcgcccatgtagatggtgtagtcgccggcgtccggacgcgccttgaagtagagcaccatcgccgtcgtcgctcagcagcagacagctctatgttattcttcaatcgggccgggccgggccggcctcttctacctctagctagctagctagctagcctgcagagtagtatctctctagcttctagagcagagtaccgaccgaccggccggctgccagatagagactccaccggcggcggctactgtatatactcgtgtatattctctgtcgccgcgcgcggcaaatacataaagcggcaagagcaatt

SEQ ID NO: 9170 - DNA, 260 bp, Zea mays
  Clone ID: LIB3061-112-Q1-K6-G4
gtgtgcaggcatgcatttttacgggctattgggaggatgttggaacaatcaaatcattctttgatgcaaacttggccctcactgagcagccttccaagtttgatttttatgatccaaaaacacctttcttcactgcaccccgatgcttgcctccgacgcaattggacaagtgcaagatgaaagatgcatttatctcagatggttgcttactgagagaatgcaacatcgagcattctgtgattggagtctgctcacgtgtc

SEQ ID NO: 9171 - DNA, 582 bp, Zea mays
  unsure (1)..(582): unsure at all n locations; Clone ID: LIB3061-112-Q1-K6-G5
cccgatgtcgtccgcttgcacgagttgctgccagtaaaacgaanactactggtgcttgagtttgtcaacggcggcgagctcttcgacaagatcgctatcaaggggaaactgtccgaacacgagggcaggaggctcttccagcagctaatcgacggcgtcagctattgccatgacagaggtgtctaccaccgagacctcaagccagagaatgtccttgttgatcggaagggcaccatcaagatctctgacttcggcctcagcgctctacctcaacatctcgggagtgacggacttctgcacacaacatgtggcagccccaactacatagctcctgaggttctgcaaaacagaggctatgacggctccttgtcagatctctggtcgtgtgggggtgatcctctacgtgatgcttgttggctgccttcccttcgacgaccaggaacctcgtcgttctttatcagaagattttcaagggagactgtcagatccccaagtggctttcgcctgccgcgcaggaccttctcaanaggatcctccaaccgaatccgatgaagaggatcaacgtcgcgggggatcagggag

SEQ ID NO: 9172 - DNA, 637 bp, Zea mays
  Clone ID: LIB3061-112-Q1-K6-G6
atccaactgcaaaatacatagtgaatacactagcaacatcttagcaccaatgggagccaagattttttccctccttgccctccttgctctttcagcaagcgctgctacctctactattattccacaatgctcacaacaatacctctctccggtgacagccgcgggatttcaacacccaactatacaatcctacatgctacatgaggccatcgtagcaagcatcttacggtcattagcattaaccctccaacagccatatgccctattgcaacaaccatccttagtgcatctgtatctccaaagaatcgcgacacaacaactacaacaacagttgctaccaacaatcaatcaagtagttgcagcgaaccttgctgcttatctccagcaacaacaatttcttccattcaatcaactagctggggtgaaccctgctgtctacttgcaggcacaacaactactaccatttaaccaacttgtcgggagccctgatgccttcttactgcaacaacagcttctgccattccatctgcaagctgtggaaaacattgcttctttcttgcgacaacaacaattgttgccattttacccacaggttgtgggaaacattaatgccttcttgcaacagcaacaattgctg

SEQ ID NO: 9173 - DNA, 596 bp, Zea mays
  unsure (1)..(596): unsure at all n locations; Clone ID: LIB3061-112-Q1-K6-G7
natacgactagcaacataccatagtgaatacactagcaacatcttagcaccaaggcagccaagatttttgccatccttgccctccttgctctttcagcaagcgttgctaccgcgactattattccacaatgctcacaacaatacctctctccggtgacagccgcgagatttgaatacccaactatacaatcctacaggctacaagaggccatcgcagcaagcatcttacggtcgttagcattgaccgtccaacaaccatatgccctattgcaacaaccatccttaatgaatctatatctccaaagaatcgcagcacaacaactacaacaacagttgcttccaacaatcaatcaagtagttgcagcgaaccttgctgcttacctccagcaacaacaatttcttccattcaatcaactagctggggtgaaccctgctgcttacttgcaggcacaacagctactaccattcaaccaacttgtcaggagccctgctgccttcttactgcagcaacagttgcttccattccatctacaagttgtggcaaacattgctgctttcttgcaacaacaacaacaattgctgccattttacccaca

SEQ ID NO: 9174 - DNA, 643 bp, Zea mays
  unsure (1)..(643): unsure at all n locations; Clone ID: LIB3061-112-Q1-K6-G9
ccagtagcaacaacagagcaacaatggcgaccaanaattttccctccttatgctccttgctctttctgcatgtgttgctaacgcgacaattttccctcaatgctcacaagctcctatagcttcccttcttcccccataccttccatcaatgatagcttcagtatgtngaaaacccagctcttcagccctataggctccaacaagcaatcgcagcaagcaacatacctttatcacccttgttgtttcaacaatcgccagccctatctttggtgcagtcattggtacaaaccatcagggcacagcagctgcagcaactcgtgctacctgtgatcaaccaagtagctctggcaaacctttctccctactctcagcaacaacaatttcttccattcaaccaactgtctacactgaaccctgctgcttatttgcagcaacaactattaccattcagccagctagctactgcctactctcagcaacaacaacttcttccatttaaccaattggccgcactgaaccccgctgcttatttgcagcagcaaatactactaccatttagccagctagctgcagcaaaccgtgcttccttcttgacacagcaacagttgctgcctttctaccagcagtttgcggctaaccccgc

SEQ ID NO: 9175 - DNA, 620 bp, Zea mays
  Clone ID: LIB3061-112-Q1-K6-H1
cagttacctttggtgcatttattggcacaaaaatcagggcacaacaactacaacaacttgtgctagcaaaccttgctgcctactctcagcaacagcagtttcttccattcaaccaactagctgcattgaactctgcttcttatttgcaacaacaacaactaccattcagccagctacctgctgcctacccccagcaatttcttccattcaaccaactggcagcattgaactctcctgcttatttacagcagcaacaactactaccattcagccagctagctggtgtgagccctgctaccttcttgatacaaccacagttgttgccgttctaccagcacgctgcgcctaacgctggcaccctcttacaactgcaacaattgctgccattcaaccaacttgctttgacaaacccagcagcgttctaccaacaacccatcattggtggtgccctcttttagatttcttatgagttatagttcaataataaagttttttgtctgatgtttgtggcttcccagaaataagaaagtacatttctagattcttatgtgcttctagtctccaaatgtggttgatagttattttgctctaagatcgacagtaatgaagtataaatcatc

SEQ ID NO: 9176 - DNA, 617 bp, Zea mays
  unsure (1)..(617): unsure at all n locations; Clone ID: LIB3061-112-Q1-K6-H12
caatgttgaactgttngatataagaacttagcttcactgtttgggatgttggtggccaggacaagatcaggcccctgtggaggcactactttcagaacacacagggacttatttttgttgtagacagcaacgacagggaacgtgttgttgaggctagagatgagctccacaggatgctgaatgaggatgagctgcgtgacgctgtgctgcttgtatttgcaaacaaacaagatcttcccaatgctatgaatgctgctgaaattactgacaagcttggtctgcattccctgcgacagcggcactggtacatccagagcacttgtgctacatctggtgaagggttgtatgaggggcttgactggctttccagcaacatctccagcaagtcttgaagcttttcggcagggctcctagcgagaggatgtctgaacaacttatggctgctttttttttacatattattactaagacacaagctacagcagatatagtacttgtgaaaaaaagaaacttctgagctcttttgagggattgatactagattggattgtgtttttgtttttgggtcgataccatcgcctgttcggttccacaaaaaaaaaaaaaaaggcggccgc

SEQ ID NO: 9177 - DNA, 633 bp, Zea mays
  unsure (1)..(633): unsure at all n locations; Clone ID: LIB3061-112-Q1-K6-H4
gnggnaaccctagcggnaacagtgacggcggcgcgctaccggtgacgggggatacggcggcatcgtcccctcctccatccccggcgcggcggcgccagcagccggcctgcaggctgtttgaagagctcgccatttaatctcaatggaagccaagtttttccgtttcctgaagctcgttggggtcggcttcaaagcgaggtcagagagccaaggccgtgagttgttccttaaactgggcttcagccatgaggtgcagttcaccgctcctccagctgtccgtgtcttctgcttcaaacccaacataatctgctgcaccggcatcgataaggacagggtgcaccagttcgccggcgccatccggagctctaaggctccagaggtgtacaaggggaaggggatcctgtacattgacgaggttatcaagctgaagcccggaaagaagcgaaaaaataagtgacgatccgaaggcgttacaactttgtctctgtcttttaaccccatgcttcgcatttgtagtgatctggatctggggtctgctgtgttgtgttgtgtacttgcgttgtgctacacagatcaccattatcttacctttacctcagctgcatgtaggaccatgagtgggaataagttacc

SEQ ID NO: 9178 - DNA, 640 bp, Zea mays
  Clone ID: LIB3061-112-Q1-K6-H5
tgttaatttgtgggtatgatgcatggattatttgagatctttgagcagataaagcaatcattatcatctcaaaggagggtattgatttcatggccgtgattccccctctcccagtcaaagccatccaagccgcaattacttcagggacagggtgttcactggggctagaaggattctgtttttattgcacgacacatgacaacatatccaagtagtccttgattgatttagcagcagggagtaagcgtcttgctaaaagtggctccacaggtgaacttaggtgagtgtttggttaccatgtatttccagatcaatgacatactaaaattgttctttgcacatataaatacaaaaaaataggtataggaaaagaaatgacatgcaacccaataaatctttttgtatttatttataagaaatgacagaaaaaatctccctcattaaaataagtgaaagaatctaacaaccactaattatcttccaaaaaatcaattattatttttgcaccaaattgtaacaatactgaaaccatattcctttcatctcattttatctgtttaacacaatgattttaataagttcaatatcacactgtaaagagtgaaccaatgatttgtcttagactacaggcgttagctct

SEQ ID NO: 9179 - DNA, 645 bp, Zea mays
  unsure (1)..(645): unsure at all n locations; Clone ID: LIB3061-112-Q1-K6-H6
gcaacatagnaaagcacaatagtgtaccaacaatggcagccaaaaattttgcttccttatgctccttggtctttctgcaagtgctgctaccgcaaccattttcccacaatgctcacaagctcctatagcttcctttcttcccccatacctctcaccagcggtgtcttcagtatgtgagaaacccaattcttcaaccctacaggatccaacaggcaatcgcagcaggcatcttacctttatcacccttgttcctccaacaaccgtcagccctattacagcagttacctttggtgcatttgttggcacaaaacatcaaggcacaacaactacaacaacttgtgctaggaaaccttgctgcctactctcagcaacagcagtttcttccattcaaccaactggctgcattgaactctgctgcttatttgcaacaacaactaccattcagtcagctagctgctgcctacccccagcaatttcttccattcaaccaactggcagcattgaactctgctgcttatttacaacagcaacagctaccaccattcagccagctagctgatgtgagccctgttgccttcttgacacaacaacagttgttgccgttctacctgcacgctgcgcctaacgctggcaccctcttacaac

SEQ ID NO: 9180 - DNA, 615 bp, Zea mays
  Clone ID: LIB3061-112-Q1-K6-H8
acaaagcttcttttccaatgctactgctcatgcctatcacattcctctccagtcttcaatgggcttcgaacacccagctgtgcaagcctataggctacaacaagcgcttgcggcgagcgtcttagaacaaccaattgcccaattacaacaacaatccttggcacatctaaccatacaaaccatcgcaacgcagcagcaacaagcactgagccacctagccgtggtgaaccctatcgcctacttgcaacaacagctgcttgcatccaacccacttgctttggcaaacgtagctgcataccaacaacaacaacagttgcaacagtttctaccagcgctcagtcaactagccatggtgaaccctatcgcctacctacaacagcaacaacttctttcatctagcccgctcgctatgggcaatgcacctacatacctgcaacaacagttgttgcaacaacagttgctgcaacaaattgtaccagctcttactcagctagctgtggcaaaccctgctgcctacttgcaacaactacttccattcaaccaactgactgtgtcgaactctgctgcgtacctacaacagcgacaacagttacttaatccactagcggtggctaa

SEQ ID NO: 9181 - DNA, 478 bp, Zea mays
  Clone ID: LIB3061-112-Q1-N6-B11
tcggcagtcttggatcttaacttcaacaatgggaaggaactactaaggtcttgtgtccggttttaatggaatcaatagccgctgatgatgcgttcaaaaatcggaattgcaccacatgttacacagtgaactgctgatattggcttaacatgcaatctgagctccgcgatgctggttgcagctatgtcagtatatttttacagtgcaaaacaaattaacttgaaatcaagcattcccttccctaaattcgtaaattatgtgaaccaaggttctagaattctgcagcgggcctgctccatcttgggggcgagtcaccatgcattgatgtgtgcctgtcttaatgggtcagacgagatcgattgcgattacctgcactacccgtcatgtacagacgctcgtacgccatgcagcgtctcgcccgtgacaagcgccgcgcacaggagcgcgatctgggagatcagcaagaacctatcgaaag

SEQ ID NO: 9182 - DNA, 614 bp, Zea mays
  Clone ID: LIB3061-112-Q1-N6-B4
tcgattgagaccaactagcatcatattaaagcacagtactgtaccaacaatggcacccaaaatattttgctcacttatgctccttgggctctctgcaagtgtagctaccgaaaccatggtaccacaatgctcacaagctcctatgaacacccttgttcccccatacctctgaccagcggagtggtacaatgttgtgaaaccccaattgagggaaccctacagtgatccaacaggcgcagggcaacaggcatcttaccattatcaccctagaaggtccaacagccgacatccctattacagcagaaacctttggtccattggtgggcacaataaatcagggcacaacaagctcatcaactggtgctagcaaaaaatgctggagtgactctgcagcaacataagttgcttacatgtcaaccaactggctgcattgaactctgctgcttatttgccacaacaattaccattcaaacatctagttgctgcctacctccagcaagttcttccattcaaccaactagcagcattgaactctgctgcttatttacagcagaacgactactaccattcatccagctagctgatgtgagccctgctgaccacgtgacacaaca

SEQ ID NO: 9183 - DNA, 603 bp, Zea mays
  Clone ID: LIB3061-112-Q1-N6-B6
tcgagtacaacaagcaacatagaagtggaatccagtagcaacaatagagcaacaatggcgaccaagatattttccctccttatgctccttgctctttctacatgtgttgctaacgcgacaattttccctcaatgctcacaagctcctatagcttcccttcttcccccataccttccatcaattatagcttcaatatgtgaaaacccagctcttcaaccatataggcttcaacaagcaatcgcagcaagcaacatacctttatcgcccttgttgtttcaacaatcgccagccctatctttggtgcagtcattggtacaaaccatcagggcacaacagctgcagcaactcgtgctacctctgatcaaccaagtagctctggcaaacctttctccctactctcagcaacaacaatttcttccattcaaccaactgtctacactgaaccctgctgcttatttgcagcaacaactattaccatttagccagctagctactgcctactctcagcaacaacaacttcttccatttaaccaattggccgcactgaaccccgctgcttatttgcagcagcaaatactactaccatttagccagctagctgca

SEQ ID NO: 9184 - DNA, 544 bp, Zea mays
  unsure (1)..(544): unsure at all n locations; Clone ID: LIB3061-112-Q1-N6-B7
tcagcgttcgatcatgcgctgtaccctggcaacaagagcgttgtgatcgtgagcaaggcagtttgggaaaagtggctgtgctatgtcagatcaagagaagcaaccatatgtggaccaagctgggcagaagaagcaggactatgtagaagactaaggcaaactttgataagaaggagagcacaagctcaaagaaggctaagactgaggatgaggatggctcgaagtcagaggttgatgacgaggatggcagcagtgacgaggaaaacgatgacgatgagtaaacagtctccaaggtcacgaggtagcaaatcgagtgttaggtccccaattagcttactgttttgctgcctttaaatgttaagttgtttcaaacaggtgtttatgaaggggatctattagtttcgcgatgtcgttagtttagtgcattagcaaagaaaaagccgaatgctgctagctgttctgttgcttttcttttgctaaccacttgtgtcacaactntctgtacctgcttcattgactaatctagtgactagtcagttattgg

SEQ ID NO: 9185 - DNA, 482 bp, Zea mays
  Clone ID: LIB3061-112-Q1-N6-B8
tcgggcgttcgggcagccgcctcctgaccgcaggtcgccactctctggttgctgcacacctttagccgggggggccatatatgcggaaaagggcacagatgaagttcggcgcagcggcctgaagcattgcgcgcgcgtccggcctgaatctggggggttccggcttctggtcatagtcaccggctggttcctcgtgtccctgaccttcgaggacttgtctcacagcccgggtccatcctgtgcagtctgaacggccagctgacggcggaccaggctccgacggccttactgatccaggataagctaacctctcccccagacaccgacttgatactctgccaccgcacgctactgcgtggagaccctaaagagggcgatgactgaagacagatccaccactcactgggttacaagggcgaggaggaagagagactgatgctgagcgagccgcacgccaccagggctatgacggagctcacccc

SEQ ID NO: 9186 - DNA, 597 bp, Zea mays
  Clone ID: LIB3061-112-Q1-N6-D6
tcggtaagtggaatacagtagcaacaatagagcaacaatggcggccaagatattttccatccttatgctccttgctctttctgcatgtgttgctaacgcgaccatttttcctcaatactcacaagctcctatagctgcccttcttcccccataccttccatcaatgaccgcttcagtttgtgaaaacccagcccttcaaccctacaggctccaacaagcaatcgcaacaagcaacttacctttatcacccctgttctttcaacaatcgccagccctatctttggtgcagtcattggtacaaaccatcagggcacaacagctgcaacaactcgtgctaccagtgatcagccaagtagctctggcaaacctttctccctactctcagcaacaacaatttcttccattcaaccaactgtctacactgaaccctgctgcttatttacaacaacaacaactactaccattcagccagctagctactgcctactctcagcagcaacaatttcttccatttaaccaattggccgcactgaacccctctgcttatttccagcagcaaatactactaccatttggccagctagctacaacaagccc

SEQ ID NO: 9187 - DNA, 113 bp, Zea mays
  Clone ID: LIB3061-112-Q1-N6-D7
tcagctttcggtataacactgttgggttaggcacaacatgttggttgaatggcagcaattgttgcgttccaaacaattaatgttcatttctccaaaaagaatataccggaagc

SEQ ID NO: 9188 - DNA, 462 bp, Zea mays
  Clone ID: LIB3061-112-Q1-N6-E11
tcggttggacctaccaaacataactgtactcgaccagctttgagtatggtaccatccgggaagccaaagcccatatacccggccgagggattgcggacccatcgatccagtgctcctcatcgaaacacgcataactctggcccgcacgcatcttgactggttacctagaagcgaaagagagctctcagcagaagctaccgttttaggcaagtcaccacatctaacaatcattaccaacccttgtactatatacaagcagattggtacagagccaaaatatgctaattacaggaggataaattagagcgatgaggaaaggaagcctggcattatcacattgacacgagacaggctgagaactacatctttgctcaactagtgagaaaggagcaaagataaaaagtgctatacccagacaaaacgaacgccttggaagagaaatcagcttcttgatagcttacc

SEQ ID NO: 9189 - DNA, 490 bp, Zea mays
  Clone ID: LIB3061-112-Q1-N6-G10
tcggttggaacaataacattagggcgacaacaactacaacaactcgtgctagcaaaccttgctgcctactcttagcaacaacagtttctgccataaaaacaactagctgcattgaactctgctgcttatttgcaaaaacaacaactactaccattcagccagctagctgctgcctacccccggcaatatcttccattcaaccaactggcagcattgaactctcatgcttatgtacaacaacaacaactactaccattcagacagctagctgatgtgagccctgctgacttcttgacacagcaacataagttgccgttctacctgcacactgcgcctaacgttggcaccctcttacaactgcaacaattgctgccattcgaccaacttgatttgacaaacccagcagagttctaccaacaacccatcattggtggtgccctcttttagattgcttatgagttatagttcaataataaagttttttttgctg

SEQ ID NO: 9190 - DNA, 564 bp, Zea mays
  Clone ID: LIB3061-112-Q1-N6-G3
tcgctgtcgttcaatatgcgtgcaatgctaatgtgtctgtacggggcggggaaggaagagacacacgcatgtatacgagcgatcggaacccaaggcaccatctaaatggcctcgcgcatcggagtcaattgacccattggatctaaagcggagaagagaactactttgcaggctagctagaggaagtaagtagaggcagaagatggcgaccacgtccggaccgaccgaagaataacatagaggtcgctgttgatgagcgactacggctatggcgcgttagttcaaatggcgatcgggcaccggccagtacaccatactcacggtggactgacaaaaaatagaacgaggtagcttcatgcaaatacacgagctcctatgaggaactgtctgaatacgggaccggacgctgggccggtacgctgtctacctcctagctagtctagttaggtagaccagcacagagaatacatgtagctgctaagcagaggagaaaccgatcaggcgaggccatatagaggatggatgggtggcggataagcgtaacgcgcgcgtattgtttggccg

SEQ ID NO: 9191 - DNA, 434 bp, Zea mays
  Clone ID: LIB3061-112-Q1-N6-G4
tcggtgtgcatgcatgcatccatacgggctattgggaggatgggggaacaatcaggtcattctttgatgcaaacttggcccttactgagccatcttacaagttcgattggtatgagcccaaaacacctttcttcactgctcgcggctgcttgcctgcatcgctgttgggcaagtgctacattaacgaggcatctatctccaatggttgcttaccgagagaaggcctcgtttagcattctgcgactggagcctgctcacttgccaaccctggatgtgaactcgaatacttcaagatgaccggagcggccacccttgaaactgaccaagaagcttcaaagctactgctattctggtgcaggttccctagttggtgatacgcaaggaacactaccataacgaactgtcttattgacatgacagctccgattgggaag

SEQ ID NO: 9192 - DNA, 436 bp, Zea mays
  Clone ID: LIB3061-112-Q1-N6-G5
tcgtccgaatgtcgtccgcttgcacgaggctgctgccagtaaaacgaattctacatggtgctcgagtttgttaacgggggccagctcttccgactggatcgctatcactgtggaaactgatcctaacacgagggctaggaggctctggcagcggctaatccaccgcctcagctcttgccatgacagaggtgtctaccacccagacctcagccagagaagcgcttgttcatcggaagggcaccatcaagatctctgactttggcctctgcgctctacctcaacatttcgggagcgacggtcttctgcacacaccatgtggcagtccctactacatagctactgaggttgtgcttaacagaggctctcaccgcttcttgtcagatctctggtcgagcggggtgatcctctaccgatgcttgggggctgccttcccttc

SEQ ID NO: 9193 - DNA, 644 bp, Zea mays
  Clone ID: LIB3061-113-Q1-K6-B7
agaaagcacaatagtgtaccaacactggcagccaaaatattttgcttccttatgctccttggtctttctgcaagtgctgctaccgcaaccattttcccacaatgctcacaagctcctatagcttcctttcttcccccatacctctcaccagcggtgtcttcagtatgtgaaaacccaattcttcaaccctacaggatccaacaggcaatcgcagcaggcatcttacctttatcacccttgttcctccaacaaccgtcagccctattacagcagttacctttggtgcatttgttggcacaaaacatcaaggcacaacaactacaacaacttgtgctaggaaaccttgctgcctactctcagcaacagcagtttcttccattcaaccaactggctgcattgaactctgctgcttatttgcaacaacaactaccattcagtcagctagctgctgcctacccccagcaatttcttccattcaaccaactggcagcattgaactctgctgcttatttacaacagcaacagctaccaccattcagccagctagctgatgtgagccctgttgccttcttgacacaacaacaggtgttgccgttctacctgcacgctgcgcctaacgctggcaccctcttacaactgcaaca

SEQ ID NO: 9194 - DNA, 75 bp, Zea mays
  Clone ID: LIB3061-113-Q1-K6-B9
aaaaaaaaaaaaaaaaaaaaaaaaaacaaaaaaaaaaaaaaaaaaaaaaaaaaaaaaaaaaaaaaaaaaaaaaaa

SEQ ID NO: 9195 - DNA, 552 bp, Zea mays
  unsure (1)..(552): unsure at all n locations; Clone ID: LIB3061-113-Q1-K6-C2
cccagggccacgatgacctcggcaagcgctgcgctaagtactacgaggccggtgcccgctttgccaagtggcgtgctgttctcaagattggccccaacgagccgtcacagcttgccattgacctgaatgctcagggtctggctcgctacgccatcatctgccaggagaacggtctggtgccaattgttgagcctgagatccttgttgatggccctcatgacattgatcgctgcgcttacgtcactgagacagtccttgctgcctgctacaaggctctcaacgagcaccatgtcctcctggagggtaccctcctgaagcccaacatggtgactnctggctccgactctaagaaggtgacacctgaggtgatcgcccagnacaccgtncgtacccttcagaggaccgnncctgctgctgtgcctgctgnngncttnctctncggnggacagagcgaggaggaggccaccctgaatctcaatgccatgaacaagctnagnaccaagaagccatgggccctgtncttctncttcggccgngcccttcaggcgagca

SEQ ID NO: 9196 - DNA, 662 bp, Zea mays
  Clone ID: LIB3061-113-Q1-K6-E12
cagaacacacctagcgaagcgcactagcaacgacctaacaacaatggctaccaagatattatccctctttgcgcttcttgccctttttgtgagcgcaacaaatgcgttcattattccacaatgctcacttgctcctagtgccattattccacagttcctccctccagttacttcaatgggcttcgaacacccagctgtgcaagcctacaggctacaacaagcgcttgcggcgagcgtcttacaacaaccaattgcccaattacaacaacaatccttggcacatctaaccatacaaaccatcgcaacgcaacagcaacaacaatttctaccagcactgagccaactagctgtggtgaaccctgtcgcctacttgcaacagcagttgcttgcatccaacccacttgctctggcaaacatagttgcataccaacaacaacaacaattgcaacagtttctaccagcgctcagtcaactagccatggtgaaccctgccgcctacctacaacagcaacaactgatttcatctagccctctcgctgtggttaatgcacctacatacctgcaacaacagttgctgcaacagattgtaccagctctgactcagctagctgtggcaaaccctgctgcctacttgcaacagctgcttccattcaaccaactga

SEQ ID NO: 9197 - DNA, 524 bp, Zea mays
  Clone ID: LIB3061-113-Q1-K6-F10
acggagaaatcgagtaggccggtcgccgcccactctacgcgttctccacctactgctggcagctgctgctaagcgacgccggaccggtcactgctctatgcgccagcgcactggacggccaccggtgtgacttcttcatccaaggcttgagctatagaccaaaccgccctgccaatctgcggccggcgcaccaccactaggacttggtttatctcatcgaacgttactggattcgatttcatagaagatgattctggggtagatgaatgctattcctataatctatgagaaaaaagaaagacacattcctcatgcaccagacaccacagatgaaaatgcacgcgcatccatagaccagcttaaaatatctgatcacatgacagatataaaggatccagagcacccatactcactggaacagctgagtgtggtgactgctgactaacttgaactgaatgatcaaagcaatcatgatactgttattttcaccccaacagtgcaacactgtactatgagcactatga

SEQ ID NO: 9198 - DNA, 637 bp, Zea mays
  Clone ID: LIB3061-113-Q1-K6-F12
acggatgaagcagtgcgccaaagccttggatgcgatgcttatcctgctggtacagtaagcacttcaaatgggacagaagtgtatgggactggacttaaaaatgctagctggtgaatacaattgttttttgaatgtgattattcagtcattcgtggcatataaggcggtttcgggacgagtttcttaaaacatcattactgcacaagcatgttgaagatccttgtgctgtctgcgctttatatggtatcttcattgacctgagcaaagcatccaagggacaaagagaagctgttgcacctacttcgttgaggattgctttgagcaaatcctacccaaacagcaaattctttcaggagggacagatgaatgatgcatctgaggtactgggtgtaatctttgagtgtttgcataagtcatacacttctcgtactgtctaccatggtgtatcccacgagaaaaattctattggatcatgggattgtgcaaatatttcttgcataacacataatctttttgggatggacgtatatgaacggatgaactgtcacaattgttagatggagtctaggcagttcaagtatacttcatttttacacaatatcaatgctagttcactccgaactgcgaagatgatgtg

SEQ ID NO: 9199 - DNA, 621 bp, Zea mays
  Clone ID: LIB3061-113-Q1-K6-F4
gttctaggcgcgacggccgccctttttttttttttttttttttttttttttttgagggcaacactaacagtgtccctattccacggataaaacacaaaacgaatccaatggtttttaacatcacaaaatacaatatcgaatgctaggtcaaaatgcatttgaaccttacaccattatacaagacagtccgaccaaacaattacactctagcgctatacaataccaaaacgacgaatgctagtttctagttattcactatacaagttatttattttatttgactactcgcaacattattcatcgcgtgatgtctttgtatgaatatggatgggttcaggaaacaccggcctgagggtcttttctggagcaacaaatatgatggcactcttcacagtagaaggcattatttacataaacttcgttccccgaccatgccctaccaggctggttctgcgtttccatcacctgcagtgttcctttttctcttgcttttgtccgacgaggatgacgccgaattgttgtgccagttccgcttacgctggttgataaaccagttattgatctgcttcagttgtagccctgtttcctgcaccagtcgagccttgtcttcctcggttgggt

SEQ ID NO: 9200 - DNA, 530 bp, Zea mays
  unsure (1)..(530): unsure at all n locations; Clone ID: LIB3061-113-Q1-K6-H5
gggccttccacttaatatataaaagtaagggtagggattcaaatggtttgcacaattataatcagaaaaaagatagaagtgattattaataatctctacctttggaggatataaaaatgcttatgctacttccagctatgccttttgtctttttttagaaaaacttccagttatgacttaattgttaatattgacaataccagtgtaggaatactgaaattagtcttgaaagtaagacattagttgctgctgtttgcgtgatggcccctagcttgaggatactttgccgctactcttgcggatgctttgccgctccatgtcatctctagcggacgctctgctgtcgtgctgctggatgtttgtctcgtctcctctcaggngatgctctgccactgcagtgtcttcgtctttattggcaacctggagttgatgtgcttttccttctgcaggttcagtcggttagattttaggtggagagtccttcttactgcattttctttctctggttctttgggtcggtttaggttgct

SEQ ID NO: 9201 - DNA, 361 bp, Zea mays
  Clone ID: LIB3061-113-Q1-N6-A3
tcgatcttagacaaaacccctcatgagcgtatagacccatgtagaagctccaagtgcatgcctaattggcgatggtcaagtaaggtcacgcactttcatcatgcctggttccgtattaagaggagatgcaaacataattcaattagattcttcgaccaatgtacatgacagtggtattatacatgtagatcaatataatctaagaacaaaggccttttcaacaacccttgactataacacaacaaatggtcatagcgctagagaacaagcatgcacaggatgatgttgaggctgtatttggcgtcgtgagctctctatgagatcgtgcagctactccaatgcacgaattatactgcatgct

SEQ ID NO: 9202 - DNA, 416 bp, Zea mays
  unsure (1)..(416): unsure at all n locations; Clone ID: LIB3061-113-Q1-N6-A4
tcgcgagcacggcgtccgctgttgcggccatagtcgaggtcggtgatgcacaggtggtgctttgcgaagcggctgcgcagtgaaccgtagatctagctggttcttgggagccacagtccagggccaactcagacgttgcaacttgcgagcgtcgctacctactgcgtacatgattctgagtgaacagtgctctacacattgcacctacgctgacgaatgcttcaacttgcatctgatcttcctaatgatagtcgaatactttataacgcttgggtcttgaccacaacatacgttacactcagaacgttgtacacataaagttactggctctgctaatgaacaacgtncgtatctgccctcgactagagctctcaagatccagcttatcgacatgtcagtgctcatccacttcacat

SEQ ID NO: 9203 - DNA, 539 bp, Zea mays
  Clone ID: LIB3061-113-Q1-N6-B10
tcgcggaccgggacggtgccgagacgctgcgcgagttcttgcagtttgcgagcgcggacagagacggggatgagctagatcaacgccgtgcgaattgaacgactatctgcattctgattacagtagacaatacagcgtgatgctgaagctactaaaggacaagctgatcgagatggaccatgacagagacggtaggctaagccaggaagagctagtcactcaatctcacatgatcatctgcagctcgcgttacaccgaccacggtggccatgcccatgaccttgagcgtgcctaaactgacaagaagttcacagaactggactccgactaggacaactacttgacagtggaagaagcgcactgagtactgcagagcctcgggctgtggagtcctactatgctcctccatgccaagtattgtgcatgctgatgtgcaccattacgagactactgtcgattgaggagatgctagacgactacatatccgtctacagcaccgggtatatgcacgatcattacgccagcgaaagataagtcga

SEQ ID NO: 9204 - DNA, 232 bp, Zea mays
  Clone ID: LIB3061-113-Q1-N6-B5
tcgggtggctaaccccgcaaccctgttacagactgctacagttgctgggctgccgccaacttgatccgacaaacccagttgtcttataccaactacacatcattggaggagccatctccgacattgcttattagttggaataaagtagtgaagtttgtcgaatgatgtatgtcgactggctagaaacaggaggagacattagcaggttgtggggttagccacccggacgcgt

SEQ ID NO: 9205 - DNA, 624 bp, Zea mays
  Clone ID: LIB3061-113-Q1-N6-B8
acgcgttcgtatctagcatcatataaagcacaatattgtacgcaacattggcaatcaaaatattatgcctgcttatgctccttgatctgtctgcaggagctcactcggggaccatgtcaacacgaagtgcgtcgcgaagcgtgcctataagctgtccgctagcttgccacgaggacctcctgacgcataggcgcactcgcgctatgtagaacacccacatctgcaaccctacacagatacagcagcgcgtctcacaccagcttgctacctgtatgaccctagttgctgctgcttcattaagcctattacatcagtgaccttaggtgcatgaatggacacaatacatgagggcacaccaactacaacaactctgagctagcaaacctggctgcctactctcaacaccaacagcatcttacattcaaccaactatggtcattgctactctgctctcttatgtgcaacaacaggctctaccattcagccagctacctgctgcctaccctgagcaattgctcccattcaaccaactagcagcctggaactctactgctgattgacagcagcaacaactactaccattcaggcagctagctggtgtgagccctgctaccttcctgacac

SEQ ID NO: 9206 - DNA, 359 bp, Zea mays
  Clone ID: LIB3061-113-Q1-N6-C10
acgcgttcgagagaatagtatcttcatgttacgtgcttagattggtaagtattataatgcctaattacaatatgcatggtctgttgcagtttgcatgcacatatcgacagtgtgagaataacttggatatgatgtgcttgatgtgatacctgatgtcgcggtgatcatcagctactttatcaacttgatctcaaccctagagcactcaccctgtgtggttacacgcccaactgcctagctctaactgatgattagatgcgtggagacgcagacaactcaccagctataccgattgtgttctcacatgatgcataagcctgataatacacaatgtgatttcgaccaaacttccttatacc

SEQ ID NO: 9207 - DNA, 497 bp, Zea mays
  Clone ID: LIB3061-113-Q1-N6-C8
tcgtagcaacatagaaagcacaatagtgtaccaacaatggcagccaaaatattttgcctccttatgctccttggtctttctgcaagtgctgctacggcgaccattttcccgcaatgctcgcaagctcctatagcttcccttcttcccccgtacctctcaccagcggtgtcttcggtatgtgaaaacccaattcttcaaccctacaggatccaacaggcaatcacagctggcatcttacctttatcacccttgttcctccaacaatcatcagccctattacatcagttacctttggtgcatttattggcacaaaacatcagggcacaacaactacaacaacttgctttgacaaacccagcagcctcctaccaacaacacatcattggtggtgccctcttttagattgcttattagttgtaattcaataataaagttttttggatgatgtatgtggccaaccagaaataagaagttacatttccagattctaatgtgtt

SEQ ID NO: 9208 - DNA, 522 bp, Zea mays
  Clone ID: LIB3061-113-Q1-N6-D10
tcggggttggcttgtactaacaatcacggttcgggttcctgatgagtgaggttatactaagtccggatgggggggacagcacctatagatgggcaggtcatgcggtgagttcgcattgcttcttcggcagcctgggctgaacacacggactgaccacctgactcacaacgactttaaatcatacacacgagatggccgacatccaacacatgacgaaccaagagaccaatgttgactagggttaacactcacggaccttatcaagataacatgccctgccgaaccccaccgatgacatcctccagttggagctggacgtgccgtacatgacggcacggttggcaccgtcgtagcctaggccaccacgaccgtatccgtcggcgtcccatcgtagccgtcgacgccgccgttaccgacgtggccgtcaccgtgatggccaccgccgttaccgccgtgtccacggctaccatggtggccgccgccgctaccgtgttcacggccgccgctacactggtcccaacc

SEQ ID NO: 9209 - DNA, 489 bp, Zea mays
  Clone ID: LIB3061-113-Q1-N6-D12
tcgtcatgattggtatcgtgaattaccttcagctttcgggatgccacacatgaaggtcatttaaccattcgtgatggttgccatatatggagattctatgggttgggtgaattctcggggatatagcactatagttatctcacatggttatggactacttcgatgacttgcaagcgagccgctaaaagcttgcccatgcactctaactctcaagattctcattctggctacgctgacaccaaatcatgtgtgtggactgtcagaccagcatgcctaggagaggactggatcacctagtgcattactttctttgcgacctgatagaggagattacttatgacatcatgttctactgtgttcactgaatgcatgcggtttatagttttcttccggctagatgttatcgagcatgtgacgacctatcaggaacgattgctgctgatacccgagcacatggctagtatactctacccggagaaaaactctgaa

SEQ ID NO: 9210 - DNA, 429 bp, Zea mays
  Clone ID: LIB3061-113-Q1-N6-D5
atgcgttcgttcttatgacatataagagacgattgtagtaccagcactggcttatcaatggtaaggcacactcttgcacatagaactttatgattgagctattactgataagatatctaaacgagggcaccaccaatgattggttgtcggtagaatgctgtcgtgttagcaaaagcagtgtggttgatatggaaaacaatatgttgtaaacgctataggatgcaacaggcaggcgcagctggcatgttaaacggatcaatcgtggttgtgcaaagaaatcagcacgtattacaccagctacctgtgtggcaggtattggcacataacatcagggctcaacaactacaacaactggtgctagcaaaccttgctgactactctcagcaacaacagtttcttacattcaaccaactagctgcattgaactct

SEQ ID NO: 9211 - DNA, 321 bp, Zea mays
  Clone ID: LIB3061-113-Q1-N6-E11
tcggcttaagcagccactcaccctgttctgaagataatagtagtggaagcagagatcgagtgcttcacagaattacacaggagaggaagacttacacccaaaccaggctgcactagtgtgccgaaacagctgcatgcacaccattcatcacatctgttgacactctcaacttgtgcaaatatctaacatttacccataccttgagcaggtgataagtcaaattgcactgatcccaacgcacgaaaaaatctactctgaccctaattgatagtcattatgcaggatctacaatgtgaactgtatttgcacctgctgtgcctt

SEQ ID NO: 9212 - DNA, 604 bp, Zea mays
  unsure (1)..(604): unsure at all n locations; Clone ID: LIB3061-113-Q1-N6-E2
tcggcaacaaccgccggtcgcgcctcacgcccgtcccgtcggagccttcgaccgcatgggcacgccaataccatnagagaagtctcatccataggcataataatacacatgtcatccaatactaataagagacagtgtcttatacatagtcataataaaagtctcaagtatcataacacaataacatggaagctcacgatcgccgatcaccatcgggttacagtgacgagtgatggtcgatacctccactggcgaagagggcttagacaaagtctaacccgtcttctcgttcatgcgtcggtaaggtagctggaggggtctaatatacttgtactaatgatattcgctgagcatacggtcagcttcatcaaggaccagatatgatacttggtgcaggctcactctattcatttccaaaatgtcatttaatctcccaggagttgcgacaagaatgtcagcaccacgctccagctctcttagctgagggccttttggagcacctccatataagcactttgagtttttcaagcgcagaacatcaccagtcataccaacacgaggagggcgtcttcgatggctttaataagctcggaactcggccacg

SEQ ID NO: 9213 - DNA, 545 bp, Zea mays
  unsure (1)..(545): unsure at all n locations; Clone ID: LIB3061-113-Q1-N6-E6
tcgttcttacctaaccaccactgctagacacctgaactatatatgcaagaccggacaccgacggagccacgcgcaggagagatagtggccaaccaccgttacaccagagagaacatacggtacgccccgaggatcgccagctctagctgatagggcgcgcccggcagacactccacgcacactggtgcacagaggtcctgcgatcccttgagtttgctggcaagctgaccgagcttgtcgtcctgggcagactgacgctcacagtcgagctcgtggggctggacctgctaaggccgctcgagctactgaccgtcccactctgggcgcgcgaagggggactggcgctggtgacaggggccgactagtcgtccctgctgcaccggcctgaccgctaccggcgcccacaccgggacgcacaggaactcgaccgggctctactgcatcagcgcgcacagcgcgcagcgcagcgatcagctcgccagcacgagcaccgccgncaacgtgaccagaagagcgaggaagcactacaactcctacgcgccaga

SEQ ID NO: 9214 - DNA, 526 bp, Zea mays
  Clone ID: LIB3061-113-Q1-N6-F11
atgcgttcgtggtgagcgtcttataaatccattggtcctttttcggaacacatgccggtacatagtgaccatatcaataccattgcatcgcatatgtaacatgcactatgccacctaaacgatgggttgcctgtaggatactggcagcatcatcagatagaattcaacccattggatttgtcgatcgtagttgcatacaaacaacaacaacaggtgagacaccgtttaccagatgatgaaactactagccatggtgaacgctctcacctaactacaacacaaacagctggtttaatgtaaccagctcgctataggcagtgcacctacatacctgaaatagctgatgttgaaccaacacaatgctgcagcaaatcgtgccagctctcactcagctagctgtggctaaccgtgctttctacttacaacaactacttacataaaacaactgactgtgtcgaactctgctatatacctacaacagggtcaacagctactcaatgcactaaacgggggtaacccattgggc

SEQ ID NO: 9215 - DNA, 545 bp, Zea mays
  Clone ID: LIB3061-113-Q1-N6-F12
tcggatgaagcagtgcgccaaagccttggatgcgatgcttatgctgctggggcagtaagcacttaaaatgggacagaagtgtatgggactggacttaaaaatgctgctaggcgaatacaaggggggattagaatgtgattttcatgcattagaagcatataaggcgggttcaggacgagtttattaaaacataattactgcacaagcatgtcgaagatccttgtgctgaatgcactttatatggtattttcattgacctgagcaaagcatggcaaaggacaaagagaagctgcgtacctacttctgtagaggattgctgtgagcatatactacccaaacagcaaattctttcaggagggacagatgaatgatgcatgtgacgtactagacgtaatctgcagagtgtccgcattaccaatacacttgtcggactgtctaccatggagtatcccaccgagaaaaactctatggcatcataggattgtgcaaatacttattagcataacaaataaccccagggggatggacgcatctgaaccgatgaa

SEQ ID NO: 9216 - DNA, 480 bp, Zea mays
  Clone ID: LIB3061-113-Q1-N6-F5
tcggaccaacaagcatcattttagagatctggaaatgtaacttcttatttctggttggccacatacataatccaaaaaaccttattattgaatcacaactaacaagcaatctaaaagagggcaccacccatgatttctcacatggcaggagggcgttccttcttccaaaatacgttgcacaaatggtagcttcagtatgtgaaaacccaggtcttcaaccatatacgcttactcatgcaatcacagcaagcaccatacctgtatcaaccttgatgactcaacagtcgccagtcctatctttggtgcagtcattggtacaaaccatcatggcacaacagctgcagcaactcgtgctacctctgatcaaccaagtagctctggcaaacctttctccctactctcagcaacaacaatttcttccattcaaccaactgactacactgaaccctgctgctcatttggagcaacaactataaccat

SEQ ID NO: 9217 - DNA, 489 bp, Zea mays
  Clone ID: LIB3061-113-Q1-N6-F6
tcgctttaggcctgctgaactagccgataatgcacatgtgactactgaacatgacaagaactctgaacactatgagcaatcttccaaactatgagaagaccacatcattattctcccacatatagtaccacttcaattactaccaccgactggacagacgtctgatcctaaacctgcagaatgccctggaacgaatccaaccaggagagcacgtgcatattatacactatatgacgcacgaggcgactgcacaaagaagctacaagggccacgatccgccacttattgcgaccatgattaaacggacatgtaacccaattgcagacaccctgtcaccatggagagctcagaaggataggcggcacacatacaagcccagatgagcaccgtccgtggatgggcagaaatgtactcgctactaaagagcctactgaacacagccacgaaaagcaacacctgcaaatgcatgaccatcaaaatttacatcca

SEQ ID NO: 9218 - DNA, 269 bp, Zea mays
  Clone ID: LIB3061-113-Q1-N6-F9
gctcctgccgcgggcctgctacgcctagctgagtatagtgcagctaatgcaatcaagtgatcgctgtttacagcgtgaaaacgtgataaaactcataatgtcacacaacatactagccttgcacatcatgcgcctagcgtgaggtggctaattagcgaacaggcccacatcaatcgcccttccctcactggcgctttctaaatggcaaatgtgacgcgccatgtagattaatatttagcgcaacgcgcgtggagagtacgctcacgtat

SEQ ID NO: 9219 - DNA, 544 bp, Zea mays
  Clone ID: LIB3061-113-Q1-N6-G4
acccaggcgtgcgtgagcattcagaaacacaccttagtcgttgtgcactatcttcgacctacatcattgtgtaccaagtaattatcccttcttttgcgcttcttgccctttttgtgagcgcaacaaatgcgttcattattccacaatgctcacttgctgggggggccattattccacagatcctccctccagttacttcaatgggcttcgaacacccagctgtgcaagcctacaggctacaacaagcgcttgcggcgagcgtcttacaacaaccaattgcccaattacaacaacaatccttggcacatctaaccatacaaaccatcgcaacgcaacagcaacaacaatttctaccagcactgagccaactagctgtggtgaaccctgtcgcctacttgcaacagcagttgcttgcatccaacccacttgctctggcaaacatagttggataccaacaacaacaacaattgcaacagtttctaccagcgctcagtcaactagccaatgggaaccctgccgcctacctacaacagcaacaactgat

SEQ ID NO: 9220 - DNA, 534 bp, Zea mays
  Clone ID: LIB3061-113-Q1-N6-G5
tcggtcagactagcaatcaaataatcgacttcagtatgtatgactccacaccatgaaagtgctgaatcgatgcccttggtttactgtgcctcgctgggagcgcgcggatactgtacaagctgatgggtgtgtatggcagaaccacggtatagtctactgggtaggttgtatatgcctccttcacattatctgtacgacgcatagcagcctcagtcatggacacacccgactgatgcaccgcaggtgaccccgcgccagctgctgcagattctgaccgacatcagcgtcagctgctgggctatgtgccacggcatcaaggccctgaggtaccactgcagctggtggtggacgaaggactgctggacacaacggcatgtgctgtagcaccaggtgctgcacctgatcatgctgaggagccggtgcactggtaccagacgacatacggagtgtggctagcctccttgctgcagcagcaggctgaacgggagcttgaggaactgatcgcagtcgacgtagaacaggatgtcaccgcta

SEQ ID NO: 9221 - DNA, 563 bp, Zea mays
  Clone ID: LIB3061-113-Q1-N6-G7
tcgagcaacatatgaaagcacaaaagtgtaccaacataggcaggtaaaatctcatagcctacttatgctacttgatctttgtgctagtgctgatacgaaaaccataagaggcacaccgccaacaagctgctatagctagaatgcttgctgggtacgtctaaccaagggggttgaatggcatgagaaagcgcaatttttcagacgtacacagatccaacacgcaatgtgctgtgagatcggaccaacatgagctggtactaagcatcatgatcactacactggatgtacttatggtgcatgtattggctcataacattaagccacagcatctactgcagctagtgctagcaaacctagatgcctactctgagcagcagcagatacttgcatgcaaccaactagctgcattgaactatgctagtcatttgcaacagcaacaactaccatgcaggcagctatctgctgcctacccagagcagtatctggcatgcaaccaactgacagcatagaactctcctgcttatgtacagcagcaacaactactaccatgcagacagctagct

SEQ ID NO: 9222 - DNA, 576 bp, Zea mays
  Clone ID: LIB3061-113-Q1-N6-H1
acgcgttcgttcataatcagaccaagcgagcacattatcatcgtcctatcatcagtggctcctaagatattgtgggtacttgcgctgcttcatcttatagggagcgcaacagatgcgtccattattgcacagtgctcagtctctccaagacagcgttatatcacagagaactggacgagtggctgcaatgggctctgatcaccgaagtgagcaagcatatgggctaccactggtagtggatgaaagcactgtacaacatccaatttgccagcagcaacatcaatcctaggcacatgtaacaatgcaaaccatctgagcgcatcagcaacaacaattgctaccactacttaaccaactactcatgcagaacgctgccacactacttgcaacagcgagttgcttgcattaaacccacttgctgctggctacataaatgcaaaccatgcacaacaacagctgcaacagggtctaccagcgctcagtcaactagccatggcgaaccctgccgcctacctacaacaggatcaactgctactatctatgccgctcgctgtggtcaatgcacactacatacct

SEQ ID NO: 9223 - DNA, 619 bp, Zea mays
  Clone ID: LIB3061-113-Q1-N6-H10
tcgcccacgcgtccgcaagctgctgcatttccagatctaaagctgacagatgtgtcaaaagaaagtgtgtgtgaaaagaaagattctgagattgttcgatcgcctagagctacaacccattctttgaagatgccgattggtgctcaaaagcctgcatatatgactggcggacttggtgcacggaagcttacatcaaagccaaatgaaagcctctatgagcagaagcccgaggaacacatctacagtcctgccatcatcggtgattcgagagtactacaactagtgagcaaatcacatacttaccgatttgattacgttgaaaatgcacctgctcttaagaatggcattagctcagatggcaaccacatgagtggacatgttgcacccccaatgtcgtcaaacttctttgctgaatttgcgatggacagtgcatatcagaaaaaatctacgtgcagttcattcaaagtgcacatcgatgaaagcaaggaatcatgacagatatcctcaaaagcgaaatcaattccttcctctcaggtctttggtgatcaagccaactttgaaaaggacgctcaagtctctctccaaaagttctatggttcctctgcgatatcaagtgctg

SEQ ID NO: 9224 - DNA, 482 bp, Zea mays
  Clone ID: LIB3061-082-Q1-N6-B10
aagaatctagaaatgtcctttcttatttctgggaagccacaaacatcagacaaaaaactttattattgaactataactcataagaaatctaaaagagggccccaccaatgatgggttgttggtagaacgctgctgggtttgtcaaagcaagttggttgaatggcagcaattgttgcagttgttagagggtgccagcgttaggcgcagcgtgctggttgaacggcaacaactgtggttgtttcaagaaggtagccgggctcacaccagctagctggctgaatggtagtagttgttgctgctgtaaataagcaggagagttcaatgctgccagttggttgaatggaagaaattgctgggggttggcagcaggtagctggctgaatggtagttgttgttgttgccaattagaagcagagttcaatgcagctagttggttgaatggaaaaaactgctgttgctgtgagtaggccacaaggtttgct

SEQ ID NO: 9225 - DNA, 552 bp, Zea mays
  unsure (1)..(552): unsure at all n locations; Clone ID: LIB3061-082-Q1-N6-B6
ggcagccgtagacacaagaccacttttatttatttgacatgaacacacatacgacagcaccggacgacgatgatagctagatgaccagatcagagttgttgacgcaggtaaacaccgatcgcagcgacgagcctgctggtcgagcgtccatagaaccccacgatgctgctgccgatcggcgcggtgatgcagaaacgtgtcccgtcctcgatcccccatggcccccaggttctgctgctggtgagaattctgatcgaggtcagcgtggtggcgccttcaaacatgccgtatgttcctgagacctccctgacaacctcggcgtcgccaagatcgatcgttcgaaggttgccgccaagtccaccccatcgcccagcagtgcgcctctggccacctctatcagtatacgtgaactcgatggagtcgacggcaaaaccagttcgaacggagaggctgtgcagacgctgtggtggctccgtcgtcgtgatgtcctgcgccgaccctccacctncaccccataccccaatcttggtgacagagacggagtcctgcttg

SEQ ID NO: 9226 - DNA, 506 bp, Zea mays
  Clone ID: LIB3061-082-Q1-N6-C10
atcttaaaactacagtatttcaaaaccgcatttccaaacaggccctaggtatttgcaatacttcagttttaaaaacatagattttatctagattgccaaacaacattttgtatataataccgtagtattcgagaatactacagtattctaccaaaactgtgcctagacacccccgaagctagtacaaacttcaaactagtcgggcccaaagggaagtcgcagtcctccgttttatcttcgtcccatggagggaggttttcttcagacgttaaagtaaccaatttatttggcaactggagacaccactgaaggtacaactacagtcgccttattgcgtcctctccgccttcactcatcatgttgatcgatctctagaacccatagacatgcatctcatgaacgaagtagtacgagcaagcctgcagagcgggcacacagccgcatccaggctcgctactgagaacccagtctctggacatctaccagctgatagagatcgccacgcc

SEQ ID NO: 9227 - DNA, 497 bp, Zea mays
  unsure (1)..(497): unsure at all n locations; Clone ID: LIB3061-082-Q1-N6-C11
cattaaaaccaaaactttattatgaccatgcatatnttattggtcataccacacatgataatgtgtgtcgtcttactgcattattacatatttagatagagagagatggatagaggagatttcccaaatctcatgaatcagtngtngggcggaatggcagcggagacgccacaggggttggtgcggtagctgggcagctggtactggtagagtccacccatggccggcatgttctgcgccatcatcatggccatggggttgagaccctgggctgccagcagctgctgctgctgctgcatcagagctggctcgtacaggctgctgctggcggcngcggcacgctcaagctgcatcatcatctgcagctgctgcgcgacggacttgccgtccatcatcctcatctgctgctggcngccctgttgccggagcggctggaacatggcgctcggctgcccacacccggcgttgttgggcgccgccgccagcgggctgcactg

SEQ ID NO: 9228 - DNA, 337 bp, Zea mays
  unsure (1)..(337): unsure at all n locations; Clone ID: LIB3061-082-Q1-N6-C2
aaacggacaatggccatgactgcaacatnggnngagncgaatacaacacggggagacatgatttgtagacaaaggtntcttgtttagacaagaataacctgttgattgttttacagcatcttattgttatttttttttagaactccgattgatattttgtgcggcaaatacccgtcctgtgagaccttttcagctcatatgaccaatccatcagcaattatcgcgttcttcagtgcgacggtggtgccagatcgaatgttgaagccttcggaagttctttcagnttcatctgcnccttcagagttggggattgccgctttcttccctatcctcgcgt

SEQ ID NO: 9229 - DNA, 498 bp, Zea mays
  Clone ID: LIB3061-082-Q1-N6-C4
ggcagccgtagacacaagaccacttttatttatttgacatgaacacacatacgacagcaccggacgacgatgatagctagatgaccagatcagagttgttgacgcaggtaaacaccgatcgcagcgacgagcctgctggtcgagcgtccatagaaccccacgatgctgctgccgatcggcgcggtgatgcagaaacgtgtcccgtcctcgatcccccatggcccccaggttctgctgctggtgagaattctgatcgaggtcagcgtggtggcgccttcaaacatgccgtatgttcctgagacctccctgacaacctcggcgtcgccaagatcgatcgttcgaaggttgccgccaagtccaccccatcgcccagcagtgcgcctctggccacctctatcagtatacgtgaactcgatggagtcgacggcaaaaccagttcgaacggagaggctgtgcagacgctgtggtggctccgtcgtcgtgatgtcctgcgccgac

SEQ ID NO: 9230 - DNA, 72 bp, Zea mays
  Clone ID: LIB3061-082-Q1-N6-D12
ggggggggggggcgccgaacacaaaaaaaaaaacccccagggccgggggggggggggaggggtggtgtgggg

SEQ ID NO: 9231 - DNA, 496 bp, Zea mays
  Clone ID: LIB3061-082-Q1-N6-D3
caaaaattatcgagaaaaatctcaatcaatatattgattatttctaggaaacacatgtcggtttgagggccccattgtcgagtccatctcatatgtaatctaaaagatggcccctccaacgatgggttgctgcaaggcagggttcatcaaagagaactggttgtttggcagcaattgttgttgctgctgcaggaaggtagccaccaatgggttagccactgccaatggattaagtaactgttgtcgctgttgtaggtccccagcaaagtttgacacacccagttggttgaatggaagcaactgttgtaagtaggcagcagggtttgccacagctagctgagtcagagctggtacaatttgttgctgcaacaaattgtaggtacgtaggtgcattgcccaccgcgagcgggctaaataaaagtagttgtaggtagacggcagggttcaccatggctagttgactgagcactggcataaactgttgcagctgttgttg

SEQ ID NO: 9232 - DNA, 546 bp, Zea mays
  Clone ID: LIB3061-082-Q1-N6-D4
cataagaatctagaaatgtactttcttatttctgggacgccacaaacatcatccaaaaaacttcattattgaactataactcataagcaatctaaaagagggcaccaccaatgatgggttgttggtagaacactgttgagtttgtcaaagcaagttggttgaatggcagcaattgttgcagttgtaagagggtgccagcgttaggcatagcgtgcaggtagaacggcaacaactgttgttgtgtcaagaaggcagcagggctcacatcagctagctggctgaatggtagtagttgttgctgctgtaaataagcagcagagttcaatgctgctagttggttgaatggaagaaattgctgggggtaggcagcaactagctggctgaatggtaattgttgttgcaaataagcagcagagttcaatgcagccagttggttgaatggaagaaactgatgttgctgagagtatgcagcaaggtttgctagcacaagttgttgtagttgttgtgccctgatgttttgtgccaccaaatggaccaaaggtaact

SEQ ID NO: 9233 - DNA, 507 bp, Zea mays
  Clone ID: LIB3061-082-Q1-N6-D5
agtaatatataggatgacagatatagttgatccaaagcaggtaatggaaatacaaaggttcataaaaaggtttgctgcaacttctagggcagcttataacagtacatactagcagcacaaatggtcaaggaacagcatgccagacaacgcattttgcgcccgaacgctcgacttcctgtcaagcggctcttaccataccaaggttacacgatccatcgatgcaataccattgtaggttcttgttttgtagacgcaaacgcagccgatctatatgacagacccatcgttgatggttgcattcttcaagatcaccacgattccagaccttatgtagtacccttcttccgggtgatcagcctcttggatgcccttactgtttgtgatcaccacgttcttcccaatcctagcattcatgtcaatgatacagttccttatctttgtgttccttcctattccaactgggaccttcccagctaacagtagctttgaagcttcttcttcagtttc

SEQ ID NO: 9234 - DNA, 430 bp, Zea mays
  Clone ID: LIB3061-082-Q1-N6-D7
aacccccgaaaaaaaatttttttttggacttttccctataaaaaatttaaaaggggggcccccccggggtggggtgtgggggaaacactggttgggttgtcaaaaaagggtgggtgaatgggcacaatttttggcgttgtaagggggggcccggtttggggccaccgggttggtggaacgggaacaactgggggtgggtcaaaaagggggggggggtcccacccctttgctgggttaatggggggtgttggtggtggtttaatattgcgggggggttcattgttccccgttgggtggggggaaaaaattggggggggtgggcaaaccgggcctggctggttgggtgtttgtggtggttgccttttaaaacccggtttcaatgcccctttgttgggtttttggggaaaaaaattctttttttttttggggt

SEQ ID NO: 9235 - DNA, 445 bp, Zea mays
  Clone ID: LIB3061-082-Q1-N6-D9
aagaatctagaaatgtactttcttatttctgggaagccacaaacatcagataaaaaactttattattgaactataactcataagaaatctaaaagagggcaccaccaatgatgggttgttggtagaacactgctgggtttgtcaaagcaagttggttgaatggcagcaattgttgcagttgtaagagggtgccagcgttaggcgcaacgtgctggtagaacggcaacaactgtggttgtgtcaagaaggtagcagggctcacaccagctagctggctgaatggtagtagttgttgctgctgtaaataagcaggagagttcaatgctgctagttggttgaatggaagaaattgctgggggtaggcagcaggtagctggctgaatggtagttgttgttgttgcaaataagaagcagagttcaatgaacctagttggttgaatggaag

SEQ ID NO: 9236 - DNA, 454 bp, Zea mays
  Clone ID: LIB3061-082-Q1-N6-E2
cacctgaacactgcattttattcctcatcataaacatgacatccaaactagccatatcgagcatgctgtacatccgcctttccgatcaaagagagacgcatacagcatatagtactgcactgcactgcatgcccccagacacaagcatgcacacacaaagcacaacacataaacgactagctagagctatcgcggcgaccgagactctacggcagcgtacgtagcagcagccaccgcctttaagggccatatgccgccgcgccggcagtggttcaaggaggtcgcgcgcgcggtccgctcgagtgtggttcttctctcaagacccctgcgcctggtcgatgcggtgctgtgctgcatccttgatgtcgcgggccttggacgccagcctcgccttggcgtggtccagctggtcggcccccggcgggtgcttgcccgtcaggtacttgtacatcca

SEQ ID NO: 9237 - DNA, 346 bp, Zea mays
  Clone ID: LIB3061-082-Q1-N6-E4
ggggggggaaaacccaaaaaaatttgggggtttttggggggaacccccggggggggggggggcccctttggggggcccctttttgggggaacaaaagggggggccccccaaaggggggggggggcccccccaggggggggttcaaaaaaaaaaacgggggggggggggaaaattttggcttgggggggggggggggccccaagggggggccccccccccaggggtaaaaaaacggggggcccggggggggggccccccaaaatttccaaaagaaaatggggggaaaggggacaccttggggcaagggggaaaaaggggggcccccaattgggggggaaaagggggg

SEQ ID NO: 9238 - DNA, 522 bp, Zea mays
  Clone ID: LIB3061-082-Q1-N6-E5
aataccacgcaaattcgcatgttcatcatgttctaaaacaacgatagagacatcaagttgtgtgcatcgtgtactctgattcgtatgaactatgcatttgcctatggccaaggaatctgagtctttaagaactcacgcctgctgtacatgtacccatttatttggcttttctactttccacacgccggagcatcccacacgcgagatgctttgtggcatgccttgaatttgaatatacttcaggctccatccacggagacgcttaccatttgttatgtgtgtcatcaaagattagggactcaatatcttgcaccacatgatcatctatctcaattctcagggtagagttatgacccaacttgacaaaaggcgtcctaagagccctgttcttatacactgtcgttctatcaggttgtctggacgggaggatccaatctctcttgtccgggcgaaggattccacaatgcagatcttacaccacgttgaacacggccgttcagaacatgagccgatacgcttgct

SEQ ID NO: 9239 - DNA, 520 bp, Zea mays
  Clone ID: LIB3061-082-Q1-N6-E6
agaaatgtactttcttatttctgggaagccacaaacatcatccaaaaaacttcattattgaagtataactcataagcaatctaaaagagggcaccaccaatgatgggttgttggtagaacgctgttgggtttgtcaaagcaagttggttgaatggcagcaattgttgcagttgtaagagggtgccagcgttaggcgcagcgtgcaggtagaacggcaacaactgttgttgtgtcaagaaggcaacagggctcacatcagctagctggctgaatggtggtagctgttgctgttgtaaataagcagcagagttcaatgctgccagttggttgaatggaagaaattgctgggggtaggcagcagctagctgactgaatggtagttgttgttgcaaataagcagcagagttcaatgcagccagttggttgaatggaaaaaactgctgttgctgagagtaggcagcaaggtttcctagcacaagttgttgtagttgttgtgccttgatgttttgtgccaacaaat

SEQ ID NO: 9240 - DNA, 527 bp, Zea mays
  Clone ID: LIB3061-082-Q1-N6-E8
catacaaacaaaaaactcattatgtaaattatattttattacaggcataatttatgaaatcatacgacaacataacggctccctctgctgatcaaaacatatcagcgatctacctcaaaaacaagttctattcttaggtacatccttctattcttaggtacatgctcgagggtgaaatacagtggaaaacatagcacagagctatacatccggcatccccgctggcttcgtcttcacttgatcatgtagcgagagtgaagggcatatcgacagaaacacgtcaaaagaaacgcaaggcatcctcaagctccttctcatcagtgcagttgtagcccaacataatcgcccgtgcgtaacgtccagatcccatgaatggctctgcttcatccactacaccagcctgttgcagatcggtatcatcagcatcccattcatcatcaggacacagccacctttcaaagcagtggccagatatcgtacaaagaagcagcccactagattggtccaagacaaattcacgacaagcg

SEQ ID NO: 9241 - DNA, 420 bp, Zea mays
  Clone ID: LIB3061-082-Q1-N6-F4
ggcagtctagcagtatgcgctaatacttagcacaaacggaacttagcaatacaacatcgacccccaaggggggtaagtttagtgagctcggtctgacaaagacataggactgatgaccgcatgaccatgctggtcatgcgcataccattcatattgtagcatccatcggtcgatcagtcactggcaacaggagaatcgtcggcggacctggagcgggatccaagaggtgagcccgagtactccttgggggacctgcggtgcaaaggagatccatcgctgtctgctgggggcgacctcttctcataaacattgtcagcatcatctttactggcaggagagtaggacctccgcttcttatcttcatcatgctcctttggcaggcgcctgggaggagatgagcgatgggcttcctgtctcctt

SEQ ID NO: 9242 - DNA, 466 bp, Zea mays
  Clone ID: LIB3061-082-Q1-N6-F6
atcggggataaatcccaatcaattttttggttttttttaggaaacaccatgcccctttgggggcccccttttcgggtccctctcatttggaatctaaaagaggggcccccccacgatggggtgctgcccccacaaggggggggtcatcaaaaagaaccgggtggttggcaacaattgttgctgctgttggaagggcgccccccatggggtagccccccctggggggttaagtaaccggtggccctgttggagggcccccccaaagttcgacccaatcagttggttgaatggaaatagttgttgcaagtaggccgcagggtttgccccaacttgctgagtaagagctgggacaatttggtgcagcaactggtggtgcaaccaccgttgttgcaggtttttaggggcattgcccatagcgagcgggctaaataaaaaaaattgttgctgttgtagggaggccataggg

SEQ ID NO: 9243 - DNA, 445 bp, Zea mays
  unsure (1)..(445): unsure at all n locations; Clone ID: LIB3061-082-Q1-N6-F7
atcgaacacccttggggaaccaatatcacattagaaatctgggaaatggtaacttctttatttctggttgngccacatacactcatccaaaaaactttattattggaattacaactaataagcaatctaaaagagggcaccaccaatgatgtgttgttggtaggaggctgctgggtttgtcaaagcaagttggacaaagggcaacaattgttgtagttgtaagagggttgcggggttagccgcaaactgctggtagaaaggcagcaactgttgctgtgtcaagaaggaagcacggcttgctgcagctagctggctaaatggtagtaatatttgctgctgcaaataagcagcgaggttcagtgcggccaattggttaaatggaagaagttgttgttgatgagagtaggcagtagctagctggctgaatggtaatagttgttgctgc

SEQ ID NO: 9244 - DNA, 522 bp, Zea mays
  Clone ID: LIB3061-082-Q1-N6-G10
cagacaaaaactttattattgaactataactcataagaaatctaaaagaggcaccaccaatgatgggttgttggtagaatgctgctgggtttgtcaaagcaagttggttgaatggcagcaattgttgcagttgtaagagggtgccagcgttaggcgcagcgtgctggtagaacggcaacaactgtggttgtgtcaagaaggtagcagggctcacaccagctagctggctgaatggtagtagttgttgctgctgtaaataagcaggagagttcaatgctgtcagttggttgaatggaaaaaattgctgggggtaggcagcaaatagctggctgaatggtagttgttgttgttgcaaataagaagcagagttcaatgcagctagttggttgaatggaagaaactgctgttgctgagagtaggcagcaaggtttgctagcacaagttgttgtagttgttgtgccctgatgttttgtgccaataaatgcaccaaaggtaactgctgtaatagggctgatgattgtt

SEQ ID NO: 9245 - DNA, 412 bp, Zea mays
  Clone ID: LIB3061-082-Q1-N6-G3
aaaaagggaaagagggttttttgggaaaaaatgtttgggaattggggcccgaggggggggggaaatttaaaaccagggggggggatttgaaaaatttaaaacctttttttaggatttttgggggccccgggcggggggggaaaacaaattaaaggggggggggggggaaaccgtttggaaggaaaagggggggggggggggggccatagaaacccaaaatttttttggcctggggggggggggggcaaaaaaggggggggtttttggtgccccaggggccccaaagttggggggggggggggaaaatttttaaaggggggggggggggccccccttgggagggggcgggcgggccaaaaaattcttggggttttttaggggggcccaaaaagggggttccggggggtggggg

SEQ ID NO: 9246 - DNA, 525 bp, Zea mays
  Clone ID: LIB3061-082-Q1-N6-G4
caattgttcattcaggtcattgctcacactgacactgccacccatggtgatgcgtgacacattattactcaatcatcgccgctaaatgactcaactagctagctagccagcggctatactacagcacatagtttcttcagtgggggacaccgccggcagcagcgtaggggcatggagtcggctgctgcaggccgcacatcgccgtcagttgctgcgctatctgcgccgccaacagccccgcgacctggccgctttgcggctgctgctgcaggatggactggaggaccaagccgaagatcgcctggtaccggtgctgcggctccacctgcctgagctgctggcaacactgctgccgcaacgactggcactgaggcgagcagtagggcgtcgccgtcgggctgcactgatgcctcagaaactcgacgcactggcccaggatcggggtgctgccaacgccgcaggttccctgcagctggcacgggcttggatgcggctgttggcacgggcatgggtgtggcttgggga

SEQ ID NO: 9247 - DNA, 545 bp, Zea mays
  Clone ID: LIB3061-082-Q1-N6-G6
gagataaatctcaatcaatatattgattatttctaggaaacacatgtcggtatgagggcaccattgtcgagtacatctcatatgtaatctaaaagaggcacctccaacgatgggttgctgcaaggcagggttcatcaaagagaactggttgtatggcagcaattgttgttgctgctgcaggaaggtagcgaccaatgggttagccactgccaatggattaagtaactgttgtcgctgttgtaggtacgcagcagagtttgacacagccagttggttgaatggaagcaactgttgtaagtaggcagcagggtttgccacagctagctgagtcagagctggtacaatttgttgcagcaactgttgttgtaggtacgtaggtgcattgcccaccgcgagcgggctagatgaaagtagttgtaggtagacggcagggttcaccatggctagttgactgagcactggcataaactgttgcagctgttgttgttgctggtatgcagctacgttcgccagagcaagtgggttggatgcaagcagctgctgtt

SEQ ID NO: 9248 - DNA, 314 bp, Zea mays
  Clone ID: LIB3061-082-Q1-N6-G8
gggtgggctggttctgttttctaaaaatgttttgttgcgtaacccccggggggcgcccttaaatgggggggggcgcctgtgtgttggcggaaaaaaggctgcggggggtcgcaaggcacgggggtcttaggggggggccccccgccggtgttagccgggggggggggggtgccgcttctggcgggctggcggccccgggggcgtcgtgtctgggggataaggagggtcggggggctcgccccccacggggaggttgcctccgccgcttggattggccccagggggaagcggggccgtttggtcttttgggggaa

SEQ ID NO: 9249 - DNA, 228 bp, Zea mays
  Clone ID: LIB3061-082-Q1-N6-H10
gtaatctaaaagagggcacctccaatgatgggttgttggttgaatgctgctgggtttgtctgggccgctcgcttgcatggcggcaaatgttgggggtccaacagggtgtcaccaccaggcgctttttgccggtggacccgcaaccactgtggttgggtcaaaaacgaaggagggttttcaccagctccctggcttattgggggcccccgggggggccgcccctcccca

SEQ ID NO: 9250 - DNA, 228 bp, Zea mays
  Clone ID: LIB3061-082-Q1-N6-H3
ggaccccccaaaggggcaaaaaaagggggggggggcgggaggcccatttaccccgggggcgaaaatggaaaaaaaaaagggttgggggggggggacaaaggtttcaagggggggggggccaagacccaaatctggttaaaaatttgccacggggcccaagattccgaaccctaaaggggcaaaaaaatggtccacttgtaaaaaagttcccccttggtttttttgggg

SEQ ID NO: 9251 - DNA, 533 bp, Zea mays
  Clone ID: LIB3061-082-Q1-N6-H5
gaaactgaatccacagaatgataaatagatactgggtccatatccaccagaagtaaacaagacatgcaaatacgttccacacattacagcaagcggattaggacaattcgggctacattaagcaaataaaagctacagatttacagtactagcacatgtgttgttgaagtcggctgatttcatctttccaccagaccaccactgacccctatgtacagcacacagacaaccatcgcatccacacccacactaccaacctaggtatccagtttctggcagtacgtacaccagatccttcctatatatgcatgaaccaacataaggcatcaagctatcatcaccaaatcaacagagtatcatggaagaataccaaaaagctgccccatctctctctccatgaagcacacacttggaacttacctattgccatgcaatgtattgccattcaatctagtgtgcacaggaggcatttatcctgtcacctttacggtcatggaagtcgatggaacttccagcttgggcagtagccaccc

SEQ ID NO: 9252 - DNA, 380 bp, Zea mays
  Clone ID: LIB3061-082-Q1-N6-H6
actcctcccacacctttcatcaagggctagtttttacatttccaggatgttatgacccccgcccacagggccccgggccagtggggggcgggaaaccaaaattcctctacgtggatgggccccgtggcccaaaaagatgttcctggtgggccgccgtggccccctggggggtggccggtggccttggttttagtccctgtggccgctggcgcgggggcccctcggcgtttgccccctcctgttggttgcctggactcgtctgttgtccgttggcggccgggtttgccgccgcttgctgggtccgagctggtgcactttgttgccccaactgttggtgttggttccttggtgccttgcccaccgggagcgggcttgttgaa

SEQ ID NO: 9253 - DNA, 284 bp, Zea mays
  Clone ID: LIB3061-082-Q1-N6-H9
ggggggggggtgttttgttttttttttttttttttttttttgggggggcccccggtcggtggggggggtttttttttgtgcccccgcggtgtgggttgtggggggtggggggcccctttttttgtgctccccccccccgctgtgggggggggggggggggttttttttgggggggggggggggcggcccccccttgtgggggggggtttgggcgttgtttgtgtgtggccccccgtctgggggggtggggaaggccgccttcccccccgggtgggggggggggg

SEQ ID NO: 9254 - DNA, 225 bp, Zea mays
  Clone ID: LIB3061-083-Q1-N6-A1
gaacaacaaatcctcattctccaaagcaaacaaaggggggccaccttcggcgcactaaagttacctctaagccctatactacctccgttcttgaatatttttcgcccgctggtccctttttgaacttgaccgggacctttctttaaagaaggaaccgagagagttttatttctgattggtccctgtttcagggcctcgtcctttccgtgggccccaccttccaca

SEQ ID NO: 9255 - DNA, 319 bp, Zea mays
  unsure (1)..(319): unsure at all n locations; Clone ID: LIB3061-083-Q1-N6-A2
cttcttgctttgtttttgggcaagctggtgccagctgctcggtgttttctgtctgcttctttttgtgttccccttcccacgccgccccgggtcgcggctttgttttccctgcctgtggctggctccgactggcacggtcccgcccccctctttcccgccgggggtttccgctgtgttcccttctgctggcctccgccgggtgatgcccttccgctgccttttcctggtgctgccccctgtgtttctctttccccttgntttttttggcccctttaccccccttggctttccccctttcctcctttgggttcccccctgt

SEQ ID NO: 9256 - DNA, 522 bp, Zea mays
  Clone ID: LIB3061-083-Q1-N6-A3
agaaatgtactttcttatttctgggaagccacaaacatcagataaaaaactttattattgaactataactcataagaaatctaaaaggggcaccaccaatgatgggttgttggtagaacactgctgggtttgtcaaagcaagttggttgaatggcagcaattgttgcagttgtaagagggtgccagcgttaggcgcaacgtgctggtagaacggcaacaactgtggttgtgtcaagaaggtagcagggctcacaccagctagctggctgaatggtagtagttgttgctgctgtaaataagcaggagagttcaatgctgctagttggttgaatggaagaaattgctgggggtaggcagcaggtagctggctgaatggtagttgttgttgttgcaaataagaagcagagttcaatgaacctagctggttgaatggaagaaactgctgttgctgagagtaggcaacaaggtttgctagcacaaattgttgtagttgttgtgccctgatgttttgtgccaataaat

SEQ ID NO: 9257 - DNA, 524 bp, Zea mays
  Clone ID: LIB3061-083-Q1-N6-A4
acaaggaagtgaactttatttgatgtatgtctccagttatacaaaagcattgaaccacaggggtgatttgctaaatacctaaatctcgctcgcctcctccagctaacaatatgcactggtatctggcttgtaaaatataagtttcagtcctctttgaagagctcacggccaattatcattcttcttacctcactagtaccagcaccaatctcaaacaattttgcatctctcaggagacgaccagttgggtactcatttatgtacccatttccaccaagacactggattgcctgaagtgccacttgggttgcattttcagcagcaaagagaattacccctgcacaatccttgcgatcaactttgccattatcgcagtccctagcaaccgagtatacaaatgatcttgacgactgcaacgaggtgtacatatcagccattttcccctgtatgaactgaaattcaccaattggacgcccgaattgctccctttgtctaacatatggaagtacaacatcaaagcatgc

SEQ ID NO: 9258 - DNA, 435 bp, Zea mays
  Clone ID: LIB3061-083-Q1-N6-A5
agcacataagaatctagaaatgtactttcttatttctgggacgccacaaacatcatccaaaaaacttcattattgaactataactcataagcaatctaaaagagggcaccaccaatgatgggttgttggtagaacactgttgagtttgtcaaagcaagttggttgaatggcagcaattgttgcagttgtaagagggtgccagcgttaggcatagcgtgcaggtagaacggcaacaactgttgttgtgtcaagaaggcagcagggctcacatcagctagctggctgaatggtagtagttgttgctgctgtaaataagcagcagagttcaatgctgctagttggttgaatggaagaaattgctgggggtaggcagcaactagctggctgaatggtaattgttgttgcaaataagcagcagagttcaatgcagccagt

SEQ ID NO: 9259 - DNA, 190 bp, Zea mays
  Clone ID: LIB3061-083-Q1-N6-A7
cagacaaaaaactttttattgaactataactcataagaaatctaaaagagggcaccaccaatgatgggttgttggtagaatgctgttgggtttgtcaaagcaagttggttgaatggcagcaattgttgcggttgttagagggttccagcgtttggcgcatcgtgctggttgtacggcaacatttgtggtt

SEQ ID NO: 9260 - DNA, 533 bp, Zea mays
  unsure (1)..(533): unsure at all n locations; Clone ID: LIB3061-083-Q1-N6-A9
aaaatatagatctctaatacttanttactgagaggtcgcacatatcagcatgagaactttattattacagtataaatcataaaaaatctagaagatggcaccaccaatggtgggcggttgcaataaggtggtaggattcgtcaaagcatgttggctaaatggtagcaattgttgttgttgtaagaaggcaacaatgtttgccacattctgtgggtagaatggtagcaattgttgctgttgcaagaaggcattaatgtttcccacaacttgtgggtaaaatggcaacaaatgttgttgtctcaagaaagcaacaatgtttgccacagcttgcagatggaatggcagaagctgttgttgcagtaagaaggcataagggctcccgacaagttggttaaatggtagtagctgttgtgcctgcaagtagatagcagggttcaccccagctagttgattgaatggaagaaactgttgttgctggaggtaagcagcaaggttcgctgcaactacttngatgattggtggtagcaactgtt

SEQ ID NO: 9261 - DNA, 398 bp, Zea mays
  Clone ID: LIB3061-083-Q1-N6-B1
agaaataaagtagtttaaaatttactgggttccttttagaccatttaaggaacaccgcgtcccccgggggtttttatttgtttaccaacatagtaattaagtgcagcagcagatcatgatgtgtcgttgcattgatcaggcctcgtcgtcgtcgttgtcagcactggcagcagtagcggcagcggcagtattttgatttttaacgagcgcaacgatcctcgctgcttcgttcttatccttgatgccaagcttttgcatgtcggggatcacagcgggggggtggtcagcccactctaaggccgccttggagatcctgtcccacttttggacctgctttccctgggttacgggcaagggcaccccgtgctggctgttgaaccccgcgttcaccgtgcggg

SEQ ID NO: 9262 - DNA, 226 bp, Zea mays
  unsure (1)..(226): unsure at all n locations; Clone ID: LIB3061-083-Q1-N6-B3
aaaagaaacaaacggtaacttatagattcatcgcgacacgatcttcaccagnaaaggttacaagagacatgtagagatttattctatggagacagcaaaaaccccagtcgatatatcagataggatgattggtgataccaaagaggaagcaaacacaaacacacaaagtttcagaagcacagctactgcttgctccctcaggcgaccttgacctcgatgggtcttg

SEQ ID NO: 9263 - DNA, 490 bp, Zea mays
  Clone ID: LIB3061-083-Q1-N6-B4
aagaccagaaataccatgcagcaaaaccattactttggtctgacacaatactcacatagttttgcatacacacatatgctcctggaactacttttttttaacacacaaacattaacgggcgaaaaacctcacattaaagcacagccatttcacgatttttggcatccttcacagcattcaaattagggcttcctggaaacgccttccttggacacatacccaggaggggcttcctaactcattttttcctcacccaacgcgcacttggggggcaggtcaaagtcacactcgtcgcacctgtaggaccagctggtgcccattttgtcacaaccattacaggggtacgtaccacggggcaaaaagacaagttcgggctcgtcatgcaacttatgcttaaacttttgaggccaccccttcgccatttaatccagctttttttgtagctcctcaagtctctcctcggtgaatgggaaagcatcagcaccggggt

SEQ ID NO: 9264 - DNA, 501 bp, Zea mays
  Clone ID: LIB3061-083-Q1-N6-B7
atgccaggataggctaatttattcgatttctgggaggcaaccacatgtccacatagtaagcatagttttacagatggaagaaagaatgtaggtgcacttcggcattgtttggatgactgaaatggtaaatgaggaagttgtattactccacaacaagaatattgttctgcgtcagtccatctccagcagtgggatattcaggcgacaatctccattccccatcaaccaaaaacttgatctcgtaccttccaggtcttagcttcagagtcgcagagaatcttccgtagtcacctgaatactccatggacatcgccttgccctgtgaccattcatcgaatgaacccatgatctgcacattttcagccatgccaatccagtagacaggaatttcttgggtctttaaagcgtcaacactctttacctgttccataatcttatcatggacagcttttaatctggagagaaaatgaaattgaatatattttccgtttatcttcctaa

SEQ ID NO: 9265 - DNA, 437 bp, Zea mays
  Clone ID: LIB3061-083-Q1-N6-B8
acaactggatttataaatatataatgatattacataagtatattacaaaaaaagaatggcctagtgcatttaaatgatactccctccgtcccaaattgaaattcgttttgcctttcaatagattcataaaataattaatgtatatctctactactacttatgttagtagtgtaggcgtccacaaccacccgttctatcgcgcgcagatgcccgaatcgcgcaatcggtccgcaaccgcccgcatccgtgccagcaccggaaccgcttctttcattcttcgtcatccttgcatccacacgggcggatcccagcgctccctcccgggcacccgcatccgtgccggatcacgcagccgccccgtaccacggataccagcgctgcctgcaccacacaagcctccttgccatgccccatgcgtagcgcccacaccaccgtcc

SEQ ID NO: 9266 - DNA, 434 bp, Zea mays
  Clone ID: LIB3061-083-Q1-N6-B9
aaagcttgttactcccaatcttagggaaaataattttcgaacacccttggggaccaatttcacattaaaatctggaaatgtaacttcttatttctgggtggccccattccttatccaaaaaactttttttttgaattacaactaataagccatctaaaaggagggcccccccaatgatgtgttgttggtaggaggcccctcggtctgtcaaagcaagttggacaaagggcaacaattgttgtagttgtaaaagggttgcggggtttgccccaaactgctggttgaaaggcagcaactgttgctttgtcaaaaaggaagcacggtttgctgcacctagctggctaaatgggagtagtatttgctgctgcaaataagcagcggggttcagggcggccaattggtttaatggaaaaagttgttgttgcttagagttg

SEQ ID NO: 9267 - DNA, 526 bp, Zea mays
  Clone ID: LIB3061-083-Q1-N6-C10
aatctagaaatgtactttcttatttctgggaagccacaaacatcagataaaaaactttattattgaactataactcataagaaatctaaaagagggcaccaccaatgatgggttgttggtagaacactgctgggtttgtcaaagcaagttggttgaatggcagcaattgttgcagttgtaagagggtgccagcgttaggcgcaacgtgctggtagaacggcaacaactgtggttgtgtcaagaaggtagcagggctcacaccagctagctggctgaatggtagtagttgttgctgctgtaaataagcaggagagttcaatgctgctagttggttgaatggaagaaattgctgggggtaggcagcaggtagctggctgaatggtagttgttgttgttgcaaataagaagcagagttcaatgaacctagttggttgaatggaagaaactgctgttgctgagagtaggcagcaaggtttgctagcacaagttgttgtagttgttgtgccctgatgttttgtgccaataa

SEQ ID NO: 9268 - DNA, 523 bp, Zea mays
  Clone ID: LIB3061-083-Q1-N6-C11
gtactgtgataccactcgaaaactagcttaacaatctcgcagtttctttttttttggtcatatatgaactgaattattagttccacacaatttcccagcttctggttcggcatgtagataaactgaattattaagcttcacacgattccccagcttctggtccggcatgtagatgaactgaattacagtacatgttattatggccactctacgcagatggaacccgaacgggaaaccagatctgtcagtactcagttgccgccagcgcagaggagggcgtcaaccttgtccttgaggtgcgcctcgtcgtccccgaggcgggcggcggcggcgccatcctcccagcggatcagcgttggcacgcccttgagcccgaacctggggtccaccctccacgggtgcgccgggtcgcgccaagtgggcttgtccccgacgtaggcgcgcaggagcaccgcgtccttgccctccagtgcctccagccgctcgtagatcaccggctccgccacgttgcagtcggggcacc

SEQ ID NO: 9269 - DNA, 452 bp, Zea mays; identical to SEQ ID NO: 7817
  Clone ID: LIB3061-083-Q1-N6-C5

SEQ ID NO: 9270 - DNA, 539 bp, Zea mays
  Clone ID: LIB3061-083-Q1-N6-C7
agaaatgtactttcttatttctgggaagccacaaacatcagataaaaaactttattattgaactataactcataagaaatctaaaagagggcaccaccaatgatgggttgttggtagaacactgctgggtttgtcaaagcaagttggttgaatggcagcaattgttgcagttgtaagagggtgccagcgttaggcgcaacgtgctggtagaacggcaacaactgtggttgtgtcaagaaggtagcagggctcacaccagctagctggctgaatggtagtagttgttgctgctgtaaataagcaggagagttcaatgctgctagttggttgaatggaagaaattgctgggggtaggcagcaggtagctggctgaatggtagttgttgttgttgcaaataagaagcagagttcaatgaacctagttggttgaatggaagaaactgctgttgctgagagtaggcagcaaggtttgctagcacaagttgttgtagttgttgtgccctgatgttttgtgccaataaatgcaccaaagggtaact

SEQ ID NO: 9271 - DNA, 405 bp, Zea mays
  Clone ID: LIB3061-083-Q1-N6-C8
atcgggataaatcccaatcaattttttggttttttctgggaaacccatggcgggttgggggcccccttggcggggccctctcatttggaatctaaaaggggggccccccaacgatgggttgctgcaagggagggttcatcaaagagaaccgggtgtttgggaacaattgttgttgctgctgccggaagggagccaccaatgggttagcccctgccaatgggttaagtaactggtggcgctgttggggggcccccccaaagtttgacccaacccgttggttgaatggaaacaactgttgtaagtaggcaacagggtttgccccaacttgctgggtcagagctgggacaatttggtgcaacaaccggtggtggaggtccctaggggcattgcccaccgggagggggc

SEQ ID NO: 9272 - DNA, 266 bp, Zea mays
  unsure (1)..(266): unsure at all n locations; Clone ID: LIB3061-083-Q1-N6-C9
aggcggggcggnctagcgatttattcatccattcaacctcatcacaatctgttcctttctactgtcacttgtgataattaactaaaagncacccaccgaccgcggtgtaattgtgtacataacctcaatgggatacacagacatgccgccgcagagcaaaacacgtcgcagatcccctctctctctaactccgcccctctgtctccctctggtcccgcaaaaactaggcgttggaggcacgttagcgccaggttttcctcccatgc

SEQ ID NO: 9273 - DNA, 458 bp, Zea mays
  Clone ID: LIB3061-083-Q1-N6-D1
agaaatgtactttcttatttctgggaagccacaaacatcatccaaaaaacttcattattgaagtataactcataagcaatctaaaagagggcaccaccaatgatgggttgttggtagaacgctgttgggtttgtcaaagcaagttggttgaatggcagcaattgttgcagttgtaagagggtgccagcgttaggcgcagcgtgcaggtagaacggcaacaactgttgttgtgtcaagaaggcaacagggctcacatcagctagctggctgaatggtggtagctgttgctgttgtaaataagcagcagagttcaatgctgccagttggttgaatggaagaaattgctgggggtaggcagcagctagctgactgaatggtagttgttgttgcaaataagcagcagagttcaatgcacccagttggttgaatggaaaaaactgctgttgctgagagtaggc

SEQ ID NO: 9274 - DNA, 490 bp, Zea mays
  Clone ID: LIB3061-083-Q1-N6-D10
aaatctcaatcaatatattgattatttctaggaaacacatgtcggtttgagggccccattgtcgagtccatctcatttgtaatctaaaagaggcacctccaacgatgggttgctgcaaggcagggttcatcaaagagaactggttgtttggcagcaattgttgttgctgctgcaggaaggttgcgaccaatgggttagccactgccaatggattaagtaactgttgtcgctgttgtaggtccccagcagagtttgacacagccagttggttgaatggaagcaactgttgtaagtaggcagcagggtttgccacagcttgctgagtcagagctggtacaatttgttgcagcaactgttgttgtaggtacctaggtgcattgcccaccgcgagcgggctagatgaaagtagttgtaggtagacggcagggttcaccatggctagttgactgagcactggcataaactgttgcaactgttgttgttgcttgta

SEQ ID NO: 9275 - DNA, 460 bp, Zea mays
  Clone ID: LIB3061-083-Q1-N6-D11
atcaagggttccccttcccttttttttcaaaagttcggtgcccgaatgggcaaattaatttaaacctctggtttcagttcccgaagggcgtccgtgctttagggctaccggggaccaatagcttggcagcccattgcctttttctggggccagctcctagcagtcgattcgttcttcacccgatcagttttgtacaagtgagcaatttttgggaccaacggatcgtcagggtttgggtccccccgaagggaccaaattgggagggggaccttaaaaactggcagggcagggccccattgctccttcaagatatcaaaacaaatgcccccgttgctggtgattttcgggtgggaaaccttcgtcttgaatgcaaccctcgggggtttgaatgggtagccccggggaaagggaatattgcccaaaaaaccccccccgcgtgtgggctttctgatggccccat

SEQ ID NO: 9276 - DNA, 370 bp, Zea mays
  Clone ID: LIB3061-083-Q1-N6-D2
gggaaagggccttttttttttggggggggccccaacctttgggcaaaaaacttttttttgggccttttcccccatggaaatttaaagaggaggggccccccaaagggggggtgggggggaaaccccgtggggtttgtcaaaacaaggggggtggttgggccaaattggtgcctttttaaaagggggccaccttttgggccccgggggtgggtaaacggcaaaaactggggggtttttaagaaggggggggggttcacaccaactatcggggtgaaagggatcagatggggttgctttaaataacggggaaagatcaaatggccccacatggtgtctttggaaaaataattgggggggtggccaaaaggat

SEQ ID NO: 9277 - DNA, 511 bp, Zea mays
  Clone ID: LIB3061-083-Q1-N6-D4
atcgagataaatctcaatcaattttttgattatttctaggaaacacatgtcggtttgagggcccccttggcgagtccatctcatttgtaatctaaaagatggcccccccaacgatgggttgctgcaaggcagggttcatcaaagagaactggttgtttggcagcaattgttgttgctgctgccggaagggagccaccaatgggttagccactgccaatgggttaagtaactgttgtccctgttgtaggtccccaccaaagtttgacacaacccgttggttgaatggaagcaactgttgtaagtaggcagcagggtttgccacaacttgctgagtcaaagctggtacaatttgttgcagcaactgttgttgtaggtacctaggtgcattgcccaccgcgagcgggctaaataaaaatagttgtaggtagaccgcagggttcaccacggctagttgactgagcactggcctaaactgttgcaactgttgttgttgctggtatgcaactacctt

SEQ ID NO: 9278 - DNA, 532 bp, Zea mays
  Clone ID: LIB3061-083-Q1-N6-D7
aaatgtcaatcaatatattgattatttctaggaaacacatgccggtatgagggcaccattatcgattacatctcatatgtaatctaaaagaggcacctccaacgatgggttgctgccacgacaaggcagggttcatcaaagagaactggctgtatggtagcaattgttgctgctgtaggaaggcagtgaccaatgggttaggcactgctagtggattaagtaactgttgtcgctgttgtaggtacgcagcagagttcgacacagtcagttggttgaatggaagcagctgttgcaagtaggcagcagggtttgccacagctagctgagtcagagctggtacaatctgttgcagcaattgttgttgcaggtatgtaggtgcattacccacaacgagagggctagatgaaagcagttgttgctgttgtaggtaggcggcagggttcaccatggctagttgactgagcgctggcagaaactgttgcaattgttgttgttgttggtatgcagctacgtttgccagagcaagtgggtt

SEQ ID NO: 9279 - DNA, 524 bp, Zea mays
  Clone ID: LIB3061-083-Q1-N6-D8
aacgaaagccccatcaagctggcctgttatattaaactggaatcacagtttcgggattattgaaaccacagcagagcagaaacggaagagaagaccccatatatatgttcttcgggatactgcgctacgcagcgttcgattacaactcaacataaatacgattggtctgcatcatgtccggtggaagcccagcatgtccggtggaaattaagccatggccacgatccgactgaatccacaggatcagacttcagctgcttccttcacttgtccacttggtattgtttctcttctttataatagcggttgaaacccaatgtatccttgatctcctgaaaagatggcaggacgctaggtggaggtacaccgccgtcttttatcgcaactagagcatcctgcattgcacgcattgataccccaactaaggataaaggatatactacaagcctgaaaccaatttcctcaagttcagcagggctcaaatatgggagttttaccaccaccttctaacatgtttgccatct

SEQ ID NO: 9280 - DNA, 418 bp, Zea mays
  Clone ID: LIB3061-083-Q1-N6-D9
gggggggggccttttttggttaaaaccgttttttgggtttaggggggggggggccacatttttttattggcaaacccccctaagggcatgggggggggggggtttttttggggggtttgggggggccaggccccccatggggggggggtttggggctggtgccaaaattgcccccgcccttgggggggctgggggggccccacaaaaccaaaagggggggggggggggcccccccgggtttttggttggaaccatgttgtaaattgttgggggaatgttttggggctaaatcggccaaagacctggaaaacattggggtggcaatacctggggttttctggggggtttcaaacggggtgggaaaaaggctttcccaaaggggtgcccgggggccttaggaattaaagaaaatttttta

SEQ ID NO: 9281 - DNA, 388 bp, Zea mays
  Clone ID: LIB3061-083-Q1-N6-E10
ggggggggccaaaggggccccaaaaaaaaggggccgggggggggggtttgggggaaaaaccgggtttgggggggggccccccaaaggccgggggggcccggggaaaaaaaaggggaaaaaaaaaaaaaaaaggggggggggggccccctttttggggttcgggggggggggggccgggcctgttggaatttggttttttgggggcaaaaaaaaaggcccccgggggggggggggggttcttaaaagggttttccccgggggggggggccccggaattttttttggggcccaagcccctaagggggggttgggggcccccccaaaaattgtttttgccccccggggaaaaatttgggggggtaaaaaaaaaacacggggtttttttttt

SEQ ID NO: 9282 - DNA, 530 bp, Zea mays
  Clone ID: LIB3061-083-Q1-N6-E4
cgagaaagcattcatcttcttgctgtgcttattattcagccatatgagctagctacaagctcattcctcatgcactatgctcttcgcagttacttggagggcatcgttccgccgccgagaatccaggggcattcggcgacgccgctgatggtggccaggttgcactcggcctccgtgacgagggtggcggcgaatcccctctgcacctcccgcgggcagcccggcaggtcctctaggcggccctccagctgcgcgtccgggcccggcgggatcgcgccgtccatgaggatgctcagcgccgtgcaccggcagtacgccgggatgtccgccagctcccggcagcatctcctcttcagctccggccacgggaggcgcggcccgatgccgcaggtccggctggtcacgtaccagcggcagctcgggagcgggttgtgcgggatggcccaccccggcacgcaggaggtcccggcgctggcgctggcagccgcgagcacggagagcaggacggcggctgcgaggatgaggcggcg

SEQ ID NO: 9283 - DNA, 467 bp, Zea mays
  Clone ID: LIB3061-083-Q1-N6-E5
agcttgcttcccaattttagggaaaataatttttgaacacccttgcaggccaatagcacattagaatttggaaatgtaactttttatttttaggggggcacattcattagccaaaaaacttcatttttgaattacaactaataagcaatctaaaagatggcccccccaatgatgtgttgttggtagaaggctgctgggtttgtcaaagcaagttggacaaagggcagcaactgttgcagttgtaagagggttgcggggttagccacaaactggtggtagaacggaagcaattgttgttgtttcaaaaaggaagtggggcttgttgtagctagctggccaaatgggagtagtatttgctgctggaaataaacagaggggttcagtgcggccaattggttaaatggaaaaaattgttgctgctgaaagtaggcagtaactaactggctgaatggtagtagttgttgttg

SEQ ID NO: 9284 - DNA, 543 bp, Zea mays
  unsure (1)..(543): unsure at all n locations; Clone ID: LIB3061-083-Q1-N6-E8
aatctagnaaagtactttcttatttctgggaagccacaaacatcagacaaaaactttattattgaactataactcataagaaatctaaaagagggcaccaccaatgatgggttgttggtagaatgctgctgggtttgtcaaagcaagttggttgaatggcagcaattgttgcagttgtaagagggtgccagcgttaggcgcagcgtgctggtagaacggcaacaactgtggttgtgtcaagaaggtagcagggctcacaccagctagctggctgaatggtagtagttgttgctgctgtaaataagcaggagagttcaatgctgtcagttggttgaatggaagaaattgctgggggtaggcagcagatagctggctgaatggtagttgttgttgttgcaaataagaagcagagttcaatgcagctagttggttgaatggaagaaactgctgttgctgagagtaggcagcaaggtttgctagcacaagttgttgtagttgttgtgccctgatgttttgtgccaataaatgcaccaaaggtaactg

SEQ ID NO: 9285 - DNA, 494 bp, Zea mays
  Clone ID: LIB3061-083-Q1-N6-F11
cgagataaatctcaatcaatatattgattatttctaggaaacacatgtcggtttgagggcaccattgtcgagtacatctcatatgtaatctaaaagaggcacctccaacgatgggttgctgcaaggcagggttcatcaaagagaactggttgtatggcagcaattgttgttgctgctgcaggaaggtagcgaccaatgggttagccactgccaatggattaagtaactgttgtcgctgttgtaggtacccagcaaagtttgacacagccagttggttgaatggaagcaactgttgtaagtaggcagcagggtttgccacagctagctgagtcagagctggtacaatttgttgcagcaactgttgttgtaggtacgtaggtgcattgcccaccgcgagcgggctagatgaaagtagttgtaggtagaccgcagggttcaccatggctagttgactgagcactggcataaactgttgcagctgttgttgttgctgg

SEQ ID NO: 9286 - DNA, 411 bp, Zea mays
  Clone ID: LIB3061-083-Q1-N6-F12
ccaaaaaatttttttcccttattttttttcccttcccattaaaaggggtaattaggggaatgggtaaaacggccccccaggggggggggggaaactcctttcctaatggccgttaaaggggaaaactagggggcttgggagtttgtaaggggctcctttccattttttccaaagaaaaaatttccccaaaaagaaaaaccccccggcatttttttttaaaggggaggaacctggttttttaaatttaaggcccaaaattccccaaagttggggggttaccggggccccattaaagcccgaaagccccccctggggttttttttccaaaaaaaacttcaaaaccaacccctttttccccgggacccggggaaagggccccacctgccttatttgggggaaaaattttttttt

SEQ ID NO: 9287 - DNA, 157 bp, Zea mays
  unsure (1)..(157): unsure at all n locations; Clone ID: LIB3061-083-Q1-N6-F2
aacccccaaagggggggggcctttttgggttaacgccgttttccccaaaaaaggggggggggccataggggccccccccttggggggggnccccgntctcgggggttgtcgggggggggccccccgtttttcaagggcgggggggggggggccctgg

SEQ ID NO: 9288 - DNA, 464 bp, Zea mays
  Clone ID: LIB3061-083-Q1-N6-F3
gcccgaacaaatccttaagccacgtgaccaatggaatgggttgcattgggaaaatttagtaaagcttttgacctactttgggtttaaacccacccaaacgcttccaatgcatttgggttgggatgaaaaaaaacaagcctggttttcctggcgcctttcaaaaaaaaaaaaaaaaaaaaaacccggtgaagatttgtttgaccccgttcccagactcaaagacaacctaagcagactggtggaaataactgcccgaacaaatcctcaagggtttttcgctttaaaaaagtccatttccgggtgctcaaacatgaactttttgaaaattttttgcttttgcatttcatcacttggcggaaggcccatttgtttttggggctggtcaaacattattttttccacagtttgtctagtttcaggatccaaatcaaaaagtttggtgttctcaggttccaccttttggg

SEQ ID NO: 9289 - DNA, 506 bp, Zea mays
  Clone ID: LIB3061-083-Q1-N6-F4
cacaaaagcgcctgtttcattgacgcatccaacgaggcggggcggactagcgatttattcatccattcaacctcatcacaatctgttcctttctactgtcacttgtgataattaactaaaaaacacccaccgaccgcggtgtaattgtgtacataacctcaatgggatacacagacatgccgccgcagagcaaaacacgtcgcagatcccctctctctctaactccgtccctctctctctctccctctggtcccgcaaaaactaggcgttggaggcacgttagcgccaggttttcctcccatgcttacgcagccacagccgtccacaccttggatgctcacagctcgtccttgacgggctcggcggcggctgccttctcggatgccggtggcccctgggtggtggtggtggtggcggcccctgcggtctccttgctcttcttgatgaagtcgacgatgtcgtccgccgtcctgccgctgtcgtaggatgtcaccttcccgctcggg

SEQ ID NO: 9290 - DNA, 494 bp, Zea mays
  Clone ID: LIB3061-083-Q1-N6-F6
atcgaacacccttggagaccaatatcacattaaaatctggaaatgtaacttcttatttctggttggccacatacatcatccaaaaaactttattattgaattacaactaataagcaatctaaaagagggcaccaccaatgatgtgttgttggtaggaggccgctcggtctgtcaaagcaagttggacaaagggcaacaattgttgtagttgtaagagggttgcggggttagccgcaaactgctggtagaaaggcagcaactgttgctgtgtcaagaaggaagcacggtttgctgcagctagctggctaaatggtagtagtatttgctgctgcaaataagcagcggggttcagtgcggccaattggttaaatggaagaagttgttgttgctgagagtaggcagtagctagctggctgaatggtaatagttgttgctgcaaataagcagcagggttcagtgtagacagttggttgaatggaagaaattgttgttgc

SEQ ID NO: 9291 - DNA, 358 bp, Zea mays
  Clone ID: LIB3061-083-Q1-N6-F9
actatcaatgtttctccttccattatatatcaaaagttcgatgcacgaatggacaaattaatttagacatctggtttcagttacagaaggcagtacgtgctttaggtctacgagagaccaatagcttgtcagcccattgcatatttctgagtccagctcctagcagtcgattcgtacttcacgcgatcagtcttgtacaagtgagcaatctctgggaccaacggatcgtcagggtttgggtccgtcagaagggaacaaattgagaggaggaccttagaaactgtcagtgcagggctccattgctccttcaagatatcaagacagatgctcccgttgctgttgatattcggatggtaaa

SEQ ID NO: 9292 - DNA, 437 bp, Zea mays
  Clone ID: LIB3061-083-Q1-N6-G1
atcgaactcccttggagaccaatatcacattagaatctggaaatgtaacttcttatttctggttggccacatacatcatccaaaaaactttattattgaattacaactaataagcaatctaaaagagggcaccaccaatgatgtgttgttggtaggaggccgctgggtctgtcaaagcaagttggacaaagggcaacaattgttgtagttgtaagagggttgcggggttagccgcaaactgctggtagaaaggcagcaactgttgctgtgtcaagaaggaagcacggtttgctgcagctagctggctaaatggtagtagtatttgctgctgcaaataagcagcggggttcagtgcggccaattggttaaatggaagaagttgttgttgctgagagtaggcagtagctagctggcttaatggtaatagttgttgctgc

SEQ ID NO: 9293 - DNA, 250 bp, Zea mays
  Clone ID: LIB3061-083-Q1-N6-G10
gaaaagaatataaaatagtttttatgtaaatgactgactaaataataatttagaggatgctcttagatgatttcgtctatctgttgtgttcgctgcaatcaagatcatgtatcgaccaacaacatgctaatccttacttacagataaggaggatagattttgcagaaaccaaacagcttaaatctcctaacctagctaaacccacagacccactgacgaacattcaatcccgagagcaccaaaaccggcg

SEQ ID NO: 9294 - DNA, 406 bp, Zea mays
  Clone ID: LIB3061-083-Q1-N6-G12
aaaaatgttctttcttatttttggggagccacaaacatcagataaaaaactttatttttgaactttaactcataaaaaatttaaaagagggcaccaccaatgatgggttgttggtagaacactgctgggtttgtcaaaacaagttggttgaatggcaacaattgttgcagttgtaaaagggtgccaacgttaggcgcaaccggctggtagaacggcaacaactggggttgtgtcaaaaaggtaacagggctcacaccaactagctggctgaatgggagtagttgttgcttctgttaataaaccggaaagttcaaagcctctagttggttgaatggaaaaaattccttggggttggcagcaagtccctggctgaatgggaattttgttgtttccaataaaaaacaga

SEQ ID NO: 9295 - DNA, 538 bp, Zea mays
  Clone ID: LIB3061-083-Q1-N6-G2
agataaatctcaatcaatatattgattatttttaggaaacacatgccgctatgagggcaccattatcgagtacatctcatatgtaatctaaaagaggcaccaccaacgatgggttgctgccacgacaaggcagggttcatcaaagagaactggttgtatggcagcaattgttgctgctgtaggaaggcagcgaccaatgggttagccaccgctagtggattaagtaactgttgtcgctgttgtaggtacgcagcagagttcgacacagtcagttggttgaatggaagtagttgttgcaagtaggcagcagggtttgccacagctagctgagtaagagctggtacaatttgttgcagcaactgttgttgcaacaactgttgttgcaggtatgtaggtgcattgcccatagcgagcgggctagatgaaagaagttgttgctgttgtaggtaggcgatagggttcaccatggctagttgactgagcgctggtagaaactgttgcaactgttgttgttgttggtatgcagctacctttgcca

SEQ ID NO: 9296 - DNA, 254 bp, Zea mays
  Clone ID: LIB3061-083-Q1-N6-G6
ggttggtctctttcttttttcaaaaaactttttttttgttttttctcttttttttatttttgaagagggccccccctattttggggggggggccggccggctcccaaaaatgtttttggggggtggcccccgggcaacaattgtaaaagggggcccccccctgcggggtttgccggaaacgggctgtggatggctccaaacggggggggcccagggaaaaaacccggcttgctggaaaaaggggggggggtggc

SEQ ID NO: 9297 - DNA, 524 bp, Zea mays
  unsure (1)..(524): unsure at all n locations; Clone ID: LIB3061-083-Q1-N6-G8
aaaaatcccaaaccagcacaaactttaaccagttcatagcaaggtttaccagatcaacatcgacactagtaaaagggcaaactcttccataggcaaattcaagggctaaacagttctgtctccaggcaagcacactcacttgaagcatttcgcgtcaagcaaggcctcgccctcaaagggctcctggtcctcaatcatcgcattgacacgctccttctgggcctcatcagagatgtccaccttggtccactcgtagagctccatgtcatagacctcgtccattacaaacttgggaacatcctggccacggaagagccaaaggcccttcagcttgaagggtggctcagagcctatcacgagcatcttcccaaaggcgtacttgcggcacaggtccatccgctgcaggaatccaccaaccttgttcagggtcacaaaggagacggngttctcatcattgtacttgtagtcacagaaccacaaagagtagccctctgggtcgtacatgtcccaaaaacctttgatgg

SEQ ID NO: 9298 - DNA, 534 bp, Zea mays
  Clone ID: LIB3061-083-Q1-N6-G9
acactataaggatgatttatagcttgcttcccaatcttagggaaaataattatcgaacacccttgcaggccaatagcacattagaatttggaaatgtaacttcttatttctaggaggccacatacatcagccaaaaaacttcattattgaattacaactaataagcaatctaaaagatggcaccgccaatgatgtgttgttggtagaaggctgctgggtttgtcaaagcaagttggacaaagggcagcaactgttgcagttgtaagagggttgcggggttagccacaaactgctggtagaacggaagcaattgttgttgtttcaaaaaggaagtggggcttgttgtagctagctggccaaatggtagtagtatttgctgctggaaataagcagaggggttcagtgcggccaattggttaaatggaagaaattgttgctgctgagagtaggcagtagctagctggctgaatggtagtagttgttgttgttgtaaataagcagcagggttcagtgtagacagttggttgaatggaa

SEQ ID NO: 9299 - DNA, 455 bp, Zea mays
  Clone ID: LIB3061-083-Q1-N6-H10
gggcaaacgttcgctttaaaatcagcaagacagtttcctaacagcccaccattctttccgttgggtgtgacgtgcctagttgctaatcctctgaaagaaaagagggggcccatttccttgggcaggtcaacagatactgggaccttgctgtcgttaaagattggccacctcccgtctttgaggacatgagctacgtagtgcccccagtgggtagaggggcccatttgggtcacgaacgccatcagcttgtatttgccacttccatttggaatatttgtgtcatcagcatttacattggttgtggaagaatcagcaaatgctgaggtagatgcttcggggtggctgaaaatccagtctgtagctttctcgattttaccactagaagcttttagggcctttatggcaatgtctttctgggatcccaaggagatgagagttttgaacacttgttttgt

SEQ ID NO: 9300 - DNA, 152 bp, Zea mays
  unsure (1)..(152): unsure at all n locations; Clone ID: LIB3061-083-Q1-N6-H11
gagttaaaaaagggaagaaaaaaaaaaagaaaggaaaggaaagctttggggggagaagccanaaaaaaanttttgnnggccggtttgctggtgaggggccccagcccacaaaaaaaaaaaaaaaaaaaaagaangggggggggagggggggg

SEQ ID NO: 9301 - DNA, 587 bp, Zea mays
  unsure (1)..(587): unsure at all n locations; Clone ID: LIB3061-083-Q1-N6-H5
cccggggggggggggggggnngnnnnnngngggggggggggggnnnnnnnnnnnnnngggngggggggggggggggngngggggggnggggggggggggggggggnnnnggnggggnggggggggnnngnggnngggggnggggggggggggggggggnnngnnnnnggnnggnggnggnggggggggggggggggggggggggggngggggggggggggggggggggggggggggggggggggggggggggngggggggggggggggggggggggggggggggggggggggggggggggggngggggggggggggggggggggggggggggggggggggggggngggggggggggggggggggggggggggggggggggggggggggggggggggggggggggggggggggggggggggggnggggngggggggggggngggggggggggggggggggggggggggggggggggggnggggngggggggggggnggggggggnnnnggggggggggnggnggggggggggggggggnggggggggggggggggggggggggggggggggggggggngggggggggg

SEQ ID NO: 9302 - DNA, 269 bp, Zea mays
  unsure (1)..(269): unsure at all n locations; Clone ID: LIB3061-083-Q1-N6-H7
acccagcgagcgggggcgggcaancagnncancnnncgggcaggacnccnccacggggaaacaaggggccccgagggccangannacgccaggggggcggacacgaacncancaggggcagccagcagcagggggggggcggacngaancagggggaacncacgcgccgggacgccggggggcacccagnnncncgggnaacgggcagaggcgnnnaagccnncgcgcggggcggccgcancccggcagggcncaggcccggcgacaaa

SEQ ID NO: 9303 - DNA, 561 bp, Zea mays
  unsure (1)..(561): unsure at all n locations; Clone ID: LIB3061-088-Q1-N6-A1
ggggggggggggggggggggggggggggggggnggggggggggggggggggggggngggggggggggggggggggggggggggggggggggggggggggggggggggggggggggnnngnnnnnnnnnnnnnnnngggggggggggggggggggggnnnnnnnnnnnnnnnnnnnngnnnnnggnngggggggggnngggggggggggggggggggggggggggggggggggggggggggggggcgggggggnggggggggggggggggggggggggggggggggggggggggggggggggggggggggngggggggggggggggggggggagggggggggggggggggggggggggggggggggggggggggagggggggggagggggggggggggggggggggggggggggggngggggggggggggggggggagggggggaggggggggggggggggggagggggggggggggggggggggggggaggggggggggggggaggagggggggggggggggggggggggggggggggggggggggggggggggggggggg

SEQ ID NO: 9304 - DNA, 458 bp, Zea mays
  unsure (1)..(458): unsure at all n locations; Clone ID: LIB3061-088-Q1-N6-A11
gggggggggggggggggggggagggaggggggggggggagcggggggggnggggnggcnggcccccccccnccccccccgggggggggggggggggggccccccccanncncgccccncccccccccccccccccaaaaacggggncnnccccccggcggggggcggcgggggggggcggcggcggggggggggggggggggcggcgggggcggggggggggggnggggggcggcgggagggcgggcggcgggggggggggggggggggggggggggggggggggggaagggnngggggggggggggggggggggggggggggggggcgggggggggggggggcggcgnggcggggggggggcggggagggcgggnggggggggggggaggcggggggggcgggggggggggggggggggccggggggggggggggggcgcggggggcgggggggggg

SEQ ID NO: 9305 - DNA, 562 bp, Zea mays
  unsure (1)..(562): unsure at all n locations; Clone ID: LIB3061-088-Q1-N6-A2
gggggggggggggggnggggnnnnaannnnnnnnggggggggggggnnnngggnnngggggggggggggggggggggggggggggggggggggggggggggngggggggggggngggggggggggggggggggngngnngggggnnngggggggggggggggnnnnnnnnngggggggggggggggggggngnnnnnnnnnnnnnngnnnngnnngggggggggggggggggggggggggggggggggnggggggggggggggggggggggggggggggggggggggggggggggggggggggggggaagggggggggggggggggggggggnggggggggggggggggggggggggnggngggggggggggggggggggggggggggggggggggggggggggggggggggggggggggggggggggggggggggggggggggggggggggggggggggggaggggggggggggggagggggggnggggggagggggggggggggggggagggggggggggagggggggggggggggagagganggggggggggaaggggg

SEQ ID NO: 9306 - DNA, 436 bp, Zea mays
  unsure (1)..(436): unsure at all n locations; Clone ID: LIB3061-088-Q1-N6-A3
ggggggggggggngggggnggggggggggggggggnnngggggggggggggggggggggggggggggggggggnggggggggggggggggggggggggggggggggggggggggggggggggggggggggggggggggggggggggnggggggggggggggngggggggggggggggggggggggggggggggggggggggggggggggggggggggggggggggggggggggggggggnnggggggggggggggggggggggggggggggggggggggggggggggggnnngnggggggggggggggggggggggggggggggggggggggggggggggggggggggggggggggggggnggggggggggggggggggggngggggggggggggggggggggggggggggggggggggnggggggnggggggggg

SEQ ID NO: 9307 - DNA, 62 bp, Zea mays
  Clone ID: LIB3061-088-Q1-N6-A4
cccccccccccccaccaacaaagaggacaactcaaaaaaaaaaaaagaagaacctttctctt

SEQ ID NO: 9308 - DNA, 332 bp, Zea mays
  Clone ID: LIB3061-088-Q1-N6-B1
ggcggggggttttttttttttttggggtttttttggggggggggggggggggggggttttgcgcctttgggttattctccgcctctggcccccttttctcccgggtttcctcgtttttttttttttttttttttgggttttttcctttttttttttttttcttcgttccctggtgttttttgtttttttttgcttgttctttctttttttcttttttgttgttgtggtttttttttttgtttctttttttttcttttttttttttttttttttgtttttcttgtttgtggtttcgcccccgccccctttttttttttttttttttttttttt

SEQ ID NO: 9309 - DNA, 382 bp, Zea mays
  Clone ID: LIB3061-088-Q1-N6-B11
ttggtcctctgcagcggccgccctgggttgtggggtgtgtttttaattttttttttcacatttaaaatctgggaaatgtaacttcttatttctggttggccccatacatcactcccaaaaactttattattgaattccaactaataagccttctaaaagaggccccaccaatgatgtgtggtgggtgggaggccgctcggtctgtcaaagcaagttggacaatgggcaacaattgttgtcgttgtccgagggttgcggggttagccgctaactgctggttggtaggctgcaactgttgctgtgtcttgatggtagcacggtttgctgctgcttgctggccttttggtcgttgtctttgctgctgcctctttgccgcggggtt

SEQ ID NO: 9310 - DNA, 495 bp, Zea mays
  Clone ID: LIB3061-088-Q1-N6-B3
gccctggaaactgaaagttccgatttttcacacgcatacaatagtacaaacatgaatccaaggacctggctcaccgatgcaatggaacacaaaacactcttacactattcacattacttgcaccacaaccgattattatagtagcattgaccaacagaaccgattatcagtagcgacgctgacaacataacaggtgctatgcgctgctcgctgggggctacatcgaggcattaacaaaggcggttacatctctaggccataacaagctctgcgagggtgagaacatgtagaagtatcttacacatctcaggaaggggaatggccattagcccattagatcaggaagaacggcgaggcaaaacgggaggccgagttgcttctgcgcatgttgaagccccggaggcgctccagattcatcacgtcagagtgttcaacaaagagatttacccttgggccataacgtctgacgaaccactccgaggtgttggagttgga

SEQ ID NO: 9311 - DNA, 486 bp, Zea mays
  Clone ID: LIB3061-088-Q1-N6-B5
gatcaacatactccgggggaaaccaagtactcgttcaaacagtctttgcgtttactagtcttgcacaaataaattattgagcatcatacatgtaccggtccattaatttgatgtccatacctatgacgtttgctcaaatcggacatacataatgtcagcaccaaagctatcggaagcaccaaaaagatcggctagatctcctatgaagaatgaagcgcatggtgttcttccacagcttagcgctttgtactgcctggacgagcggggccaaaatagttcgtcaccagacccataacagcaaacatgaaggccatagaaagctgcttcagatcgctctcaaagttcttcatgtttgccaacgactgagcgcagaagatgattgcgatccacgagcacaccttgtagcggagcatgacgccgaggacgccgaagaccacggcgaggaagcctgcatagtcgatgggtaggtcctggggcgacagcttc

SEQ ID NO: 9312 - DNA, 212 bp, Zea mays
  Clone ID: LIB3061-088-Q1-N6-B6
aggggggggtcctttttggttaacacccttttttgggttaaaccgttagggggggacatttttttgtttccaacccccctttatggcattgctgggggggggatcttttttgttttttgaggggcccctgccttacattggtggggggggtttttccgggggtttttttggcaccacccctcccgttgtttggggggttccccccccctcac

SEQ ID NO: 9313 - DNA, 514 bp, Zea mays
  unsure (1)..(514): unsure at all n locations; Clone ID: LIB3061-088-Q1-N6-B7
atatcgagataaatctcaatcaatatattgattatttctaggaaacacatgtcggtntgagggcaccattgtcgagtacatctcatatgtaatctaaaagaggcacctccaacgatgggttgctgcaaggcagggttcatcaaagagaactggttgtatggcagcaattgttgttgctgctgcaggaaggtagcgaccaatgggttagccactgccaatggattaagtaactgttgtcgctgttgtaggtacgcagcagagtttgacacagccagttggttgaatggaagcaactgttgtaagtaggcagcagggtttgccacagctagctgagtcagagctggtacaatttgttgcagcaactgttgttgtaggtacgtaggtgcattgcccaccgcgagcgggctagatgaaagtagttgtaggtagacggcagggttcaccatggctagttgactgagcactggcataaactgttgcagctgttgttgttgctggtatgcagctaccttcg

SEQ ID NO: 9314 - DNA, 515 bp, Zea mays
  unsure (1)..(515): unsure at all n locations; Clone ID: LIB3061-088-Q1-N6-B8
aaanatctggaaatgtaacttcttatttctggttggccacatacatcatccaaaaactttattattgaattacaactaataagcaatctaaaaggggcaccaccaatgatgtgttgttggtaggaggccgctcggtctgtcaaagcaagttggacaaagggcaacaattgttgtagttgtaagagggttgcggggttagccgcaaactgctggtagaaaggcagcaactgttgctgtgtcaagaaggaagcacggtttgctgcagctagctggctaaatggtagtagtatttgctgctgcaaataagcagcggggttcagtgcggccaattggttaaatggaagaagttgttgttgctgagagtaggcagtagctagctggctgaatggtaatagttgttgctgcaaataagcagcagggttcagtgtagacagttggttgaatggaagaaattgttgttgctgagagttgggagaaaggtttgccagagctacttggtttgatcacaggtagca

SEQ ID NO: 9315 - DNA, 367 bp, Zea mays
  Clone ID: LIB3061-088-Q1-N6-B9
gaacttaaaatatagatctctaatcttttattactggagagttgcacatatcagtttgagaaatttattattacagtttaaagcctaaaaaatctagaagatggtaccaccaatggtgggctgatgcaataaggtggtaggattcgtcaaagcgagttggctaaatggcagcaattgctgttgttgtaagaaggcgacaatgtttgccacattctgtgggtagaatggcagcaattgttgttgttgcaagaaggcgttaatgtttcccacaacctgtgggtaaaatggcagcaattgttgttgttgcaagaaagcaccaatgttttgcaacaactttgttgacggaatggcatcaactgtttgcctc

SEQ ID NO: 9316 - DNA, 447 bp, Zea mays
  unsure (1)..(447): unsure at all n locations; Clone ID: LIB3061-088-Q1-N6-C1
ggggggggggggggggggnnnggnggggggggggggggggggggggggnngggggggggggngggggggggggggggggngggggggggggggggggggggggggggggggggggggggggggggggggnggggggggggggggggngggggggggggggggggggggggggggggggggngggngggggggggggaggggggggggggggggggggggggggggggggggggggggggggggggggggggggagggggggggggggggggggggggggggggggggggggggggggggggggggggggggggggggggagggggggggggggggggggggggggggggggggggggggggggggggggggaggggggggggaggggggcgcgggggggggggggggggggggggggggggaagaggggggggagggggggaggggg

SEQ ID NO: 9317 - DNA, 538 bp, Zea mays
  Clone ID: LIB3061-088-Q1-N6-C5
aaaaccaaaactttattatgatgcatatattattggtcataccacacatgataatgtgtgtcgtcttactgcattattacatatatagatagagagggatggatagaggagatttcccaaatatcatgaatcagtagtagggcggaatggcagcggagacgccacaggggttggtgcggtagctgggcagctggtactggtactggtagagtccacccatggccggcatgttctgcgccatcatcatggccatggggttgagaccctgggctgccagcagctgctgctgctgctgcatcagagctggctcgtacaggctgctgctggcggcagcggcacgctcaagctgcatcatcatctgcagctgctgcgcgacggactgcacgtccatcatcctcatctgctgctggcagcactgttgccggagcggctggtacatggcgctcgtctgcccacacccggcgtagtagggcgccgccgccagcgggctgcactgcggctgcctcaggtactccgcgtaggggtacagcccgccggc

SEQ ID NO: 9318 - DNA, 519 bp, Zea mays
  Clone ID: LIB3061-088-Q1-N6-C6
gcttgccattcttttccctttatacatatacatacgtacgtgtatggcattactatgtaataagtcatggaatgtttattttaagcatgcatgcatctttatctatcgctcttagcgtggcaagagggctagctagagcagcgttgtgtcgacacgccacaccatgatttgagaacggttggaggagtaatcgtcgtctgcagggatgatggccctcgttttgttgtactccgccatcaccaacctttgcacgaacttgatcgaatcctgcgactggtcgggctcggatgtggggaagcggtcccacctggaagggtcccagaggaggtcactggcgaaggcaaagccgtggacggagtcgtcgaccgtcactgggggcgctgccgctgccgctgccgccaataatgtggagtcggaggcggagaaccatgcacatgctgtggatgctgcgctggtgctggtgggtggtgttgcagacgacgacgggcccttccacggccaccctcttctcctgctccc

SEQ ID NO: 9319 - DNA, 508 bp, Zea mays
  Clone ID: LIB3061-088-Q1-N6-C7
cgagataaatctcaatcaatatattgattatttctaggaaacacacgtcggtttgagggccccattttcgagtccatctcatttgtaatctaaaaatggcccctccaacgatgggttgctgcctcgccaagacaggattcatcaaagagaactggttgtttggcagcaattgttgctgctgtaggaaggcggcgaccaatgggttagccactaccaatggattaagtaactgttgtcgctgttgtaggtccccagcaaagttcgacagagtcagttggttgaatggaagcagctgttgcaagtaggcaacagggtttgccacagctagttgagtcagagctggtacaatctgttgcaacaattgttgttgcaggtttgtaggtgcattgcccacagcgagcgggctagatgaaagcagttgttgttgttgtacgtaggcggcagggttcaccatggctagttgactgagcgttggcagaaactgttgtacctgttgttgttgctggtt

SEQ ID NO: 9320 - DNA, 519 bp, Zea mays
  unsure (1)..(519): unsure at all n locations; Clone ID: LIB3061-088-Q1-N6-D10
aagaatctagnaatgtactttcttatttctgggaagccacaaacatcagataaaaaactttattattgaactataactcataagaaatctaaaagagggcaccaccaatgatgggttgttggtagaacactgctgggtttgtcaaagcaagttggttgaatggcagcaattgttgcagttgtaagagggtgccagcgttaggcgcaacgtgctggtagaacggcaacaactgtggttgtgtcaagaaggtagcagggctcacaccagctagctggctgaatggtagtagttgttgctgctgtaaataagcaggagagttcaatgctgctagttggttgaatggaagaaattgctgggggtaggcagcaggtagctggctgaatggtagttgttgttgttgcaaataagaagcagagttcaatgaacctagttggttgaatggaagaaactgctgttgctgagagtaggcagcaaggtttgctagcacaagttgttgtagttgttgtgccctgatgtttt

SEQ ID NO: 9321 - DNA, 355 bp, Zea mays
  unsure (1)..(355): unsure at all n locations; Clone ID: LIB3061-088-Q1-N6-D2
agaaatgtcctttcttatttctgggaagccccaaacctccggcaaaaaactttnttnttggacttttactcattagaaatcttaaagagggcccccccaatgatgggttgttggggggacgctgctgggtttgtcaaagcaagttggttgaatggccgcaattgttgccgttgtcagagggtgcccgcgtttggcgccgcgtgctggttgaacggccccaactgtggttgtttcaagaaggtggccgggctctcccccgcttgctggctgcntggtcggnggtggtgctgctgtttattcgccggggagttcaatgctgcccgttggttggttggtataaattgctgggggttgg

SEQ ID NO: 9322 - DNA, 548 bp, Zea mays
  Clone ID: LIB3061-088-Q1-N6-D3
ccaaacaaaatcagttaatcattacattgtaacaaatagtgctgttttttctttacgttaccattaccactgtgtttgctgaaccgaacgccacctaaatggaaagcattatccaagccaaccaaacaaatggcactttcagttaaaccctgacaaataacgccaccagttgatttcatttgccttgacccatattagctgtctcactacgctcaaacaaagtgcaggtttacacaagcattgtcaggccacgctaacagccataataattaacaaaatcctcaccgagcacagcacatatcctgagaaagttgcaaaacaccaaatttatctcttctcacgttaagagaagcaggacctaatcgcccttgcgacggaaggagcacccctcggtgagcctggccttcccaccggttggttggcagagaacagtttggcagcctgggcacacaaccacagtctgggagtggctgaacacagtggttatgctgaaacagccctggcacttgacatccatgaagaaggagttgggggactggactagccgc

SEQ ID NO: 9323 - DNA, 551 bp, Zea mays
  unsure (1)..(551): unsure at all n locations; Clone ID: LIB3061-088-Q1-N6-D6
ggctactatcatgtngaaacatctcgttttcgtcgaacctgttctccatcctggggtcaggaaggtccccgaactcccgatgctcgatcgccttcgtcagaagggagcgggcccattcaaccagactttcatctcccaatggctgagaagcatcaacaggttttcttcctgtgatcagctccaaaagaacaaccccaaaagaatatacatcagactttgctgttaactttcctgacaatgcatactctggagccaaatacccaaatgtccccatgacacgtgtggtaacatgtgtattggaatcagccgctaaccttgcaagtccaaaatcagaaacctgagcttcaaagttgttgtccaacaaaatattggatgatttaatatctctatgaataatacgtggatgacaatcttcatggaggtaaccaatccctcgggctgctccagctgcaatcttaacccttgtccgccaatccagtgatgtttcacttacatggaggtggtaatatagtgtgttgttgggaacaaaatcataaacaagcattcgctgg

SEQ ID NO: 9324 - DNA, 490 bp, Zea mays
  Clone ID: LIB3061-088-Q1-N6-D8
ccctatatattattcctttccatttcaatggttcattcaggtcattgctcacactgccacccatggtgatgggtgacactccgttactcatcgccgctaaacgagtgaactagctatagccctatgggtagctagtcagcggctccattacattattactacagtccatagtttcctcagtggtagacaccgccggcagctgcgttgcaagggcagggacctggctgctgcagctgcagaccgcacatcgccgtcagctgctgcgctacctgggccgccatcagcgccgcgagctcgccctgcggctgctgctgcaggaaggactgctggaccacaccgtatgtcgcctggtaccggtgcagcggctccacctgcctgatctggtggcagcactgctgctgcagcgcctggcactgtggcgagccgtagggcgttcccgccgggctgcactggtgcctcaggaactcgacgcactggcccaggaacgggc

SEQ ID NO: 9325 - DNA, 516 bp, Zea mays
  Clone ID: LIB3061-088-Q1-N6-E10
atcaaaatgttcttccaagcaaaattaactttcctagttacaggtccttcgagttaaatctctgacaaatagaaagttataagcaaccaaaattataggtgcacttttctaactgatgaatacttcgttgccgttcatggagtggtgagtaaatgtaaacttaaaagctttcgcacagctcaaactaccaagagttcctccaggcaaaaccaccagctacaccgtcaactgcgacctataagtagatcagcgtctcttcttgcttgcctttgagctgctcttcgacgggctcgcgacaaggtagataaacagtccaacaaaagagacaacagacacaagtgacccgtatttcatcacaagcctcttagcccattcaaacttcttctctggaggtctctcagcgagaatatccagtgggaagatgggagttgagtatgcctcctgaagagctgtctttgtgggaacacggtatgtaatgatagctggtgaaccctggaacctgccctgtgttttggt

SEQ ID NO: 9326 - DNA, 484 bp, Zea mays
  Clone ID: LIB3061-088-Q1-N6-E11
gtaaatgcttggtagaattcccatgttcatttcaggttcttaaaccaacccacataaaataagcacttctacacttgtcccgaatttttagagagagagagagaggaacttgaatccagagaggaaaggccaattaacgaaaaatacagcctcaaaacccatgatccatcattgcaaaacccagttaatcatccttctattcctaaatacctgacacgcccgaacacagaacatgacttttaccaaacacaagcaacttgctaagcctctagctcctttgaactcttggaaacaagctcaatgggacattaaaattttcttaaacaacccaccacattcttaggttcaacccagacaccactgtcaacgggttgggcttacgaaaaatttaacagccctttttacccgccaacttttcaatttgtgttttcgggtcctgtggggcgacatcattttctttctcgccctttttctctcctgcttt

SEQ ID NO: 9327 - DNA, 385 bp, Zea mays
  Clone ID: LIB3061-088-Q1-N6-E2
agaaatgtactttcttatttctgggaagccacaaacatcagacaaaaaactttattattgaactataactcataagaaatctaaaagagggcaccaccaatgatgggttgttggtagaacgctgctgggtttgtcaaagcaagttggttgaatggcagcaattgttgcagttgtaagagggtgccagcgttaggcgcagcgtgctggtagaacggcaacaactgtggttgtttcaagaaggtagcagggctcacaccagctagctggctgaatggtagtagttgttgctgcttgtaataagcaggagagttcaatgctgccagttggttgaatggaagaaattgctgggggttggcagcaggtagctggctgaatggtcgttgtt

SEQ ID NO: 9328 - DNA, 548 bp, Zea mays
  unsure (1)..(548): unsure at all n locations; Clone ID: LIB3061-088-Q1-N6-E4
aaacgggcactgngaaattattggtctaaactttgatgtctgactgaactcaactgagctgaaacttctctatacacccagatatatgatatatccctgcacctacaatacaatcctcctctgctgtccctctcaaactcttctttattcacagccaattttaaccaccaatcccaagcctaaaacgctccgaatagacccagcagaccacccgtcaccttcaatccaatccctttcagcaccaacgaccgacaccgacagaccatgatttcacaaaattctgtggagacatgcagaaccaactatccttccgttccgtgctcttgaggcatgcagccatcaaccaacagtatttgctaagcatgacaatgaccacgtacactggtgaatctggcaagtggtagccatggccggaggggcgagagcagaaccaactatccttccgttccgtgcttctgagattctttctatcaatgcagcggagggggcggcggcgatccatattgaactgggtatactgatggccatggatggtgctgctgtggggg

SEQ ID NO: 9329 - DNA, 383 bp, Zea mays
  unsure (1)..(383): unsure at all n locations; Clone ID: LIB3061-088-Q1-N6-E6
gggaaaaaataagaaggggggttttttttttggggggggccccaaacctgaaaaaaaaaattttttttggggccttttccctaaaaaaaattaaaaagaggggcccccccaaaggggggggggggggaaaaccccggggggttttaaaaaaaaagggggggaaaggggaaaaaatggggggggggtgttggttggggggggggggcccccgggggggggtttttttttaaaaaaaaaacctttggggggggggggttttttgggggggccataaaaacctgggggggggggggtgccccccccggggaaatttgggggggggggtaatttttttttttttggggataaattttttggggggtatttnccccgcccctggggtt

SEQ ID NO: 9330 - DNA, 527 bp, Zea mays
  Clone ID: LIB3061-088-Q1-N6-E7
agctcttacagcattcttgtattgcagaaggtgaaatagcaagaaggtaccaaataaatagataaaagtgcacaggctaacagagctcaacagttcacacaataacagcaacgaccacaaacaaaacttgtaatgatgaaaactaggtattgctaaagcaggcgcaggatcgcatcatttcttcttggcagcagccttggtcaccttggcgccggttgggtccttcttctccacactcttgataactccaacagcaaccgtctgcctcatgtcacggacagcaaacctaccaaggggaggatacgctgagaatgtctccaccaccatgggcttggtgggtatcatcttcaccataccagcatcaccgttcttcaggaactttggctccttctcaagctccttgccagaccgcctgtcgatcttggtaatgagctcagcaaacttgacagcgatgtgggaggtgtggcagtccagcacaggggcatagccgttgccaatctgcccagggtggttcatgatgatgacct

SEQ ID NO: 9331 - DNA, 367 bp, Zea mays
  Clone ID: LIB3061-088-Q1-N6-F2
ggaacaatacttttttcttttcatttcaattgttcattcaggtcattgctcacactgacactgccacccatggtgatgcgtgacacattattactcaatcatcgccgctaaatgactcaactagctagctagccagcggctatactacagcacatagtttcttcagtgggggacaccgccggcagcagcgtaggggcatggagtcggctgctgcaggatggactggaggaccaagccgaagatcgcctggtaccggtgctgcggctccacctgcctgagctgctggcaacactgctgccgcaacgactggcactgaggcgagcagttgggcgtcgccgtcgggctgcactgatgcctcagaaactcg

SEQ ID NO: 9332 - DNA, 509 bp, Zea mays
  unsure (1)..(509): unsure at all n locations; Clone ID: LIB3061-088-Q1-N6-F4
ggaaatataacttcttatttctaggaggccacatacatcagccaaaaacttcattattgaattacaactaataagcaatctaaaagaggcaccgccaatgatgtgttgttggtagaaggctgctgggtttgtcaaagcaagttggacaaagggcagcaactgttgcagttgtaagagggttgcggggttagccacaaactgctggtngaacggaagcacttgttgttgtgtcaagaaggaagcggggcttgttgtagcttgctggccaaatggtngtagtatttgctgctggagataagcagaggggttcagtgcggccaattggttnaatggaagaaattgttgctgctgagagtnggcagttgctagctggctgaatggtagtagttgttgttgctgccaataagccgcagggttcagtttngacagttggttggttggaagaaattgttgttgctgtgagttgggggaaaggtttgccagagctacttggctggtcactggtagca

SEQ ID NO: 9333 - DNA, 283 bp, Zea mays
  unsure (1)..(283): unsure at all n locations; Clone ID: LIB3061-088-Q1-N6-F6
atataactatcagctcttacaggtaaaaccaatcaagccaagcaagtttaacaactcatctcataaaccaggttataggacacagcatgctcacacatggagccacgaaataccaaaacgatgcaaatctgccacacatgtgggagcaaatgaagggggcataacttaagactaggtngcgatgatgaacatggcgaaccctaaaagcacttgacgaacttggcagaaacctagaagcacttcctgtgaacaattgccgggccagactcatcgtactcctcct

SEQ ID NO: 9334 - DNA, 519 bp, Zea mays
  Clone ID: LIB3061-088-Q1-N6-F7
aggaaagtactttcttatttctgggaagccacaaacatcagacaaaaactttattattgaactataactcataagaaatctaaagggggcaccaccaatgatgggttgttggtagaacgctgctgggtttgtcaaagcagggtggttgaatggcagcaattgttgcagttgtaagagggtgccagcgttaggcgcagcgtgctggtagaacggcaacaactgtggttgtatcaagaaggtagcagggctcacaccagctagctggctgaatggtagtagttgttgctgctgtaaataagcaggagagttcaatgctgccagttggttgaatggaagaaattgctgggggtaggcagcaggtagctggctgaatggtagttgttgttgttgcaaataagaagcagagttcaatgcagctagttggttgaatggaagaaactgctgttgctgagagtaggcagcaaggtttgctagcacaagttgttgtagttgttgtgccctgatgttttgtgccaataa

SEQ ID NO: 9335 - DNA, 499 bp, Zea mays
  unsure (1)..(499): unsure at all n locations; Clone ID: LIB3061-088-Q1-N6-F8
gttcaaacaaagtcgccattagcttggttgcccaggggcatttctggcaaagacagggtccttcgctctggcaggggcaggacgccaggaccccgcgcaaanacagggtcctacggttcttttttttttacatgacatttgagtgacaactacatgacggagcaggcgttggggttctcgtcgctgaagatctgcggcgccatgggctgctgctggtgcaggtggtggtgcggcggcgcgtagaacggcggcgggtaggccggctggtaggcgtacgggtaccccggaggcggcgggtaggccggcggctggtagtaccctccagcgaacgggaaccgcgggtagtgcatgtacaggctggcggccgggtccttgtccttgtcgccggcctcgtccttcttgtcgccgtctccgtcgccgccggccttcttctcctcattcttctcgccgccggccttcttctcttcctcctccttgccggccttctttctcctcgctt

SEQ ID NO: 9336 - DNA, 532 bp, Zea mays
  Clone ID: LIB3061-088-Q1-N6-F9
aattattacagacctgattccgtaagttaatgaaagcccgaatgaacaagcagagacgacgtacaaagacggcacccccacaccaccaagcaaatgaatgaatcagacagacagacaatcaaagacacacgcgcagtacagggctctgcaacgacgacgaaccggctggctagtatttgtgctggaagtcctcggtggcgggcgtgggctggtacccgacgccgtgccggttgttggggaacaccatgaagacgtagcccgcgacggcgccgacgacgggcgggagcacggccatcatggtgggctcggcgagctccagcgccgggtagaggcaggcgacggtgtcggcgtcgaggagcgcgagggtggcgaagacgagcagcgagagcgcggcgtgcgcgaagtcgccggcgcggaggcggtacgccgacaggtcccgggcggcggcgtccgggtcgggcgtgaaggtgcgcaggccccgccgcgtcaccacgccgtagtacacgcgcccgtccgcgcccacgtagctgtc

SEQ ID NO: 9337 - DNA, 364 bp, Zea mays
  unsure (1)..(364): unsure at all n locations; Clone ID: LIB3061-088-Q1-N6-G11
ctgcacgcgtacgttttcttggntcctcttttgcggccgcccggtttggggggggggttttttttaatttttttttttttttttttttttttttttttttttttttttttttttttttttttttttttttttttttttttttgtgggggggggggccgggcccctttcttttttttccctccccncntttggggggccgcctggggcttttttttctccccccttttccctcctnttcccttgccccccccttgggcggggcccctctttcctgggggccccccccccgggtgggctccgccccccccgctggggggggcttcttcccttttccccgttccctcccggggggggggggccccct

SEQ ID NO: 9338 - DNA, 379 bp, Zea mays
  unsure (1)..(379): unsure at all n locations; Clone ID: LIB3061-088-Q1-N6-G2
aaaggggaaaaaagggggggctttttttttttttttttaaaaggggtataagggggatggggaaaaagggccccgccccccggggggggggggggaaaatttttttcaaaaaaaggggggttaaaggccaaaatggggggggggggggggggttttcccccaaaaaaatttttttggggggggggaccccccggggggcccggggggggggggggtggttgtttccggcccccccctcccgcggggggggggggttttttggggggcccaaaccccccggncgggggggtttttgggggtttttcgcggggggggctgggggcccaaccccaaatccccgggggcccgggggggggggtcccccccggggggtgggggg

SEQ ID NO: 9339 - DNA, 503 bp, Zea mays
  Clone ID: LIB3061-088-Q1-N6-G5
cgagtcgagaccaaagcattagatacgtgataggaataatttacatgtaagttaatgtaagtttacaatcaaagatggcagacaactcgaccgggtgcattgcaacgtgcaaggatgcagattagtggccatcactttgatgcagatgagcgagcttgccgacgacgatatgcatcgggccttctactggttacatgcatatgtgattcgagccttcataggatgacactcggcaaacagaggcgcaatgcatgtcgacaggcgaactcacccgggcttatgaattgaaacctcatcaaccccttaatccatatggattgggatagaactgaataagccctagatgggaattaatccaccatcttgctcgttgccggcaatcaagccatgccacctcttatcttgcattcaattcggagttggttgaacaagagatatggcaagttttcaggttttcaggtgaactgaactgttccatacctgcatgccccgggctctttaaa

SEQ ID NO: 9340 - DNA, 477 bp, Zea mays
  Clone ID: LIB3061-088-Q1-N6-G6
catccaaaaacttcatttttgaactttaactcataagcaatttaaaagggggcccccccaatgatgggttgttggtagaacactgttgggtttgtcaaagcaagttggttgaatggcaccaattgttgcagttgtaagagggtgccagcgtttggctttgcgtgcgggtggaacggcaacaactgttgttgtgtcaaaaaggcagcagggctcacatcacctagctggctgaatggtagtagttgttgctgctgtaaataagccgcagagtccaatgctcctagttggttgaatggaaaaaattgctgggggtgggccgcaactacctggctgattggttattggtgttgccaataagccgccgtttttattgcacccagttggttgaatggaaaaaaccgatgttgctgaaagttttctccaagggttttttccccaatttgtttgtttttgttgtgccctttttttttgtgcccc

SEQ ID NO: 9341 - DNA, 504 bp, Zea mays
  Clone ID: LIB3061-088-Q1-N6-G8
gcaaacagaaactccttggtgttcagaatttttcctggctggagaaaggaatctcctcaggtcaatttggcaacttcatccttccataatcaatatatctacagctacataatgttctgacccaaggtggcgggaaagaggaaaaatttcaggcacttgtcatgatgagtaacttccagatgaacagttaggtatgggattatttggtttctctgatagtagcccaatgctgccctcaaacttggcgcccgcctgctgttgtctcgatgcatccacaggagaaccttaacaggctagagctgctggaagcaaaatggctttcactatcacattttgttggaccccataaatttgttttttctctcagcaggtttcagaatttgggatgagcacatcaaagtttcatcggcactcatcattgccccagcattatcaaattcaccacaataattgggggccgcgaatatggtgacaagctgtttgtccgccaaaaatttattccca

SEQ ID NO: 9342 - DNA, 360 bp, Zea mays
  Clone ID: LIB3061-088-Q1-N6-H10
cacattaaaatctggaaatgtaacttcttatttctggttggccacatacatcatccaaaaaactttattattgaattacaactaataagcaatctaaaagaggcaccaccaatgatgtgttgttggtaggaggccgctcggtctgtcaaagcaagttggacaaagggcaacaattgttgtagttgtaagagggttgcggggttagccgcaaactgctggttgaaaggcagcaactgttgctgtgtcaagaaggaagcacggtttgctgcagcttgctggctcaatggtcgtagtatttgctgctgcaaataagcagcggggttcagtgcggcccattggttaaatggaagaagttgttgt

SEQ ID NO: 9343 - DNA, 82 bp, Zea mays
  unsure (1)..(82): unsure at all n locations; Clone ID: LIB3061-088-Q1-N6-H11
aaaaaaaaaaaaaaaaaaaaaaaaaaaaagctcttagggaaaaaaaacaccaaaaaaangnngggttttttttttttttttt

SEQ ID NO: 9344 - DNA, 341 bp, Zea mays
  Clone ID: LIB3061-088-Q1-N6-H2
gggtgtgggggtttttttttttttttttttttttttttttttttttttttttttttttttttttttttttttttttttttttttttttttttttttttttttttttttttttttttttttttttttttttggggggggccccctttgggggggggggggggtttttttgttttttttttttttgttttttttaggggggggcccccccttttgggggtggggggggctctttttgtggtttgtcgtcgggggggggtgtgtggggccgcttttggggctttttgtgggggggtcccgcgggggggtgtgttgggggtgggctgggtcccctgttttttttt

SEQ ID NO: 9345 - DNA, 291 bp, Zea mays
  unsure (1)..(291): unsure at all n locations; Clone ID: LIB3061-088-Q1-N6-H4
gggaaatgtcctttcttttttttggggcgccccaaacatcatccaaaaaacttcatttttgaacttttactcattagcaatcttaaagagggcacccccaatgatgggttggtggggggacactgttgggtttgtcaaagcaagttggttggctggccgcaattgttgcagttgttagagggtgcccgcgtttggccttgcgtgccggttggncggcgcccactgttgttgtgtcccggagggcgccgggctcccctccgcttgctggctggntgggggcgggtgttgctg

SEQ ID NO: 9346 - DNA, 409 bp, Zea mays
  unsure (1)..(409): unsure at all n locations; Clone ID: LIB3061-088-Q1-N6-H8
cctcttttgcggccccccttggggggggggggttctttttnttttttttttggtgtttttttttttttttttttttttttttttttttttttttttttttttttttttttttttttttttttgggccccccccctttttttttttttccctttttccttcccccccgtggggggggggggccccttttttcccccccttttttcttttccccccccccttttttcttttccccccccgggttttttttggggggttgggggggcccccccccccctttggggggggggtttggcctttttccttttccccccccccccctcggtcccttttggggcccccccttcctcccccgcgggggtgttttcgccccccccggtttttgggtgtcccccccttttttttttcccc

SEQ ID NO: 9347 - DNA, 609 bp, Zea mays
  Clone ID: LIB3061-107-Q1-N6-A10
gagaataacaaagttatataagttacattttctaaatcttagtgaaagagatcgcaattttacacacaatttcaacctgggattctaaagacttccgtataaaaagctgggcaaagctcgagtggtacttttcactctcccttctgtatttaccacgttgtgtaacactatccaccagaaaacctttgcctgttcccaaggcctgctctctaatggatcgggtggtattgtgtgatcccacgctttggaggcagtttccgtagaatgaagagcaccagagctgaaggcactatctcaaccagcaggtaatagaagaagttcaggattggatggttcagaacatcaagatctgctgctttatcaaacgcattaaggcacatcatgacgcatctgatcaagaaacaagaaaagcatatggtagtcacatacccaacctcctgcaatttctttcgtcttccttttgattctacaggaaaacgctgcaacatcatgaacaaccttcctccatagagaacaaacccgagggctgcaaatagtgatacacctgcaaagaacatctttgacaagatgaccataattcgaactggtttccaccacaaaaccaaccat

SEQ ID NO: 9348 - DNA, 448 bp, Zea mays
  unsure (1)..(448): unsure at all n locations; Clone ID: LIB3061-107-Q1-N6-A11
gggaaaaattttttttaaaaccctttggggacaaattttattttaaaattgggaaatttttttttttttttttggggggcccaataaattttaaaaaaaatttttttttttttttaaaaataaaaaacattttaaaagggggcccccccatttttttttttttgggggggggcccttttttttttaaaaaaagtttgaaaaaagggcaaaatttttttttttttaaaaagggttggggggttaccccaaacttttttttaaaaagggcaaacttttttttttttaaaaaaaaaaaacgggttttttcaaaattgggggtaaaaaggggngggttttttgtggcaaaaaaaaaccggggggtttaaggcggccaatttgttaaaagaaaaaattttttttttttaaaaaaaggccancccccccgggcgaaagggaaaaagggggggcc

SEQ ID NO: 9349 - DNA, 582 bp, Zea mays
  Clone ID: LIB3061-107-Q1-N6-A2
agaaatgtactttcttatttctgggaagccacaaacatcagacaaaaaactttattattgaactataactcataagaaatctaaaagagggcaccaccaatgatgggttgttggtagaacgctgctgggtttgtcaaagcaagttggttgaatggcagcaattgttgcagttgtaagagggtgccagcgttaggcgcagcgtgctggtagaacggcaacaactgtggttgtatcaagaaggtagcagggctcacaccagctagctggctgaatggtagtagttgttgctgctgtaaataagcaggagagttcaatgctgccagttggttgaatggaagaaattgctgggggtaggcagcaggtagctggctgaatggtagttgttgttgttgcaaataagaagcagagttcaatgcagctagttggttgaatggaagaaactgctgttgctgagagtaggcagcaaggtttgctagcacaagttgttgtagttgttgtgccctgatgttttgtgccaataaatgcaccaaaggtaactgatgtaatagggctgatgattgttggaggaacaagggtgataaa

SEQ ID NO: 9350 - DNA, 459 bp, Zea mays
  Clone ID: LIB3061-107-Q1-N6-A6
aaagggggggggccttttgggccaaacccccttttggggaaaaacgggggggggaaccccattttttaaatggaaacccccccaaaggtcttgggggggggggggttttttggggggggggggggggccccccccccccatggggggggggtttggggccgggaaaaaaaacccccccccctttggggggggtggggaaaacccaaaaaacaaaaaggggggggggggggccccccccgggaaagggggggaaccccttttgaaaatgggggggaaaaattttgggggcaaaaccccccaaaaaaaaaaaaaaattggggggggaaaacccgggggatttttggggggttaaaaacggggggggaaaaagggcttccccaaggggggccccggggccctaaaaaaaaaaaaaaaatttttaaaattgggcccccggcttaaaaagtaaagggccccccc

SEQ ID NO: 9351 - DNA, 601 bp, Zea mays
  Clone ID: LIB3061-107-Q1-N6-B1
agagtcgatcacacttcttctcacacaaatagctacatttgcacgtgttataatccactgttgacatggaacaggcaacgatcaggttttgacatgctcaaatgttgttgaactttctagaactgattaatatcaatatacatataggatcatgattcatgaaaggcaagcgtgggaatcataactaacaaggaagaagaatgatgaaatgggttgtttaatccacctttggtcgctatcagcggcgtcagggctcgcctcgcaagcagattcttccttgtcgccaccgttgagcttcccctccagagcaaacccactgctcagcttgagctgctctccggactctagtggcgactcgactgccatggtgctcaaaggatggttggacgcaaaggcattggcaactggtgttggcagtgccgatgccgctgctgctgtcgcagctgcgcgagccttgaggccgagcagctggagatccatgaggcggcggctctggagctaaatggcgtgctgaagttcggcagcctgctgctgctcctccagcttccggcgcaagagcagctcgttggcactgttcgaatgctgcaacatcctcgcgctg

SEQ ID NO: 9352 - DNA, 609 bp, Zea mays
  Clone ID: LIB3061-107-Q1-N6-B10
caagaaaacaataacgccaaacttaataacccagtagcaaagcgggggaataaagtcttacaacgtaagttgtaaaccacacaacgacagatagataagaaccgacagaaacataacacgataggagccactcagggcagatcacaggatagcagtggcacacaagcccgacgacgccgcgccagtagagcgtctagtactcgtcaccctcgtcgccgtcctcaccctcgtcaaactcagcaccgacctcctcgtagtccttctcgagcgcagccagatcctcacgagcctcggagaactcgccctcctccataccctcaccgacgtaccagtgcacgaaggcgcgcttggcgtacatgaggtcgaacttgtggtcaatgcgggagaagacctccacaacactggtggagttggagatcatgcacacggcacgctgcaccttggccaggtcaccgccggggacgacgctgggaggctggtagttgattccgcacttgaagccagtcgggcaccagtccacgaactggatggtgcgcttggtcttgattgtggccacagcagcgttcacgtccttgggaaccacatcaccacgggacatgaggcagcatg

SEQ ID NO: 9353 - DNA, 603 bp, Zea mays
  Clone ID: LIB3061-107-Q1-N6-B3
gaaagaaaatccgacaaccttactttgctgaaaactctgcacattcttcattcacattatccagcatactttagtcagaaagcaccttagacaaaaacaaaacatccaaacaaacaggaagcagtcacaggctcagttcccgccaggctccctgatgactagttatctgcagcgctacttctaaaacttggttgcagaccccatcacggggacctcctttgccgcgcctcgtcgccttccacgatgccgctctccggcttccacatcacgtccttcagtccatttgagatgttgtggtagaacttgtggaattcaagggtgtcgccgttggacttgcgcagctcaaccatgtacagggaaggcgtgacctcgaaaacctctgttgcaatggccagctgacctttccttccagggttctccccttgcagcttcagcttatagttgcgcttctgaacgttgaagcccatgggtcccgctgctgcttcgatcttcgacagtatctcatttgcaggaagccttgacgcaaaccttgtttctcgcttaacagaacccgtttgcttctcgaagagcgtcccgagattgaggcccggagacgtagagatt

SEQ ID NO: 9354 - DNA, 452 bp, Zea mays
  Clone ID: LIB3061-107-Q1-N6-B4
cggggaagccacaaacatcatccaaaaaacttcattattgaactataactcataagcaatctaaaagagggccccaccaatgatgggttgttggtaaaacgctgctgggtttgtaaaagcaagttggttgaatggcaacaattgttgcagttgtaaaagggtgccagcgttaggcccagcgtgcaggtaaaacgacaacaactattgttgtgtcaaaaaggcagcagggctcacattaactagctggttaaatgggggtagctgttgctgttgtaaataagcagcaaagttcaatgttgctagttggttgaatggaaaaaattgctgggggtaaacaacaactagttggctgaatggtagttgttgttgcaaataagcagcaaagttcaatgcacccagttggttgaatggaaaaaactgctgttgctgaaagtaggcaacaaggtttgcta

SEQ ID NO: 9355 - DNA, 532 bp, Zea mays
  Clone ID: LIB3061-107-Q1-N6-B6
accggccacgtacggaaaacgagatctgattgcaaacagctggagtcaacatagcacaaatctaaaaaaatctcaaaaggactgttgcccaaatttaaaatttcaatcaacagaacacaaagagtgatctaacgatgtgagacaaacatgtccaagttcgttcataaacatggcgcttttacaattcatggttcatggatacatgcggctccgctaaaggtcttttaaacaacaggtttaaacaaaaacagtaggcccattggccattttctgttaaaccggagttttctaaaccgggtagtagtggtagtgcaactccccgacattatccccaaaaagctttgtccaaccattagggccaacgtggtaaacactaacacaaccaccacttgctgcatcacggaatgttgccccataaatagcccgtcgcgctaattcgggggcttcctaaactgacatgctgaagcggtaaccatcatccaagataccataagcatacagggaaccaaagccaacagaaaacctgttcccc

SEQ ID NO: 9356 - DNA, 605 bp, Zea mays
  unsure (1)..(605): unsure at all n locations; Clone ID: LIB3061-107-Q1-N6-B7
acttaacactacaatattantttgaacacaccagtacaccactgcttatgtacatcattattgagcgaactcaaaacattatgtacgatgtaacggccacagattcgcagtatacgggggctcccggatattgaagccagttgtgataaattgttcaaacagatacaacagttcattggccatgagttttgccaatccagcaagcgctaattcacatcagctgggccgtggtagtttctcctcctcagctgcgattctggggcaggttgctgaaggtaaatcttggtaggatcatttgggtcaacatacgcatgacgcatcatatcatcgacaggagtctgcgcggcttgcagaggatccacacgcggtgccatgttagcagcagactgggcttcaaactcattgtagcgccgcacagatgcagtcaggttaaggaagagaggaacgaaagtaccacagccgccttccttgaacaagatcttgaaggtgtgaggttgagtacagggccctgttctgattgtctggaacgactggttcaacgaatccagagatgttgttgcagtgaaatatgggctgattgaacttctcaccatgcacaaacaaca

SEQ ID NO: 9357 - DNA, 588 bp, Zea mays
  Clone ID: LIB3061-107-Q1-N6-C10
accacaaaatccagaagctggatacatccggtatatctcacggtttttcttcaaacgttgataagcaatacaacaaagtttttactgttaaccacaaattaagaaattacgaaagctggtgacccacgggggttgcattctcctgccgagcagttagagcagtaccaatacccaacatcttgacaggacttcagttctgaattggctgctgtggctgctgctgagctggagggccatcaggcggctgctgctgccctccacctgcatgcggtggttgccgagatgaactagcctgtacctgtgctggttgagctagcatcggctggtaaggcggatattgcggtgggtagggcatgcgcggtggaggcatgtagccaccgtatggtggtgggggtggatagtttggggggttactgaccatggtagtatggcggtggtgcaggatagccgcccccttgtgctgggttgcttgatgcctgagcttgcccggcttgctgcggccctggtttgccttcactgtcatgtggttttactatagcacccatcctctgtggatccatggatggatacacagtccgctccgttgct

SEQ ID NO: 9358 - DNA, 590 bp, Zea mays
  Clone ID: LIB3061-107-Q1-N6-C11
gaagcaaaccaagcacatacacacatatatatatatatatattgtctacaaagtacaaactcgcaatgttcagagccatttttttgaagcaaagacaagaaaataaaaggagcagacacatagctgttgtcacggatacatagtaaaataaggtacatgtccagcgccaaattgtacttaaaggaagtgactgaacatctaagcatatatactaataccgcagctactacacgcgtgcctgcaggcacgcccacgcaagcgtttcttcatctccagaacattattcctgaaacacgggggcggaagaaagagttgaagggatagaaattgcaagtaccagaaagagccaatctctgttactgcaggctcttaccctttgtccccccctatgtacacaagcaccagtcgctgggcctcagcctcagtagaaaccagcagacatgggcatgtcctcgaagctccaaaggtccatgttgctgaccacgtcctgggatccatcacagctcaagagagtgctgatcgagtcgtctgaaccaccgtccatcaggaaattcatatacggctccaactcggcgagataacaccagtgt

SEQ ID NO: 9359 - DNA, 510 bp, Zea mays
  unsure (1)..(510): unsure at all n locations; Clone ID: LIB3061-107-Q1-N6-C3
cttttttttttttttttttttttttttttttttttttttttttttttttttttttttttttttttttttttttttttttttttttttttttttttttttttttttttttttgggaaaagaaaatttttatttgggggttgtttttttaataaagaaaaaaaattnnntntggaattaaaactaaaaaaaaaactaaaaagggggcccaccaaagatttttttttggtaggagggttttgggtttttaaaaaaaagttggaaaaaaggaaaaaatttttttatttttaaaaaggttggggggttaacccaaaaatttttttaaaaaaggaaaaatttttgttttgtaaaaaaaaaaaaaaaaattggttaaactagcttgttaaaagggaagagtttttgttttttaaaaaaaaaaagggggtttaaggggggaaattggttaaaagaaaaaaaattttttttttnaaaaaaagcaaaacctacctgggtaaaagggaaaaaggggggctg

SEQ ID NO: 9360 - DNA, 429 bp, Zea mays
  Clone ID: LIB3061-107-Q1-N6-C4
aaaaaaaaattttttttttttttaaaaaaaaaatttgggtttggggggcccttttttgattaaattttaattttaaaaaaaaaaaggggcccccaaaaagggggttttttccaaaaaaagggggggtttaaaaaaaaaaaatggttttttgggaaaaatttttttttttttaaaaaaggaaaaaaaaaagggttaggccctttttgggaaaaaaaaaaatttttgccttttttgggggccccaaaaaaatttcaaaaaattttttttttaaaaaaaaaaatttttttaaaaaagagaaaagggttttccaaaatttttttaaaaaaaattgggaaaattttttaaaaaaatttttttgcaaagtttttggggccatttcccaaaaaaaaggggtttaaaaaaaacatttttttttttttttggaggggg

SEQ ID NO: 9361 - DNA, 456 bp, Zea mays
  Clone ID: LIB3061-107-Q1-N6-C7
acaaggggggggccccccgggtggggggggccccgggtctttaggggggaggggccctttttttttttgcaacacccccccctggaaaaactttttacttttgccccccccaaaaaaggggggggggccccttttttttgcccccccccacttggggggggggggggggccacccttttaccggcaaaggggtgcccggccaaaattttaaatgtggacacacaggaagggggggaaaccccttattttggagagaaaccccccccccccccgccgggggggttctctttgccccccccttgggggcccccccttttttttttttatggccccccgggggaaggggcccccccccccatttttgggaaaaaaaaactttccttctaacccaggggccgacaaaggggcccagaagagggaccacccccccacttttattttccgcggggggggggg

SEQ ID NO: 9362 - DNA, 602 bp, Zea mays
  Clone ID: LIB3061-107-Q1-N6-C8
agcaaaagatcaatatgtatgtacagcaaccaaatgtaccaacaacaacaatttaaccatgacaccagaccatatgtatatgaaaggttcccccggtacactctttattcatccttgaacacaaaatctagacgccgcctctcaccctcgggtgtaaaaccaatgagccagacatgatctcacaatgccaactaaaaatcacaatatctgagtacagttatgatcatcatattctattagcccatatttccaagaagtcgctccactgcagcatgaacatttccagcggtagcggccaaggctcggatgttctcttgtgtgtcaaagaaacccatttcttggagctgagctaattgtgtggcgtacagttcttctggcggcacattaggagcatttggaacacctaggccaccaccagcaccaagcccgctgaacatgttcatcaaggtgttgaggttgacattgcctgcaccagagcctgattgtgtccgctcctgtccagcttgttgttggccaagttgtgacatcaaagactgctggaatgaaattaattgctgcaatgtttcaagagatgttaactggcgaagaaattctggattctg

SEQ ID NO: 9363 - DNA, 579 bp, Zea mays
  Clone ID: LIB3061-107-Q1-N6-C9
agaaatgtactttcttatttctgggaagccacaaacatcagacaaaaaactttattattgaactataactcataagaaatctaaaagagggcaccaccaatgatgggttgttggtagaacactgctaggtttgtcaaagcaagttggttgaatggcagcaattgttgcagttgtaagagggtgccagcgttaggcgcagcgtgctggtagaacggcaacaactgtggttgtgtcaagaaggtagcagggctcacaccagctagctggctgaatggtagtagttgttgctgctgtaaataagcaggagagttcaatgctgccagttggttgaatggaagaaattgttgggggtaggcaacaggtagctggctgaatggtagttgttgttgttgcaaataagaagcagagttcaatgcagctagttggttgaatggaagaaactgctgttgctgagagtaggcagcaaggtttgctagcacaagttgttgtagttgttgtgccctgatgttttgtgccaataaatgcaccaaaggtaactgctgtaatagggctgatgattgttggaggaacaagggtgat

SEQ ID NO: 9364 - DNA, 418 bp, Zea mays
  Clone ID: LIB3061-107-Q1-N6-D11
aagggggggggggtcccccttgggggtgggaaaatttttttttccgggggaaagcgaaaaaaaggcgaagggggggccccccagcgggggggtttgtcccaaaaggggggggggttcccaaaaggcggttgtgttaaaggcaacctttggtttttgtggaaaaaggggaaaattttccccccccctcggggggagaaggggcccattcttgtttgggtaaaaaaggcctttatttttccccacccccgggggtaaaaggggccttttctttgggcccccgtgggccccccggtttttccggcccgggtcctgggagcttccccattttctttttaaaggggcattccaaggctgggggaaaaatgagccaacgccttttcctgggggaaaattttttgccccccaaataccccccaaa

SEQ ID NO: 9365 - DNA, 408 bp, Zea mays
  unsure (1)..(408): unsure at all n locations; Clone ID: LIB3061-107-Q1-N6-D2
agaatctagaaatggactttcttatttctgggaagccacaaacatcagacaaaaaactttattattgaactataactcataagaaatctaaaagagggcaccaccaatgatgggttgttggtagaacgcgggggggtgtgtcaaagcaagttggtagaatggcagcaatagctgcagttgtaagagggtgccagcgttaggcgcagcgtgctggtagaacggcaacaactgcggttgtatcaagaagggagcagggctcacaccagctagctggctgaatggaagnagttgttgctggtggaaataagcaggagaagacaatgctgccagcagggtgaatggaagaaaatgctgggggtaggcagcagggagctggctgaaaggaagtagatgaagttgcaaataaga

SEQ ID NO: 9366 - DNA, 443 bp, Zea mays
  Clone ID: LIB3061-107-Q1-N6-D3
aaaaactaaaaatgtactttcttatttttgggaagccacaaacatcatccaaaaaacttcattattgaagtataactcataagcaatctaaaagagggcaccaccaatgatgggttgttggtaaaacgctgttgggtttgtcaaaacaagttggttgaatggcaacaattgttgcagttgtaaaagggtgccagcgttaggcgcaacgtgcaggtaaaacggcaacaactgttgttgtgtcaaaaaggcaacagggctcacattaactagctggctgaatgggggtagctgttgctgttgtaaataaacagcaaagttcaatgctgccagttggttgaatggaaaaaattgctgggggtaggcagcaactagctgactgaatggtagttgttgttgcaaataaacagcaaaattcaatgcagccagttggttgaatggaaaaa

SEQ ID NO: 9367 - DNA, 567 bp, Zea mays
  unsure (1)..(567): unsure at all n locations; Clone ID: LIB3061-107-Q1-N6-D4
ggataaacgagtagctgtaaatgaagtattcacatgcagcaattcattacatactagatagatatttgtatctctagatcgttatgctcaatcaggttaacctcaatgcagtccaaaaacaaatctaaagccactcaccttttttttatctaagacctggaacaattatcgatgtgaccggtatccagcaaccgtcccaggcaaatatacagcagcagcagcaagcagcaggcagctcaacttccatttatacaaagcaagaaggaccactaggcagtccttctggagtctggacagacatcgaagtctcccccctcgtgactcacagctcaacattgctgggactgacagtaactttatatacggttgccaatgcgagctcgtntgtcgtccccatccccagtccgttcacggatttggagatcaatggtggaaggacgctgcanataagtaaatgccccagaaacgaagcgagaaatgcacacgctcccctccattaccagccgttcctcttcggctcttcctatatgaacaacaactgaacaagtacagcagtttatattatac

SEQ ID NO: 9368 - DNA, 455 bp, Zea mays
  Clone ID: LIB3061-107-Q1-N6-D5
aagaatctagaaatgtactttcttatttctgggaagccacaaacatcagacaaaaaactttattattgaactataactcataagaaatttaaaagagggccccaccaatgatgggttgttggtagaatgctgctgggtttgtcaaagcaagttggttgaatggcaaaaattgttgttgctgatagtagggagaaaggtttgccagagctacttggttgatcacaggtagcacgagttgctgcagctgctgtgccttgatggtttgtaccaatgactgcaccaaagatagggctggcgattgttgaaacaagggtgataaaggtatgttgcttgctgcgattgcttgttggagcctatagggttgaagagctgggttttcacatactgaagctatcattgatggaaggtatgggggaagaagggaagctataggagcttgtgagcattgagggaaa

SEQ ID NO: 9369 - DNA, 578 bp, Zea mays
  unsure (1)..(578): unsure at all n locations; Clone ID: LIB3061-107-Q1-N6-D6
aaatctcaatcaatatatntgatnntatttttaggaaacacatnngccgctatgagggcanccattatcgagtacatctcatatgtaatctaaaagatggcaccaccaacgatgggttgctgctgtaggaaggcagcgaccaatgggttagccaccgctagtggattaagtaactgttgtcgctgttgtaggtacgcagcagagttcgacacagtcagttggttgaatggaagtagttgttgcaagtaggcagcagggtttgccacagctagctgagtaagagctggtacaatttgttgcagcaactgttgttgcaacaactgttgttgcaggtatgtaggtgcattgcccatagcgagcgggctagatgaaagaagttgttgctgttgtaggtaggcgatagggttcaccatggctagttgactgagcgctggtagaaactgttgcaactgttgttgttgttggtatgcagctacgtttgccaaagcaagtgggttggatgcaagcagctgttgttgcaagtaggcgatagggttcaccacggctaggtggctcagtgcttgttgctgctgcgttgc

SEQ ID NO: 9370 - DNA, 489 bp, Zea mays
  Clone ID: LIB3061-107-Q1-N6-E1
cgggagggcaaataatgatttattaagtcgtcttctcggttaatttaaaccatgcatggcgcccaccatgccagtagcaatataattcatgtgattgtatgatgctttatttcccactcatgcatcaggagaaaccttcacaagggttttttttttgcactcattaataagggaagggaatatacgtattgctatatatctctctctcccttcattccccactttaactctttaatttactcatcacagtacatttataatttgtgtggaattattaattcttccacacccggccggccagttgatgacgacgagcgctgatctctcgatcgaccggtattgatcagtagaaaccttggatcttcttgggagccaccggcaccgacgagacagcctagatcacgagcttattcttgccaccctctcggccggagtttaagccgaaatggatgttcggataatgtgcccagtttttggctgctgagctga

SEQ ID NO: 9371 - DNA, 478 bp, Zea mays
  Clone ID: LIB3061-107-Q1-N6-E11
aaaatctaaaaatgtactttcttatttctgggaagccacaaacatcagataaaaaactttattattgaactataactcataatatatttaaaagagggcaccaccaatgatgggttgttggtagaacactgttgggtttgtcaaagcaagttggttgaatggcaccaattgttgcagttgttagagggggccagcgtttggcgcaacctgctggtaaaacgggaacaactgggggtgtgtcaaaaagggaacaaggctcacaccaactagctggctgaatggtagaagttgttgctgctgtaaataagcacgagagttcaatgctgcttgttggttgaatggaaaaaaatgctgggggtaggcagcacgtagctggctgaatgggagttgttgttgttgcaaataaaaagcaaagttcaatgaacctagttggttgaaaggaaaaaactgctgttgctgaaaggaggcaccaaggttt

SEQ ID NO: 9372 - DNA, 608 bp, Zea mays
  Clone ID: LIB3061-107-Q1-N6-E12
aacatcagacaaaaaactttattattgaactataactcataagaaatctaaaagagggcaccaccaatgatgggttgttggtagaacgctgctgggtttgtcaaagcaagttggttgaatggcagcaattgttgcagttgtaagagggtgccagcgttaggcgcagcgtgctggtagaacggcaacaactgtggttgtatcaagaaggtagcagggctcacaccagctagctggctgaatggtagtagttgttgctgctgtaaataagcaggagagttcaatgctgccagttggttgaatggaagaaattgctgggggtaggcagcaggtagctggctgaatggtagttgttgttgttgcaaataagaagcagagttcaatgcagctagttggttgaatggaagaaactgctgttgctgagagtaggcagcaaggtttgctagcacaagttgttgtagttgttgtgccctgatgttttgtgccaataaatgcaccaaaggtaactgatgtaatagggctgatgattgttggaggaacaagggtgataaaggtaagatgccagctgtgattgcctgttggatcctgtagggttgaagaattgggttttc

SEQ ID NO: 9373 - DNA, 414 bp, Zea mays
  unsure (1)..(414): unsure at all n locations; Clone ID: LIB3061-107-Q1-N6-E3
gaaaaaatctttttttttatttaattttttcacttacccatagaaccggaaaattatttttactggggcaaccctaccggtttcaaattaacagagcgggggatcaccccttccggggggggaaaaggggctttcttattgcttggttccaatttttacggggttacaaaaaatttccttttccaggggaagggtttgaggtcttaacttccacgttaaagtctcagggccctgtggttttttgaaaaggaactttggttccaagcccattccggggaggtttgtaacctagcttcccaaaagaatccttttttagacattttccncnggttggaggaatataaaggtttccctgtcggcgcgaaggtaaattttttatcggacccctttgggggttccacgccaaagctttcc

SEQ ID NO: 9374 - DNA, 442 bp, Zea mays
  Clone ID: LIB3061-107-Q1-N6-E6
gggaaatattttaaaaaaaatttttttttttttttaaaaaaaaaaacttggttttgggggcccctttttggggcccttttaattttaaaaaaaaaaaagggccccccaaaaaggggttttttccctccaaaaaaaagtttttaaaaaaaaaaattttttttttgaaaaaaattttttttttttaaaaaaggggccaaaaaagggtttcccccccccaaagggttaaaaaaacttttgccctttttgggggcccccaaaaaatttcaaaaaaaaattttttttaaaaaaaaaaattttttaaaaaaaaaaaaaaggttttccaaaaatttgttgaaaaaaagttggaaaaattttttaaaaaaatttttttccaagtttttaggggcttttcccaaaaaaggggggtttaaaaaaaaaaatttttttttttttaccttggggg

SEQ ID NO: 9375 - DNA, 562 bp, Zea mays
  Clone ID: LIB3061-107-Q1-N6-F1
agagtcgatcacactttttttcacacaaatagctacattttgtctgtgttataatccactgttgacatggaacaggcaacgatcaggttttgacatgctcaaatgttgttgaactttctagaactgattaatgtcaatatacatataggatcatgattcatgaaaggcaagcgtgggaatcataactaacaaggaagaagaatgatgaaatgggttgtttaatccacctttggtcgctatcagcggcgtcagggctcgcctcgcaagcagattcttccttgtcgccaccgttgagcttcccctccagagcaaacccactgctcagcttgagctgctctccggactctagtggcgactcgactgccatggtgctcaaaggatggttggacgcaaaggcattggcaactggtgttggcagtgccgatgccgctgctgctgtcgcagctgcgcgagccttgaggccgagcagctggagatccatgaggcggcggctctggagctcaatggcgtgctgaagttcggcagcctgctgctgctcctccagcttccggcgcaagagcag

SEQ ID NO: 9376 - DNA, 596 bp, Zea mays
  Clone ID: LIB3061-107-Q1-N6-F11
agaatctggaaatgtaacttcttatttctggttggccacatacatcatccaaaaaactttattattgaattacaactaataagcaatctaaaagagggcaccaccaatgatgtgttgttggtaggaggccgctgggtctgtcaaagcaagttggacaaagggcaacaattgttgtagttgtaagagggttgcggggttagccgcaaactgctggtagaaaggcagcaactgttgctgtgtcaagaaggaagcacggtttgctgcagctagctggctaaatggtagtagtatttgctgctgcaaataagcagcggggttcagtgcggccaattggttaaatggaagaagttgttgttgctgagagtaggcagtagctagctggctaaatggtaatagttgttgctgcaaataagcagcagggttcagtgtagacagttggttgaatggaagaaattgttgttgctgagagtagggagaaaggtttgccagagctacttggttgatcagaggtagcacgagttgctgcagctgttgtgccctgatggtttgtaccaatgactgcaccaaagatagggctggcgattgttgaaacaaca

SEQ ID NO: 9377 - DNA, 564 bp, Zea mays
  Clone ID: LIB3061-107-Q1-N6-F4
ttttggaaatgttcgaattttgttttccgggtttacaactgttacaacagggttcggtatacatgtaagataaaaatattcgcggcaagagcaaacaaatagcaaatgcctcgcccagttttttagctcaggggggtatcttaagacagtgacaaattgacagcgcgagtgcgcgacaatacacaatcaaacagcactatgtacatatcaaccagtgtgtatttcttgcccacgcaaggcccagacaaataatacatgtcagtgaagataaccaaatcgaattgtgttctgtttgtcgattctttgtgtcagctcttaaggtcctcttcgagctcgtcaaactcccacccgcttatctcctcaactgagtactctttgtcttctttcccgatctctgatcccagggttgcaagctccgcatttgaatcgaaatgctgctcaggtttcatgggagattttggtgagtcaacgtgtgcagcttttggggtagcagggagccgaagaggtgaaggactcagtttcgatccctaaacggtaggggtttgctttctcagatctatgctt

SEQ ID NO: 9378 - DNA, 456 bp, Zea mays
  Clone ID: LIB3061-107-Q1-N6-F5
caaaaaacctttttgccttttttttttaaatttgggggaaatacttatccaaaattttttaaaggaaaggaccctttttaaaaaaaacaaaaaatttcctttttttcaaaggttttttttttttcccccataaaaagggaaaaaaaatttaattttttcctccttttttgggggaaaaaccaaatttccaaaaaaacttggattttttttcttacccccaaggggggggggggcaaaaccccaaattttccacccggtttactttaaaaattgcccctttctttgcaaaaccattgggtttccacaaaaagggcttccctttttaattgggattgaaaaaaaaaaaccctggaaccaaaccaaggggccccacccagggttttgggggaaaaccccctcccccaaatttttttttgcccaacccctttggccaaggcaaaatggcccccccccctt

SEQ ID NO: 9379 - DNA, 569 bp, Zea mays
  Clone ID: LIB3061-107-Q1-N6-F6
gcagcaccaagaagcaccatttttttccttaggatttaacttagaataaagcctgacgggggtaacagcacccatcgatccgcagtccatgctggttgatgcatgggtctgctggagccgaggtttttcacagcactaacggctgacacagagcgaccttcaatcaaaaacacagatgggcaacaacaaacacgagacgaacgaagataaacactctggactagggtaaacaacacggtagcgaacaggataacttggccgcgcgggccccaccgctcagttcctccagttcccgtcggagttgccgtagccgccgccacggttgccaccgccgtagccgccgccaccaccaccgtagccgccgccgccaccaccgtagccgccgccaccgccgtagccgccgccgccatcacggcgcccgccaccgccgtagccgccgcctccacggccaccaccgtacccgccgccgccgccgcctccacggccgccgcgggactgggcctcgttgacggtgatgttgcggccggccagctccttgccgttcatgccctcgatggcgttccgcatcg

SEQ ID NO: 9380 - DNA, 596 bp, Zea mays
  Clone ID: LIB3061-107-Q1-N6-F8
gaatgagaatatttggtctttctatatttttgtgtctcatgtgtttgtgagttaaggagcctttggactacattcggtagcaaatggttcttaagaataaccagtgacaccagttgttgatttccaattctcttgtgcttcaaaaccaaaagatgaagatgtcgcgaaggtcgcgacgcacggcgtcgtcgtccctgagccttgccatggtcatcttctcgatcttcatggtcccactccttggagacgacgcggtacatgcctccgttctcctccagcgacctgccgagcgccgagcgtggccaccaagatggtcttcagtggacccagtcttcagtgggctggctaccttcaccagccagcaacacaggtcacgaaagtagattgcttctgccagcatgggtaacctttgtagccacacaaaatagattcctgtgagacttaaaaaatgttaattgtagctaggtttttcgtttggtactaaagaagatgttggtgtatcatgcatacaatgtagtagatttaagaaaaaaatacgtgatgataaaagcagtattgaagagtgtcgagtaaatcaatgcagtaactatatgttt

SEQ ID NO: 9381 - DNA, 603 bp, Zea mays
  Clone ID: LIB3061-107-Q1-N6-G11
aatctagaaatgtactttcttatttctgggacgccacaaacatcatccaaaaaacttcattattgaactataactcataagcaatctaaaagagggcaccaccaatgatgggttgttggtagaacactgttgagtttgtcaaagcaagttggttgaatggcagcaattgttgcagttgtaagagggtgccagcgttaggcatagcgtgcaggtagaacggcaacaactgttgttgtgtcaagaaggcagcagggctcacatcagctagctggctgaatggtagtagttgttgctgctgtaaataagcagcagagttcaatgctgctagttggttgaatggaagaaattgctgggggtaggcagcaactagctggctgaatggtaattgttgttgcaaataagcagcagagttcaatgcagccagttggttgaatggaagaaactgatgttgctgagagtatgcagcaaggtttgctagcacaagttgttgtagttgttgtgccctgatgttttgtgccaccaaatggaccaaaggtaactgctgtaatagggctgacggttgttggaggaacaagggtgataatggtaagatgcctgttgcga

SEQ ID NO: 9382 - DNA, 520 bp, Zea mays
  Clone ID: LIB3061-107-Q1-N6-G12
aaatctcaatcaatatattgattatttttaggaaacacatgccgctttgagggcaccattatcgagtacatctcatttgtaatctaaaagatggcaccaccaacgatgggttgctgccacgacaaggcagggttcatcaaagagaactggttgtatggcagcaattgttgctgctgtaggaaggcagcgaccaatgggttagccaccgctagtggattaagtaactgttgtcgctgttgtaggtacccaacaaagttcgacacagtcagttggttgaatggaagtagttgttgcaagtaggcagcagggtttgccacagctagctgagtaagagctggtacaatttgttgcagcaactgttgttgcaacaactgttgttgcaggtatgtaggtgcattgcccatagcgagcgggctaaatgaaagaagttgttgctgttgtaggtaggccatagggttcaccatggctagttgactgagcgctggtagaaactgttgcaactgttgttgttgttggtatg

SEQ ID NO: 9383 - DNA, 611 bp, Zea mays
  Clone ID: LIB3061-107-Q1-N6-G3
gctgacaaactaaaatagcagtgaactttggttgcaaacgaggtttcagatacatgctaattatcaatccgttacaaccggtagaggccttgaccttgcattgtcgattagctatcttcaactgctgcagtgtaaacaggagaggtcatgagctatgatatttagagggaccaagaaaatcatgcacatgtaggggcaacaaatgtcaactttcaactaatctaagtgtgaggcagggagcaagcaagaaaattcagatacacattgtaaggtcaataagtttcaacttatctaagtgtgtgaggcaatgagcaacaacagctgaaaaaaaagtacagtcggaaggcacaaatgtctaatatatgaccaaactgtgtgaagcaaggaatctctgtgactattctaccacatccttgattattagaatgctcatcattgagcaatagagctcgttactgtgtcaatcaaatatagacagactactatgcagataatacgagcaaccatgacctaagcaagctacagaatatcaacagaataaccagctccatgtaccaccggatgcacgccctcagcttcttgatgtagacgctcatctgattgattctccc

SEQ ID NO: 9384 - DNA, 594 bp, Zea mays
  Clone ID: LIB3061-107-Q1-N6-G4
agcacataagaatctagaaatgtactttcttatttctgggaagccacaaacatcagacaaaaaactttattattgaactataactcataagaaatctaaaagagggcaccaccaatgatgggttgttggtagaacgctgctgggtttgtcaaagcaagttggttgaatggcagcaattgttgcagttgtaagagggtgccagcgttaggcgcagcgtgctggtagaacggcaacaactgtggttgtatcaagaaggtagcagggctcacaccagctagctggctgaatggtagtagttgttgctgctgtaaataagcaggagagttcaatgctgccagttggttgaatggaagaaattgctgggggtaggcagcaggtagctggctgaatggtagttgttgttgttgcaaataagaagcagagttcaatgcagctagttggttgaatggaagaaactgctgttgctgagagtaggcagcaaggtttgctagcacaagttgttgtagttgttgtgccctgatgttttgtgccaataaatgcaccaaaggtaactgatgtaatagggctgatgattgttggaggaacaagggtgat

SEQ ID NO: 9385 - DNA, 607 bp, Zea mays
  Clone ID: LIB3061-107-Q1-N6-G5
gggacaaacattgaaattttctggtttaagtcaagagtcccctcgaggccatgtcggcgctaaagaacaggtatggaaatgtctgttcggcgggatacaaacagaggctcggttcttcagtttactcctcgtcatcatccgctgcatccccggacccacctttaaggtgcagatgcttctccctcctctggaagtcggtcaggcccttgccactcccagtgacacccaccttacctctgtggtcgtccggtgacttgaagatgctctccttcttgcgaccggagaagaaccccacctttttggctttccccttggtttgaaactgctgccatgcattctgccttttgttttgggcaaattcaagctgctcaaagcgggattttgatttgaaagcatgtattttcttacgctttgcagctttaacatcctcagggtcacttggttcgatacgaagtttggccggcaagctacgcgcctgaaaatcagatgttgctgcttgttcaattttcctctttattgccatttttgtagcttcagcttccttttcagcttgtcccaaggcatcagctgcttcttcctcaagcagcctcacattatctgggtccac

SEQ ID NO: 9386 - DNA, 409 bp, Zea mays
  Clone ID: LIB3061-107-Q1-N6-G6
aaaatctggaaatgtaatttcttatttctggttggccacatacatcatccaaaaaactttattattgaattacaaccaataagcaatctaaaagagggcaccaccaaagatgtgttgttggtaggaggccgctcggcctgtcaaagcaaggtggacaaagggcaacaatgggtgtagttgcaagaggggggcggggccagccgcaaactgcaggaagaaaggcagcaactgtcgctgagacaagaaggaaacacggggcgccccaactagctggctaaatgggaggaggatttgctgctgcaaaaaaacagcggggaacagggcggccaattggttaaatggaaaaaggtgttggtgctgacaataagcagtagctaaaaggctgaatggtaatcggacgccaagaaca

SEQ ID NO: 9387 - DNA, 599 bp, Zea mays
  Clone ID: LIB3061-107-Q1-N6-G7
attatgcagggttcaccgtaacctagctgatctgatgaattcaacttggcaacaacatattagaaccgttataaggaaacctttaaacacaggcatgcaaggcacgtcgcaaaaggtccgtagcatgccgttacaccgttcagggagaggccgtgaaaggtggcggtgggtacatcaaggcatgagcctcacttccagagcttgcgcagggacatgttcttctccgtgtctttcttcatcaccttggccactgccatctcgaagtcctcctgtgtaacgtgcacccttctctcacggagagcaaacattccagcctctgtacagacggccttgagctcagctcctgaggccccattcatcttttctgcgatctttttcagatcgataccacgcatcaagttcattttccttgaatggatcttcagaatatcgaaacgtgagtcctcgttaggatttggaaactcaatcttcctgtctatgcggccaggcctcaaaagggcttgatccaaaatgtctattctgtttgttgccatcaaaaccttaattttgtttgaagcttcaaaaccatcaagctggtttagaagttcaagcatggtacg

SEQ ID NO: 9388 - DNA, 505 bp, Zea mays
  unsure (1)..(505): unsure at all n locations; Clone ID: LIB3061-107-Q1-N6-H11
gggaagcaaaagctccatattantgtgtagaggaactgtttacctatttattcattgcctccacatcaaacatgcatgacacttgatagaggcagattactgataaccagaagcacacgatggcgccacctgaagttattctttcagtttgtcactcattaactttcatcagcaacacctcttgtttatacaaaggtttgctccggttagcactgaatcatttacaggttcataaatcacaacagcctccaatccaacccttcgtttccacaggtgacagacaatcaaaaccactttttgctcagcagtttcgaaacggtcaagtctgtgtcgccgaacccatccataacggccttcgcggagtgaaattcggctcttgcggtaaagctgcttcgaacaactatgcatggcatgccaatgcgttcggctgcaaggacaccagattggctgcccgcaacaaggatgcagttttgcacgtcgcacccaacgtattctgaaccagctc

SEQ ID NO: 9389 - DNA, 534 bp, Zea mays
  Clone ID: LIB3061-107-Q1-N6-H3
gccacaaaattgcggatctcattaagaaaagagttgcaattttacaacaagagaacccctgaggagttagaggcagccactggtttcttcactagataatacacgaggcatctgtgtttcagtatacgtttgcgacagactatactctcatacaagctatacaactatgattggattaacagccaatagcactcgtcccagatattccaccagcagcagttcggcccggcagaccaaagggaatcaccccaatgcaaatcctcaccacctgcggcgcttcctgccataccaatacccaattgcagcaatcgacacagctgcaatgacaccggctgtggcatgccacgcataagtaggttttccgacaacagcaagcccactgtcaggcacctccttctggctctcctgaatggcgagtgccaggccttgtttctcgagttcacccatgtctgtgaccacagcttcccgccgaacagcgatcgatatggcctcgtactcttcccgacttccgccttcaagaaacgcacccgcgat

SEQ ID NO: 9390 - DNA, 385 bp, Zea mays
  Clone ID: LIB3061-107-Q1-N6-H7
agggaaaaggaaaattgattaaattggaccaaaaatttttttttttttttaatttgaaaaaaaaaaaagatccggaaaaaccaaataaaactccaaattttcttggccatccgtttccaattaaagtacccttaaaaaaattgttacctttttgggcaaaaaatttgaaaattaaaacttttttttggaaacctttccgccggcgggtttggcctcctcctcctaaatctcctccttgggaaaaaagatttttttgcaccccttgtaaaaaaaaaaaggaaatccgggggggggcataaactttatgcaattagggccaaaaacttgggaaaaggcgccggggcccttttttttgaagaagcaaaaaaaaagggggaggaagttt

SEQ ID NO: 9391 - DNA, 643 bp, Zea mays
  Clone ID: LIB3061-113-Q1-K6-A1
ttcagttgttattgaggaaattgaagaggatgatgacaaggctgctgttgctgaagtgcagaagggattgaagaagcaaatccgtgaaaatggtgatgagtctcaactccagcttgctgcaagaaatccacctactgaatccttggaaagtgaagatgaagatggttttcctgtatcattttctgaatcaaagaagagttctgagattgtttcaaacaagaatgggggaaaagacaaggagactagcaacaaagacctgaaaagaaaaagtggagccattagcgaccgtggtgattcttcaggggggaaagctgagattgatggggcatcaaagaaaaagaaaaagggcaaggacaaaagcactgttatggacacaggaaaagtaaacaacgaagaaaaggaggttaagctacacgattctccagctgatcctgtcggtataaaacagaagaaaaagaaaaacaagaacaaaagtgcttctgagggtgataccagtgagcaatctgctaagaacaacaatatcaataaagacactgaggaggcaagtgcgcaggaggccaataaaaagaacaagaaaaagaaggcacatgatataagcagaagtgaaagtcaggcaggaactggacttggtgagtcagatagc

SEQ ID NO: 9392 - DNA, 315 bp, Zea mays
  Clone ID: LIB3061-113-Q1-K6-A11
cccacgcgtccgtgcttatttccagcagcaaatactactaccatttggccagctagctacaacaagccccgcttccttcttgacacaacaacaagtgcttccgttctaccagcagtttgtggctaaccccgcaaccctcttacaactgcaacagttgctgccctttgtccaacttgctttgacaaacccagcagccttctaccaacaacacatcattggcggtgccctcttttagattgcttattagttgtaattcaataatgaagttttttggctgatgtatgtggcctcctagaaataagaagttatatttcc

SEQ ID NO: 9393 - DNA, 642 bp, Zea mays
  Clone ID: LIB3061-113-Q1-K6-A12
cgaccacaagcctgtgttcgccacggcggcggtgagctccccgccggagcagaagccgttcgtggcggcggcgggcgggctgcccccggcgttcccggagctggcggcgtactacgaccggccgtcggactcgatgccgcggctgcacgcggactactccagctgctcggagcaggtgctgtccccggagcagctggcgtgcgaccgggaggtgcagagccagcccaagatcagcgagtgggagcggaccttcgcctccgaccccgtgaaccccgcgggctccatgctcgaccccgtcgtcggccacgccggcggcgacccgctgctgcaggacatcctcatgtactggggcaagccgttctagacgacaccgcccatcatgtcctgaggggaggtgggggtggcgaagcatcctcggctgcggttggttggttgattgatctgtcttgggcagcgcaatgcaatgcaaccgcacggtgtgggcttgagtcaggcgagccgccattgttgacttgcaaggaggatataatatgaaactatagctggattacatggagaggcggcaatgagaccgtctggccccgccgcggaagtgagacggagacggagacggatggcgcagtgcatcgggtgtggtggatc

SEQ ID NO: 9394 - DNA, 650 bp, Zea mays
  Clone ID: LIB3061-113-Q1-K6-A2
caaggcgaggagcggagcggagaggagggcccttctgcttgtttctccgctttgcaagatgtcgtccccgagcaagcgccgcgagatggaccttatgaagctgatgatgagcgactacaaggtggagatggtgaacgacgggatgcaggaattcttcgtcgaattcaagggcccggccgaaagtatctaccaaggtggtgtctggaaggttcgggtagaactgcctgatgcatacccttacaaatccccgtccatcggcttcatcaacaagatttatcacccgaatgtcgatgagatgtctggctctgtctgtttggatgtcataaaccagacatggagcccaatgtttgatctagtaaatgtttttgaagtattccttccacagctgttgctgtacccaaatccttctgatccattaaatggggaggctgcagcactgatgatgcgtgatcggcctgtttatgaacagaaagtgaaagaatattgtgaaaagtatgctaaaccagaggacgctggcatcaccccggaagacaagtccagtgatgaagagcttagcgatgatgatgatgacgacgacgacaacgactccggggatgaagctatacttggcaatcctgatccttagtctgagtaggaaacagcgcagtcag

SEQ ID NO: 9395 - DNA, 648 bp, Zea mays
  Clone ID: LIB3061-113-Q1-K6-A3
atctttgacaaaacccctcatgtgcataaagacgcatttgttgctccaagtgcatcccttattggcgatgttcaagtcgggtcaggagcttccatttggtatgggtgcgtcttaagaggggatgcaaacatcatacaaattggatctgggaccaatatacaagacaattctcttatacatgtggctaaatctaatctaagtgggaaggtctttccaacaaccattggtaataacgtcacagtaggtcatagtgctgtgttacaaggatgcacggttgaggatgaggcttttgttggcattggggcaaccctattagatggtgttgttgttgaaaagcacggaatggtggctgctggagccctcgtacgacagaatactaggatcccttgtggagaggtatggggagggaaccctgccaaatttctgaggaagctcacagatgacgagatcagtttcattgcggaatcagctgccaactattccaatctgtccaaggtccatgctgctgagaatgccaaacctcttgaaaagatcgagtttgagaaggtgttgggcaagaagtttgctcaccaggatgagtatgattcctcgattggcgtcgctgaaggggcaccaccagagctcacgtccccaaatccagcccaatga

SEQ ID NO: 9396 - DNA, 461 bp, Zea mays
  Clone ID: LIB3061-113-Q1-K6-A4
cgagcacggggttgctgtagaggcaattgtcgaggtcggagatgcaaaggaggtgatatgtgaagtggctgagaagaaaaatgtcgatctgctggttcttggaagccacagtcgtgggccaatacagaggttgttccttgggagcgtcagtaactactgtgtacatcattctaagtgtccagttcttgtggtgaagaaccaaggctgatgaaggattcaactcccagctgctagtcctaatcatgttcgggtatttgtcaacgtatttgtaatgtgtagtacttgctttagccaaacgcattggcgaataaagtagcttgctttgcttcttggaagggccgaggctggactggaggagagttctttttctttttctttttttctggtcagtgtgcctttgctccggaatggcagagttgtaaataagaactacgaactttgtgcgtatttatggttgttgt

SEQ ID NO: 9397 - DNA, 630 bp, Zea mays
  Clone ID: LIB3061-113-Q1-K6-A5
gggaaacgccgagaagtccaggatcatcatggtcggcgacacgcttaagaaggcaggcgccgacggcgaaggcctcgtcaccatcaaagacctaggactgcgctgagggacaagtcaggaccatgcagccttgtccttgagagaccatttgctccttttccaatccatcagttgcatcaaaatgaagattaccacattctatttaacagaggacgagctgctgtggcctcttggaacagtgctgtttggtctacaaagatgaacgaatcttctactggggatggaaaattaggttttgctgtattctccccaaggttgctaagttctcaaggatgggctcttctgtccaatgagaaaggtggactcaatcagagtagcactaaccttgccaatcgcgtaagtgagattgttggtttatattctgatgaagacgatgacaatgctgagtgggcacatggtagctttcctttggaagagtacattaaagcactagaccgtgctaaaggtgaactgtactataatcattcactgggtatgcagtacagcaagataacagaacaaatatttgttgggtcatgtatacaaacagagaaagatgtgaagatgttatcagaaactatgggtattact

SEQ ID NO: 9398 - DNA, 522 bp, Zea mays
  Clone ID: LIB3061-113-Q1-K6-A6
ggcaactacttattggcatcatcgtcttcatatttgccacggttggtgtcctgcttgttatggagaccctgagtgcattccttcacgcactgaggcttcactgggtggagttccagaacaagttctatgaaggtgatggttacaagttcgccccattctcctttgcgctgattcgtgaggaagaagattgagatcgtcccatgtagccgatgtacaatctttgatggcctttgttcccggaacaaatcattttttcatctgttgtctcggatggatcataaacctcagtcccctttgtttagacatgggacgaacagcaccatttttccttgtttagctatgcagaggatttttgggtcggttggcggcaaacatgggggtgatatcaccattgtatgatgctaataagtagttgccgattgggcggtgtgttggatataaataagcactgtattgaaggttaaacattccgctacgttcgttgtcaataaagagtgctatttacgctgctggcgttagtca

SEQ ID NO: 9399 - DNA, 637 bp, Zea mays
  Clone ID: LIB3061-113-Q1-K6-A7
gccattattccacagttcctcccaccagttacttcaatgggcttcgaacatccagccgtgcaagcctacaggctacaactagcgcttgcggcgagcgccttacaacaaccaattgcccaattgcaacaacaatccttggcacatctaaccctacaaaccattgcaacgcaacaacaacaacaacaacagtttctgccatcactgagccacctagccgtggtgaaccctgtcacctacttgcaacagcagctgcttgcatccaacccacttgctctggcgaacgtagctgcataccagcaacaacaacagctgcaacagtttatgccagtgctcagtcaactagccatggtgaaccctgccgtctacctacaactactttcatctagcccgctcgcggtgggcaatgcacctacgtacctacaacaacagttgctgcaacaaattgtaccagctctgactcagctagctgtggcaaaccctgctgcctacttacaacagttgcttccattcaaccaactggctgtgtcaaactctgctgcgtacctacaacagcgacaacagttacttaatccattggcagtggctaacccattggtcgctaccttcctgcagcagcaacaacaattgctgccataca

SEQ ID NO: 9400 - DNA, 671 bp, Zea mays
  Clone ID: LIB3061-113-Q1-K6-A8
cagaaacacacctagcgaagcgcactagcaacgacctaacaacaatggcttccaagacattatccctccttgcgcttcttgccctttttgtgagtgcaacaaatgcgttcattattccacaatgctcacttgctccgagtgccattattccacagttcctccctccagttacttcaatgggcttcgaacacccagctgtgcaagcctataggctacaacaagcgcttgcggcgagcgtcttagaacaaccaattgcccaattacaacaacaatccttggcacatctaaccatacaaaccatcgcaacgcagcagcaacaagcactgagccacctagccgtggtgaaccctatcgcctacttgcaacaacagctgcttgcatccaacccacttgctttggcaaacgtagctgcataccaacaacaacaacagttgcaacagtttctaccagcgctcagtcaactagccatggtgaaccctatcgcctacctacaacagcaacaacttctttcatctagcccgctcgctatgggcaatgcacctacatacctgcaacaacagttgttgcaacaacagttgctgcaacaaattgtaccagctcttactcagctagctgtggcaaaccctgctgcctacttgcaacaactacttccattcaaccaactgactgtg

SEQ ID NO: 9401 - DNA, 645 bp, Zea mays
  Clone ID: LIB3061-113-Q1-K6-A9
cagaaacacaccaagcgaagcacattagcaacaacctaacaacaatggctaccaagatattatccctccttgcgcttcttgcgctttttgcgagcgcaacaaatgcgttcattattccacaatgctcacttgctccaagttccattattacacagttcctcccaccagttacttcaatgggcttcgaacacccagctgtgcaagcctataggctacaacaagcaattgcggcgagcgtcttacaacaaccaatttcccagttgcaacaacaatccttggcacatctaacaatacaaaccatcgcaacgcaacagcaacaacaattcctaccagcactgagccacctagccatggtgaaccctgccgcctacttgcaacagcagttgcttgcatcaaacccacttgctctggcaaacgtagttgcaaaccagccacaacaacagctgcaacagtttctgccagcgctcagtcaactagccatggtgaaccctgccgcctacctacaacagcaacaactgctttcatctagcccgctcgctgtggccaatgcacctacatacctgcaacaacaattgttgcaacagattgtaccagctctgactcagctagttgtggcaaaccctgctgcctacttgcaacagctgc

SEQ ID NO: 9402 - DNA, 654 bp, Zea mays
  Clone ID: LIB3061-113-Q1-K6-B1
gggaaatctgggaaggatggctggtatcctcctggtcatggtgatgtgtttccctctttgaataacagcggaaaacttgacatcttattggctcagggcaaagagtatgtctttgttgcaaactcagacaacttgggtgctatagtcgacatcaagatcctaaaccatctgatcaataaccagaacgagtactgcatggaggttactccaaagacgctggctgacgttaagggtggcactctcatctcttacgaaggaagagttcagcttttggagattgcccaagtacccgatgagcatgtgaatgaatttaaatcaatcgagaagtttaagatattcaacactaacaacttgtgggtgaaccttaaagctatcaagagactcgtagaggctgaggcacttaagatggaaattattccaaaccccaaggaagttgatggtgtgaaagtccttcaactcgaaaccgcagctggtgcagctattcggttcttcgacaaagcgattggaattaatgttccccgctcaaggtttctcccagtgaaggctacatctgatctgttgcttgtgcagtctgatctttacaccttggttgatggctttgtcatccgcaacccatccagagcgaatccagctaacccttcaattgagcttgga

SEQ ID NO: 9403 - DNA, 646 bp, Zea mays
  Clone ID: LIB3061-113-Q1-K6-B10
cggaccgcgacggtgccgtcacgctgcgcgagttcttcgcagtttgcgagcgcggacagagacggggatggctcgctcaacgccgtcgaattcaacgacttcctgcatcctgaagacagcagccaagagagcgtgatgctgtggctactcaaggacaagctaagcgagatggaccatgacggagacggcaggctaagccaggaggagttcgtcgctcaatctcacatcatcatctccggcgcgcgtcacgccgacgacggtggccatgcccatgaccttgagcgtgccgaagctgcgaagaagttcacagaactggacgccgacaaggacaactacttgacggtggaagaagcgcgctgcgtactgcagagcctcgtcacgggggagttctcctatgctacctcacatgccaagttcttgatgaaggctgatgtgaaccatgacggcaaactgtcgctggaggagatgctagacgactacatatccttctacagcaccgtgtatatggatgatcattacgccagcgaaggtgaagtcgatagtgattcccgcgacgagctatgagcagttaaggcaggacaggacagcaagtcggaggttctttactttcaaatacactaggattttgcagccaaaggaaatggga

SEQ ID NO: 9404 - DNA, 642 bp, Zea mays
  Clone ID: LIB3061-113-Q1-K6-B12
tgcttgtggtggctacggcggcgagttgaggaagtggatgcagttggtgctgcgccggagagccccattctcctacgtcgacggcgtagctgcgccgtctacagccgcaagatcttcggcttcgaccccggtcgtgcccgcacggcgaccacggtgcggtaccggtatagggttctcggcggcggggacgggtggtgatggggagatttttcatgtccgttcggattcgtctgggaccctcgcgcaacggccgttgtgcgaggccttttctggccgtccagatgagatcgaacggttgggaaaaaagcagagtttggtttctttgcgccgctggcggtcgcggcccaagcctgaggaggtcacagccccacaggcgcccattcggacttccctttattccccttcctatataatcccatcgactgccatcttcagatcttcttccgcttccaacttccgttccgcaaattgaaagctcggcgttgccctgcgcccctgcctcgagctcgaaggactttgtccctatacgtcgttgtccagctcctcgcatattgtggcctggtgcagattggagatccgcccggacttggatcgagtcctcctgtctttggacattcattggagtgctccattcattgagac

SEQ ID NO: 9405 - DNA, 579 bp, Zea mays
  Clone ID: LIB3061-113-Q1-K6-B2
cctagccgtggtgaaccctgtcacctacttgcaacagcagctgcttgcatccaacccacttgctctggcgaacgtagctgcataccagcaacaacaacagctgcaacagtttatgccagtgctcagtcaactagccatggtgaaccctgccgtctacctacaactactttcatctagcccgctcgcggtgggcaatgcacctacgtacctacaacaacagttgctgcaacaaattgtaccagctctgactcagctagctgtggcaaaccctgctgcctacttacaacagttgcttccattcaaccaactggctgtgtcaaactctgctgcgtacctacaacagcgacaacagttacttaatccattggcagtggctaacccattggtcgctaccttcctgcagcagcaacaacaattgctgccatacaaccagttctctttgatgaaccctgccttgcagcaacccatcgttggaggtgccatcttttagattacatatgagatgtactcgacaatggtgccctcataccgacatgtgttttctagaaataatcaatatattgattgagatttatctcg

SEQ ID NO: 9406 - DNA, 647 bp, Zea mays
  Clone ID: LIB3061-113-Q1-K6-B3
gagggaaccgaaaactcaggtgagggcttcttccgccgcacccgccgtcttatccgaactcctcgacccgattggcgcgattcgccgtttgttttcccgaatcggcgacgggatccgcccgattcggccgtcgatctgcgctgattcggcccgcgcgccgtcggggttcgctttcttctgcgcagggtctcgaatttcctaggagcggaggcgatggctgggaagggaggaaaaggattgctcgccgcgaagacgacggcggccaagtcggcggagaaggacaaggggaagaaggcccccatctcacggtcctcccgcgcgggcctccagtttcctgttggacgaatccaccgtcagctgaagcaaaggactcaggcaaatggccgcgttggtgccactgcagccgtctactctgccgccatcctggagtacttgactgccgaggttctggagctggctgggaacgctagcaaggatctgaaggtgaagcgtatcacccctcgccacctacagttggccattcgcggagacgaggagctggacaccctcatcaagggcaccatcgcaggtggaggtgtcatcccgcacatccacaagtccctgatcaacaagtcctccaaggagtgaagactagggaatgcacattg

SEQ ID NO: 9407 - DNA, 198 bp, Zea mays
  Clone ID: LIB3061-113-Q1-K6-B5
ggtggctaaccccgcaaccctcttacaactgcaacagttgctgccctttgtccaacttgctttgacaaacccagcagccttctaccaacaacacatcattggcggtgccatcttttagattgcttattagttgtaattcaataatgaagttttttggctgatgtatgtggcctcctagaaataagaagttacatttcc

SEQ ID NO: 9408 - DNA, 612 bp, Zea mays
  Clone ID: LIB3061-113-Q1-K6-B6
caattttgattaagtactgataatatttgttgattttgcagatgtgaaggacataaagtgtgtgataaattatgattttccaacaactcttgaagattatattcacaggataggtcgaactggccgtgctggtgctagcggaactgcatttacttttttcacacacgcaaatgcaaagttctcaaggaatctagtgaagattctgcgagaagctggccaagttgtgaatcctgccttagaatccatgtccaggtcttcgaactcaacgggaggaggcaattttcggtcgagaggcagaggtgggtttggtaaccggggccatatgtctggatcaaatacctttcctttaggaggaagaaggccatattgatgtgtgcaaaagaactgtgggagtatgggactatttgtatactactcggcattaagtgcattctttgggaaatttctgagaaatttcccctactaccaggattgataacaccatcgattttcgctacagtacctggagcttcttatatgaaagaacaacacatcaactatctagcaacagcatatgcattccattcagatatttcttttggaaggaccctgtcttgttttagtggagtccct

SEQ ID NO: 9409 - DNA, 641 bp, Zea mays
  Clone ID: LIB3061-113-Q1-K6-B8
caactagcaacatagaaagcacaatagtgtaccaacaatggcagccaaaatattttgcctccttatgctccttggtctttctgcaagtgctgctacggcgaccattttcccgcaatgctcgcaagctcctatagcttcccttcttcccccgtacctctcaccagcggtgtcttcggtatgtgaaaacccaattcttcaaccctacaggatccaacaggcaatcgcagctggcatcttacctttatcacccttgttcctccaacaatcatcagccctattacaacagttacctttggtgcatttattggcacaaaacatcagggcacaacaactacaacaacttgtgctagcaaaccttgctgcctactctcagcaacagcagtttcttccattcaaccaactaggttcattgaactctgcttcttatttgcaacaacaacaactaccattcagccagctacctgctgcctacccccagcaatttcttccattcaaccaactagcagcattgaactctcctgcttatttacagcagcaacaactactaccattcagccagctagctggtgtgagccctgctaccttcttgacacaaccacagttgttgccgttctaccagcacgttgcgcctaacgctggca

SEQ ID NO: 9410 - DNA, 650 bp, Zea mays
  Clone ID: LIB3061-113-Q1-K6-C10
agagaagagtatctagaagtttgagcatagaaaggtaaaaactttaaagccaaatcagaaaagtcaaagtcgatttaggattttattaaaagtacaattttgttagaaaacttgtctatgagttggatcagttcttaccagaggttgcaattattataggaaaatttataaaccaaatatcaaccctaaaacacttcccaaagttcctaagccaaaagacaactcaaaactcactcaagaatagtggggaggagacgaaaacaactcaagaacgaaacccattatattttgacatgagttaaaagcctggaagtcgcaatgtgggtacgaccaaacttcctaaaaatcaaatgaacttagatgtcatatattcaaatcatcgaaggatctcctaacaaaataaaagtgggaaataaagattacaagctagagagatacttgaatggtttagcccttccctcgtaggttttgttcggttattcccattccatgtgaattatatgagattgaaagaaactaggaagaattttgattaaatagagatttaaatccactcaatccctgcaatccatatggattgatattaaaaatgaacaaaccctcatatagggtcattcttatttgctaaactaccactagatacatagaga

SEQ ID NO: 9411 - DNA, 540 bp, Zea mays
  unsure (1)..(540): unsure at all n locations; Clone ID: LIB3061-113-Q1-K6-C11
agcaaaccttgctgcctactctcagcaacaactacaacaacttgtgctagcaaaccttgctgcctactctcagcaacaacagtttcttccattcaaccaactagctgcattgaactctgcttcttatttgcaacaacaacaactaccattcagccagctatctgctgcctacccccagcaatttcttccattcaaccaactgacagctttgaactctcctgcttatttacagcagcaacaactactaccattcagccagctagctggtgtgagccctgctaccttcttgacacaaccacaattgttgccgttctaccagcacgctgcgcctaacgctggcaccctcttacaactgcaacaattgctgccattcaaccaacttgctttgacaaacccaacagcattctaccaacaacccatcattggtggtgccctcttttagatttcttatgagttatagttcaataataaagttttttgtctgatgtttgtggcttcccagaaataagaaagtacatttctagattcttaaannaaaaa

SEQ ID NO: 9412 - DNA, 534 bp, Zea mays
  Clone ID: LIB3061-113-Q1-K6-C3
agacaagccgctcttgttgattattccgttcgttagttccgtcgcggagctacgctaagcctacgcccatcggcccctgttttcctaatccgcttctcctgcttccggggaaatttcgtgtccagtatcttgatcttccgccgccgcgcttcacgccagggctccttccaccggcgtcctccttaccgtcgtcctctactggtgctggactgctgcgggggtggagatcggcttagatcaactcttaattttgccgggactctttagagggcgcgtgcgctggtacagcaaaaaatgagtgataacctgatggaaaaggttagcgcctttggtgagcgcctgaagatcaccgggacggaggtcagcaagaagatgacggccggaatgagctccatgagcttcaagatgaaggagttgttccaggggcagactcccgctgataagaatgttgaggacgccaccttggagaatcttgacgggcctgattggaactcaaacttggagatttgcgacttgatcaacacagagaaagtt

SEQ ID NO: 9413 - DNA, 656 bp, Zea mays
  Clone ID: LIB3061-113-Q1-K6-C4
aaaaagagaaatagaggagaatgggaagaagcgtgagcaaatttggggttattgcaacttcccaaattgtaagcggcgatatagagcagagggccgccaaggtacaactgcatttaagaatcatttgaggtccgcacacagcatagttcgaggccaacaacaacttaaatttgagaaggaccttggtaataacattacccatatccagcctttcatgtatgatcaagaagttagcgtgaagaaacttatcatggcaataattatgcatgattatcctttcaatatagtagagcatggatatttcgttgatttcattaaatcacttcatcctagctttccaatcaagagttgtaatgctgttggtaaagaagtaatggatacatatttggaagagaaggagaaattatatgcacatttaaaaactgtgcattgtcgctttagtgtaaccatggatatgtggacatcatgctcgaataaatcatacatgtgtgttactgttcattggataaatgatgattggtgtattcagaagaggattattggtttcttcaatgtcaaaggacgacacactggtaaaaagttgtcagagacctttactgaagctatggttagatggaatcttgataagaagctattttccttgaccttggataatg

SEQ ID NO: 9414 - DNA, 635 bp, Zea mays
  Clone ID: LIB3061-113-Q1-K6-C5
cgttcttctcggcctcctccgcgtcggcgccctacggctacggcgccggcggatggagctacgactcgctcaagaacttccgccagatcacccctgccgtccagacccgcgcaattagcatttcgtatttttttaaaaatatatatcagtcgctggtttcgtgcgttccagaaattctcctgcgggttgcgtgtagctgatgcgtaattccctgacgtaatctatgattcgcgcgcgtcgtgttccttgcatttagaactgcaactgtgcggatgccaccgattcgattgattcgtcactttaagaacatgatccggttagaacagcaagatatgataaatcgatttgaatccaaatctgaccatctggttcggcttggttgcctgcaggtctacctcaccctgtgcgcggcgctggcctcgtcggcggtgggcgcttacctgcacgtggtctggaacatcggcgggacgctgacaatgctcggttgcgtcggcagcatcgcctggctcttctcggtgcccgtctacgaggagaggaagaggtatgggctgctgatggcggctgccctcctggaaggcgcttcggtcggacccctcgtaagcttcgcgtggaatttgacccaagcatcctggtga

SEQ ID NO: 9415 - DNA, 459 bp, Zea mays
  Clone ID: LIB3061-113-Q1-K6-C6
gcagatcgttctgctgggcacgggcaagaagaagttcgagcgcatgctcatgagcgccgaggagaagttcccaggcaaggtgcgcgccgtggtcaagttcaacgcggcgctggcgcaccacatcatggccggcgccgacgtgctcgccgtcaccagccgcttcgagccctgcggcctcatccagctgcaggggatgcgatacggaacgccctgcgcctgcgcgtccaccggtggactcgtcgacaccatcatcgaaggcaagaccgggttccacatgggccgcctcagcgtcgactgtaacgtcgtggagccggcggacgtcaagaaagtggccaccacattgcagcgcgccatcaaggtggtcggcacgccggcgtacgaggagatggtgaggaactgcatgatccaagatctctcctgaaaggcccttgccaagaactggaaaaacgtgctgctcag

SEQ ID NO: 9416 - DNA, 578 bp, Zea mays
  unsure (1)..(578): unsure at all n locations; Clone ID: LIB3061-113-Q1-K6-C7
cctgcaggtccgggccgancttcccgggtaattggcacatctaaccatacaaaccatcgcaacgcagcagcaacaagcactgagccacctagccgtggtgaaccctatcgcctacttgcaacaacagctgcttgcatccaacccacttgctttggcaaacgtagctgcataccaacaacaacaacagttgcaacagtttctaccagcgctcagtcaactagccatggtgaaccctatcgcctacctacaacagcaacaacttctttcatctagcccgctcgctatgggcaatgcacctacatacctgcaacaacagttgttgcaacaacagttgctgcaacaaattgtaccagctcttactcagctagctgtggcaaaccctgctgcctacttgcaacaactacttccattcaaccaactgactgtgtcgaactctgctgcgtacctacaacagcgacaacagttacttaatccactagcggtggctaacccattggtcgctgccttcctacagcagcaacaattgctgccatacaaccagttctctttgatgaaccctgctttgtcgtggcagcaac

SEQ ID NO: 9417 - DNA, 492 bp, Zea mays
  Clone ID: LIB3061-113-Q1-K6-C8
tagcaacatagaaagcacaatagtgtaccaacaatggcagccaaaatattttgcctccttatgctccttggtctttctgcaagtgctgctacggcgaccattttcccgcaatgctcgcaagctcctatagcttcccttcttcccccgtacctctcaccagcggtgtcttcggtatgtgaaaacccaattcttcaaccctacaggatccaacaggcaatcacagctggcatcttacctttatcacccttgttcctccaacaatcatcagccctattacatcagttacctttggtgcatttattggcacaaaacatcagggcacaacaactacaacaacttgctttgacaaacccagcagcctcctaccaacaacacatcattggtggtgccctcttttagattgcttattagttgtaattcaataataaagttttttggatgatgtatgtggccaaccagaaataagaagttacatttccagattctaatgtg

SEQ ID NO: 9418 - DNA, 631 bp, Zea mays
  unsure (1)..(631): unsure at all n locations; Clone ID: LIB3061-113-Q1-K6-C9
gcttcagtatgtgaaaacccagctcttcagccctataggctccaacaagcaatcgcagcaagcaacatacctttatcacccttgttgtttcaacaatcgccagccctatctttggtgcagtcattggtacaaaccatcagggcacagcagctgcagcaactcgtgctacctgtgatcaaccaagtagctctggcaaacctttctccctactctcagcaacaacaatttcttccattcaaccaactgtctacactgaaccctgctgcttatttgcagcaacaactattaccattcagccagctagctactgcctactctcagcaacaacaacttcttccatttaaccaattggccgcactgaaccccgctgcttatttgcagcagcaaatactactaccatttagccagctagctgcagcaaaccgtgcttccttcttgacacagcaacagttgctgcctttctaccagcagtttgcggctaaccccgcaaccctcttacaactacaacaattgttgccctttgtccaacttgctntgacagaccgagcggcctcctaccaacaacacatcattggtggtgccctcttttagattgcttattagttgtaattcataantaaagtttttggat

SEQ ID NO: 9419 - DNA, 432 bp, Zea mays
  Clone ID: LIB3061-113-Q1-K6-D1
cctagccgtggtgaaccctgtcacctacttgcaacagcagctgcttgcatccaacccacttgctctggcgaacgtagctgcataccagcaacaacaacagctgcaacagtttatgccagtgctcagtcaactagccatggtgaaccctgccgtctacctacaactactttcatctagcccgctcgcggtgggcaatgcacctacgtacctacaacaacagttgctgcaacaaattgtaccagctctgactcagctagctgtggcaaaccctgctgcctacttacaacagttgcttccattcaaccaactggctgtgtcaaactctgctgcgtacctacaacagcgacaacagttacttaatccattggcagtggctaacccattggtcgctaccttcctgcagcagcaacaacaattgctgccatacaacca

SEQ ID NO: 9420 - DNA, 647 bp, Zea mays
  Clone ID: LIB3061-113-Q1-K6-D10
gggttgtcttctcctccccctccggttcgggttcgggttcgtgaggttctccggggttcggtttcgtgggtgagcggatcgagatggcggcgtcggatgttgagtaccgctgcttcgtcggcggcctcgcctgggccacggacgaccactccctccacaacgccttcagcacctacggcgaggtcctcgagtccaagatcatcctcgatcgggagacgcagaggtcccgcggcttcggcttcgtcaccttctccacggaggaggcgatgcggaacgccatcgagggcatgaacggcaaggagctggacggccgcaacatcaccgtcaacgaggcccagtcccgcggcggccgtggaggcggcggcggcggcgggtacggtggtggccgtggaggcggcggctacggcggtggcgggcgccgtgatggcggcggcggctacggcggtggcggcggctacggtggtggcggcggcggctacggtggtggtggcggcggctacggcggtggcaaccgtggcggcggctacggcaactccgacgggaactggaggaactgagcggtggggcccgcgcggccaagttatcctgttcgctaccgtgttgtttaccctagtccagagtgtttatcttcgttcgtctcgtgtttg

SEQ ID NO: 9421 - DNA, 643 bp, Zea mays
  Clone ID: LIB3061-113-Q1-K6-D11
gaccaactagcaacatagaaagcacaatagtgtaccaacaatggcagccaaaatattttgcttccttatgctccttggtctttctgcaagtgttgctaccgcaaccattttcccacaatgctcacaagctcctatagcttcccttcttcccccatacctctcaccagcggtgtcttcaatgtgtgaaaacccaattgttcaaccctacaggatccaacaggcaatcgcaacaggcatcttaccattatcacccttgttcctccaacaaccgtcagccctattacagcagttacctttggtccatttggtggcacaaaacatcagggcacaacaactacaacaacttgtgctagcaaaccttgctgcatactctcagcaacatcagtttcttccattcaaccaactggctgcattgaactctgctgcttatttgcaacaacaattaccattcagccagctagttgctgcctacccccagcaatttcttccattcaaccaactagcagcattgaactctgctgcttatttacagcagcaacaactactaccattcagccagctagctgatgtgagccctgctgccttcttgacacaacaacagttgttgccgttctacctgcacgctatgcctaacgctggcacc

SEQ ID NO: 9422 - DNA, 654 bp, Zea mays
  Clone ID: LIB3061-113-Q1-K6-D12
ccatgattggtctgttcaatttttttcagctatgggatgccacacatgaagtttatttaaccattgatgatggttgccatatctggagattctctggttcggttgaattctcggcgatatcggcctatagtttcttccatggtttggtctcctttgatccttggaagcgtgtttcaaaaacttgggctccacctaagttcaagattttcatttggctagctgtccgaaatcgctgttggactgcagaccgattgccttggagaggactggcacacctagttcattacgttctttgcgacctggaagaggagaatactaatcacattttgttttcctgtgttttctcgagggttctggtttagagttttctcccggctggggtatattgaccatgtgttggggtcccaggagcaatcgtttgcagattggtggtgaaaggcttgcaaatatctcccaaaagaaaaaaaaggaagggcatggattcaatgattatgttgggagcttggatcctatggaagcatcgcgatgcctgcgtcttggaaggtttgcagccgaatatgtggagtgttcttctgcatgctcttgaagatgaacaacatctctggtgtctcgctggagtgcaaggactgcagagtttaggcttgggctccctga

SEQ ID NO: 9423 - DNA, 648 bp, Zea mays
  unsure (1)..(648): unsure at all n locations; Clone ID: LIB3061-113-Q1-K6-D2
ctagcaacatagaaagcacaatagtgtaccaacaatggcagccaaaatattttgcttccttatgctccttggtctttctgcaagtgttgctaccgcaaccattttcccacaatgctcacaagctcctatagcttcccttcttcccccatacctctcaccagcggtgtcttcaatgtgtgaaaccccaattgttcaaccctacaggatccaacaggcaatcgcaacaggcatcttaccattatcacccttgttcctccaacaaccgtcagccctattacagcagttacctttggtccatttggtggcacaaaacatcagggcacaacaactacaacaacttgtgctagcaaaccttgctgcatactctcagcaacatcagtttcttccattcaaccaactggctgcattgaactctgctgcttatttgcaacaacaattaccattcagccagctagttgctgcctacccccagcaatttcttccattcaaccaactagcagcattgaactctgctgcttatttacagcagcaacaactactaccattcagccagctagctgatgtgagccctgctgccttcttgacacaacaacagtntgtgccggtctacctgcacgctatgcctaacgctggcaccctcttacaact

SEQ ID NO: 9424 - DNA, 533 bp, Zea mays
  unsure (1)..(533): unsure at all n locations; Clone ID: LIB3061-113-Q1-K6-D3
ccttagtcatgactccgatcttagtagttctcgatcccacgagctcgtagcttcgtgtagattattattattcagtttgtacttatgtttggtgtgatgttaattttatctataccatgtttgtttgtattgctacgactagcagtgaggtcgcgaggatctgaagaatcatcctggtacctggaatctcaagtgccaggcaagttgtgcccttgaccacttttcacccaataatgttctttaatgtcattattcatgcataggtttaattttgacgggacccaatatgtcaccctagtctgtttatccattttaccttgtttacccctgaatcatttgagtagttttgctattactttatattgttttgggttaatatttcattatatccatgtaccaattatgttgntattttatttatgttcatgtcaagatcattattatctttaattggaacatggagcttaacttgagaaacacgtgccacaacaagggtggaatgggacgcccttggctgactaataaggaaagct

SEQ ID NO: 9425 - DNA, 656 bp, Zea mays
  Clone ID: LIB3061-113-Q1-K6-D4
tattattgagaccaactagcaacatagaaagcacaatagtgtaccaacaatggcagccaaaatattttgcctccttatgctccttggtctttctgcaagtgctgctacggcgaccattttcccgcaatgctcgcaagctcctatagcttcccttcttcccccgtacctctcaccagcggtgtcttcggtatgtgaaaacccaattcttcaaccctacaggatccaacaggcaatcacagctggcatcttacctttatcacccttgttcctccaacaatcatcagccctattacatcagttacctttggtgcatttattggcacaaaacatcagggcacaacaactacaacaacttgtgctagcaaaccttgctgcctactctcagcaacagcagtttcttccattcaaccaactagctgcattgaactctgcttcttatttgcaacaacaacaactaccattcagccagctacctgctgcctacccccagcaatttcttccattcaaccaactggcagcattgaactctcctgcttatttacagcagcaacaactactaccattcagccagctagctggtgtgagccctgctaccttcttgatacaaccacagttgttgccgttctaccagcacgctgcgcctaacgctggcaccc

SEQ ID NO: 9426 - DNA, 642 bp, Zea mays
  unsure (1)..(642): unsure at all n locations; Clone ID: LIB3061-113-Q1-K6-D5
caactagcaacatagaaagcacaatagtgtaccaacaatggcagccaaaatattttgcctccttatgctccttggtctttctgcaagtgctgctacggcgaccattttcccacaatgctcacaagctcctatagcttcccttcttcccccgtacctctcaccagcggtgtcttcggtatgtgaaaacccaattcttcaaccctataggatccaacaggcaatcgcagctggcatcttacctttatcacccttgttcctccaacaatcatcagccctattacagcagttacctttggtgcatttattggcacaaaacatcagggcacaacaactacaacaacttgtgctagcaaaccttgctgcctactctcagcaacaacagtttcttccattcaaccaactagctgcattgaactctgcttcttatttgcaacaacaacaactaccattcagccagctatctgctgcctacccccagcaatttcttccattcaaccaactgacagctttgaactctcctgcttatttacagcagcaacaactactaccattcagccagctagcntggtgtgagccctgctaccttcttgacacaaccacaattgttgccgttctaccagcacgctgcgcctaaacgctgca

SEQ ID NO: 9427 - DNA, 656 bp, Zea mays
  Clone ID: LIB3061-113-Q1-K6-D6
cgttgctcgcctcgggtcaaaccctaagcagggagttgatttatccgctgcagccatgagtaagttgcagtctgagtctgtcaaggatgccatctcccagattgttggggatgccaaggagaagaataggaagttcactgagactgtggaacttcagattggtctgaagaattatgatccacagaaggacaagcgtttcagtggctctgttaagttgccccatatccctcgtcccaagatgaaggtgtgcatgcttggtgatgcccagcatgttgaggaggccgagaagatgggacttgactacatggatgttgaggctctcaagaaaatgaacaagaacaagaagcttgttaagaggcttgccaagaagtaccatgctttcttggcatcagaggccatcatcaagcagattccccgtctccttggtcctggtctcaacaaggcaggcaagttcccgaccctggttactcaccaggaatccctcgagtccaaggtgaacgagactaaggcaaccgtcaagttccagctcaagaaggtcctttgcatgggtgtcgccgtcggcaacttggcgatggaggagaagcagatccagcagaacatccagatgagcgtcaacttcccttgttcccttctgaagaagaactggcagaatgtga

SEQ ID NO: 9428 - DNA, 591 bp, Zea mays
  Clone ID: LIB3061-113-Q1-K6-D7
cccgggcactaccctactcaaccgccccggcctcagcctcatccccagccacacccatgcccgtgccaacagccgcatccaagcccgtgccagctgcagggaacctgcggcgttggcagcaccccgatcctgggccagtgcgtcgagtttctgaggcatcagtgcagcccgacggcgacgccctactgctcgcctcagtgccagtcgttgcggcagcagtgttgccagcagctcaggcaggtggagccgcagcaccggtaccaggcgatcttcggcttggtcctccagtccatcctgcagcagcagccgcaaagcggccaggtcgcggggctgttggcggcgcagatagcgcagcaactgacggcgatgtgcggcctgcagcagccgactccatgcccctacgctgctgccggcggtgtcccccactgaagaaactatgtgctgtagtatagccgctggctagctagctagttgagtcatttagcggcgatgattgagtataatgtgtcacgcatcaccatgggtgggagtggcagtgtgagcaatgaccctgatgaacaattgaaatgaaaagaaaaaaggattggttcc

SEQ ID NO: 9429 - DNA, 651 bp, Zea mays
  Clone ID: LIB3061-113-Q1-K6-D8
catcaatcatcattcatcttagtagtataggcaccaaatcaaatctgcaacatcaattatctaactccaaaaaccatgaagctggtgcttgtggttcttgctttcattgctttagtatcaagtgtttcttgtacacagacaggcggctgcagctgtggtcaacaacaaagccatgagcagcaacatcatccacaacaacatcatccacaaaaacaacaacatcaaccaccaccacaacatcaccagcagcagcaacaccaacaacaacaagttcacatgcaaccacaaaaacatcagcaacaacaagaagttcatgttcaacaacaacaacaacaaccgcagcaccaacaacaacaacaacaacaacagcaccaacaacaacatcaatgtgaaggccaacaacaacatcaccaacaatcacaaggccatgtgcaacaacacgaacagagccatgagcaacaccaaggacagagccatgagcaacaacatcaacaacaattccagggtcatgacaagcagcaacaaccacaacagcctcagcaatatcagcagggccaggaaaatcacaacagcaacaatgtcattgccaggagcagcaacagactaacaagtgcagctataactactatagcagtagctcaaatctaaaaa

SEQ ID NO: 9430 - DNA, 656 bp, Zea mays
  Clone ID: LIB3061-113-Q1-K6-E1
attttgagcattcagaacacacctagcgaagcgcactagcaacgacctaacaacaatggctaccaagatattatccctctttgcgcttcttgccctttttgtgagcgcaacaaatgcgttcattattccacaatgctcacttgctcctagtgccattattccacagttcctccctccagttacttcaatgggcttcgaacacccagctgtgcaagcctacaggctacaacaagcgcttgcggcgagcgtcttacaacaaccaattgcccaattacaacaacaatccttggcacatctaaccatacaaaccatcgcaacgcaacagcaacaacaatttctaccagcactgagccaactagctgtggtgaaccctgtcgcctacttgcaacagcagttgcttgcatccaacccacttgctctggcaaacatagttgcataccaacaacaacaacaattgcaacagtttctaccagcgctcagtcaactagccatggtgaaccctgccgcctacctacaacagcaacaactgatttcatctagccctctcgctgtggttaatgcacctacatacctgcaacaacagttgctgcaacagattgtaccagctctgactcagctagctgtggcaaaccctgctgcctacttgcaacagctgc

SEQ ID NO: 9431 - DNA, 634 bp, Zea mays
  Clone ID: LIB3061-113-Q1-K6-E10
caactagcaacatagaaagcacaatattgtaccaataatggcagccaaaatattttgcctcattatgctccttggtctttctgcaagtgctgctacggcgagcattttcccgcaatgctcacaagctcctatagcttcccttcttcccccatacctctcaccagcgatgtcttcagtatgtgaaaatccaattcttctaccctacaggatccaacaggcaatcgcagcaggcatcttacctttatcacccttgttcctccaacaatcatcagccctattacagcagttacctttggtgcatttattggcacaaaacatcagggcacaacaactacaacaactcgtgctagcaaaccttgctgcctactctcagcaacagcagttacctttggtgcatttgttggcacaaaacatcagggcacaacaactacaacaactcgtgctagcaaaccttgctgcctactctcagcaacaacagtttctgccattcaaccaactagctgcattgaactctgctgcttatttgcagcaacaacaactactaccattcagccagctagctgctgcctacccccggcaatttcttccattcaaccaactggcagcattgaactctcatgcttatgtacaacaa

SEQ ID NO: 9432 - DNA, 653 bp, Zea mays
  unsure (1)..(653): unsure at all n locations; Clone ID: LIB3061-113-Q1-K6-E11
gcttaagcagccactcaccctgttctcaagataatagtaatggaagcagtgatgagtgcttcgagaattatgcagcagaggaagatttacaccagatcagtagattaaatgtgccgcagcagatttatccagagcatccatcacatatattgacaaactcgactagtgcaaatatcttggatttttccagttcttgttttggtgatgagtcagattggactgctcccagcgcaggaaaaaagctactctcacccttcttgctgtcaaatatgctggatctctcaggtgatctggagttgcacttggggtgccttcgcaaagttcagtaccacctggagtcattgtttgatgaactcctgcaggctgttgaagaagcatgtttagctgatgtgcttgatgaggattctttcaagatgtcggacattatcttgaagttgaaaactagcactagatcctcaagcctgtcactagtttcatctactgatagcgacagaaggaaactatctcatgtgtattgttctcatagcacaggagacgatttacaactatcaaatgctgaggttcaagtggatatggtttggcagcagaatgtgccattgtcccccaacggatcaacatttactccatctncttcaaacaattcagataactat

SEQ ID NO: 9433 - DNA, 383 bp, Zea mays
  Clone ID: LIB3061-113-Q1-K6-E2
gcaacaccgccggtcgcgcctcacgcccgccccgccggtgcccccgcccgccggcgcacgcccccacccgccgcgggtcctccccgcaccgccagcgcccccgtccgccagtcggccgctgcgcccctcaccgccccacccaaccgcgcccctcgtcggttcgtgctcgtggccatgggggtggcgaaggtcagaatcggtcgccctctccgtcagtcacaagtgttggaacatcttggccgacggttgggaagcccaccttaacactgtcaaggctgacaacaagggaagcaagaatgagatttacacatcgagggtgcactacatgatccacaagggcacgccctacttgattgtcccccagaacgacattgacaacatta

SEQ ID NO: 9434 - DNA, 654 bp, Zea mays
  Clone ID: LIB3061-113-Q1-K6-E4
caactagcaacatagaaagcacaatagtgtaccaacaatggcagccaaaatattttgcttccttatgctccttggtctttctgcaagtgttgctaccgcaaccattttcccacaatgctcacaagctcctatagcttcccttcttcccccatacctctcaccagcggtgtcttcaatgtgtgaaaacccaattgttcaaccctacaggatccaacaggcaatcgcaacaggcatcttaccattatcacccttgttcctccaacaaccgtcagccctattacagcagttacctttggtccatttggtggcacaaaacatcagggcacaacaactacaacaacttgtgctagcaaaccttgctgcatactctcagcaacatcagtttcttccattcaaccaactggctgcattgaactctgctgcttatttgcaacaacaattaccattcagccagctagttgctgcctacccccagcaatttcttccattcaaccaactagcagcattgaactctgctgcttatttacagcagcaacaactactaccattcagccagctagctgatgtgagccctgctgccttcttgacacaacaacagttgttgccgttctacctgcacgctatgcctaacgctggcaccctcttacaactgca

SEQ ID NO: 9435 - DNA, 624 bp, Zea mays
  unsure (1)..(624): unsure at all n locations; Clone ID: LIB3061-113-Q1-K6-E6
ctctccccttccacccgccagtcgccacctcgcctcgccatggcagaccggccaccgccggggccacgcgcagcagccctgctgcccaacccggtcacccggcgcggccacgcggcgtcgtcgacggatcgccagcactcgctgctcgggcgcgccgtccagacgctccacgcccacggctccacccagctcctgcgcttcctcgcgcttgccgtcacgctgaccgcgctcctcgtcctggccagcgtgacgctcacggccgcgctcgccgcgctggtcctgctcagcccgctcgtgctcctcaccgtcccgctctgggcgcccgtagcggtactggcgctgctgacgggggccgcctcgctcgtcgcctgctgcgccggcctggccgcggtcgccgcgggcacgtgggcgcaccggtacttcacggggcgctactccgtcggcgcgcaccgggtgcagtccgccgatcagtacgcccgcgggggcacggtcgcggacgtggccagccgagtgagggggtactacgacgcctacgcgcgagagtacggggggtacccgncgcgcccgcactctcgggtcaaggacgccgcgcccggggcgtagcgtagcttgggtgtgctgagc

SEQ ID NO: 9436 - DNA, 643 bp, Zea mays
  unsure (1)..(643): unsure at all n locations; Clone ID: LIB3061-113-Q1-K6-E7
ggctccgttcgatcataagcaacacaacacccttccgtttgcgtcgctcctccggcctcccctccctggtcggtcgatcgcgaggatgacgccggcgagcgtggtcgccgcgcccaggagcgtcggggcgttgcccttggcggcgttcccggcgcccgcgagggccggggtgcggaggaacggccggtcctcgaggcccgcggcgtgcggcggggacgaccagcagccgccgtccatggccgcgatgccggcgtcgctgcgcgccatccaggccaggaggaagcaggaggcggcgcagcgcggggtgccgcgggcgacggccacgagcgcggccgggtgcgccgtggcggccctcgtcaaggccgtggaggccgtccagggcgcggcggccgggggcgccgcggaggccgcgcgcggcgccggggacgccgtggcgtgggtgttcagcaaggtccacctccagtcgcccgacctcgccgtcgggctgctcgggatggtcgcctgctgcctcggcacgatcgtggaggcggagaggtgccgcgtggaggcgaggaagcccgaggcggcgccggcgggcaacgcggnggccgaccgccccgacggcaacggngcccccgcggaggagatcgaggaccacgacatg

SEQ ID NO: 9437 - DNA, 626 bp, Zea mays
  Clone ID: LIB3061-113-Q1-K6-E9
cgacaggggaattaatggcgtcgtcgtctagcagcagccaccgccgcctcatcctcgcagccgccgtcctgctctccgtgctcgcggctgccagcgccagcgccgggacctcctgcgtgccggggtgggccatcccgcacaacccgctcccgagctgccgctggtacgtgaccagccggacctgcggcatcgggccgcgcctcccgtggccggagctgaagaggagatgctgccgggagctggcggacatcccggcgtactgccggtgcacggcgctgagcatcctcatggacggcgcgatcccgccgggcccggacgcgcagctggagggccgcctagaggacctgccgggctgcccgcgggaggtgcagaggggattcgccgccaccctcgtcacggaggccgagtgcaacctggccaccatcagcggcgtcgccgaatgcccctggattctcggcggcggaacgatgccctccaagtaactgcgaagagcatagtgcatgaggaatgagcttgtagctagctcatatgtctgaataataagcacagcaagaagatgaatgcatttctcggatcgttcatccggaacaataattaaaggggatccggatttggtcttgtgatat

SEQ ID NO: 9438 - DNA, 639 bp, Zea mays
  Clone ID: LIB3061-113-Q1-K6-F11
cggcgagcgtcttagaacaaccaattgcccaattacaacaacaatccttggcacatctaaccatacaaaccatcgcaacgcagcagcaacaagcactgagccacctagccgtggtgaaccctatcgcctacttgcaacaacagctgcttgcatccaacccacttgctttggcaaacgtagctgcataccaacaacaacaacagttgcaacagtttctaccagcgctcagtcaactagccatggtgaaccctatcgcctacctacaacagcaacaacttctttcatctagcccgctcgctatgggcaatgcacctacatacctgcaacaacagttgttgcaacaacagttgctgcaacaaattgtaccagctcttactcagctagctgtggcaaaccctgctgcctacttgcaacaactacttccattcaaccaactgactgtgtcgaactctgctgcgtacctacaacagcgacaacagttacttaatccactagcggtggctaacccattggtcgctgccttcctacagcagcaacaattgctgccatacaaccagttctctttgatgaaccctgccttgtcgtggcagcaacccatcgttggtggtgccatcttttagattacatatgagatgtact

SEQ ID NO: 9439 - DNA, 585 bp, Zea mays
  Clone ID: LIB3061-113-Q1-K6-F3
gtcgatggcgtggaacgtctcgctcatgttcgtcacggggatgttcgtgaacgggccctacgcgctgatcacgacggcggtgtcggccgacctcggcacgcacagctcgctcaacggcaactcccgggcgctggccaccgtgacggcgatcatcgacgggacggggtctgtcggagccgccatcgggccgctggtgacggggtacgtctcgtcgaggagctggagcgccgtgttcaccatgctgatggcggcggctctcctcgctgggctcctcttgagcaagctcgtgtgcgccgagctgcaagggaaaacgcattccatcgtgagcaaggacgcaggcggggaacatggggcctactcagatgaagtgtaagactgaagccctggttagtaagcccacgttcccgacctgaagatgaaaaggcagagatttagctgctgagtgactggctcaaatggcaatacagaggatgtacttttggtatgagtggtaaaagatgtaagtgggtgcttagatgggatttacaggttaactagactctagagcccaaatacaggcacattggaggcgcctaggggaataag

SEQ ID NO: 9440 - DNA, 638 bp, Zea mays
  Clone ID: LIB3061-113-Q1-K6-F5
gaccaacaagcaacatagaaagtggaatccagtagcaacaatagagcaacaatggcgaccaagatattttccctccttatgctccttgctctttctacatgtgttgctaacgcgacaattttccctcaatgctcacaagctcctatagcttcccttcttcccccataccttccatcaattatagcttcaatatgtgaaaacccagctcttcaaccatataggcttcaacaagcaatcgcagcaagcaacatacctttatcgcccttgttgtttcaacaatcgccagccctatctttggtgcagtcattggtacaaaccatcagggcacaacagctgcagcaactcgtgctacctctgatcaaccaagtagctctggcaaacctttctccctactctcagcaacaacaatttcttccattcaaccaactgtctacactgaaccctgctgcttatttgcagcaacaactattaccatttagccagctagctactgcctactctcagcaacaacaacttcttccatttaaccaattggccgcactgaaccccgctgcttatttgcagcagcaaatactactaccatttagccagctagctgcagcaaaccgtgcttccttcttgacacagcaacagttgct

SEQ ID NO: 9441 - DNA, 648 bp, Zea mays
  Clone ID: LIB3061-113-Q1-K6-F6
ctttaggcctgctgaacttgaggataatgcacatgtgactcctgagcatgacgagtcctctgaaactataagcaatctttcaaactatgagaagaacacaacatcattccccaattatgttccacttcaattactaccaccgcctggacagcggcctgatcctaaacctccaggatgccctgtaacgaatccaaccaggagagcacgtgcagattatagactatatgatgttgaggtgactgtccaaagaagctacaagggtcatcatgcgccccttatttccctcatgagtaaatggacaggtaaaccaattgtggggtaccctgtcaccctggaggttttgaaggatagccgtcacacaacaagtagagatgagcaccgcccggtgatgggcagtctggactccttactaaagagcagagtttcagagccacggcaagcaagatcttcacatgcatcacgatcaaaatttaaatccagtggacgtaaaaaggccacagagcatgatttggacaggtcttggtggccccataccaagaaaccagcatcttcgccgaggaaaatgcggaggctatcatctttcgccggcagccggagagagagtgcagaccaaaagcccgtagttgcaaaaactggcggaccagcagt

SEQ ID NO: 9442 - DNA, 651 bp, Zea mays
  Clone ID: LIB3061-113-Q1-K6-G1
cgccagctcatcgccaccgccctcctccgctcccgcgtcttcttcccctcgtcgtcgtcgggttggtgggtccacctctcgccgtgccccgccgtcgacccgcctcagaatcaaagataagtcaaaggaaaggtcggtatgcgccggtggttttgctgcacgaggtttaatgcttcataccgtgaacatgaaaatgaacgtcccatcactccagaggagaaagaaggaaatggtttttctgttaaaagtgatcccatcaaggcaccaccttccattgaagtccctgaattatcatttgaagaattgaaagaaaagaccgacaattttggttcaatggctttgattggtgaggggtcatatggaagagtatattatgctattctggacagcggaaaacatgttgctgttaaaaagcttgacgcttcaacagaccctgaacttgataatgagtttttgacacaggtatccattgcctcaaaactaaaacatgataattttgtggagatgcttggatattgtgtggaaggaaatcagcgtctagtggtctatgaatttgcgacaatgggttctctgcatgatatcttgcatggaagaaagggtgttccaggtgcacagcctggcccagcacttgattggatgcagcgggttaag

SEQ ID NO: 9443 - DNA, 646 bp, Zea mays
  Clone ID: LIB3061-113-Q1-K6-G10
cagccgtgcatcactcctatagaagtatcggcatataggaatgtgaggcgctcgccatcatggaacattcgatgggacaatcgcacacatatagaagacataatggacattcctactctgttctccaatcatagtagtggaagcattcatcctcatacaaagagtggttccgttgctccaactgaagggttctctaatgggaatagccttggaactagcccttccaatgtgttccatggagcaaagtggcacaaatctgataaaaaaatggaagcacgcaaggttacaaagtctgattctcgagctaaccgctccacagcaagtaactcttctcctgagacaaagctttccaggaaatcactggacatatcaagtgttgcttcagatttgaagacttcagtgtctgttccttcaacgccacccttagtatccagagcagatccatcatcctccaaggggcattctcaacctacagattcagattcgatgaagaaagcatggcggtcaccagggtatcaattatacagacaggtttcggacagtaaaattccatctctcagatctctcaatgagataaggtctcctgaaggaaggcctccctcttccatgttatcaacctgcagcaatgacttgtcagcagcaggat

SEQ ID NO: 9444 - DNA, 645 bp, Zea mays
  Clone ID: LIB3061-113-Q1-K6-G11
ctcttgctctattgcttattggaatcagcatcaatcaactccgaactgtacctgtgggcaacacagcatttggtcttcctgtcactgctattgcgtacatatatacattgatttttgtaactgttccttcagtggcttctgtctacaatgaatatgccttgaaaagtcaatatgacactagcatctatctccagaacttgtttctgtacggatatggagcaatattcaacttgcttggcattcttgggactgtcctattccaagggccagagagttttaatattcttcgaggccattcaagggccacaatatttctcatatgtaacaatgctgcacaaggcattctatcttcattcttctttaagtatgcagacacaattttgaagaaatattcgtcaactgttgccacaatatttactggcctagcttctgctgcatttttggggcattccttgaccattaattttctcctgggcatatcagtggtgtttatttcaatgcaccagttcttctctccgcttgcaaaagtcaaagatgacaaaccagctgactcaatagagttggaagatacacaaaatgaccgcccatctgaatcttcttttgtaaatatgactgctggtgccgctgatgatgcaagccatcgga

SEQ ID NO: 9445 - DNA, 119 bp, Zea mays
  Clone ID: LIB3061-113-Q1-K6-G12
gtcgagttctattgcttcttggaatgagcgtcagtcaactcagaactgtacctagagggcaacacagcgtcttggtctagctcgtcactcggcattggactacatcatatacagttgat

SEQ ID NO: 9446 - DNA, 648 bp, Zea mays
  Clone ID: LIB3061-113-Q1-K6-G3
cttatattctttgtcttatgcctatttgcctcttctactacatccttgtttgttattacctttaaaaaaccctcgtgatatctatgcccttgccttcctgcttatcatgaacctatcctttgaagcctcctctattccatccctgttcgaggataatgcctcatctatctcatcattgactggtcccccttctctgacactttgcaagcttttcctcaaatacgtcctttgtcgtgtgtttgtccgttatcaccttaacccttgtcatccctcgatctttaccttgatgcttatcctgtacctgcactttaaagccgcctcttccattccattccaagagtgatgtcttgcccttctcgatcttgtccgttcccttttcctctgtcgcattgtatgtcctagcttttgctcgatatcacccctagcttcctaatatctagatctttccatgatgcttatcctatacctaccttttgaattatcatcttttccatctcgatttgagaatggtgttttacctatcctaaccttggttgcattctctccctgtcggatacaatccttgctttagctccatcctttattatgctcatgcccctatcctgcatgtcttattattccccttgcctttcgatgtccttagagtag

SEQ ID NO: 9447 - DNA, 621 bp, Zea mays
  Clone ID: LIB3061-113-Q1-K6-G4
tgagcattcagaaacacacctagcgaagcgcactagcaacgacctaacaacaatggctaccaagatattatccctctttgcgcttcttgccctttttgtgagcgcaacaaatgcgttcattattccacaatgctcacttgctcctagtgccattattccacagttcctccctccagttacttcaatgggcttcgaacacccagctgtgcaagcctacaggctacaacaagcgcttgcggcgagcgtcttacaacaaccaattgcccaattacaacaacaatccttggcacatctaaccatacaaaccatcgcaacgcaacagcaacaacaatttctaccagcactgagccaactagctgtggtgaaccctgtcgcctacttgcaacagcagttgcttgcatccaacccacttgctctggcaaacatagttgcataccaacaacaacaacaattgcaacagtttctaccagcgctcagtcaactagccatggtgaaccctgccgcctacctacaacagcaacaactgatttcatctagccctctcgctgtggttaatgcacctacatacctgcaacaacagttgctgcaacagattgtaccagctctgactcagctagctgt

SEQ ID NO: 9448 - DNA, 641 bp, Zea mays
  Clone ID: LIB3061-113-Q1-K6-G5
gtcagcctagcaattagctcatcgactccagattggagaactcgacaccatgaaggtgctgatcgttgcccttgctctcctggcgctcgctgcgagcgccgcctccagtacaagcggcggctgtggctgccagacaccaccgtttcatctaccgcctccgttctatatgccgcctccgttctatctgccgccgcagcagcagccgcagccatggcaataccccactcaaccaccgcagctaagcccgtgccagcagttcggatcctgcggcgtcggcagcgtcggcagcccgttcctgggccagtgcgtcgagttcctgaggcaccagtgcagcccggcggcgacgccctacggctcgccacagtgccaggcgctgcagcagcagtgctgccaccagatcaggcaggtggagccgctgcaccggtaccaggcgacatacggtgtggtcctgcagtccttcctgcagcagcagccgcagggcgagctcgcggcgctgatggcggcccaggtagcgcagcagctgacggcgatgtgcggtctgcagctgcagcagccaggtccctgcccttgcaacgcagctgccggcggtgtctactactgaggaaactatgtactgtagtaataatgtaatggagccgctg

SEQ ID NO: 9449 - DNA, 644 bp, Zea mays
  Clone ID: LIB3061-113-Q1-K6-G6
tagcaacatagaaagcacaatagtgtaccaacaatggcagccaaaatattttgcctccttatgctccttggtatttctgcaagtgctgctacggcgaccattttcccgcaatgctcacaagctcctatagcttcccttcttcccccgtacctctcaccagcggtgtcttcggtatgtgaaaacccaattcttcaaccctacaggatccaacaggcaatcgcagctggcatcttacctttatcacccttgttcctccaacaatcatcagccctattacagcagttacctttggtgcatttattggcacaaaacatcagggcacaacaactacaacaacttgtgctagcaaaccttgctgcctactctcagcaacagcagtttcttccattcaaccaactagctgcattgaactctgcttcttatttgcaacaacaacaactaccattcagccagctacctgttgcctacccccaacaatttcttccattcaaccaactggcagcattgaactctcctgcttatttacagcagcaacaactactaccattcagccagctagctggtgtgagccctgctaccttcttgacacaaccacagttgttgccgttctaccagcacgctgcgcctaacgctggcaccctctt

SEQ ID NO: 9450 - DNA, 656 bp, Zea mays
  Clone ID: LIB3061-113-Q1-K6-G7
agcaacatagaaagcacaatagtgtaccaacaatggcagctaaaatattttgcctccttatgctccttggtctttctgcaagtgctgctacggcgaccattttcccacaatgctcacaagctcctatagcttcccttcttcccccgtacctctcaccaacggtgtcttcggtatgtgaaaacccaattcttcaaccctacaggatccaacaggcaatcgcagctggcatcttacctttatcacccttgttcctccaacaatcatcagccctattacagcagttacctttggtgcatttattggcacaaaacatcagggcacaacaactacaacaacttgtgctagcaaaccttgctgcctactctcagcaacagcagtttcttccattcaaccaactagctgcattgaactctgcttcttatttgcaacaacaacaactaccattcagccagctatctgctgcctacccccagcaatttcttccattcaaccaactgacagcattgaactctcctgcttatttacagcagcaacaactactaccattcagccagctagctggtgtgagccctgctaccttcttgacacaaccacagttgttgccgttctaccagcacgctgcgcctaacgctggcaccctcttacaactgcaacaa

SEQ ID NO: 9451 - DNA, 641 bp, Zea mays
  unsure (1)..(641): unsure at all n locations; Clone ID: LIB3061-113-Q1-K6-G8
attttcatcattcaaaaacacaccaagcgaagcgcactagcaacgacctaacaccaatggctaccaagatattagccctccttgcgcttcttgcccttttagtgagcgcaacaaatgcgttcattattccacagtgctcacttgctcctagtgccattattccacagttcctcccaccagttacttcaatgggcttcgaacatccagccgtgcaagcctacaggctacaactagcgcttgcggcgagcgccttacaacaaccaattgcccaattgcaacaacaatccttggcacatctaaccctacaaaccattgcaacgcaacaacaacaacaacaacagtttctgccatcactgagccacctagccgtggtgaaccctgtcacctacttgcaacagcagctgcttgcatccaacccacttgctctggcgaacgtagctgcataccagcaacaacaacagctgcaacagtttatgccagtgctcagtcaactagccatggtgaaccctgccgtctacctacaactactttcatctagcccgctcgcggtgggcaatgcacctacgtacctacaacaacagttgctgcaacaaattgtaccagctctgactcagctagctgtggcaaaccctgctgnctac

SEQ ID NO: 9452 - DNA, 652 bp, Zea mays
  Clone ID: LIB3061-113-Q1-K6-H1
ttcagaaacacaccaagcgaagcacattagcaacaacctaacaacaatggctaccaagatattatccctccttgcgcttcttgcgctttttgcgagcgcaacaaatgcgttcattattccacaatgctcacttgctccaagttccattattacacagttcctcccaccagttacttcaatgggcttcgaacacccagctgtgcaagcctataggctacaacaagcaattgcggcgagcgtcttacaacaaccaatttcccagttgcaacaacaatccttggcacatctaacaatacaaaccatcgcaacgcaacagcaacaacaattcctaccagcactgagccacctagccatggtgaaccctgccgcctacttgcaacagcagttgcttgcatcaaacccacttgctctggcaaacgtagttgcaaaccagccacaacaacagctgcaacagtttctgccagcgctcagtcaactagccatggtgaaccctgccgcctacctacaacagcaacaactgctttcatctagcccgctcgctgtggccaatgcacctacatacctgcaacaacaattgttgcaacagattgtaccagctctgactcagctagttgtggcaaaccctgctgcctacttgcaacagctgcttcca

SEQ ID NO: 9453 - DNA, 647 bp, Zea mays
  Clone ID: LIB3061-113-Q1-K6-H10
cccacgcgtccgcaagctgctgcatttccagatctcaagctgacagaggtgtcaaaagaaaatgtaagtgaaaagaaagattctgagattgttcgttcgcctagagctccaacccattctttcaagaagccgattggtgctaaaaagcctggaaataagactggtggacttggtgcacggaagcttacatcaaagccaaatgaaagcctctatgagcagaagcccgaggaaccagctcccgtcctgccatcatcggtgattgagagtactacaactaggagcaaatcacatacttcccgatttgattacgttgaaaatgcacctgctcttaagaatgggaatagctcagaaggcaaccacatgagtggacatgttgcacccccaatgtcgtcaaacttctttgctgaatttgggatggacagtggatatcagaaaaaatctacgtccagttcatccaaagtgcagatcgaggaaagcagggaagcaagacagaaattctcaaaagcgaaatcaatttcttcctctcagttttttggtgatcaggccagttttgaaaaggacgctcaagtctctctccaaaagttttctggttcctctgcgatatcaagtgctgacctatttggccatccggcaaacaattctagcgt

SEQ ID NO: 9454 - DNA, 642 bp, Zea mays
  Clone ID: LIB3061-113-Q1-K6-H11
gacatctacttggacaagttcgacagccagtaccacttctcttgccagttcacagctgaccttattgccatgaaccacactgatttcatcatcaccagcacattccaagaaatcgcgggaagcaaggacaccgtggggcagtacgagtcccacatcgcgttcactcttcctgggctctaccgtgtcgtccatggcatcgatgttttcgatcccaagttcaacattgtctcccctggagcagacatgagtgtttactacccgtatacggaaaccgacaagagactcactgccttccatcctgaaatcgaggagctcatcaacagcgacgtcgagaactccgagcacaagttcgtgctgaaggacaagaagaagccgatcatcttctcgatggcgcgtctcgaccgcgtgaagaacatgacaggcctggtggagatgtacggcaagaacgcgcgcctgagggagctggcgaacctcgtgatcgtcgccggtgaccacggcaaggagtccaaggacagggaggagcaggcggagttcaagaagatgtacagcctcatcgacgagtacaagttgaagggccatatccggtggatctcggcgcagatgaaccgcgtccgcaacggggagctgtaccgctacatttgc

SEQ ID NO: 9455 - DNA, 641 bp, Zea mays
  Clone ID: LIB3061-113-Q1-K6-H12
attgagaccaacaagcaacatagaaagtggaatacagtagcaacaatagagcaacaatggcggccaagatattttccatccttatgctccttgctctttctgcatgtgttgctaacgcgaccatttttcctcaatactcacaagctcctatagctgcccttcttcccccataccttccatcaatgaccgcttcagtttgtgaaaacccagcccttcaaccctacaggctccaacaagcaatcgcaacaagcaacttacctttatcacccctgttctttcaacaatcgccagccctatctttggtgcagtcattggtacaaaccatcagggcacaacagctgcaacaactcgtgctaccagtgatcagccaagtagctctggcaaacctttctccctactctcagcaacaacaatttcttccattcaaccaactgtctacactgaaccctgctgcttatttacaacaacaacaactactaccattcagccagctagctactgcctactctcagcagcaacaatttcttccatttaaccaattggccgcactgaacccctctgcttatttccagcagcaaatactactaccatttggccagctagctacaacaagccccacttgctttttgaaacaacaacaa

SEQ ID NO: 9456 - DNA, 92 bp, Zea mays
  Clone ID: LIB3061-113-Q1-K6-H2
cccggggcaggccacgcctccccaccggttcgagaacaggaccagggccgagggcgagagggaagagatggcggaacaagacgaagagcacc

SEQ ID NO: 9457 - DNA, 659 bp, Zea mays
  Clone ID: LIB3061-113-Q1-K6-H3
gttggcttctcctcccccaccggttcgtgttcaggttctggttcgtgggcgagagggaagagatggcggcgtcggacgttgagtaccgttgcttcgttggcggcctcgcctgggccaccgacgaccactccctcaacaacgccttcagcacctacggcgaggtcctcgagtcgaagatcatcctggatcgggagacgcagaggtcccgcggcttcggcttcgtcaccttctccacggaggacgcgatgcgcagcgccatcgagggcatgaacggcaaggagctcgacggccgcaacatcaccgttaacgaggcccagtcccgcggcggccgtggaggcggcggtggcggatacggtggcgggcgccgtgatggaggcggctacggcggtggcggtggaggctacggcggtggtcgtggaggctacggcggcggtgggggatacggtggtgcaaaccgcggcggcggctacggcaacaacgacgggaactggaggaactgagcggtggggtccgctgaggcctagttatcttgttcgcttctgctaccgtgttcaccctagtctagagggggtttatcttcgtctgtggtcgtctcgtgtccgtatgtttcgtttcgtgttcggtgttggtgttgcccatctgtgtttttgaccgcaagc

SEQ ID NO: 9458 - DNA, 601 bp, Zea mays
  Clone ID: LIB3061-113-Q1-K6-H4
catagatgaagcctttaggtgtataagagagctcagccttccatttttccatcatgaggttgtgaagcgtgctctcacctttggtatagagaacgtatcctcgcaaccatcaatccttaagttattgaaggaggcagctgcaagttgcttgatcagtcctaatcaaatctcaaagggtttttctagactagctgagggtgttgacgacttgagtcttgatattccttctgctaaagttctttttgacaagctggtttcaacagctatatctgaaggatggcttgatgcttcttttggtaaatcagctgcccctgatgaagagatacaaagtacaagcgttgtaaaggtgaagcgttttaaagaagaatgtggccacataattcatgagtattttctctcagatgatgtcccagaacttattcgaagccttgaagagctttctgctccagaattcaatcccattttcctcaaaaagcttgtgacgcttgctatggatagaaagagcagagagaaggagatggcctcagtactcctttcttcattgagattagaattgttttcaactgatgacatcattgagggttttgtaatgctcttgcag

SEQ ID NO: 9459 - DNA, 520 bp, Zea mays
  Clone ID: LIB3061-113-Q1-K6-H8
gtagtataggcaccacaacaactacaacaacttgtgctagcaaaccttgctgcctactctcagcaacagcagtttcttccattcaaccaactaggttcattgaactctgcttcttatttgcaacaacaacaactaccattcagccagctacctgctgcctacccccagcaatttcttccattcaaccaactagcagcattgaactctcctgcttatttacagcagcaacaactactaccattcagccagctagctggtgtgagccctgctaccttcttgacacaaccacagttgttgccgttctaccagcacgttgcgcctaacgctggcaccctcttacaactgcaacaattgctgccattcaaccaacttgctttgacaaacccagcagtgttctaccaacaacccatcattggtggtgccctcttttagatttcttatgagttatagttcaataataaagttttttatctgatgtttgtggcttcccagaaataagaaagtacatttctagattctt

SEQ ID NO: 9460 - DNA, 413 bp, Zea mays
  Clone ID: LIB3061-113-Q1-K6-H9
agcacatcaaacaagtggcgacagacaaagatttgtgagggtgatccgcgctgagaagagatggctaagatcgccgcggcggcggcggcggcgctgtgcttcgcggccctggtggccgtggccgtctgccaaggcgaggtcgagcggcagaggctcagggacctgcagtgctggcaggaggtccaggagagcccgctcgacgcgtgccgccaggtcctcgaccggcagctaaccggcggcggcggcggcggcggcgttggcccgttccggtggggcaccgggctccggatgcggtgctgccagcagctccaggacgtgagccgcgagtgccgctgcgccgccatccggagcatggtcaggggatacgaggaggccatgccgccgctggagaaaggctggtggccatgggggcg

SEQ ID NO: 9461 - DNA, 589 bp, Zea mays
  unsure (1)..(589): unsure at all n locations; Clone ID: LIB3061-113-Q1-N6-A1
ttcagttgttattgaggaaatggcagaggatgatgacaaggctggctgtgtgctcgaagtgctgcaagggattagacgaagcaaatccgagaaaatggcgatgagtatcaactccagcttgttgcaagaaatgcacctactgaattctcagaaagggaaaatgaacatggattgactgtatcattggatgaatcaaacaacagtcctagaaattgttccaaacagagaatcgggggaaaagacatgtgagcactatgcnacataagacctgaagagaaaaagtggagccattagcaaccgtggagatgcttcaagggggacagctgagattgatggagcgtaaaagaaaaagaaaaagaggcaaggacaatgcactgttatggacacaggataagtaaacaacgaagaaaaggacgtttagctacacgatactacagctgatcctgttcggtataaaacagaactataaagaataacatgaccaaaagtgctgttagatggtgataccactgagcaatctgctcagaacaacattgtcaataaagacactgacgaggcaagtgcgcacgacgcctattataagaacaag

SEQ ID NO: 9462 - DNA, 391 bp, Zea mays
  Clone ID: LIB3061-113-Q1-N6-A11
cccacgcgtccgtgcttatttccagcagcaaatactactaccattttggccagctagctacaacaagccccgcttccttcttgacacaacaacaagtgcttccgttctaccagcagtttgtggctaaccccgcaaccctcttacaactgcaacagttgctgccctttgtccaacttgctttaacaaacccagcatccttataccaacaacacataattggcggtgccctcttttagattgcttattagctgtaattcaataataaagttttttgaatgatatatgtggcctcctagaaataaaaggatatatgcccaatgtaaatagctggccaaaaagaaaaaaatatttgctgctggaaaaaaaaacagacccctgggcggacacgggg

SEQ ID NO: 9463 - DNA, 501 bp, Zea mays
  Clone ID: LIB3061-113-Q1-N6-A12
cgaccacaagcctgtgttcgccacggcggcggtgagctccccgccggagcagaagccgttcgtggcggcggcgggcgggctgcccccggcgttcccggagctggcggcgtactacgaccggccgtcggactcgatgccgcggctgcacgcggactactccagctgctcggagcaggtgctgtccccggagcagctggcgtgcgaccgggaggtgcagagccagcccaagatcagcgagtgggagcggaccttcgcctacgaccccgtgaaccccgcgggctccatgctcgaccccgtcatcagtcacgcctgcggtgacccgatgctgcaggacatgcttatgtactgttgcaagccgctctagacgacaccgaccatcatgtcctgaggggaggtggtggtggccaaccatcctcggttaaggcatgatgggtgattgatctgtctagggctgggcactgcacttcaagctcaccgtgtgggcttgagtcacgccagccg

SEQ ID NO: 9464 - DNA, 388 bp, Zea mays
  Clone ID: LIB3061-113-Q1-N6-A2
cacgcctgcaggagccgggatgctatagagcggtcgacctacgcgttcgtatggagaggagcggagcaggagaggagggcccttgagcgagacactacggtgtgaaagacgtagtacactaacaagcgctgacgagaaggacggtatgaagctagatgatgagcgactacaaggcggacatggtgaacgacgggacgcaggattgctgacctgaatgcaatggcccgtactaaagcttataccaaggaggggcatggatggctcgattagaactgtctgatgcatacccttacaaatccatcatccattgagcttcatcaacaagatacatgactcgaatgtcgatgacatgtctgtctgtgtcagcatacatgtcataaaccagaca

SEQ ID NO: 9465 - DNA, 417 bp, Zea mays
  Clone ID: LIB3061-113-Q1-N6-A5
gcctgcgtgtgccgggctgctatagagcggtcgacctacgcgttcggtgaaacgccgagaagggcaggatcatcatggttccagacactcttatgacggcaagggccgacggggaccgcctggtgaccctctaagacctatgactgggctgagggacacggcagcatcatgcaagcttgcccttgagagaccattacctgatttttcaatacatcagatgcatgataatgatgattaccacattgtattcaacagaggacgggctgctgcgggctttctgatcagtgctcagtgggctacaaagataaacgaatgttctactggggatgtgaaatcacgttatgctgcgttctccctaaggttgctaagttcttatggatgggctatcatgtgcaatgagaatggtggactcaatca

SEQ ID NO: 9466 - DNA, 564 bp, Zea mays
  Clone ID: LIB3061-113-Q1-N6-A6
ggcaactacttattggcatcatcgtcttcatatttgccacggttggtgtcctgcttgttatggagaccctgagtgcattccttcacgcactgaggcttcactgggtggagttccagaacaagttctatgaaggtgatggttacaagttcgccccattctcctttgcgctgattcgtgaggaagaagattgagatcgtcccatgtagccgatgtacaatctttgatggcctttgttcccggaacaaatcattttttcatctgttgtctcggatggatcataaacctcagtcccctttgtttagacatgggacgaacagcaccatttttacttgtttagctatgcagaggatttttgggtcggttggcggcaaacatgggggtgatatcaccattgtatgatgctaataagtagttgccgattgggcggtgtgttggatataaataagcactgtattgaaggttaaacattccgctacgttcgttgtcaataaagagtgctatgtacgctgctggcggttgccacaaaaaaaacccaagggggggaaggaaacccccaaggggctc

SEQ ID NO: 9467 - DNA, 519 bp, Zea mays
  Clone ID: LIB3061-113-Q1-N6-A7
gtcgacctacgcgttcggtcattatagaacagctcattcaatcagttgcttatatggtaggaaacacatgcaggcgtgcgagcccacatgctacagctcagcgcatgtggaaagcaaatgacagcacccaaaaggacagttgcgtcaacaggcactgggcaatataaacatacggacgattggaacgaatcatcaacaacaacaacagaaggtggcatcaatgggccaactaactgccaatgaaccatgtcacctacttgcatcaggagatgactgaatacaacccaatagatctagctaacggaattgaataccatgaacaacgtcagctgcaacagttgatacaagtagttaagcaactagtcatgcaagaacgctgcacgatatgtacatactacgttcatatatccatgtcgcggtggagaatgctcctacatacctactacaacaggagctgcaacataatgatgcagttctgactgagctaggtgatgaaaagcctgatgtctacttacaaca

SEQ ID NO: 9468 - DNA, 436 bp, Zea mays
  unsure (1)..(436): unsure at all n locations; Clone ID: LIB3061-113-Q1-N6-A8
tgcattttatgtgagagcaacaagagcgtacattataccacagtggctgcattcgctacaagggacggtatcatcaaagagaattggttgagtgacatcaatgggcgctgatcaacgaatgagcaagcattgggctacaacaagcggttgatgaaagcgctgtagaacaatccaagtaggccactcacaacagcaatacataggcacatttaacgatacaaaccatctgatcgcagtaggcacaagcactgacccacctagccgaggtgaaccctatacactacttggaacaacatgtggttgcatccaacgcagttgcttgggcgtacgtacatggatactaacaagagcaacagatgcaacagtttctaccagcgctcagtcaactagacatggtgaaccctatagnctacctacaacaggaacaacctgtttc

SEQ ID NO: 9469 - DNA, 325 bp, Zea mays
  Clone ID: LIB3061-113-Q1-N6-A9
cgatgtgggcaggcggatacgacccatgaagcagccgctgctagcggattacatcaccgaagtcgctagtggcagcaccaatcctaggcacatataacaatacagaccattggaacgcaacagcagacagcaattactaccagcactgacacatctatgcatggtgaaccctgccgcctacttgcaaatcggtggctagcattagaccgacctgctctcagcaaacagaggtgtaaaccagacacaacaacagctgcaacagtttctgccagggctcaccaaactaggcatggtgaaccctgccgatacctacaacataacaact

SEQ ID NO: 9470 - DNA, 469 bp, Zea mays
  Clone ID: LIB3061-113-Q1-N6-B1
gggaaatctgggaaggatggctggcttcctcctggtcatggtgatgtagtttccctctttggtaacacaggacaacttgacatcttattggctcaaggcaaagagtatgtctttgctgcatactcagacaccttagagtgctatagtgcgacctcatgatcctaaaccatcttatcaataaccagagcgagtactgcatggaggttactccaaacacgctctctgacaataagggtggcactctcatctcttacaaatgatgaggtcacctgtcgtacattgcccaagtacccgattgagcatgtgaatgaatacaaatacattcagacatagttaagatattcaacactaacatctagtgggtgaaccttaccgctctcaacagactcagaaacgctgaggcacttaacatagatattcttgcaaaccccattgaacctgacggtgtaaaagtcctccttctcgaaac

SEQ ID NO: 9471 - DNA, 471 bp, Zea mays
  unsure (1)..(471): unsure at all n locations; Clone ID: LIB3061-113-Q1-N6-B11
gctagatgtaattaagtggatagctgtttacagcngtgaaatatgtgataaaactcataatgtcacacaacttaatagccttgagcatcatgcgcctatcgtgaggtggctaattagcgaagaagctcacatcgattgcgcttcgcatcagtgtgcgctttctgaatggcaaatgtgacgcgccatgtagattaatatttagcgcaacgggcgtggagaggacgctcagctattgcgctacactttgcattgttctatcaccagctagattggctatatttgattgctttctcagcgacgtgtcgcctggatatactcgtaaaggtgtaaaacggtggcttgctttagggttccaatttactgctttatggcgcctaaagcccaaaatattaattagctggattgggtacgtagtgtgccactaccctgatatacggatcttcgcgctgtgacgattgagtaaaggttctt

SEQ ID NO: 9472 - DNA, 583 bp, Zea mays
  Clone ID: LIB3061-113-Q1-N6-B6
atctatgacaagctggcacgcctgcgtgtgccgggatgctatagaggggtcgaccctacgcgttctgtatatttagattagagtacatgataatactaacgatgatctaccgcagatagtggaaagacactaagatgtgtcgtggactaacatttatagactattcacaagcagcctttcagctagattcatatgacacggaggacttggcaagaacatgatacgtgctagtgggctaggctataagctgcatgctactatagttcacacacgcgaatgctaatatctcaaggtatatagtctggatcctgcaagaagctggccatgaagcgaatcctgacttaaaatccatgagcaggtctccaaactcagcgctgaggaggcaattttctgccgataggcacatgcgggctcggtaaccggggccatatgtctggatcaaatacctttcctttaggaggaagaaggccatattgatgtgtgcaaaagaactgagggagtatgggactatttgtatactactgggcattaagtgcattctttgagaaatttctgagaaatttaccgtactaccaagattgat

SEQ ID NO: 9473 - DNA, 194 bp, Zea mays
  Clone ID: LIB3061-113-Q1-N6-B7
atctatgacgagcttgcacgcctgcgtgagccgggatgctctagaggggtcgacctatgcgttcgagatagacaatagacgtcctcattggtgggcagacacttacagcttccatatgcttctatgttctgtactgtagcgctgatgccgtatccatgagggcacagtgcttgctggcttctatggctgaactg

SEQ ID NO: 9474 - DNA, 346 bp, Zea mays
  Clone ID: LIB3061-113-Q1-N6-B9
agtgataacctggtgcatggtaattagcaggcggtcagacctatgcgtttcttaaaaaaatttttaatttttttattttttattttttttttattattttaaaaataaatattttaaaaataaaaaaaacggggggtcaatctataatatcaaagattaatatcgagtgcatacaaggttttagtttttttatagggtaaaaaaatttaaattaattgggcgttgttttataacttgggaaatggaaaaaccctgaaatattcaaaattaattgaattgaagaaaattaaattttaaaaatgtggtgttataataaaaaggccattaaatataatttttctaaaaa

SEQ ID NO: 9475 - DNA, 530 bp, Zea mays
  unsure (1)..(530): unsure at all n locations; Clone ID: LIB3061-113-Q1-N6-C11
agcaaaccttgctgcctactctcagcaacaactacaacaacttgtgctagcaaaccttgctgcctactctcagcaacaacagtttcttccattcaaccaactagctgcattgaactctgcttcttatttgcaacaacaacaactaccattcagccagctatctgctgcctacccccagcaatttcttccattcaaccaactgacagctttgaactctcctgcttatttacagcagcaacaactactaccattcagccagctagctggtgtgagccctgctaccttcttgacacaaccacaattgttgccgttctaccagcacgctgcgcctaacgctggcaccctcttacaactgcaacaattgctgccattcaaccaacttgctttgacaaacccaacagcattctaccaacaacccatcattggtggtgccctcttttagatttcttatgagttatagttcaataataaagttttttgtctgatgtttgtggcttnccagaaataagaaagtacatttctagattctt

SEQ ID NO: 9476 - DNA, 429 bp, Zea mays
  unsure (1)..(429): unsure at all n locations; Clone ID: LIB3061-113-Q1-N6-C3
agacaaggcctgtctcttgtttgattatagccggntcgactagttctcgaacaagagcagctacggtggacctacgcacatcggtccctgttgacctaatacgcttatcctagatgacggtgaaattacctgttcgaggtatcattgatcttaacaatcgccgggctagactccagtgctacttcgacccgcgtactacgtactgacgtcctctactgttgcttcactgttgttggggcctagatcggatcagatcaactcttaattgcgccataactttttagacagatcatgcagcttgtaaatcatacacagatggactacctgatggaaaaggtgagcgcctgacaagagcgcctgaatatcaccgagacggaagatattaataatatgacggaaccaatgagatacctgatctttaagatgaat

SEQ ID NO: 9477 - DNA, 409 bp, Zea mays
  Clone ID: LIB3061-113-Q1-N6-C4
aaagctggcacgcctgcgtgtgccggtctgctattacacggacaaagtatatttgaggataatgggatgacgcgtgtgcaaattaggggttctagcacctatccaatttgtacgcagaggtatagagcattgggccgacactgtacaactgcatttatgaatcataatgaggttcgggacacatccataatctatgaggcacaacatactaacttatatttctgagataagacactatgctataacattacccatttccaggctcttatgtttcaccaatatgatagcgtgaacaatctcatcatgtaaataattatgcatgatgatacttacaatataaccaaccatggatatttcgttgatttcattaaatacactaaattctagctctccaatcaagatttaccat

SEQ ID NO: 9478 - DNA, 432 bp, Zea mays
  Clone ID: LIB3061-113-Q1-N6-C5
gcgccagcgtcggtcttctcggcctctcgcgcggcgccctacgtcaggccagatgtggactcgatcgtcagaacgacgcagatcaccccagtcgttcacacccaagcaaatagcaccacttatacccctaaaaagtacatcagcagctacgtctattgcggtgcagagatcctcctgcgggtacgcgtgaagccgatgcgtaactccctgacgcaatctacgagtcgcgcgcgttctggagcttgcatacaaaaccgcagccgagcacatgccaccaattcgatagaagggtgactgcaagaacatgatccggcaagaacagcaagatctgatcaatcgatatgaatccaaatctgaccatctcgttcggcttgaatgcctgcaggtctacctcaccctgtgcacggagctggcctcggcggcggcggacac

SEQ ID NO: 9479 - DNA, 462 bp, Zea mays
  Clone ID: LIB3061-113-Q1-N6-C7
cattttaaccatacaaaccatcgcaacgcagcagcaacaagcactgagccacctagccgcggtgaaccctatcgcctacttgcaacaacagctgcttgcatccaacccacttgctgtggcaaacgtagctgcataccaacaacaacaacagttgcagcagcttctaccagcggtcagtcaactagccatggtgaaccctatcgactacctacaacagcaacaacttctttcatctagcccgctcgatatgggcaatgcacctacatacctgcatcaacagttgatgcaacaacagttgctgcaacaaatcgcaccagatcttactcaactagctggggcaaaccctgctgcctacttgcaacaactacttgcattcaaccaactgactgggtcgaactctgctgcgtacctacaacagcgacaacagttacttaatccactagcaggggctaacccattggt

SEQ ID NO: 9480 - DNA, 618 bp, Zea mays
  Clone ID: LIB3061-113-Q1-N6-C9
gcttcagtatgtgaaaacccagctcttcagccctataggctccaacaagcaatcgcagcaagcaacatacctttatcacccttgttgtttcaacaatcgccagccctatctttggtgcagtcattggtacaaaccatcagggcacagcagctgcagcaactcgtgctacctgtgatcaaccaagtagctctggcaaacctttctccctactctcagcaacaacaatttcttccattcaaccaactgtctacactgaaccctgctgcttatttgcagcaacaactattaccattcagccagctagctactgcctactctcagcaacaacaacttcttccatttaaccaattggccgcactgaaccccgctgcttatttgcagcagcaaatactactaccatttagccagctagctgcagcaaaccgtgcttccttcttgacacagcaacagttgctgcctttctaccagcagtttgcggctaaccccgcaaccctcttacaactacaacaattgttgccctttgtccaacttgctttgacagaccgagcggcctcctaccaacaacacatcattggtggtgccctcttttagattgcttattagttggaattcaataat

SEQ ID NO: 9481 - DNA, 568 bp, Zea mays
  Clone ID: LIB3061-113-Q1-N6-D1
cgcctgcgtgagccgggatgctatagagcggtcgacctacgcgttcgtctagccggagagaaccctgtcacctacttgcatcagcatatgatagaatccaacccactaggtctcgatagcgtagctcattaccagtgtcatcaacaggtgggacagttcatgccagggctgatgcaactagccatggataaccctgacctgtacctacagctactttcatctatcctgctcggcggagggcaatgcacatacgtacctacaacaacagtggatgaagcaaatggtgccagttctgactgaactcgctagagcaaaccctagctcggctacttacaacagaagctttcattgaacgcaactggctgggtcaaactctgctggctacctacaacatcgaccacagtgacttaatacatggggaggggctaacccattggcatctaccttcctgagcgagctacatcaattgctgccatacaaccaggtatgtttgatcaaccctggcttgctagaacctatcgtaaactgtgccatctgtttagattacatatgatacgtactcgacaat

SEQ ID NO: 9482 - DNA, 479 bp, Zea mays
  Clone ID: LIB3061-113-Q1-N6-D11
cagagcgtcctataaactgcccttcttccccaatacatgctcaccagaatggcatcaatatgtggcgaaaacccaaagggtgacccctacaggattcaacaggcagtcgaaccaggcctactaccattgtgacactagggcactacaacatcacatcagccctattacatgaatggaccttatggtgcagtctggtggcacaaaacatcaaggcacatcatctacaacaacttgagctaacaaacctggctgcatactctcaacatcatcagctgattgcatacaaccaactggctgcatcgaactatgctagctgattcccaacagcaattaccattcaaccagctaggtgctgactaccaccacagtttgctactcaaaccaactagcatcatggaactctgctgcttatgcacagcagcaacaactactaccatgcagccagctagctgatgtgagccctgctacactgttgacac

SEQ ID NO: 9483 - DNA, 486 bp, Zea mays
  Clone ID: LIB3061-113-Q1-N6-D4
gcacgcctgcaggagccgggcttctctagagcggtcgaccgaggcgtgcgtttttttatcaacaactggactcatcttatggctcgggaagccacaaacatcaggcaaacaactttattagtgaactattgctcataggaaatctaaaagagggcaccaccaatgacgggttgccggaataacgctagggggcggggcggagcatgctggctgaatgcgcatcaccagcgcagtctgtaagagggtgacaacgcaaggctgcaaccctacaggataacaacaggcaactgacagctggattaagaacgtagataaccctagaccatccaacattcatgatgcctattacatgagctacctttggtgcatttattggcacaaaacatcagggcacaacaactacaacaacttgtgctagcaaaccttgctgcctactctcagcaacagcagttgcttccattcaaccaactagctgcattgaactct

SEQ ID NO: 9484 - DNA, 431 bp, Zea mays
  Clone ID: LIB3061-113-Q1-N6-D6
cgttgctcgcctcgggtcaaaccctaagcagggagttgatttatccgctgcagccatgagtaagctgcagtctgagtctgtcaaggatgccatctcccagattgttggggatgccaaggagaacactaggaagttcactgagactgtggaactccagattggtctgaagaattatgatccacagaaggacaagcgtttcagtggctctgctaagttgccccatatacctcgttccaagatgaaggtgtgcatgctcggcgatgcccagcatgccgaggaggccgagaagatgggacttgactacatggatgatgaggctctcaagagggtgaacaggaacatgaagcctgttaagaggcttgccaagaagtaccatgctctcttggcatcagatgccatcatcaagcacattccccgggtccttggtgctg

SEQ ID NO: 9485 - DNA, 628 bp, Zea mays
  Clone ID: LIB3061-113-Q1-N6-D7
agctggcacgcctgcgtgatgccgggcacgctctagcaggggcacgtaccctactcaaccgccccggcctcagcctcatccccagccacacccatgcccgtgccaacagccgcatccaagcccgtgccagctgcagggaacctgcggcgttggcagcaccccgatcctgggccagtgcgtcgagtttctgaggcatcagtgcagcccgacggcgacgccctactgctcgcctcagtgccagtcgttgcggcagcagtgttgccagcagctcaggcaggtggagccgcagcaccggtaccaggcgatcttcggcttggtcctccagtccatcctgcagcagcagccgcaaagcggccaggtcgcggggctgttggcggcgcagatagcgcagcaactgacggcgatgtgcggcctgcagcagccgactccatgcccctacgctgctgccggcggtgtcccccactgaagaaactatgtgctgtagtatagccgctggctagctagctagttgagtcatttagcggcgatgattgagtaataatgtgtcacgcatcaccatgggtggcagtgtcagtgtgagcaatgacctgaatgaacaattgaaatgaaaagaaaaaagtattggtcc

SEQ ID NO: 9486 - DNA, 639 bp, Zea mays
  Clone ID: LIB3061-113-Q1-N6-D8
catcaatcatcattcatcttagtagtataggcaccaaatcaaatctgcaacatcaattatctaactccaaaaaccatgaagctggtgcttgtggttcttgctttcattgctttagtatcaagtgtttcttgtacacagacaggcgggtgcagctgtggtcaacaacaaagccatgagcagcaacatcatccacaacaacatcatccacaaaaacaacaacatcaaccaccaccacaacatcaccagcagcagcaacaccaacaacaacaagttcacatgcaaccacaaaaacatcagcaacaacaagaagttcatgttcaacaacaacaacaacaaccgcagcaccaacaacaacaacaacaacaacagcaccaacaacaacatcaatgtgaaggccaacaacaacatcaccaacaatcacaaggccatgtgcaacaacacgaacagagccatgagcaacaccaaggacagagccatgagcaacaacatcaacaacaattccagggtcatgacaagcagcaacaaccacaacagcctcagcaatatcagcagggccaggaaaaatcacaacagcaacaatgtcattgccaggagcagcatcagactacaaggtgcagctataactactatagcagtagc

SEQ ID NO: 9487 - DNA, 552 bp, Zea mays
  Clone ID: LIB3061-113-Q1-N6-E10
gacaaagctatgcacgcctgcgtgaagccgggcatcctatagagcggtcgacctacgcgttcgcaactagcaacatataaagcacattattgtaccaataatggcaaaacaatatattttgcctcattatgctacttggactttatagaaagggctcgctacaagcgagcattttcccgcaaagctcacatgctcctataaattcccttcttcccacatgacctctcaccagcgatgtcttaagaagtgtgaaaatccaattctcactaccctacaggatccaacagcgcattcgcagtaggcatcatacctttatgaccctcattacttcaacaatcataaggcctattacagcagttaccttcagagcatttataggcacaaaacatcagggcacaacaactacaacaactcgtgctagcaaaccttgctgcctactctaatgaacagcagttacctttgttgcattagctggcacaaaacatcaaggcacatcagctacaacaactaagtgctagcaaaccttgctgcctactctcagcaacaacagtt

SEQ ID NO: 9488 - DNA, 429 bp, Zea mays
  Clone ID: LIB3061-113-Q1-N6-E4
accactgacacatcatacataaaagtttacttatgcaccatgacttatatgcaagcgaaaatacggcaccaacaatgatacattgctcacaagatcactatatcagtccggggggcgcgtaccttgaacgacaggagtcgtcaatgtgggaaaacgcagccagccaaccgtacaggatgcaacaggaactggcaccacggatgttaccataataacgcttgatgcttcaacaaccgtaagtcctataacagcagttacctttggtccatttgagtggcacaaaacatcagggcacaacaactacaacaacttgtgctagcaaaccttgctgcatactctcagcaacatcagtttcttccattcaaccaactggctgcattgaactctgctgcttattggcaacaacaattaccattcagccagctagat

SEQ ID NO: 9489 - DNA, 458 bp, Zea mays
  unsure (1)..(458): unsure at all n locations; Clone ID: LIB3061-113-Q1-N6-E7
ggctccgttcgatcataagcaacacaacacccttccgtttgcgtcgctcctccggcctcccctccctggtcggtcgatcgcgaggatgacgccggcgagcgtggtcgccgcgcccaggagcgtcggggcgttgcccttggcggcgttcccggcgcccgcgagggccggggtgcggaggaacggccggtcctcgaggcccgcggcgtgcggcggggacgaccagcagccgccgtccatggccgcgatgccggcgtcgctgcgcgccatccaggccaggaggaagcaggaggcggcgcagcgcggggtgccgcgggcgacggccacgagcgcggccgggtgcgccgtggcggccctcgtcaaggccgtggaggccgtccagggcgcggcggncgggggcgccgcggaggccgcgcgcggcgcccgggacgccgtggcgtgggtggtcagcaaggtccacc

SEQ ID NO: 9490 - DNA, 348 bp, Zea mays
  unsure (1)..(348): unsure at all n locations; Clone ID: LIB3061-113-Q1-N6-E9
ctcacgagctggcagtgcatcgtgaccacgccgacctgccagatgcatccgggcacgccgttgacggagctcaagaggaaatgctgccgcgagccgagggacatgccgaattactgccggagcacggggctgaagatcctcatggactgtacgatgccgtccagccccgacgcccagcccgagggcctcctacaggacctgacgatgctcaccgccgagcgccagaggggatccgncatgcccctcagcacggaggccgagtgcatcctggccaccatcaacgggaggcgcggacgcatgccgaatgtccgggggggcacgaaccaccggaagttactgagaagagca

SEQ ID NO: 9491 - DNA, 578 bp, Zea mays
  Clone ID: LIB3061-113-Q1-N6-F10
agctggcacgcctgcaggagccgggcttcaatagaggggcggacctaggcgctcggtgaaatcgaggaggaccgtcgactgcccgaatactataggcgttgctccacctactgctgccgctgctgtgaggcgccggcaggaccggccaccgctcttgctaacagcgcatggaccggccatcggcgtgaccttctgattcacggcgtgagctatacaccgagacgagccgccaagctgccgccggcacgccaccactcggacctggggaatctgatcgaacgtaccgcaccgatgttatagaagagattctgcgggagctaatgctatgccggagtccatgagaaacaagaaagacagattccacagggaccggacaccacagatgaacacgcgcgcgaagccatagaccagccggaaagatctgaccacatgacagatataaaggatgcagaggacccatactcactctgaacacctgagcgcggtgacagcagactcacatgaacggaatgatgaaaggcctcatgatacggtgagtccgaccgatacagtgcaagacactgctatgagaactatga

SEQ ID NO: 9492 - DNA, 454 bp, Zea mays
  unsure (1)..(454): unsure at all n locations; Clone ID: LIB3061-113-Q1-N6-F3
gtcgatggcgtggaacagatggctgatgttcgtcacggggatgttcgcgaacggaccctacgcgctgatcacgacagcagtggcggccaacctgagcacgcacagttcgatcaacggccactaacaggtcgctggccaccgtgactgagatcatagacagcacgagagactgacgtagccacactctgacacgntggtgacagacataccaatagaagatgatctgaatcgccatgttgaccatgctactcagcagctgatctcctcgctgggcatctctagagcaagcaactgtgcgccactctccagggcttaacacttacaatcgatagcaaggacgcaccacggtgaacatggtgcctactgatataaagtggaatgtctgaagcccttgctagtaagcccacactagctagctgaagatgaacccgcagagattagcctgctgcatgac

SEQ ID NO: 9493 - DNA, 433 bp, Zea mays
  Clone ID: LIB3061-113-Q1-N6-F4
gccgctgcggaccggcttcctacacggcgccccccaccgtgtctacggcgacgacggccgggggccggtgggagagggagaaggcggagggcaacactaacagggtcctataccacggctaaagacaacgcgaatcgcgggtttaacacccgatgaccagtcccgtgcggggaccacagatgcggacctgaccccatccatcaaggccggcgtgcagcgatgcagtgtagggtaacttaccaggaaggagatgctctctctagaacaactgtgcagtactttgttaatcagagtacaactaccactattgtgcggggacatgcttggaagaatatggagggtggcaggaagcaccgaccagcgggcatagcctgacacgagcatcttcaggggacggcactgaggcaacggtgttatgacacatgaacacaat

SEQ ID NO: 9494 - DNA, 581 bp, Zea mays
  Clone ID: LIB3061-113-Q1-N6-G1
cgccagctcatcgccaccgccctcctccgctcccgcgtcttcttcccctcgtcgtcgtcgggttggtgggtccacctctcgccgtgccccgccgtcgacccgcctcagaatcaaagataagtcaaaggaaaggtcggtatgcgccggtggttttgctgcacgaggtttaatgcttcataccgtgaacatgaaaatgaacgtcccatcactccagaggagaaagaaggaaatggtttttctgttaaaagtgatcccatcaaggcaccaccttcctttgaagtccctgaattatcatttgaagaattgaaagaaaagaccgacaattttggttcaatggctttgattggtgaggggtcatatggaagagtatattatgctattctggacagcggaaaacatgttgctgttaaaaagcttgacgcttcaacagaccctgaacttgataatgagtttttgacacaggtatccattgcctcaaaactaaaacatgataattttgtggagatgcttggatattgtgtggaaggaaatcagcgtctagtggtctatgaatttgcgcaatgggttctctgcatgatatc

SEQ ID NO: 9495 - DNA, 525 bp, Zea mays
  Clone ID: LIB3061-113-Q1-N6-G10
cagccgtgcatcactcctatagaagtatcggcatataggaatgtgaggcgctcgccatcatggaacattcgatgggacaatcgcacacatatagaagacataatggacattcctactctgttctccaatcatagtagtggaagcattcatcctcatacaaagagtggttccgttgctccaactgaagggttctctaatgcgaatagccttggaactagcccttccaatgtgttccatggagcaaagtggcacatatctgataaaaaagtggaagcacgcaagggtacaaagtctgattctcgagctaaccgctccacagcaagtaactcttctcctgagacaaagctgtccaggaaatcactggacatatcaagtgctgcttgagatttgaagactccagtgtctgatgcttcaacgccacccttagtatccagagcagatccatcatactacaaggggcattctcaacctacagattcagattcgatgaagaaagcatggcggtcaccagggtatcaattatac

SEQ ID NO: 9496 - DNA, 363 bp, Zea mays
  Clone ID: LIB3061-113-Q1-N6-G3
cttatattctgagactcctgcctacttgcctcttctactacaacctaggttgttcaaacctataaataaccctatgataattatgccaatagcctccacagcatatcatgaaccaatccttagtagccttcaatataacatccatgagagaggataaggcccaatctaatcaataattaactggggctcctcatatggcgactaacatgactggtctaaactacgtcactccgccgagtgacagaaccaaagcaccatcacgcgaggcatcattcgcaaaacacgtgggggcggattctgatcctgctaccgctaagcactcatttacattacataacaacagtgaagtatagacgttataga

SEQ ID NO: 9497 - DNA, 362 bp, Zea mays
  Clone ID: LIB3061-113-Q1-N6-G6
cggtcgacctatctttttttttttacaatgtacttacttatttctgggaagcccaacatagacaaacttattattgaactataatataaaaactaaaaaggaccaccatgatggtggagagaaacatttttgctgtaaaggaggcggtgaaaggcagcaattgctgcaggtgaaaacacgatgccatcaaccatacacaatccactaggaaaacggaaacaactgtgttacgctgtcaaaaaggtagcacctctaacaaccattagccgtattacatggaatacctgtggcgcatgtataataaacaaaacatgacagtgcagcaactacaacaactggagctaacaaaccttggtggctac

SEQ ID NO: 9498 - DNA, 521 bp, Zea mays
  Clone ID: LIB3061-113-Q1-N6-H11
atgacaaagcttgcacgcctgcgtgtgccgggctgctatagagcggtcgacctacgcgttcggacatcgacctaggacacgcacgcaagacagaaccacttctctggcccgatgacagctgaccctattgccatgtaccacactgactcgattatcaccagcacatgccaagaaacagatggaagcgcgggcaccggggggcaggacgaggccacatcttgttcatttttcctgggctataccgaggacagcatggcctggatggtcaggataccaagtctaacattggttgaactgtagcatacatgagtgggtactacccctatacagaaacctaacggacactcactgcctgtactcccgaaatagaggaattaatctacagcaacatagataactgcgatcccaattataaagcttatgacaggaagactgcgataatttgttccatgagccgtgatcagccttggattgaacatgacaagtccaccaggatatgcacggcctgaacgctcgcctga

SEQ ID NO: 9499 - DNA, 659 bp, Zea mays
  Clone ID: LIB3061-113-Q1-N6-H3
agcttgcacgcctgcaggtgccggtccgctcttacaggggcgggcttctccttccccaccggttcgtgttcaggttctggttcgtgggcgagagggaagagatggtcggcgttcggacgttgagtaccgttgcttcgttggcggcctcgcctgggccaccgacgaccactccctcaacaacgccttcagcacctacggcgaggtcctcgagtcgaagatcatcctggatcgggagacgcagaggtcccgcggcttcggcttcgtcaccttctccacggaggacgcgatgcgcagcgccatcgagggcatgaacggcaaggagctcgacggccgcaacatcaccgttaacgaggcccagtcccgcggcggccgtggaggcggcggtggcggatacggtggcgggcgccgtgatggaggcggctacggcggtggcggtggaggctacggcggtggtcgtggaggctacggcggcggtgggggatacggtggtgcaaaccgcggcggcggctacggcaacaacgacgggaactggaggaactgagcggtggggtccgctgaggcctagttatcttgttcgcttctgctaccgtgttcaccctagtctagagggggtttatcttcgtctgtggtcgtctcgtgtccgtatgtttagtttcgtg

SEQ ID NO: 9500 - DNA, 534 bp, Zea mays
  Clone ID: LIB3061-113-Q1-N6-H4
catagatgaagccttcaggtgtataagatagctcaaccttccatcctcccatcatgaggatgggcagcgggctctcacctcaggtatagacaacgtatgctaggaaccatcaatccttacgttattgaaggccgcacctgactgttcgcttgatcacactctaatcaaatctcaaagggtcatctctagactcaactgctgctgttgacgactcgtgtcttgatcttgcttatgataacttctgttcgacactctggacataacagccacatatgaacacataatggatgcttctccaggggaagctgctgaccgtactgaagagatacgaagtacacacccagccaagctgtgtcgccagatacacatactgtccaaactaatccagggactttgggtttcagatgatcagatcatcctggtcttacttgccacagacctagcctgtgcacatctgagtgatagttatcagaccatgctcgaaacactcgctctgcatgaccaaaacgctgatgtcgttatggtcttacatct

SEQ ID NO: 9501 - DNA, 633 bp, Zea mays
  Clone ID: LIB3061-113-Q1-N6-H5
gggccttccacttaatatataaaagtaagggtagggattcaaatggtttgcacaattataatcagaaaaaagatagaagtgattattaataatctctacctttggaggatataaaaatgcttatgctacttccagctatgccttttgtctttttttagaaaaacttccagttatgacttaattgttaatattgacaataccagtgtaggaatactgaaattagtcttgaaagtaagacattagttgctgctgtttgcgtgatggcccctagcttgaggatactttgccgctactcttgcggatgctttgccgctccatgtcatctatagcggacgctctgctgtcgtgctgctggatgtttgtctcgtctcctctcaggggatgctctgccactgcagtgtcttcgtctttattggcaacctggagttgatgtgcttttccttctgcaggttcagtcggttagattctatgtggagagtccttcttactgcattttctttctatggttctttgggtcggcttaagttgctaaccacttctgtgcttttgtaatatgggcgacagggtctctcagtagctttgtcataaaacaattctacttccccttaatatagtacatgtgactctgacatg

SEQ ID NO: 9502 - DNA, 677 bp, Zea mays
  Clone ID: LIB3061-113-Q1-N6-H8
atgacaaagctatgcacgcctgcgtgtgccggtatgctatagagcggtcgacctacgcgttcggtagtataggcaccacaacaactacaacaacttgtgctagcaaaccttgctgcctactctcagcaacatgcagtttcttccattcaaccaactaggttcataagaactctgattcttatttgcaacatcaacaactaccattcagccagctacctgctgcctacccccagcaatttcttccattcaaccaactagcagcattgaactctcctgcttatttacagcagcaacaactactaccattcagccagctagctggtgtgagccctgctaccttcttgacacaaccacagttgttgccgttctaccagcacgttgcgcctaacgctggcaccctcttacaactgcaacaattgctgccattcaaccaacttgctttgacaaacccagcagtgttctaccaacaacccatcattggtggtgccctcttttagatttcttatgagatatagttcaataataaagttttttatctgatgtttgtggcttcccagaaataagaaagtacatttctagattcttaaaacaaatggggaaaaaggaaaaaactccttttgcttaaaaaaaagcaaaaaggttttttaaaacaaattgttgaaatttttggggggcct

SEQ ID NO: 9503 - DNA, 441 bp, Zea mays
  Clone ID: LIB3061-113-Q1-N6-H9
agcacatcaaacaagtggcgacagacaaagatttgtagagggtgatccgcgctgagaagagatggctaatatcgccgcggcggcggcggcggcactgtgcttaccggccctggtggccgcggccgtctgacaaggcgaggtctagcggtagacgctcacggacctgcagcgctggcaggaggtccaggacagcccgctcgactcgtgccgacaggtcctagaccggcagctaaccggcagaagatgctgccgtcgcgttggtccgttccggtggcgcaccgggctcccgatgcggtgcttccagcagcttcaggacgtgagccgcgagcgccgctgggccgccatgcggagcatcgacacgggatacgaataggccatgccgacgcttgtgataggctggtggcatgggaaggcggaggccgccgccgctgccgctgcgtg

SEQ ID NO: 9504 - DNA, 591 bp, Zea mays
  Clone ID: LIB3061-103-Q1-K6-A1
catcactgtgccacctagccgtggtgaaccctgtcacctacttgcaacagcagctgcttgcatccaacccacttgctctggcgaacgtagctgcataccagcaacaacaacagctgcaacagtttatgccagtgctcagtcaactagccatggtgaaccctgccgtctacctacaactactttcatctagcccgctcgcggtgggcaatgcacctacgtacctacaacaacagttgctgcaacaaattgtaccagctctgactcagctagctgtggcaaaccctgctgcctacttacaacagttgcttccattcaaccaactggctgtgtcaaactctgctgcgtacctacaacagcgacaacagttacttaatccattggcagtggctaacccattggtcgctaccttcctgcagcagcaacaacaattgctgccatacaaccagttctctttgatgaaccctgccttgcagcaacccatcgttggaggtgccatcttttagattacatatgagatgtactcgacaatggtgccctcataccgacatgtgtttcctagaaataatcaatatattgattgagatttatctc

SEQ ID NO: 9505 - DNA, 654 bp, Zea mays
  Clone ID: LIB3061-103-Q1-K6-A3
attttcagcattcaaaaacacaccaagcgaagcgcactagcaacgacctaacaccaatggctaccaagatattagccctccttgcgcttcttgcccttttagtgagcgcaacaaatgcgttcattattccacagtgctcacttgctcctagtgccattattccacagttcctcccaccagttacttcaatgggcttcgaacatccagccgtgcaagcctacaggctacaactagcgcttgcggcgagcgccttacaacaaccaattgcccaattgcaacaacaatccttggcacatctaaccctacaaaccattgcaacgcaacaacaacaacaacaacagtttctgccatcactgagccacctagccgtggtgaaccctgtcacctacttgcaacagcagctgcttgcatccaacccacttgctctggcgaacgtagctgcataccagcaacaacaacagctgcaacagtttatgccagtgctcagtcaactagccatggtgaaccctgccgtctacctacaactactttcatctagcccgctcgcggtgggcaatgcacctacgtacctacaacaacagttgctgcaacaaattgtaccagctctgactcagctagctgtggcaaaccctgctgcctacttacaacagttgc

SEQ ID NO: 9506 - DNA, 539 bp, Zea mays
  unsure (1)..(539): unsure at all n locations; Clone ID: LIB3061-103-Q1-K6-A5
ggcgattcgtcttcacgatccgcccgccgtttccattgcttacttgctatggcgcacacagccggtgcggcggttctgaaggtggcaccgccggggaaggggggcggggaatccttccccacggtgcaggcggcggtcgacgcggtgccgctgggcaaccgggcgcgcgtcgtcatccgcctcgcgccgggggtctacagggagcctgtctacgtcgccaagaccaagaacttcatcaccgtcgtgtcatgggacaacaccgccacgcgcatcaggcactcgcagtcatccagggttataggaactggaacattcggctgtggtacgttcatcgttgagggggaagatttcattgcagagaatatcacgtttgagaactcagctccccagggctctgggcaggccgttgcagtccgggttaccgcagataggtgtgctttctacaactgccggttcctcggttggcaagacacattatacttacactacntggaaacagtacttaagagaatgttatattgaaggccattgtgacttca

SEQ ID NO: 9507 - DNA, 661 bp, Zea mays
  Clone ID: LIB3061-103-Q1-K6-A6
cggacgcgtgggtcagcattcaaaaacacaccaagcgaagcgcactagcaacgacctaacaccaatggctaccaagatattagccctccttgcgcttcttgcccttttagtgagcgcaacaaatgcgttcattattccacagtgctcacttgctcctagtgccattattccacagttcctcccaccagttacttcaatgggcttcgaacatccagccgtgcaagcctacaggctacaactagcgcttgcggcgagcgccttacaacaaccaattgcccaattgcaacaacaatccttggcacatctaaccctacaaaccattgcaacgcaacaacaacaacaacaacagtttctgccatcactgagccacctagccgtggtgaaccctgtcacctacttgcaacagcagctgcttgcatccaacccacttgctctggcgaacgtagctgcataccagcaacaacaacagctgcaacagtttatgccagtgctcagtcaactagccatggtgaaccctgccgtctacctacaactactttcatctagcccgctcgcggtgggcaatgcacctacgtacctacaacaacagttgctgcaacaaattgtaccagctctgactcagctagctgtggcaaaccctgctgcctacttacaacagttg

SEQ ID NO: 9508 - DNA, 663 bp, Zea mays
  Clone ID: LIB3061-103-Q1-K6-A9
atcaatcatcattcatcttagtagtataggcaccaaatcaaatctgcaacatcaattatctaactccaaaaaccatgaagctggtgcttgtggttcttgctttcattgctttagtatcaagtgtttcttgtacacagacaggcggctgcagctgtggtcaacaacaaagccatgagcagcaacatcatccacaacaacatcatccacaaaaacaacaacatcaaccaccaccacaacatcaccagcagcagcaacaccaacaacaacaagttcacatgcaaccacaaaaacatcagcaacaacaagaagttcatgttcaacaacaacaacaacaaccgcagcaccaacaacaacaacaacaacaacagcaccaacaacaacatcaatgtgaaggccaacaacaacatcaccaacaatcacaaggccatgtgcaacaacacgaacagagccatgagcaacaccaaggacagagccatgagcaacaacatcaacaacaattccagggtcatgacaagcagcaacaaccacaacagcctcagcaatatcagcagggccaggaaaaatcacaacagcaacaatgtcattgccaggagcagcaacagactacaaggtgcagctataactactatagcagtagctcaaatctaaaaaattgtcatgaat

SEQ ID NO: 9509 - DNA, 677 bp, Zea mays
  Clone ID: LIB3061-103-Q1-K6-B1
agaaagcacaatagtgtaccaacaatggcagccaaaatattttgcctccttatgctccttggtatttctgcaagtgctgctacggcgaccattttcccgcaatgctcacaagctcctatagcttcccttcttcccccgtacctctcaccagcggtgtcttcggtatgtgaaaacccaattcttcaaccctacaggatccaacaggcaatcgcagctggcatcttacctttatcacccttgttcctccaacaatcatcagccctattacagcagttacctttggtgcatttattggcacaaaacatcagggcacaacaactacaacaacttgtgctagcaaaccttgctgcctactctcagcaacagcagtttcttccattcaaccaactagctgcattgaactctgcttcttatttgcaacaacaacaactaccattcagccagctacctgttgcctacccccaacaatttcttccattcaaccaactggcagcattgaactctcctgcttatttacagcagcaacaactactaccattcagccagctagctggtgtgagccctgctaccttcttgacacaaccacagttgttgccgttctaccagcacgctgcgcctaacgctggcaccctcttaccaactgcacaattgctgccattcaaccaacttgctttgac

SEQ ID NO: 9510 - DNA, 587 bp, Zea mays
  Clone ID: LIB3061-103-Q1-K6-B10
gccggttcatctgccgccgccaccatgccactaccctactcaaccgccccggcctcagcctcatccccagccacacccatgcccgtgccaacagccgcatccaagcccgtgccagctgcagggaacctgcggcgttggcagcaccccgatcctgggccagtgcgtcgagttcctgaggcatcagtgcagcccgacggcgacgccctactgctcgcctcagtgccagtcgttgcggcagcagtgttgccagcagctcaggcaggtggagccgcagcaccggtaccaggcgatcttcggcttggtcctccagtccatcctgcagcagcagccgcaaagcggccaggtcgcggggctgttggcggcgcagatagcgcagcaactgacggcgatgtgcggcctgcagcagccgactccatgcccctacgctgctgccggcggtgtcccccactgaagaaactatgtgctgtagtatagccgctggctagctagctagttgagtcatttagcggcgatgattgagtaataatgtgtcacgcatcaccatgggtggcagtgtcagtgtgagcaatgacctgaatgaacaattg

SEQ ID NO: 9511 - DNA, 681 bp, Zea mays
  Clone ID: LIB3061-103-Q1-K6-B11
cccgggatttataccaactagcaacatatttagcacaatagtgtaccaacaatggcagccaaaatattttgcctccttatgctccttggtatttctgcaagtgctgctacggcgaccattttcccgcattgctcacaagctcctatagcttcccttcttcccccgtacctctcaccagcggtgtcttcggtatgtgaaaacccaattcttcaaccctacaggatccaacaggcaatcgcagctggcatcttacctttatcacccttgttcctccaacaatcatcagccctattacagcagttacctttggtgcatttattggcacaaaacatcagggcacaacaactacaacaacttgtgctagcaaaccttgctgcctactctcagcaacagcagtttcttccattcaaccaactagctgcattgaactctgcttcttatttgcaacaacaacaactaccattcatccagctacctgttgcctacccccaacaatttcttccattcaaccaactggcagcattgaactctcctgcttatttacagcagcaacaactactaccattcagccagctagctggtgtgagccctgctaccttcttgacacaaccacatttgttgccgttctaccagcacgctgcgcctaacgctggcaccctcttacaactgcaacaattgctg

SEQ ID NO: 9512 - DNA, 649 bp, Zea mays
  Clone ID: LIB3061-103-Q1-K6-B12
tctagttctaggcaaccaacccatgctaagttgcctaagaagaaaattcctaatgcatcaaatgatcatgccatttcatttaaaacttttgatgcttcttatgttttgactaacaaatccggcaaggtcgttgccaagtttgttgggggcaagcacaagggatcaaagacttgtgtttgggtgcccaaagttcttgtttctaatgccaaaggacccaaaaccgtttgggtacctaaagtcaagaactaaatttgttttgtaggtttatgcatccggtggctcaagttggatactcgatagcgggtgcacaaaccacatgaccggggagaaaaggatgttctcctcatatgagaaaaacaaagatccccaacgagcaatcacattcggggatggaaatcaaggtttggtcaaagatgtgggagttaaatgcgaatggaaatctcgtgagcagctattcaagattatgtgccacagtggaatcaatggacgaaggaggtaatggtggaggtcgggcatggattgcaactggaagtgaaggagaaatctatctcgcgttcttcaatctcgactccatgagcaggaagatgaccgttgaaatatcagaccttggaaaggttctcggaagataccttttggagaaaacccatgt

SEQ ID NO: 9513 - DNA, 633 bp, Zea mays
  Clone ID: LIB3061-103-Q1-K6-B3
cactggcaagacaatcacccttgaggtggagtcttcggataccattgacaatgtcaaggccaagatccaggacaaggagggcatcccaccggaccagcagcgcctcatcttcgccggcaagcagctggaggatggccgcaccctggcggattacaacatccagaaggagagcactctccacctggtgctccgcctcaggggtggcatgcagatttttgtgaagacattgactggcaagactatcaccttggaggtggagagctctgacaccattgacaatgtgaaggccaagatccaggacaaggagggcattcccccagaccagcagcgtctgatctttgcgggcaagcagctggaggatggccgcactctcgcggactacaacatccagaaggagagcacccttcaccttgttctccgcctcaggggtggtatgcagatctttgtgaagaccctgactggaaaaaccataaccctggaggttgagagctcggacaccatcgacaatgtgaaggcgaagatccaggacaaggagggcatccccccggaccagcagcgtctgatcttcgccggcaaacagctggaggatggccgcaccctagcagactacaacatccaaaaggagagcaccct

SEQ ID NO: 9514 - DNA, 662 bp, Zea mays
  unsure (1)..(662): unsure at all n locations; Clone ID: LIB3061-103-Q1-K6-B7
cgtcagcagcttctgcttgctctggggggaaggagagagagagagcgagagagagagagagatctagtagagaggctagtaggtggtcctcgaacgaagatgttggcggtgttcagcgggcaggtggtggaggtgccggcggagctggtggcggcgggcagccggacgccgtcgcccaagacgaaggcgtcgcagctcgtggggcgcttcctggccgcgtccgatccggccgtgtccgtgcagctcggcgaccacggccacctcgcctactcccacaccaaccaggcgctcctccgccccatgtcgttcgcggccaatgacgaggtgttctgcctgttcgaaggggtgctggacaacctgngtcggctgagccagcagcacgggctgtcaagcaagggcgccaacgaggtgctcctcgtcatcgatgcctacaagacgctgcgcgaccgcgcgccctacccggccagcttcatgctcgcccagctcaccggctcctacgccttcgtcctcttcgacaagtccaccaactccctgctcgtcgcatctgaccccgagggcagggtgccgctcttctgggggatcaccgccgacggctgcgtcgncttctccgacgacatcgacttgctcaaaggctcatgcgggaagtcgctcgcgccgttccc

SEQ ID NO: 9515 - DNA, 663 bp, Zea mays
  Clone ID: LIB3061-103-Q1-K6-C1
ctagcaacatagaaagcacaatagtgtaccaacaatggcagccaaaatattttgcctccttatgctccttggtctttctgcaagtgctgctacggcgaccattttcccgcaatgctcgcaagctcctatagcttcccttcttcccccgtacctctcaccagcggtgtcttcggtatgtgaaaacccaattcttcaaccctacaggatccaacaggcaatcgcagctggcatcttacctttatcacccttgttcctccaacaatcatcagccctattacaacagttacctttggtgcatttattggcacaaaacatcagggcacaacaactacaacaacttgtgctagcaaaccttgctgcctactctcagcaacagcagtttcttccattcaaccaactaggttcattgaactctgcttcttatttgcaacaacaacaactaccattcagccagctacctgctgcctacccccagcaatttcttccattcaaccaactagcagcattgaactctcctgcttatttacagcagcaacaactactaccattcagccagctagctggtgtgagccctgctaccttcttgacacaaccacagttgttgccgttctaccagcacgttgcgcctaacgctggcaccctcttacaactgcaacaattgct

SEQ ID NO: 9516 - DNA, 632 bp, Zea mays
  Clone ID: LIB3061-103-Q1-K6-C10
ccggattcccgggtgccgcctccgttctatctgccgtcgcagcagcagccgcagccatggcaataccccactcaaccaccgcagctaagcccgtgccagcagttcggatcctgcggcgtcggcagcgtcggcagcccgttcctgggccagtgcgtcgagttcctgaggcaccagtgcagcccggcggcgacgccctacggctcgccacagtgccaggcgctgcagcagcagtgctgccaccagatcaggcaggtggagccgctgcaccggtaccaggcgacatacggtgtggtcctgcagtccttcctgcagcagcagccgcagggcgagctcgcggcgctgatggcggcccatgtagcgcagcagctgacggcgatgtgcggcctgcagctgcagcagccatgtccctgcccttgcaacgcagctgccggcggtgtctactactgaggaaactatgtactgtagtaataatgtaatggagccgctgactagctacctagctcgctagtttactcatttagcggcgatgagtaacgtagtgtcacccatcaccatgggtggcagtgtgagcaatgacctgaatgaaccattgaaatggaaaggaataatatataaggaaaaaagatgattgg

SEQ ID NO: 9517 - DNA, 426 bp, Zea mays
  unsure (1)..(426): unsure at all n locations; Clone ID: LIB3061-103-Q1-K6-C3
agcgcaacaaaagcgnncaanannccacaaggcncacnngcnccnagggccaanannccacatttccnccccgcaggggggggaangggccncgaacacccagcngggcaagccnacaggccacaacaagcgccngcggcgagcggccaacaacaaccaaangcccaannacaacaacaancccgggcacaacnaaccanacaaaccaacggaacgcaacagccacaacaancnccaccagcacngagccaacaagccgcggngaacccggacccccacnagcaacagcagacgcnngcagccaacccacaagcnccggcaaacagagaacgaaaccaacaacaacaaccancgccacaaggnacaccagcgcccagncaacaagccaaggagaacccngccccccaccgacaacagccacaaccg

SEQ ID NO: 9518 - DNA, 585 bp, Zea mays
  Clone ID: LIB3061-103-Q1-K6-C5
actccctaccagccacaggcttggtagctgacgagttcccacacctggacatcatcaacgacctgctggatgaggagcagagtgacaggagaagggttcttcagcctggtttcgtccagcaattctctgtgcataacggcgtcagcgcgcctgattatggcttgttcagtgagccgtacctgttcgaccggtccgagcagtactttgacgaggagcctccaaggttctacagtccattgagcagcgctcctcggaggatgagggaccggagctactcgcacttcgatctcccttcatactccatgagcagccagcttgatggtctattgatgagccagtggccgccatacagccgcgccgacctcgccatgcctggttttgggtcagacacaggtggctactcctatcagccgcaggtttcccgagtcaacgagtgcacagcaataccgtctatcgcctgcatggcatgaaagttaacatgcattgcatatgtgtggggaatcatgctgctcgcttttgacctgattgtattggaattagtcccccataacagtgatttaaaaattggttcctctggtttaattc

SEQ ID NO: 9519 - DNA, 228 bp, Zea mays
  Clone ID: LIB3061-103-Q1-K6-D1
tcctgttcttgctggggtatgtgctacagatccatttcgtcgaatggaatactttctcagacaactagaaaaccattggttttggcggtgtgcaaaacttcccaaccgaggtctgtttgatggggaattttagaccagaatttggagggaactggaatgggggacacatggaagtggagatgatttcaatggctcatcgcatggggtttccttactactccatatgct

SEQ ID NO: 9520 - DNA, 654 bp, Zea mays
  unsure (1)..(654): unsure at all n locations; Clone ID: LIB3061-103-Q1-K6-D11
accgccccggcctcagcctcatccccagccacacccatgcccgtgccaacagccgcatccaagcccgtgccagctgcagggaacctgcggcgttggcagcaccccgatcctgggccagtgcgtcgagtttctgaggcatcagtgcagcccgacggcgacgccctactgctcgcctcagtgccagtcgttgcggcagcagtgttgccagcagctcaggcaggtggagccgcagcaccggtaccaggcgatcttcggcttggtcctccagtccatcctgcagcagcagccgcaaagcggccaggtcgcggggctgttggcggcgcatatagcgcagcaactgacggcgatgtgcggcctgcagcagccgactccatgcccctacgctgctgccggcggtgtcccccactgaagaaactatgtgctgtagtatagccgctggctagctagctagttgagtcatttagcggcgatgattgagtaataatgtgtcacgcatcaccatgggtggcagtgtcagtgtgagcaatgacctgaatgaacaattgaaatgaaaagaaaaaagtattgttcccaanaaaaaaaanaaaanaaaaannnnnnnnnnnnnnnnnnnnnnnnnnnnnnnnntttttttaaaaaaaaaaaaaannaaaa

SEQ ID NO: 9521 - DNA, 675 bp, Zea mays
  unsure (1)..(675): unsure at all n locations; Clone ID: LIB3061-103-Q1-K6-D2
attgagaccaactagcaacatagaaagcacaatagtgtaccaacaatggcagccaaaatattttgcctccttatgctccttggtctttctgcaagtgctgctacggcgaccattttcccgcaatgctcgcaagctcctatagcttcccttcttcccccgtacctctcaccagcggtgtcttcggtatgtgaaaacccaattcttcaaccctacaggatccaacaggcaatcacagctggcatcttacctttatcacccttgttcctccaacaatcatcagccctattacatcagttacctttggtgcatttattggcacaaaacatcagggcacaacaactacaacaacttgtgctagcaaaccttgctgcctactctcagcaacagcagtttcttccattcaaccaactagctgcattgaactctgcttcttatttgcaacaacaacaactaccattcagccagctacctgctgcctacccccagcaatttcttccattcaaccaactggcagcattgaactctcctgcttatttacagcagcaacaactactaccattcagccagctagcntggtgtgagccctgctaccttcttgatacaaccacagttgttgccgttctaccagcacgctgcgcctaacgctggcaccctcttacaactgcaacaattgct

SEQ ID NO: 9522 - DNA, 695 bp, Zea mays
  Clone ID: LIB3061-103-Q1-K6-D3
ccgggctagcaacatagaaagcacaatagtgtaccaacaatggcagccaaaatattttgcctccttatgctccttggtctttctgcaagtgctgctacggcgaccattttcccgcaatgctcgcaagctcctatagcttcccttcttcccccgtacctctcaccagcggtgtcttcggtatgtgaaaacccaattcttcaaccctacaggatccaacaggcaatcacagctggcatcttacctttatcacccttgttcctccaacaatcatcagccctattacatcagttacctttggtgcatttattggcacaaaacatcagggcacaacaactacaacaacttgtgctagcaaaccttgctgcctactctcagcaacagcagtttcttccattcaaccaactagctgcattgaactctgcttcttatttgcaacaacaacaactaccattcagccagctacctgctgcctacccccagcaatttcttccattcaaccaactggcagcattgaactctcctgcttatttacagcagcaacaactactaccattcagccagctagctggtgtgagccctgctaccttcttgatacaaccacagttgttgccgttctaccagcacgctgcgcctaacgctggcaccctcttacaactgcaacaattgctgccattcaaccaacttgctttgacaac

SEQ ID NO: 9523 - DNA, 645 bp, Zea mays
  Clone ID: LIB3061-103-Q1-K6-D6
cgggtcgatcttgcgtccgaattttttagcatgtgagaaacacaccaagcgaagcgcactagcaacgacctaacaacaatggctaccaagatattagccctccttgcgcttcttgccctttttgtgagcgcaacaaatgcgttcattattccacaatgctcacttgctcctagtgccattattccacagttcctcccaccagttacttcaatgggcttcgaacacctagctgtgcaagccaacatgcaacaacaagcgcttgcggcgagcgtcttacaacaaccaattgcccaattgcaacaacaatccttgccacatctaacaatacaagccatcacaacgcaacagcaacaacagttcctaccagcactgagccacctagccatggtgaaccctgccgcctacttgcaagagcagctgcttgcatccaacccacttgctctggcgaacgtagttgcaaaccagcaacaacaacagctacaacagtttctgccaacgctcagtcaactagccatggtgaaccctgccgcctacgtacaacaacaacaactgctttcatctagcccgctcgctgtgggcaatgcacctacatacctgcaacaacaattgttgcaacagattgtaccagctctgactcaactagct

SEQ ID NO: 9524 - DNA, 359 bp, Zea mays
  Clone ID: LIB3061-103-Q1-K6-D9
gcaacattaatttcttccattcaaccaactagcagcattgaactctcctgcttatttacagcagcaacaactactaccattcagccagctagctggtgtgagccctgctaccttcttgacacaaccacagttgttgccgttctaccagcacgttgcgcctaacgctggcaccctcttacaactgcaacaattgctgccattcaaccaacttgctttgacaaacccagcagtgttctaccaacaacccatcattggtggtgccctcttttagatttcttatgagttatagttcaataataaagttttttatctgatgtttgtggcttcccagaaataagaaagtacatttctagattctt

SEQ ID NO: 9525 - DNA, 271 bp, Zea mays
  Clone ID: LIB3061-103-Q1-K6-E12
tcagccagctagctgatgtgagccctgctgccttcttgacacatcaacagttgttgccgttctacctgcacgctatgcctaacgctggcaccctcttacaactgcaacaattgctgccattcaaccaacttgctttgacaaacccaacagtgttctaccaacaacccatcattggtggtgccctcttttagattgcttatgagttatagttcaataatgaagttttttggatgatgtttgtggcgtcccagaaataagaaagtacatttct

SEQ ID NO: 9526 - DNA, 566 bp, Zea mays
  unsure (1)..(566): unsure at all n locations; Clone ID: LIB3061-103-Q1-K6-E3
gtcgaccacgccgtccggccgcccttagcgccactgcacagacgcgcagagacagacattgcgactttgcgagagacaaaacctcccagataacgcccgcgcgcctccccgatggcgtcgtcgtgccagaacgtggagattcccggcaagccgacggagacggggacggcgctgctggagacggcgacgggcaccatccaggggttcgcgccgctgagccagatccaccagcacctgtgcgcgttccacttctacgcggacgacatggggcggcaggtggaggcgcaccacttctgcgcgcacctgaacgaggacgtgcggcagtgcctcatcttcgacgggcccggcgccggcgcgcgcctcatcggcgtggagtacatcgtctccgagacggtgttcctgacgctgcccgacgccgagaagccgctgtggcacacgcacgagttcgaggtgaagggcggngtgctgttcatgccgggggtgcccggcgtggtggagcgccgggacctggagaaggtggcaagaactacggcaagaccatccacttctggcaggtggaccgcggc

SEQ ID NO: 9527 - DNA, 698 bp, Zea mays
  unsure (1)..(698): unsure at all n locations; Clone ID: LIB3061-103-Q1-K6-E4
ccgggtntgagaccaactagcaacatagatttcacaatagtgtaccaacaatggcagctaaaatattttgcctccttatgctccttggtctttctgcaagtgctgctacggcgaccattttcccacaatgctcacaagctcctatagcttcccttcttcccccgtacctctcaccaacggtgtcttcggtatgtgaaaacccaattcttcaaccctacaggatccaacaggcaatcgcagctggcatcttacctttatcacccttgttcctccaacaatcatcagccctattacagcagttacctttggtgcatttattggcacaaaacatcagggcacaacaactacaacaacttgtgctagcaaaccttgctgcctactctcagcaacagcagtttcttccattcaaccaactagctgcattgaactctgcttcttatttgcaacaacaacaactaccattcagccagctatctgctgcctacccccagcaatttcttccattcaaccaactgacagcattgaactctcctgcttatttacagcagcaacaactactaccattcagccagctagctggtgtgagccctgctaccttcttgacacaccacagttgttgcccttctaccagcacgctgcgcctaacgctggcaccctcttacaactgcaacaattgctgccattcaaccaacttgctt

SEQ ID NO: 9528 - DNA, 456 bp, Zea mays
  unsure (1)..(456): unsure at all n locations; Clone ID: LIB3061-103-Q1-K6-E5
cgccgccaccttgctggggtcgcaaatcggggcgccgagcaccgaatctccgatggcccgcacgaagcagacggcgcgcaagncgacgggcggcaaggcgccccgcaagcagctggccaccaaggcggcgcgcaaggcggcgccggcaaccggcggcgngaagaagcctcaccgcttccgcggcggcaccgtcgcgctccgggagattcgcaagtaccagaagagcacggagctgctcatccgcaagctgcccttccagcgcctcgtccgtgagatcgcgcaggatttcaagaccgacctccgcttccagtcctccgctgtcgccgcgctgcaggaggccgccgaggcctacctcgtggggctcttcgaggacaccaacctttgcgccatccacgccaagcgcgtcaccatcatgcccaaggacatccagctcgcgcgccgcatcaggggcgagag

SEQ ID NO: 9529 - DNA, 356 bp, Zea mays
  Clone ID: LIB3061-103-Q1-K6-F2
cgaaccttgctgcttaccttcagcaacaacaacaaccatgtgagttatgtggatctcaacaagctactcaaagtgcggtggcaatcttgacagcagcacaatacctaccatcaatgtgcggcttgtaccactcatactaccaaaataatccatgcagcagcaatgacattagtggtgtttgcaattgaagaattgtgtctacctagccgttatactcctataacggtgttaagcaataaagtaccatacattatgatgtttgtactatgatatttgaataagaatactaattgtaattaaaaaaaaaaaaaaaaaaaaaaaaaaaaaaaaaaaaaaaaaaggaaaaaaagaaataa

SEQ ID NO: 9530 - DNA, 396 bp, Zea mays
  unsure (1)..(396): unsure at all n locations; Clone ID: LIB3061-103-Q1-K6-F3
aaccctacaggatccaacaggcaatcgcagctggcatcttacctttatcacccttgttcctccaacaatcatcagccctattacagcagttacctttggtgcatttattggcacaaaacatcagggcatatcaactacaacaactggtgctagcaaaccttgctgcctactctcagcaacagcagtttcttccattcaaccaactagctgcattgaactctgcttcttatttgcaacaacaacaactaccattcagccagctatctgctgcctacccncagcaatttcttccattcaaccaactgacagcattgaactctcctgcttatttacagcagcaacaactactaccattcagccagctagctggtgtgagccctgctacctttttgacac

SEQ ID NO: 9531 - DNA, 510 bp, Zea mays
  unsure (1)..(510): unsure at all n locations; Clone ID: LIB3061-103-Q1-K6-F6
ccgttcctgttcctgttcctgctgctagctgctggttgctggggccgtgtacgtacgcgttgatgaaggtgaccgtggaagggagcggcgccggcccggccgcggtcaagaggaggcggagtggcgcgcctggcaggcgccagagcggcggcgtgagcgtgcggcggcgcgtgcaggtggacgcggcgaccgcgccagagccggcgccgctccagcgtctgcttgccgcgtgccgccgcgcgttcggaggccccgggaccgtgccggcgcaccacgacgtcgtcctcatcagagacatcctngacaagatgggaccagaggatgtgcacctgagagccgtcaccaaggccgccgccgcttccggcggccctcgaacgcaccctgttcctatcatcacacgaaccaccatttataaatgcaagaacttctnggtcggggggttcctgctgcccccaagcgcgaccatncctttgcacaaccacccggggatgacggtgttcaacaagcttc

SEQ ID NO: 9532 - DNA, 413 bp, Zea mays
  Clone ID: LIB3061-103-Q1-K6-G1
ccgggctctgcttcttatttgcaacaactactactaccattcagacagctatctgctgcctacccccagcaatttcttccattcaaccaactgacagctttgaactctcctgcttatttacagcagcaacaactactaccattcagccagctagctggtgtgagccctgctaccttcttgacacaaccacaattgttgccgttctaccagcacgctgcgcctaacgctggcaccctcttacaactgcaacaattgctgccattcaaccaacttgctttgacaaacccaacagcattctaccaacaacccatcattggtggtgccctcttttagatttcttatgagttatagttcaataataaagttttttgtctgatgtttgtggcttcccagaaataagaaagtacatttct

SEQ ID NO: 9533 - DNA, 656 bp, Zea mays
  Clone ID: LIB3061-103-Q1-K6-G10
caagcattatagaaagtggaatccagtagcaacaacagagcaacaatggcgaccaagatattttccctccttatgctccttgctctttctgcatgtgttgctaacgcgacaattttccctcaatgctcacaagctcctatagcttcccttcttcccccataccttccatcaatgatagcttcagtatgtgaaaacccagctcttcagccctataggctccaacaagcaatcgcagcaagcaacatacctttatcacccttgttgtttcaacaatcgccagccctatctttggtgcagtcattggtacaaaccatcagggcacagcagctgcagcaactcgtgctacctgtgatcaaccaagtagctctggcaaacctttctccctactctcagcaacaacaatttcttccattcaaccaactgtctacactgaaccctgctgcttatttgcagcaacaactattaccattcagccagctagctactgcctactctcagcaacaacaacttcttccatttaaccaattggccgcactgaaccccgctgcttatttgcagcagcaaatactactaccatttagccagctagctgcagcaaaccgtgcttccttcttgacacagcaacagttgctgcctttctaccagcagtttgcggc

SEQ ID NO: 9534 - DNA, 679 bp, Zea mays
  Clone ID: LIB3061-103-Q1-K6-G11
ccgggccaacaagcaacatagaaagtggaatacagtagcaacaatagagcaacaatggcggccaagatattttccatccttatgctccttgctctttctgcatgtgttgctaacgcgaccatttttcctcaatactcacaagctcctatagctgcccttcttcccccataccttccatcaatgaccgcttcagtttgtgaaaacccagcccttcaaccctacaggctccaacaagcaatcgcaacaagcaacttacctttatcacccctgttctttcaacaatcgccagccctatctttggtgcagtcattggtacaaaccatcagggcacaacagctgcaacaactcgtgctaccagtgatcagccaagtagctctggcaaacctttctccctactctcagcaacaacaatttcttccattcaaccaactgtctacactgaaccctgctgcttatttacaacaacaacaactactaccattcagccagctagctactgcctactctcagcagcaacaatttcttccatttaaccaattggccgcactgaacccctctgcttatttccagcagcaaatactactaccatttggccagctagctacaacaagccccacttcctttttgaaacaacaacaattgcttccgttcaccagcagtttgtggctaaccccgcaac

SEQ ID NO: 9535 - DNA, 652 bp, Zea mays
  Clone ID: LIB3061-103-Q1-K6-G12
tagaaatcacaatagtgtaccaacaatggcagccaaaatattttgcctccttatgctccttggtctttctgcaagtgctgctacggcgaccattttcccgcaatgctcgcaagctcctatagcttcccttcttcccccgtacctctcaccagcggtgtcttcggtatgtgaaaacccaattcttcaaccctacaggatccaacaggcaatcgcagctggcatcttacctttatcacccttgttcctccaacaatcatcagccctattacaacagttacctttggtgcatttattggcacaaaacatcagggcacaacaactacaacaacttgtgctagcaaaccttgctgcctactctcagcaacagcagtttcttccattcaaccaactaggttcattgaactctgcttcttatttgcaacaacaacaactaccattcagccagctacctgctgcctacccccagcaatttcttccattcaaccaactagcagcattgaactctcctgcttatttacagcagcaacaactactaccattcatccagctagctggtgtgagccctgctaccttcttgacacaaccacaggtgttgccgttctaccagcacgctatgcctaacgctggcaccctcttacaactgcaacaattg

SEQ ID NO: 9536 - DNA, 689 bp, Zea mays
  Clone ID: LIB3061-103-Q1-K6-G3
ggggcggactccccgggattgagaccaactagcaacatagaaagcacaatagtgtaccaacaatggcagctaaaatattttgcctccttatgctccttggtctttctgcaagtgctgctacggcgaccattttcccacaatgctcacaagctcctatagcttcccttcttcccccgtacctctcaccaacggtgtcttcggtatgtgaaaacccaattcttcaaccctacaggatccaacaggcaatcgcagctggcatcttacctttatcacccttgttcctccaacaatcatcagccctattacagcagttacctttggtgcatttattggcacaaaacatcagggcacaacaactacaacaacttgtgctagcaaaccttgctgcctactctcagcaacagcagtttcttccattcaaccaactagctgcattgaactctgcttcttatttgcaacaacaacaactaccattcagccagctatctgctgcctacccccagcaatttcttccattcaaccaactgacagcattgaactctcctgcttatttacagcagcaacaactactaccattcagccagctagcctggtgtgagccctgctaccttcttgacacaccacagttgttgccgttctaccagcacgctgcgcctaacgctggcaccctcttacaactgcaacaattg

SEQ ID NO: 9537 - DNA, 605 bp, Zea mays
  Clone ID: LIB3061-103-Q1-K6-G5
cgggtcgactttgcgtccggagatttttcagctccatagcaaaccattcttcagagataatgagagtgaggtcctgacggatctgtcatcaatgcatcggttggttgttgcaaccggaggtggtgcagtgatccgaccaatcaattggagttacatgaagaaagggctgaccgtatggttagatgtcccactggatgcacttgcaagaagaatcgctgctgtaggaaccgcgtctcgaccactcttgcatcaggaatccggtgatccttatgcaaaggcttatgcaaaacttacgtcactttttgagcaaagaatggactcgtatgctaatgctgatgccagagtttcacttgaacatattgcattaaaacaaggccataatgatgtcactatacttacacctagtaccatcgccattgaggcattgctaaagatggaaagttttcttaccgagaagaccatggtcagaaactgacctcttgaatgagagggaaaggatgctgacaacatgtggcccttgtttgtttaattgtacatatacctttgcattattgcctaaactctttctacagtgttgttggattattgtttgtgcagcatgaaag

SEQ ID NO: 9538 - DNA, 609 bp, Zea mays
  Clone ID: LIB3061-103-Q1-K6-G8
tcccgggttcttcccccgtacctctcacaacggtgtcttcggtatgtgaaaacccaattcttcaaccctacaggatccaacaggcaatcgcagctggcatcttacctttatcacccttgttcctccaacaatcatcagccctattacagcagttacctttggtgcatttattggcacaaaacatcagggcacaacaactacaacaacttgtgctagcaaaccttgctgcctactctcagcaacagcagtttcttccattcaaccaactagctgcattgaactctgcttcttatttgcaacaacaacaactaccattcagccagctatctgctgcctacccccagcaatttcttccattcaaccaactgacagcattgaactctcctgcttatttacagcagcaacaactactaccattcagccagctagctggtgtgagccctgctaccttcttgacacaaccacagttgttgccgttctaccagcacgctgcgcctaacgctggcaccctcttacaactgcaacaattgctgccattcaaccaacttgctttgacaaacccagcagcattctaccaacaatcccatcattggtggtgccctcttttag

SEQ ID NO: 9539 - DNA, 594 bp, Zea mays
  Clone ID: LIB3061-103-Q1-K6-H1
ccgggtcgaccctacgccgtccgatgtacgtgctattcataaacacacctagcgaagcgcactagcacgcacctatcacactggctctccatgcattatccctacgtgcgcttctcgcccttttggggagtgcaacaaatgcgatcatgatcccacagtgctcacttgctcccagcgccatgattacacacatcctccctccaggtactacaatgggctacgaacacccagctcgcgcaagcctataagctccaacacgcgcttgcggcgagcgccttataacatcctagcgcccactgacaacagcattcctcggcacatgctaaccatacacaccatcgcatccgcagcagcaacacgcactgagccacctatacgaggtgaaccctatcgactactggcaacaacagctgcttgcatacaacccactcgctttggcaaacgtagctgcatacctacaacaacaacagttgcaacagttgctacacaccgctgatgcaactacgccatggtgaaccctatggactacctacaacatcaacaacttgtgtcatactatcgccgtcgacttgggcaatgcacctacatacctgc

SEQ ID NO: 9540 - DNA, 670 bp, Zea mays
  unsure (1)..(670): unsure at all n locations; Clone ID: LIB3061-103-Q1-K6-H11
cgggncgaccttgcgtccgcagcctttagaaagtggaatacaccagcaacaacagagcaacaatggcgaccaagatattttccctccttatgctccttgctctttctgcatgtgttgctaacgcgacaattttccctcaatgctcacaagctcctatagcttcccttcttcccccataccttccatcaatgatagcttcagtatgtgaaaacccagctcttcagccctataggctccaacaagcaatcgcagcaagcaacatacctttatcacccttgttgtttcaacaatcgccagccctatctttggtgcagtcattggtacaaaccatcagggcacagcagctgcagcaactcgtgctacctgtgatcaaccaagtagctctggcaaacctttctccctactctcagcaacaacaatttcttccattcaaccaactgtctacactgaaccctgctgcttatttgcagcaacaactattaccattcagccagctagctactgcctactctcagcaacaacaacttcttccatttaaccaattggccgcactgaaccccgctgcttatttgcagcagcaaatactactaccatttagccagctagctgcagcaaaccgtgcttccttcttgacacagcaacagttgctgcctttctaccagcagtttgc

SEQ ID NO: 9541 - DNA, 667 bp, Zea mays
  Clone ID: LIB3061-103-Q1-K6-H12
ctggacgtcagcctagcaattagctcatcgactccagattggagaactcgacaccatgaaggtgctgatcgttgcccttgctctcctggcgctcgctgcgagcgccgcctccagtacaagcggcggctgtggctgccagacaccaccgtttcatctaccgcctccgttctatatgccgcctccgttctatctgccgccgcagcagcagccgcagccatggcaataccccactcaaccaccgcagctaagcccgtgccagcagttcggatcctgcggcgtcggcagcgtcggcagcccgttcctgggccagtgcgtcgagttcctgaggcaccagtgcagcccggcggcgacgccctacggctcgccacagtgccaggcgctgcagcagcagtgctgccaccagatcaggcaggtggagccgctgcaccggtaccaggcgacatacggtgtggtcctgcagtccttcctgcagcagcagccgcagggcgagctcgcggcgctgatggcggcccaggtagcgcagcagctgacggcgatgtgcggcctgcagctgcagcagccaggtccctgcccttgcaacgcagctgccggcggtgtctactactgaggaaactatgtactgtagtaataatgtaatggagccgctgactagctacctagctcgcta

SEQ ID NO: 9542 - DNA, 633 bp, Zea mays
  unsure (1)..(633): unsure at all n locations; Clone ID: LIB3061-103-Q1-K6-H2
agcccggtccccgatctccgatcccctcgncgatccaagatgcagatcttcgtcaagaccctcactggaaagactatcaccctcgagggggagtcttctgacaccattgacaacgtcaaggccaagatccaggacaaggagggcattcccccggaccagcagcggctcatcttcgctggcaagcagctcgaggacgggcgcacacttgccgactacaacatccagaaggagagcaccctccaccttgttctccgcctcaggggaggcatgcagatcttcgtcaagaccctcactggaaagactatcaccctcgaggtggagtcttctgacaccatcgacaacgtcaaggccaagatccaggacaaggagggcatccctccggaccagcagcggctcatttttgctggcaagcagctcgaggacgggcgcacgctggccgactacaacattcagaaggagagcaccctccacttggtgttgcgtctcaggggcggcatgcagatatttgtgaagactctgactggcaagactatcacccttgaggtcgagtcttctgataccatcgacaatgtcaaggccaagatccaggacaaggagggcatcccttcggaccagcagcggctcttttttgcc

SEQ ID NO: 9543 - DNA, 494 bp, Zea mays
  unsure (1)..(494): unsure at all n locations; Clone ID: LIB3061-103-Q1-K6-H6
cgggtcgatctcgcgtccggctttttttagcccgctcgctagcgccaatgcacctacatacctgcaacaagaattgttgcaacagattgtaccagctctaactcagctagctgtggcaaaccctgttgcctacttgcaacagctgcttccattcaaccaactaactttgtcaaactctgctgcgtacctacaacagcgacaacagttacttaatccattggcagtggctaacccattggtcgctaccttcctgcagcagcaacaacaattgctgccatacaaccagttctctttgatgaaccctgccttgcagcaacccatcgttggaggtgccatcttttagattacatatgagatgtactcgacaatggtgccctcataccgacatgtgtttcctagaaataatcaatatattgattgagatttatctcgataaaaaaaaaanaaaaaaaaaaaaanannannnannnnnnnnnnnnnnnnnnnnntttttt

SEQ ID NO: 9544 - DNA, 653 bp, Zea mays
  Clone ID: LIB3061-103-Q1-K6-H7
atccacataaacaacaacatcaaccaccaccacaacatcaccagcagcagcaacaccaacaacaacaagttcacatgcaaccacaaaaacatcagcaacaacaagaagttcatgttcaacaacaacaacaacaaccgcagcaccaacaacaacaacaacaacaacagcaccaacaacaacatcaatgtgaaggccaacaacaacatcaccaacaatcacaaggccatgtgcaacaacacgaacagagccatgagcaacaccaaggacagagccatgagcaacaacatcaacaacaattccagggtcatgacaagcaacaacaactacaacaacttgtgctaggaaaccttgctgcctactctcagcaacagcagtttcttccattcaaccaactggctgcattgaactctgctgcttatttgcaacaacaactaccattcagtcagctagctgctgcctacccccagcaatttcttccattcaaccaactggcagcattgaactctgctgcttatttacaacagcaacagctaccaccattcagccagctagctgatgtgagccctgttgccttcttgacacaacaacagttgttgccgttctacctgcacgctgcgcctaacgctggcaccctcttacaactgcaacaattg

SEQ ID NO: 9545 - DNA, 643 bp, Zea mays
  Clone ID: LIB3061-103-Q1-K6-H8
ctttctcttgatggctacttcgctcagtccaatgtgcttggataccctgacactggcggtcaggttgtgtacattctggatcaagtccgtgctttggagaatgagatgcttctgaggattaagcagcaaggccttgatatcactccgaagatcctcattgttaccaggctgttgcctgatgctgctgggactacgtgcggtcagcggctggagaaggtcattggtactgagcacacagacatcattcgcgttccgttcagaaatgagaatggcatcctccgcaagtggatctctcgttttgatgtctggccatacctggagacatacactgaggatgtttccagtgaaataatgaaagaaatgcaggccaagcctgaccttatcattggcaactacagcgatggcaacctagtcgccactctgctcgcacacaagttgggagtcactcagtgtaccatcgctcatgccttggagaaaaccaaataccccaactcggacatctacttggacaagttcgacagccagtaccacttctcttgccagttcacagctgaccttattgccatgaaccacactgatttcatcatcaccagcacattccaagaaatcgcgggaagcaaggacaccgtggggcagtacgagt

SEQ ID NO: 9546 - DNA, 665 bp, Zea mays
  Clone ID: LIB3061-104-Q1-K6-A1
catcaattatcattcatcttagtagtataggcaccaaatcaaatctgcaacatcaattatctaactccaaaaaccatgaagctggtgcttgtggttcttgctttcattgctttagtatcaagtgtttcttgtacacagacaggcggctgcagctgtggtcaacaacaaagccatgagcaggaacatcatccacaacaacatcatccacaaaaacaacaacatcaaccaccaccacaacatcaccagcagcagcaacaccaacaacaacaagttcacatgcaaccacaaaaacatcagcaacaacaagaagttcatgttcaacaacaacaacaacaaccgcagcaccaccaccaacaacaacaacaacagcaccaacaacaacatcaatgtgaaggccaacaacaacatcaccaacaatcacaaggccatgtgcaacaacacgaacagagccatgagcaacaccaaggacagagccatgagcaacaacatcaacaacaattccagggtcatgacaagcagcaacaaccacaacagcctcagcaatatcagcagggccaggaaaaatcacaacagcaacaatgtcattgccaggagcagcaacagactacaaggtgcagctataactactatagcagtagctcaaatctaaaaaattgcatgaattc

SEQ ID NO: 9547 - DNA, 209 bp, Zea mays
  unsure (1)..(209): unsure at all n locations; Clone ID: LIB3061-104-Q1-K6-A2
ccccaaaccaaaancnnannnnangnggganngancaagcanggagagaacccanaacnacagcncnngcacaagcnggccngcnggaaccgaaggagggcgaccccnngaannnaaccgccaaggcaagcccngccccgccaccgngcccnnnggcacaaacagaagcngaacgggggaacnnacccanncnnaaacgaannagagca

SEQ ID NO: 9548 - DNA, 687 bp, Zea mays
  Clone ID: LIB3061-104-Q1-K6-A4
cccgggtcgaccatgcgtccgcgatgaattcaatgatgatcaaaatgtcatccacttgatggctaaatcattgcttgagaaatttgaagagaagtggctccattttcttcctaaagttgagagtgaggaaaaaagacaaaaggaggaggaatcaaagggtgttgcagccacaaatacttctcgagaagttgcaattgtgggattagcaaaagacactgatgatgagatcaacaggaagctggaggagctccggaaaatggtggttcacagatgcaggaaaatgacgacagatgagaagaggaagctgggtgcaggtatctgtcacttgtctccagatgatcttagcaaggcgctagagattgtcgcacaagacaatcctagcttccagactaaagcagaagaagtggatcttgatatggatgcccagagcgagacaactctatggaggctgaaattctttgtgagggaagcgctggaacgacaggccaacgttgcctctgggaagatggacgaaaacgccaagagaaagagggagatatgcaatgctctggccaaaaccacctcgagacggatcaagaagcagccctagccatcttccatatatttcactcgcgtcctctgattgtttagaagttctttttttgatactagccaccagctttgtgaaacgttttcctgcattttttt

SEQ ID NO: 9549 - DNA, 636 bp, Zea mays
  Clone ID: LIB3061-104-Q1-K6-A5
ccagcaagcaacatagaaagtagaatccattagcaacaatagagcaacaatggcgaccaagatattttccctccttatgctccttgctctttctacatgtgttgctaacgcgacaattttccctcaatgctcacaagctcctatagcttcccttcttcccccataccttccatcaattatagcttcagtatgtgaaaacccagctcttcaaccatataggcttcaacaagcaatcgcagcaagcaacatacctttatcgcccttgttgtttcaacaatcaccagccctatctttggtgcagtcattggtacaaaccatcagggcacaacagctgcagcaactcgtgctacctgtgatcaaccaagtagctctggcaaacctttctccctactctcagcaacaacaatttcttccattcaaccaactgtctacactgaaccctgctgcttatttgcagcaacaactattaccatttagccagctagctactgcctactctcagcaacaacaacttcttccatttaaccaattggccgcactgaaccccgctgcttatttgcagcagcaaatactactgccatttagcgagctagctgcagcaagtcgtgcttccttcttgacacagcaacagttgct

SEQ ID NO: 9550 - DNA, 628 bp, Zea mays
  Clone ID: LIB3061-104-Q1-K6-A7
cgtcggggttctcgaaccagccctgtgggatcttgggtcggcagtcgttcgtcgatgctatcgcagtggctgtgtcgtaaggaggaagattttgtcatgttggacactggcgtggggggcatttccttcgggaatgtggtcagcccaaagtaaagacgacgcgtggtgcccaacgtgacacactcaatgtcaatctgcaaggatttctgttggtggtgctacacttacttcaacaagtacttttgattctggtgacagaaagactatcattgacagtgggacacctggcatatcttccgagggaagtataggactttgttggctgcggctttgataagtaccaagatctgcccttacataattatcaagacttcgtgtgttttcaattttctggaagtatagatgatggatttcccgtaatcacctctagttctgagggagaccttacactgaatgtttacccagatgattaccttttccagaacaggaatgatttatactgtatgggattcctggatggtggtgtacagactaaagatgggaaagatatgctcctcttaggagacctggtcctctcaaacaaactagtagtttatgacttggaaaaagaagtattggatggacagac

SEQ ID NO: 9551 - DNA, 570 bp, Zea mays
  unsure (1)..(570): unsure at all n locations; Clone ID: LIB3061-104-Q1-K6-A9
ccgggnngacctagcgtccgccctttctaacggggcggcccngcgggggagcgtgacctgccaagagattatcacactggggagccaagaggatttgggttcgtggagttcgttgatgcttatgacgcttctgaggcacagtaccacatgaatcgccagatgtttgctgggcgtgaaataactgttgtacttgctgcgggggcacggaaaaggcctgaggacatgcgtagacaaactggaccaagaggttattctggtcatgaagggcgtcgtccgaatcgtcatggtgcaggacggtcccgttctcgttcatactcgcgttcccgctcaccacgccctcgtggtcgtggtagatcacagtcatactcccctgccccgaaaaggcgtgatgactactctgcttccccaccccgggcaaaggaagagcacccgaggtcatcaaaacagcctaaagaaaataacagggataggaggagatcctatactcctgatgatataaatgatcgccgtggtgcagacaatggtcgtgatgagaggaagaggtccccagcaggcgaggaggatgaggag

SEQ ID NO: 9552 - DNA, 507 bp, Zea mays
  Clone ID: LIB3061-104-Q1-K6-B4
ccggctcacaggaaagtgttcgtcctcatggcgccgccgcagccgaagtcgggcctcttcgtgggcatcaacaagggccatgtcgtcaccaagcgcgagctgcctctgcgcccgtcccaccgcaaggggaaagcaacgaagagggtgtccatggtcaggggcctgatcagagaggttgctggctttgctccttatgagaagcgtatcaccgagcttctgaaggttggcaaggacaagcgcgctctgaagcttgccaagagaaagcttggaactcacaagagggcaaagaagaagagagaggagatgatgggcgtcctcaggaagatgagatcggctggtacgcacactgacaagaagaaataaagcatttcaagttcatgaatgtggcagccagagattatcaactgtgttttttccctacctctagaaactagacatggcaaagtatttttgaccgaaacattgtttgttagtaatgtattgaaccacctcgtggtattttgcccc

SEQ ID NO: 9553 - DNA, 671 bp, Zea mays
  unsure (1)..(671): unsure at all n locations; Clone ID: LIB3061-104-Q1-K6-B8
gtgtaagccaacttggaacagggaatgctattctcattatacttcagcttttctttgctggcatcattgtcatctgtttggatgaacttctccagaaaggttatggtttgggatctggtatttctctgttcattgctaccaatatcntgtgagaatatcatctggaaggcatttagccccacaaccatcaacagtggtcgtggtgctgaattcgaaggggctgtcattgcactgttccatctgttgattacgagaaccgataaagtccgtgctcttcgtgaggctttctaccgccagaaccttccaaatgtgaccaatttgcttgccactgtcttggtattcctcatagttatctatttccaaggcttccgtgttgtgcttccagtgagatcaaagaatgctcgtggccagcaaggctcatatccaattaagctgttctacacttcaaacatgcccatcattcttcactctgcgctgattaccaacctctattttatatcccagcttctctacaggaagtacagtggaaacttccttgttaaccttcttgggaagtggaaggagtctgaatactctggccattctattcctgttggtggtcttgcttactatgtaactgccccatcaagtttggctgatgtccttgcaaatccattccatgcactgtttta

SEQ ID NO: 9554 - DNA, 270 bp, Zea mays
  Clone ID: LIB3061-104-Q1-K6-B9
cagccagttagctggtgtgagccctgctaccttcttgacacaaccacagttgttgccgttctaccagcacgctgcgcctaacgctggcaccctcttacaactgcaacaattgctgccattcaaccaacttgctttgacaaacccagcagcattctaccaacaacccatcattggtggtgccctcttttagatttcttatgagttatagttcaataataaagttttttgtctgatgtttgtggcttcccagaaataagaaagtacatttct

SEQ ID NO: 9555 - DNA, 465 bp, Zea mays
  Clone ID: LIB3061-104-Q1-K6-C10
cagcatcttcaatttcttccattcaaccaactatctacactgaaccctgctgcttatttgcagcaacaactattaccattcagccagctagctactgcctactctcatcaacaacaacttcttccatttaaccaattggccgcactgaacctcgctgcttatttgcagcagcaaatattactaccatttagccagctagctgcagcaagccgtgcttccttcttgacacagcaacagttgctgcctttctaccagcagtttgcggctaaccccgcaaccctcttacaactacaacaattgttgccctttgtccaacttgctttgacaaacccagcagcctcctaccaacaacacatcattggtggtgccctcttttagattgcttattagttgtaattcaataataaagttttttggatgatgtatgtggccaaccagaaataagaagttacatttccagattct

SEQ ID NO: 9556 - DNA, 534 bp, Zea mays
  unsure (1)..(534): unsure at all n locations; Clone ID: LIB3061-104-Q1-K6-C11
aacaaagagaacggaanggccggagaaacccnagagccgagggancnnanggcgcaaacaaacaaaagaanagngccaaagnncacagaaancnnccccgnggaggacgcgaacnacccnnacagcgccnncancgcgncggnccggaaagacgngancaaacacggcaccgaccanaaagggancnnccagcccgagccgccaccggagaagaagggcccggagcnanggnncnacacagagcncaaaacnaggaccagcnccancacgcncgccanacgcanggacaaccngnaccncgngggcnncaggaccccgggcgggggggggngggagnncggcaaggacggcgacacccaccnccncggcgacaaccccaggnggcncggcnncggcggcagggaccaggaccncancggcaacaagggncnggagaccgncaccangggccgcgccgaaaggaccagngccgncaacgacccggcgaagaagaagaagaaggcgacaccggaggaggaggaggggcagangcag

SEQ ID NO: 9557 - DNA, 599 bp, Zea mays
  Clone ID: LIB3061-104-Q1-K6-C3
cttgattttactgctagcttcgcccctattgggcttaactctgctctaattacaaatgattagctgctggagctctataagtagatgcagctctaacttcctgaccgacaaatctgctgctttctcttcaatccttcaaagctaggaactaactgaaacaaactctgaagaagacgaaaacaaactactgaactcgaaccaacttgaaacaaactcagtcacttgtggatgatagttgtttcttgcatcacagatcacacttggtctatgtcggtgaaaggatccacatcagtggtattattttttgtatagactatagagtatatttgagattcttaacttgagaaattaactgatgatgactgatccttcatcggcaaggtcattagtaggaggtcagcatgtttaactccaatacctaatttgagaagggagcaagcaactcaactctgggctaatggggttggatctcttggcacatttatgttgacaagagattgtgtaggaactaggaacatgaggagcacacgagggtagagatggcaggtaagaggagggggtacagtagtgcaatgaccaacaatgcaactgtgatggag

SEQ ID NO: 9558 - DNA, 622 bp, Zea mays
  Clone ID: LIB3061-104-Q1-K6-C5
caagcatcagcggcaggagctctgggcagcgtgcgcacgtggggtacctagctcgctctgctagcctaccatggctgatcaccaccggggcgcgacgggaggtggcgggggctacggcgacctccagcgcgggggcggcatgcacggcgaggcgcagcagcagcagaagcagggcgccatgatgacggcgctcaaggccgcgacggccgcgaccttcggcgggtcgatgctggtgctgtccgggctgatcctggccggcaccgtgatcgcgctcacggtggccacccccgtgctggtgatcttcagcccggtgctggtgccggccgccatcgcgctggcgctcatgggcggccgggttcgtcacctccggcggcctcggcgtcgctgcgctgtccgtgttctcctggatgtacaagtacctgacgggcaagcacccgccgggcgccgaccagctggaccaccccaaggcaaggctggcgtccaaggcccgcgacatcaaggatgcagcacagcaccgaatcgaccaggcgcaggggtcttgagagaagaacacactcgagcggaccgcgcgcgcgacctccttgaaccactgccggcgcggcggcatatggcccttaaaggc

SEQ ID NO: 9559 - DNA, 662 bp, Zea mays
  Clone ID: LIB3061-104-Q1-K6-C6
caaagccttgagcagcaacatcatccacaacaacatcatccacaaaaacaacaacatcaaccaccaccacaacatcaccagcagcagcaacaccaacaacaacaagttcacatgcaaccacaaaaacatcagcaacaacaagaagttcatgttcaacaacaacaacaacaaccgcagcaccaccaccaacaacaacaacaacagcaccaacaacaacatcaatgtgaaggccaacaacaacatcaccaacaatcacaaggccatgtgcaacaacacgaacagagccatgagcaacaccaaggacagagccatgagcaacaacatcaacaacaattccagggtcatgacaagcagcaacaaccacaacagcctcagcaatatcagcagggccaggaaaaatcacaacagcaacaatgtcattgccaggagcagcaacagactacaaggtgcagctataactactatagcagtagctcaaatctaaaaaattgtcatgaattcctaaggcagcagtgcagccctttggtaatgccttttctccaatcacgtttgatacaaccaagtagctgccaggtattgcagcaacaatgttgtcatgatcttaggcagattgagccacaatacattcaccaagcaatctacatcatggttcaatccataat

SEQ ID NO: 9560 - DNA, 659 bp, Zea mays
  Clone ID: LIB3061-104-Q1-K6-C9
ccaactattaacatagaaagcacaatagtgtaccaacaatggcaaccaaaatattttgcttccttatgctccttggtctttctgcaagtgctgctaccgcgaccattttcccgcaatgctcacaagctcctatagcttcccttcttcccccatacctctcaccagcggtgtcttcagtatgtgaaaacccaattcttcaaccctacaggatccaacaggcaatcgcagcaggcatcttacctttatcacccttgttcctccaacaaccgtcagccctattacagcagttacctttggtgcatttgttggcacaaaacatcagggcacaacaactacaacaacttgtgctagcaaaccttgctgcctactctcagcaacagcagtttcttccattcaaccaactggctgcattgaactctgctgcttatttgcaacaacaactaccattcagccaactagctgttgtctacccccagcaatttcttccattcaaccaactagcaacattgaactctgctgcttatttacaacagcaacagctaccaccattcaaccagctagctgatgtgagccctgctgccttcttgacacaacaatagttgttgtcgttctacctgcacgctgcgcctaacgctggcaccctcttacaactgcaacaa

SEQ ID NO: 9561 - DNA, 663 bp, Zea mays
  unsure (1)..(663): unsure at all n locations; Clone ID: LIB3061-104-Q1-K6-D1
gaggtttatctggaacaattcttgtgcataaggttgctggggccgcagcagatgctggtttatctcttgcagaggttgccgcagaagcaaaacatgcatctgaggttgttggtacgatgggagttgcactttctgtttgcacattgcctgggcaaataacttctgatcgtctaggtccaaggcaaatggagcttggccttggaattcatggagaacctggagttgctgttgttgaactccagccagttgacgtagtggtagaacatgtccttaaacagatattgtcacaggaaactcagtatcttcctgtcacaagaggttgcaatgctgttctcctagtgaatggattaggagccactcctatcatggaacttatgattgcagcgagaaaagcagttcctgagttgcaattggtgtatggcattgctgttgacagagcctacactggcacacttatgacatcacttgatatggcaggattatctattaccattatgaagtccggcgaaagcattttgaagagacttgatgctcccactaaagctccagcttggcctgttggttctgaaggaaaccgtccaccagcaaagtttnctgttcctctaccaccatcaccttcaatgaaggatgacgagattcttgctccatctcangagctgagca

SEQ ID NO: 9562 - DNA, 640 bp, Zea mays
  Clone ID: LIB3061-104-Q1-K6-D10
tacaagattggtggtattggaactgtaccggttggtcgtgtggagactggtgtcatcaagcctggtatggtagtcacctttggtccaactggcctgactaccgaggtgaagtctgttgagatgcaccacgaggcacttcaggaggctcttccgggtgacaatgttggcttcaacgtgaagaatgttgctgtcaaggatctcaagcgtgggtttgtggcctccaactccaaggatgaccctgccaaggaggctgccagcttcacctcccaggtcatcatcatgaaccaccctgggcagattggcaacggctatgcccctgtgctggactgccacacctcccacatcgctgtcaagtttgctgagctcattaccaagatcgacaggcgctctggcaaggagcttgagaaggagccaaagttcctgaagaacggtgatgctggtatggtgaagatgatacccaccaagcccatggtggtggagacattctcagcgtatcctccccttggtaggtttgctgtccgtgacatgaggcagacggttgctgttggagtatcaagagtgtggagaagaaggacccaaccggcgccaatgtgaccaatgctgctgccaagaagaaatgatgcgatcctgcgcctgcttt

SEQ ID NO: 9563 - DNA, 471 bp, Zea mays
  unsure (1)..(471): unsure at all n locations; Clone ID: LIB3061-104-Q1-K6-D11
ggcgcagnncacaagaanaaccgncagcaaccagggggnccgncgggcaggcccaggcagcacggagcngaccgnggagggaaggccanccgaccagcngggcaggagaaaccncacngacagccccgnannngacggggggggcccngacgccagccncgnggcncgcgnacagggagncgcnacccagangggcgacgngcgccagnngnacaccgncgngnnccaggagaggccgcncaagggcnccacgcncgncaccgaaggcgcgangacagaagggncagacgagngggcgancnacggnggaaccggagngnncgcgaaggcgagaggcgncanaaggagaacgnnncnngccgacacgagcggcgggaaccccgacgagcnngccgnggaggnncnccgcccggggggccgcccggcggcgnngggcncaacgncgncacagccagcagcaaaggacancag

SEQ ID NO: 9564 - DNA, 656 bp, Zea mays
  Clone ID: LIB3061-104-Q1-K6-D12
ccaactagcaacatagaaagcacaatagtgtaccaacaatggcagccaaaatattttgcctccttatgctccttggtctttctgcaagtgctgctacggcgaccattttcccacaatgctcacaagctcctatagcttcccttcttcccccgtacctctcaccagcggtgtcttcggtatgtgaaaacccaattcttcaaccctataggatccaacaggcaatcgcagctggcatcttacctttatcacccttgttcctccaacaatcatcagccctattacagcagttacctttggtgcatttattggcacaaaacatcagggcacaacaactacaacaacttgtgctagcaaaccttgctgcctactctcagcaacaacagtttcttccattcaaccaactagctgcattgaactctgcttcttatttgcaacaacaacaactaccattcagccagctatctgctgcctacccccagcaatttcttccattcaaccaactgacagctttgaactctcctgcttatttacagcagcaacaactactaccattcagccagctagctggtgtgagccctgctaccttcttgacacaaccacaattgttgccgttctaccagcacgctgcgcctaacgctggcaccctcttacaactg

SEQ ID NO: 9565 - DNA, 214 bp, Zea mays
  Clone ID: LIB3061-104-Q1-K6-D9
tagcgtccgctgagagtagcttagttagtaaagcgagtttatgttagctcgatttgaatgacaaccttctacataattgcccctgttgtttctacactaatctatgcggagagggagctacggcagtagagatgagctgatgtatgtcgatttgatcttaaccaaacctctgttttaagcttcggcgggggaggaaaaaaaaaaattttggagg

SEQ ID NO: 9566 - DNA, 380 bp, Zea mays
  unsure (1)..(380): unsure at all n locations; Clone ID: LIB3061-104-Q1-K6-E1
cgggncgaccacgcgnccgagccgctgcaccggnaccaggcgacatacggngnggnccngcagnccnncctgcagcagcagccgcagggcgagcncgcggcgctganggcggcccaggnagcgcagcagcngacggcgangngcggcctgcagctgcagcagccaggncccggcccnngcaacgcagcngccggcgggggcgacnacngaggaaaccangnacngnagnaanaangnaanggagccgcngactagcnaccnagcncgcnagnnnacncaaaaagcggcgangagnaacgnagngncacccaacaccangggnggcagngngagcaangaccngaangaaccanngaaanggaaaggaanaacananaagg

SEQ ID NO: 9567 - DNA, 654 bp, Zea mays; identical to SEQ ID NO: 8617
  Clone ID: LIB3061-104-Q1-K6-E10

SEQ ID NO: 9568 - DNA, 417 bp, Zea mays
  unsure (1)..(417): unsure at all n locations; Clone ID: LIB3061-104-Q1-K6-E11
ccacacaaggcaccaagagagaccccnngccccggcccnnnnggagcgcacaagcgncannanccacaagncacnngcccaggccannanccacagnncccccccaggggcggggggggcnncgaacacccagcagngcaagccnacaggcnacaacaagcgcnngcggcgagcgncnnacaacaaccaanngcccaannacaacaacaanccnnggcacancnaaccanacaaaccancgcaacgcaacagcaacaacaannncnaccagcacngagccaacnagcngnggngaacccngncgccnacnngcaacagcagnngcnngcanccaacccacnngcncnggcaaacaaagnngcanaccaacaacaacaacaanngcaacagnnncaaccagcgcncagncaaccagcc

SEQ ID NO: 9569 - DNA, 400 bp, Zea mays
  Clone ID: LIB3061-104-Q1-K6-E12
actgaaccctgctgcttatttgcagcaacaactattaccatttagccagctagctactgcctactctcagcaacaacaacttcttccatttaaccaattggccgcactgaaccccgctgcttatttgcagcagcaaatactactgccatttagcgagctagctgcagcaagtcgtgcttccttcttgacacagcaacagttgctgcctttctacaagcagtttgcggctaaccccgcaaccctcttacaactacaacaattgttgccctttgtccaacttgctttgacaaacccagcagcctcctaccaacaacacatcattggtggtgccctcttttagattgattattagttgtaattcaataataaagttttttggatgatgtatgtggccaaccag

SEQ ID NO: 9570 - DNA, 392 bp, Zea mays
  Clone ID: LIB3061-104-Q1-K6-E3
gtcgacttgcgtccgagacatctttcacattaaagacagggggggccacaatggcaccaaaatatagagctaccttatgctccacggcctttctctaagtgctggtaccgcaaccattttcccacaatgctcacaagctagtatagctaccttgcttccgccatacctctcactatcagtgtcgggagtgtgtgaaaacccaatttttgaaccatacaagatccaacaggcaatcgcaacaagcatcttacctttatcacccttgatcctgcaacacccgacagccctattacaccaaacacctttggtgcatttgttggcacataacatcgaggcgcaacaactacaacaactattgctaggaaacccagctgctctactctcagcaacag

SEQ ID NO: 9571 - DNA, 656 bp, Zea mays
  Clone ID: LIB3061-104-Q1-K6-E5
catagaatgcacaatagtgtaccaacaatggcagccaaaatattttgcctccttatgctccttggtctttctgcaagtgctgctacggcgaccattttcccgcaatgctcgcaagctcctatagcttcccttcttcccccgtacctctcaccagcggtgtcttcggtatgtgaaaacccaattcttcaaccctacaggatccaacaggcaatcacagctggcatcttacctttatcacccttgttcctccaacaatcatcagccctattacatcagttacctttggtgcatttattggcacaaaacatcagggcacaacaactacaacaacttgtgctagcaaaccttgctgcctactctcagcaacagcagtttcttccattcaaccaactagctgcattgaactctgcttcttatttgcaacaacaacaactaccattcagccagctacctgctgcctacccccagcaatttcttccattcaaccaactggcagcattgaactctcctgcttatttacagcagcaacaactactaccattcagccagctagctggtgtgagccctgctaccttcttgatacaaccacagttgttgccgttctaccagcacgctgcgcctaacgctggcaccctcttacaactgcaacaattgct

SEQ ID NO: 9572 - DNA, 659 bp, Zea mays
  Clone ID: LIB3061-104-Q1-K6-E7
gttcaaatttgggcttttggacagctgtggtgtgcacggcagctctgtgacttgtgaggaggaagggaggaagaaagcggatccatggcgtcgaagcggatcctcaaggagctcaaggacctgcagaaggatcctcccacctcttgcagcgcaggccctgttgccgaagatatgttctactggcaggcgacgattatggggccatcagatagcccatacgctggtggcgtatttttggtcactattcactttccaccggactacccattcaaaccaccgaaggttgcattcaagacgaaggtttaccatccgaatatcaacagcaacgggagcatctgtcttgatatcttgaaggagcaatggagccctgcactgacagtttctaaggtcctcctctcaatttgttcccttctgacggacccaaaccctgacgatccgttggtcccagagattgctcacttgtacaagactgatcgcgtgaagtacgaatcgactgctaggagctggactcagaaatatgcaatgggctgacaagctattggtctctcgtagacctaaagcacgtactgccttctgtaactgaaaccagatgtctaaattaatttgtccattcgtgcatcgaacttttgatatataatggaaggaggaacattgatagt

SEQ ID NO: 9573 - DNA, 505 bp, Zea mays
  Clone ID: LIB3061-104-Q1-K6-F11
cgggtcgaccatgcgtccgcaagcctttgccagctgcatggaacctgcggggtgggcagcaccccgatcctgggccagtgcgtcgagtttctgaggcatcagtgcagcccgacggcgacgccctactgctcgcctcagtgccagtcgttgcggcagcagtgttgccagcagctcaggcaggtggagccgcagcaccggtgccaggcgatcttcggcttggtcctccagtccatcctgcagcagcagccgcaaagcggccaggtcgcggggctgttggcggcgcagatagcgcagcaactgacggcgatgtgcggcctgcagcagccgactccatgcccctacgctgctgccggcggtgtcccccactgaagaaactatgtgctgtagtatagccgctggctagctagctagttgagtcatttagcggcgatgattgagtaataatgtgtcacgcatcaccatgggtggcagtgtcagtgtgagcaatgacctgaatgaacaattg

SEQ ID NO: 9574 - DNA, 370 bp, Zea mays
  Clone ID: LIB3061-104-Q1-K6-F6
ccgggtcgaccatgcgtccggcaacatttactaccattcagccagctagctggtgtgagccctgctaccttcttgacacaaccacagttgttgccgttctaccagcacgttgcgcctaacgctggcaccctcttacaactgcaacaattgctgccattcaaccaacttgctttgacaaacccagcagtgttctaccaacaacccatcattggtggtgccctcttttagatttcttatgagttatagttcaataataaagttttttatctgatgtttgtggcttcccagaaataagaaagtacatttctagattcttatgtgcttctagtcttcaaatgtggttgatagttattgttggggacttgttctc

SEQ ID NO: 9575 - DNA, 661 bp, Zea mays
  Clone ID: LIB3061-104-Q1-K6-G11
attgagaccaacaagcaacatagaaagtggaatccagtagcaacaatagagcaacaatggcgaccaagatactttccctccttatgctccttgctctttctgcatgtgttgctaacgcgacaattttccctcaatgctcacaagctcctatagcttcccttcttcccccataccttccatcaatgatagcttcagtatgtgaaaacccagctcttcaaccctataggctccaacaagcaatcgcagcaagcaacatacctttatcacccttgtttcaacaatcgccagccctatctttggtgcagtcattggtacaaaccatcaaggcacagcagctgcagcaactcgtgctacctgtgatcaaccaagtagctctggcaaacctttctccctactatcagcaacaacaatttcttccattcaaccaactatctacactgaaccctgctgcttatttgcagcaacaactattaccattcagccagctagctactgcctactctcatcaacaacaacttcttccatttaaccaattggccgcactgaacctcgctgcttatttgcagcagcaaatattactaccatttagccagctagctgcagcaagccgtgcttccttcttgacacagcaacagttgctgcctttctaccagcagtttgc

SEQ ID NO: 9576 - DNA, 349 bp, Zea mays
  unsure (1)..(349): unsure at all n locations; Clone ID: LIB3061-104-Q1-K6-G2
gcaacanagaaagcacaagagngnaccaacaaaggcagccaaaanannnngccnccnnangcnccnnggncnnncngcaagagcagcnacggcgaccannnncccgcaaagcncgcaagcnccnanagcnncccnncnncccccgnaccncncaccagcgggggcggggggangngaaaacccaanncnncaacccnacagganccaacaggcaancgcagcnggcancnnaccnnnancacccnngnncccccaacaancancagcccnannacaacagnnaccnnnggngcannnannggcacaaaacaacagggcacaacaaccacaacaacnngngcnagcaaac

SEQ ID NO: 9577 - DNA, 665 bp, Zea mays
  unsure (1)..(665): unsure at all n locations; Clone ID: LIB3061-104-Q1-K6-G4
gctgtctatcatcttggcacagtggcctacaagctgacagacctatacgaagagcaggcttcagaaataacagccctcgagttgaaagtagcatgcttgaaccagcaagtccgtacctgccagacatacacggacaaagaaggcctcaggcaacagcagatgatgggggctgccagaagagaccataaccattacatcgtaccatatgcgggaaacaaaagaatgcaggccttctctgttacgcaagccgatgctgatttcgacccaacgccaaggcctttctcttcagcaaggacccttgagtggcatttggtttccgagaagaattccaaaaccagtagaccagatcagtctgaaattgccttaggagaaacaaaaactactaaggcttcgtcaagtggtttccgccttctcggtaaggaatcatctgcatctcccttgtccaggaatgtgcattccaacataaccagtttggatattgtcagtgccggcatgaaggatcagcccacgaccaggcacttgtcatcattcagttctttggacaaccccagggggcgccaaatccagaaggctccgcttcgcacaaaaagtatgctagccgttttctttgtctacacagatcagcanagatgaaaaacgtctctgtgcgttgatcaactgcaagc

SEQ ID NO: 9578 - DNA, 523 bp, Zea mays
  Clone ID: LIB3061-104-Q1-K6-G5
caaccttttagcctgctgcctgcatgttggtgcaagtagtttgtttttgccatgagatgtctgagtctgatcctttttggcattaataaatgtgttgttcttggatcacaaaaaaaaaaaaaaaaaaaaaaaaaaaaaaaaaaaaaaaaaaaaaaaaaaaaaaaaaaaaaaaaaaaaaaaggggggggaaaaaaaaaaaaaaaaaaaaaaaaaaaaaaaaaaaaaaaaaaaaaaaaaaaaaaaaaagggggggggcccttttaaaaaaacaaagtttacttccccgggattgaaagttaaaagtttttttttagggcacccaaaaaaaaattaacgggccgggttttaaaaattggggaacggaaaaaaccctggcttacccaaattaaatggcttggaaaaaaatcccctttttccaagtggggaaaaaaaaaaaaaggccccaacaaatcccctttcaaaaaattggcccatcctaaatggaaattggaacccccccttttagggccaataaagccggggg

SEQ ID NO: 9579 - DNA, 677 bp, Zea mays
  unsure (1)..(677): unsure at all n locations; Clone ID: LIB3061-104-Q1-K6-H11
cccgggctagtttgccgatcgagcccggtcgacgtgagatacgagcggggtggagcggcgccggcgagcctccgcagccgcagccgcccgatctgggttttctttcgtagcggtagcggaagatgagccaggaccaggagaacggaggcaccaacgggcagcacgccgccgacgtgatggaggtggagccgaagcgccgggcgccgcggctgaacgagcgcatcctgtcgtcgctgtcgcggaggtccgtcgccgcgcacccctggcacgacctcgagatcggtcctgaagctccggccgtcttcaacgtcgtcgtggagatcaccaaggggagcaaggtgaagtacgagctggacaagaagacggggctcatcaaggtggaccggatcctctactcgtccgtcgtctaccctcacaactacggcttcgtgccccggacgctctgcgaggacaacgaccccatggacgtcctcgtgctcatgcaggaacccgtccttcccggcgccttcctccgcgccagggccatcggcctcatgcctatgatagatcagggagagaaggacgacaagatcatcgccgtctgcgccgacgaccccgagtaccgccactacaacgacatcagcgagctctcccctcaccgncttcaggagatccgccggttcttcgaagactacaag

SEQ ID NO: 9580 - DNA, 646 bp, Zea mays
  Clone ID: LIB3061-104-Q1-K6-H3
attcagattcacaccaagcgaagcgcactagcaacaacctaacaacaatggctaccaagatattatccctccttgcgcttcttgcgctttttgcgagcgcaacaaatgcgtccattattccacaatgctcacttgctcctagttccattattccacagttcctcccaccagttacttcagtggccttcgaacacccagctgtgcaagcctataggctacaacaagcgattgcggcgagcgtcttacaacaaccaattgcccaattgcaacaacaatccttggcacatctaacaatacaaaccatcgcaacgcaacagcaacaacagttcctaccagcactgagccacctagccatggtgaaccctgtcgcctacttgcaacagcagctgcttgcatccaacccacttgctctagcaaacgtagttgcaaaccagcaacaacaacaactgcaacagtttctgccagcgcttagtcaactagccatggtgaaccctgccgcctacctacaacagcaacaactgctttcatctagcccgctcgctgtggccaatgcacctacatacctgcaacaagaattgttgcaacagattgtaccagctctaactcagctagctgtggcaaaccctgttgcctacttgcaacagct

SEQ ID NO: 9581 - DNA, 672 bp, Zea mays
  Clone ID: LIB3061-104-Q1-K6-H5
attttcagcattcaaaaacacaccaagcgaagcgcactagcaacgacctaacaccaatggctaccaagatattagccctccttgcgcttcttgcccttttagtgagcgcaacaaatgcgttcattattccacagtgctcacttgctcctagtgccattattccacagttcctcccaccagttacttcaatgggcttcgaacatccagccgtgcaagcctacaggctacaactagcgcttgcggcgagcgccttacaacaaccaattgcccaattgcaacaacaatccttggcacatctaaccctacaaaccattgcaacgcaacaacaacaacaacaacagtttctgccatcactgagccacctagccgtggtgaaccctgtcacctacttgcaacagcagctgcttgcatccaacccacttgctctggcgaacgtagctgcataccagcaacaacaacagctgcaacagtttatgccagtgctcagtcaactagccatggtgaaccctgccgtctacctacaactactttcatctagcccgctcgcggtgggcaatgcacctacgtacctacaacaacagttgctgcaacaaattgtaccagctctgactcagctagctgtggcaaaccctgctgcctacttacaacagttgcttccattcaaccaactgg

SEQ ID NO: 9582 - DNA, 188 bp, Zea mays
  unsure (1)..(188): unsure at all n locations; Clone ID: LIB3061-104-Q1-K6-H8
caccgcgccgccgccgccgcgnacgccgangaagaagccgangcgaccgccaacgccgacgcnggnggcgaggagggcgagccnggcngnnccagcggcaccaaggacgacgccgacgccgacngccagcgcgcgcagcagcagcagcanggccgncaccaccaccaacccaggcagggcggcgggcc

SEQ ID NO: 9583 - DNA, 671 bp, Zea mays
  Clone ID: LIB3061-104-Q1-K6-H9
ccgggtcgaccttgcgtccgcgtgagtttgtgacagtggttttctgggtggggggttttgcagggaaagggggtctgggttgcgtacaggcgaaaggcacgcgccgccgctgccgcgcgagcctctccgtccccatcgccgcgcagatggatccgtcgtcggagcccctgtacgcgcaggtcgagccgtacgactccggggggctcaaggtctccgatgtccacaccatctactacgagcagtccgggaacccgcagggccatgcggccgtgtttctccacggcggtcccggagccggcacgtcgcccggcaacaggaggttctttgacccgcagttctacaggatcgttctgtttgaccagaggggtgcaggcagaagcactccccatgcttgtttagagcagaacactacttgggacttggttgctgacattgagaagctcagggagcatcttggcatccctgaatggcaggtgtttggtggttcatggggaagcaccttggcacttgcctacagccaggagcaccctgataaggtcactggccttgttctgagaggaattttcttgcttaggaaaaaggagtttgattggttctatgagggtggtgcagcagccattttcccagatgcatgggaaccatttagagattttattcctgaggatgaaagg

SEQ ID NO: 9584 - DNA, 292 bp, Zea mays
  unsure (1)..(292): unsure at all n locations; Clone ID: LIB3061-105-Q1-K6-A10
cagncgganaaacacacaacaaaancggacaagngcangnncgngggaaanccaaaggaaaccccagganannacnnnnaccaccggncagagggcaaagngnnngncgcccggaacggngngnncnaagagaaagagnnncncaaaagagagaaaagnaaacaaaaggngnancnngaagaagnncaggangagccagngggacaagaaacaacaagngangccaangnagcagaacaagnngagacgnccanggcaagagaancaccaccacaaccacgaaggncagcaa

SEQ ID NO: 9585 - DNA, 565 bp, Zea mays
  Clone ID: LIB3061-105-Q1-K6-A2
ccggcctcagcctcatccccagccacacccatgcccgtgccaacagccgcatccaagcccgtgccagctgcagggaacctgcggcgttggcagcaccccgatcctgggccagtgcgtcgagtttctgaggcatcagtgcagcccgacggcgacgccctactgctcgcctcagtgccaggcgttgcggcagcagtgttgccagcagctcaagcaggtggagccgcagcaccggtaccaggcgatcttcggcttggtcctccagtccatcctgcagcagcagccgcaaagcggccaggtcgcggggctgttggcggcgcagatagcgcagcaactgacggcgatgtgcggcctgcagcagccgactccatgcccctacgctgctgccggcggtgtcccccactgaagaaactatgtgctgtagtatagccgctggctagctagctagttgagtcatttagcggcgatgattgagtaataatgtgtcacgcatcaccatgggtggcagtgtcagtgtgagcaatgacctgaatgaacaattgaaatgaaaagaaaaaagtattgttcc

SEQ ID NO: 9586 - DNA, 397 bp, Zea mays
  unsure (1)..(397): unsure at all n locations; Clone ID: LIB3061-105-Q1-K6-A3
ccgggnncgacccacgcgttcggnctgtttcacctgggcaaaggatgtgcacgcgctacgaaccttgatccccctggtaatttctcatcgggggcgccactaccttgagcccgcgccgcatcgcaattcgcgcgtccgtcgccccaactccaacgagcaagtgattgaggaccctggtgttcaacaggtagaagttgctgaggaggagctcattgaaggtggtccaagaggagccttacaacgaggagttcgagcttatctaggtggcgtctcccagtcagcttgatggcgccaaggaataatacttagttcgttttattattcttattcatttttgtaagacttccgctatgtaataatgatatttgtgacatttatctctatacactttatcgtt

SEQ ID NO: 9587 - DNA, 263 bp, Zea mays
  unsure (1)..(263): unsure at all n locations; Clone ID: LIB3061-105-Q1-K6-A4
cagccgngcaagccnacaggcnacaacnagcgcnagcggcgagcgccnnacaacaaccaanngcccaanngcacaacaanccggaaagaaaggaacccnacaaaccaaagcaacacaacaacaacaacaacaacagnnncngccancacngagccacccagccgnggngaaccccggcacccaccngcaacagcagcngccggcaaccaacccaccngccccggccaaccnaaccgcagacccgcaacaacaacagccgcaac

SEQ ID NO: 9588 - DNA, 595 bp, Zea mays
  Clone ID: LIB3061-105-Q1-K6-B2
ggcgaccagcgtccggtaaatttgttaatagaaaaaagatgattgtttgcttgttttttggtctttactctagtactctaaatgcttgaaattattatggttactctaggtatgatgattggtgactggtaaaaaattcgtgatttatggtgcatgtatcatggagttagtgatttaacttgtttgatgcatattaagtagttttaaatggtttataaatagtatacggatgtaaaaatggaaaatgttgttctagtgtctttatacgatgttgtagtggcctaataaaagttaacatggctatgcattcacaaaaaatatttagttttagatttaacttgtcgtcatatgccttattgcattaacaatttatcatttttgtaataattaatatataaaacctgataatgtaaaatttgtacatttgtcatgacttgttattacctatactttatgaaaatcacagccccaaattagatagcctcatatggtgctaaactaatactcattctaaaataatacctactctattaagaacataatgtgggcatctcgtgctactatgacttcaccctttacgctgccactctgggcc

SEQ ID NO: 9589 - DNA, 673 bp, Zea mays
  Clone ID: LIB3061-105-Q1-K6-B3
ggagggtacaagaatgaagggtttgttgaagtcttagctgcacagcagagcccagataatccaaactggtttcagggtactgcagatgctgtaaggcagtacttgtggttgtttgaggagcataatgtgatggaatttctaattcttgctggcgatcacctgtaccggatggactatgaaaagttcattcaggcacacagagaaacaaatgctgatattaccgttgctgccctaccgatggatgagaaacgtgcaactgcatttggcctcatgaaaattgatgaagaagggaggatcattgagtttgctgagaaaccgaaaggagagcagttgaaagcaatgatggttgacaccaccatacttggccttgatgacgtgagggcaaaggaaatgccttatattgctagcatgggtatctatgttttcagcaaagatgtaatgcttcagctcctccgtgaacaatttcctgaagccaatgactttggaagtgaggttattccaggtgcaaccagcattggaaagagggttcaggcttatctgtatgatggttactgggaagatatcggtaccattgcggcattttataatgcaaacttgggaataaccaagaagccaataccagatttcagcttctatgaccgttttgctccaatttatacacaacctcgacacc

SEQ ID NO: 9590 - DNA, 650 bp, Zea mays
  Clone ID: LIB3061-105-Q1-K6-B5
attttcagcattcaaaaacacaccaagcgaagcgcactagcaacgacctaacaccaatggctaccaagatattagccctccttgcgcttcttgcccttttagtgagcgcaacaaatgcgttcattattccacagtgctcacttgctcctagtgccattattccacagttcctcccaccagttacttcaatgggcttcgaacatccagccgtgcaagcctacaggctacaactagcgcttgcggcgagcgccttacaacaaccaattgcccaattgcaacaacaatccttggcacatctaaccctacaaaccattgcaacgcaacaacaacaacaacaacagtttctgccatcactgagccacctagccgtggtgaaccctgtcacctacttgcaacagcagctgcttgcatccaacccacttgctctggcgaacgtagctgcataccagcaacaacaacagctgcaacagtttatgccagtgctcagtcaactagccatggtgaaccctgccgtctacctacaactactttcatctagcccgctcgcggtgggcaatgcacctacgtacctacaacaacagttgctgcaacaaattgtaccagctctgactcagctagctgtggcaaaccctgctgcctacttacaacag

SEQ ID NO: 9591 - DNA, 666 bp, Zea mays
  Clone ID: LIB3061-105-Q1-K6-B7
ggtcgaccacgcgtcgaacagttcatagaaagggaatccagtagcgacaacagacaacatggcgaccaagatattttccctccttatgctccttgctctttctgcatgtgttgctaacgcgacaattttccctcaatgctcacaagctcctatagcttcccttcttcccccataccttccatcaatgatagcttcagtatgtgaaaacccagctcttcagccctataggctccaacaagcaatcgcagcaagcaacatacctttatcacccttgttgtttcaacaatcgccagccctatctttggtgcagtcattggtacaaaccatcagggcacagcagctgcagcaactcgtgctacctgtgatcaaccaagtagctctggcaaacctttctccctactctcagcaacaacaatttcttccattcaaccaactgtctacactgaaccctgctgcttatttgcagcaacaactattaccattcagccagctagctactgcctactctcagcaacaacaacttcttccatttaaccaattggccgcactgaaccccgctgcttatttgcagcagcaaatactactaccatttagccagctagctgcagcataccgtgcttccttcttgacacagcaacagttgctgcctttctaccagcagtttgc

SEQ ID NO: 9592 - DNA, 351 bp, Zea mays
  Clone ID: LIB3061-105-Q1-K6-B8
cccgggtcgacgccatagtgctcggccgttcacagcaacagcccgcccgagcccgcgcccacgtcgagaaagcgctcgcccggccgcagccgcagcttgcggcagatgtggtcgagcttggcttcctgggcctgcgccaggttcatgcccggctcgcggtaataggcgcaggaatagacccggcgcggatccagccacagggggtagaaatcgtcggacaggtcgtaatggaattcgatctggcgggcgtcgcgctccaccgagtgacgccacaccgacatcaccttgcgcaccagctcggtcagccagccgccgcgcgccgcgtccaccggtgaacccggcagcagcgcc

SEQ ID NO: 9593 - DNA, 649 bp, Zea mays
  Clone ID: LIB3061-105-Q1-K6-B9
gtaccgaccgactctccatctcaggaccgcagagctacttcctccgcctcgacaggcgtcggcgagatggtgaagagaagcaagaagagcaagagcaagcgcgtcacgctgcggcagaagcacaaggtgctgcgcaaggtgaaggagcaccaccgcaagaagcgcaaggaggccaagaaggagggcaaggccggccagcggaagaaggtcgagaaggaccccgggatccccaacgagtggcccttcaaggagcaggagctcaaggcgctcgaggcccgacgcgcgcatgcgctccaggagctcgagctcaagaaggaggcgcgcaaggagagggctcggaagaggaagctaggattgctcgaggatgaggaaattgctaatttggcatctgcagcttccgcgcagggcagtgagtttgcagcaaaggatgcagcaaaggataaagctcctttaacagtggcaaagagcaatgatcattctgagagatctttctacaaggagcttgttaaagtaatcgaagcttctgatgtgattcttgaggttcttgatgcaagagatccgctgggcacccgttgcattgacatggaaaagatggttaggaaggctgatccaagtaaacggattgtactacttctcaacaagatagatc

SEQ ID NO: 9594 - DNA, 623 bp, Zea mays
  unsure (1)..(623): unsure at all n locations; Clone ID: LIB3061-105-Q1-K6-C10
caccgcgctcggagacgactcgcccaagcggagcgncatcgngctctcggagnncgncgggtgctccccgtccctgagcggcgcgatccgcgtcaacccgtggagcgtggagtccgtggcggaggccatgaacgccgcgctgcggatgccggaggccgagcagcggctgcggcacgaggagcactacaagtacgtgagcacccacgacgtcgcctactgggcgcggtccttcgactcggacctgcagcgcgcctgcaaggaccatttctcgcgccggcattgggggatcggcttcggcatgagtttcaaggtggtggcccttggcccgaatttccggcgcctctccgtggagcacattgtcccgtcgtatcggaggacggataaccggctgattctcctggactacgacggcaccgtgatgccggagaactccatcgacaggacgccgagcagtgaggtcatctctgggttgaatcgtctgtgcgaggaccccaagaacagagtgttcatcgtaagcggaccggggaaggacgagctgagcaggtggttcgccccctgcgagaagttgggcatcgcccgcgggcaccggtacctcacaagggggagcagggacgcgccatggg

SEQ ID NO: 9595 - DNA, 664 bp, Zea mays
  Clone ID: LIB3061-105-Q1-K6-C11
ctccatcccccttcgccctttccgacgcgccgcccgaaaccctagccccactgattctctccagcccagcccagcccagccagggggaggggatgtcggcggcgccagcggcgggagggcagggtggcgggggcattgacgccgcgctcctcgacgacatcatccgccgcctgctcgaggtgcggaccgcgcgcccagggaagcaggtgcagctctctgagtcggagatccgccagctgtgcaccgtctcccgcgccatcttcctcagccagcccaacctcctcgagctcgaggcgcccatcaagatctgcggtgacatccatggtcaatacagtgatcttctaaggctttttgaatatggaggttttcctcctgaagccaattatctattcttaggtgattatgttgatcgaggcaaacaaagtttggagactatatgccttcttcttgcttacaaaatcaagtaccctgagaacttttttcttctgaggggcaatcatgaatgtgcctcaataaacagaatatatggattttatgatgaatgcaagcgtcgatttaatgtgcggctatggaaggtcttcacagaatgttttaacactctacctgtggctgctcttatcgatgataaaatattatgtatgcacggtggactctctcccgatct

SEQ ID NO: 9596 - DNA, 397 bp, Zea mays
  unsure (1)..(397): unsure at all n locations; Clone ID: LIB3061-105-Q1-K6-C2
ctgcaacaaattgtaccagctctgactcagctagctgtggcaaaccctgctgcctacttacaacagttgcttccattcaaccaactggctgtgtcaaactctgctgcgtacctacaacagcgacaacagttacttaatccattggcagtggctaacccattggtcgctaccttcctgcagcagcaacaacaattgctgccatacaaccagttctctttgatgaaccctgccttgcagcaacccatcgttggaggtgccatcttttagattacatatgagatgtactcgacaatggtgccctcataccgacatgtgtttcctagaaataatcaatatattgattgagatttatctcgnnnnanaaannnnnnnnnnnnnnnnnnnnnnnntnnnnngg

SEQ ID NO: 9597 - DNA, 616 bp, Zea mays
  unsure (1)..(616): unsure at all n locations; Clone ID: LIB3061-105-Q1-K6-C3
gaggaagaagatatcaacaaagtgtcgagatatttctcatatgaacacttttatgtgatctactgcaaattctgggagctggatgcagaccacgattttttgattgataaggaaaatctcatcaaatatgggaaccattcgttgacctatagaatagttgatagaattttcgcacagatcccaaggaaattcacaagcatgacagaaggaaagatgggttatgaagactttgtttactttatattatcagaggaagacaaatcatctgagcctagtcttgaatattggtttaagtgcatcgatcttgatggtaatggtattttaactttcaatgaaatgcaatttttctacgaggagcaattgcaccgaatggagtgcatggcacaagagcctgtgctttttctggacatattatgccagatgattgatatgattggaccagagaatgagagctatntaactctacgggacttaaacggtgtaaactctcaggaacatattcaatattcttttcaatctcaacaagttcatggcatttgaaactcgtgatccattcctcattcgccaggaacgtgaaaatccaactctaactgagtgggaaccggtttgcacatag

SEQ ID NO: 9598 - DNA, 550 bp, Zea mays
  Clone ID: LIB3061-105-Q1-K6-C4
cgggagaccattagctgtatctactccatagcgcagaagaacccgatcgacaccatgagggtgttgctcgttgccctcgctctcctggctctcgctgcgagcgccacctccacgcatacaagcggcggctgcggctgccagccaccgccgccggttcatctaccgccgccggtgcatctgccacctccggttcacctgcgcggtgcggtgcatctcccaccgccggtccacctgccgccgccggtccacctgccaccgccggtccatgtgccgccgccggttcatctgccgccgccaccatgccactaccctactcaaccgccccggcctcagcctcatccccagccacacccatgcccgtgccaacagccgcatccaagcccgtgccagctgcagggaacctgcggcgttggcagcaccccgatcctgggccagtgcgtcgagttcctgaggcatcagtgcagcccgacggcgacgccctactgctcgccttagtgccagtcctttgcggcagcagggttgccagcagctcaggcaggtggagccgcag

SEQ ID NO: 9599 - DNA, 662 bp, Zea mays
  Clone ID: LIB3061-105-Q1-K6-C9
ggtcatgtagttgtgtcaaatttagcgagacaatcactctatacttctgatgaccgtggtgctccaaaagcaactgcaatacttaggcatctagtggagagatgtccttcagtggatgcacaaggcattaaaatggaaatacctatgcctgggcatcctgtgtctcctggtgaagcagcgggtgtgctccaagattgcgagcgccttaaggaattggtgttgtcccacgatgctatcttcttgttgaccgacacaagagaaagcaggtggcttccaactctcctatgcactaacgaaaacaagattgctatcactgcagcattagggtatgatagttaccttgtcatgcgacatggggctggccctggcataagctgtgaagcttccagtgtggtcactgccatagacaagatgtccacggaggatgcccttgggcgtcaaaggctggggtgttatttctgcaatgacgtcattgctcctgtcgactcagtttccaatcggacactggatcaacaatgtacagtgacacgaccggggttggcctctattgcatcaggacgcgctgcagacctcttcagaagaatgttacaccatcctgatgggatacatgctccaggagagattgctggtacaggcagtggtcatgagcacggccttttacc

SEQ ID NO: 9600 - DNA, 683 bp, Zea mays
  unsure (1)..(683): unsure at all n locations; Clone ID: LIB3061-105-Q1-K6-D1
gaagcgcactagcaacgacctaacaacaatggcttccaagacattatccctccttgcgcttcttgccctttttgtgagtgcaacaaatgcgttcattattccacaatgctcacttgctccgagtgccattattccacagttcctccctccagttacttcaatgggcttcgaacacccagctgtgcaagcctataggctacaacaagcgcttgcggcgagcgtcttagaacaaccaattgcccaattacaacaacaatccttggcacatctaaccatacaaaccatcgcaacgcagcagcaacaagcactgagccacctagccgtggtgaaccctatcgcctacttgcaacaacagctgcttgcatccaacccacttgctttggcaaacgtagctgcataccaacaacaacaacagttgcaacagtttctaccagcgctcagtcaactagccatggtgaaccctatcgcctacctacaacagcaacaacttctttcatctagcccgctcgctatgggcaatgcacctacatacctgcaacaacagttgttgcaacaacagttgctgcaacaaattgtaccagctcttactcagctagctgtggcaaaccctgctgcctacttgcaacaactacttncattcaaccaactgactgtgtcgaactctgctgcgtacctacaacagc

SEQ ID NO: 9601 - DNA, 605 bp, Zea mays
  unsure (1)..(605): unsure at all n locations; Clone ID: LIB3061-105-Q1-K6-D10
cgggnncgacccacgcgnncgcagaaaccaccnagcgaagcgcaccagcaacgaccnaacaacaanggcnnccaagacannaggccgccnggcgccccnagcccnnnnngngagngcaacaaaagcgnncannannccacaaagcncacnagcnccgagagccannannccacagnnccncccnccagnnaccccaggagggggggaacacccagcngngcaagccnanaggcnacaacaagcgcnngcggcgagcgncnnagaacaaccaanngcccaannacaacaacaanccnnagcacancnaaccanacaaaccancgcaacgcagcagcaacaagcacngagccaccnagccgnggngaacccnancgccnacnngcaacaacagcngcnngcanccaacccacnngcnnnggcaaacgnagcngcanaccaacaacaacaacagnngcaacagnnncngccagcgcncagncaacnagccaaggngaacccnancgccnacccacaacagcaacaacnncnnncaacnagcccgcncgcnangggcaaggcacccacanacccgcaacaacagnngnngcaacaacagnngcngcaac

SEQ ID NO: 9602 - DNA, 640 bp, Zea mays
  Clone ID: LIB3061-105-Q1-K6-D2
ccgggagaaagcacatagtgtaccaacaatggcagccaaaatattcgcctccttatgctccttggtctttctgcaagtgctgctacggcgaccattttcccgcaatgctcgcaagctcctatagcttcccttcttcccccgtacctctcaccagcggtgtcttcggtatgtgaaaacccaattcttcaaccctacagggtggaacaggcaatcacagctggcatcttacctttatcacccttgttcctccaacaatcatcagccctattacatcagttacctttggtgcatttattggcacaaaacatcagggcacaacaactacaacaacttgtgctagcaaaccttgctgcctactctcagcaacagcagtttcttccattcaaccaactagctgcattgaactctgcttcttatttgcaacaacaacaactaccattcagccagctacctgctgcctacccccagcaatttcttccattcaaccaactggcagcattgaactctcctgcttatttacagcagcaacaactactaccattcagccagctagctggtgtgagccctgcttcccttttgatacaaccacagttgttggcgttctaccagcacgctgcgcctaacgctggcaccctcttac

SEQ ID NO: 9603 - DNA, 339 bp, Zea mays
  unsure (1)..(339): unsure at all n locations; Clone ID: LIB3061-105-Q1-K6-D6
ccccccccccccccccgggggggggttttccctaccccccaaataaaaacccngggggggggggggggggaaaaaaaaaaaaaaaaaaatatataaatnntnnnnnnnnnnccccccccccccccccccccctctnttgtggggggggaaaaaaaaaaagaaaaaaaaaaaacacccgaaaggggggttgtggggccccccccccccccnnaaaaaaaaaaaaaaaaaaaaaaaaaaataatttttttttttttttttttnnggggggggggtnggggggggggggggggnnnttgttttttttttttttttttttttntnccccccccccccccccct

SEQ ID NO: 9604 - DNA, 661 bp, Zea mays
  Clone ID: LIB3061-105-Q1-K6-E10
catcaatcatcattcatcttagtagtataggcaccaaatcaaatctgcaacatcaattatctaactccaaaaaccatgaagctggtgcttgtggttcttgctttcattgctttagtatcaagtgtttcttgtacacagacaggcggctgcagctgtggtcaacatcaaagccatgagcagcaacatcatccacaacaacatcatccacaaaaacaacaacatcaaccaccaccacaacatcaccagcagcagcaacaccaacaacaacaagttcacatgcaaccacaaaaacatcagcaacaacaagaagttcatgttcaacaacaacaacaacaaccgcagcaccaacaacaacaacatcaacaacagcaccaacaacaacatcaatgtgaaggccaacaacaacatcaccaacaatcacaaggccatgtgcaacaacacgaacagagccatgagcaacacctatgacagagccatgagcaacaacatcaacaacaattccagggtcatgacaagctgcatcatccacaacagcctcagcaatatcagcagggccaggaaaaatcacaacagcaacaatgtcattggcaggagcagcaacagactacaaggtgccgctttaactactatagcagtagctcaaatctaaaaaattggcatg

SEQ ID NO: 9605 - DNA, 380 bp, Zea mays
  Clone ID: LIB3061-105-Q1-K6-E11
cagaacacaccaagcgaagcacattagcaacaacctaacaacaatggctaccaagatattatccctccttgcgcttcttgcgctttttgcgagcgcaacatatgcgttcattattccacattgctcacttgctccaagttccattattacacagttcctcccaccagttacttcaatgggcttcgaacacccagctgtgcaagcctataggctacaacaagcaattgcggcgagcgtcttacaacaaccaatttcccagttgcaacaacaattcttggcacatctaacaatacaaaccattgtatcgcatcagtatcatcatttttctaccatcactgagccacctagccatggtgaaccctgacgactacttgcagcag

SEQ ID NO: 9606 - DNA, 563 bp, Zea mays
  unsure (1)..(563): unsure at all n locations; Clone ID: LIB3061-105-Q1-K6-E12
cgggncgacccagcgnncgctagcaacatagaaagcacaanagcgnaccaacaanggcagccaaaanannnngcnncccnangccccnaggacnaacagcaagagcagccaccgcaaccannnacccacaaagcncacaagcnccnanagccaccnaacnacccccaaaccacacaccagcggagacnacagnaggggaggacccaannccncaacccnacagganccaacaggcaancgcagcaggcancnnaccnaaaacacccnagagcccccaacaaccgacagcccaaagacagcaganaccngnggngcanagggaggcacaaaacagcaaggcacaacaaccacaacaacnagngccaggaaacccggccgcccacccacagcaacagcaggggccagcaagcaaccaaccggccgcaaagaaccccgcngacgaagagcaacaacaaccgaccagcagacagcaagcngcngcccacccccagcaaggggcgccagacaaccaaccggcagcaaagaacgcggccgccnaaggacaacagaaacaggaaccacca

SEQ ID NO: 9607 - DNA, 676 bp, Zea mays
  Clone ID: LIB3061-105-Q1-K6-E4
tattatttagaccaactagcaacatagaaagcacaatagtgtaccaacaatggcagccaaaatattttgcctccttatgctccttggtatttctgcaagtgctgctacggcgaccattttcccgcaatgctcacaagctcctatagcttcccttcttcccccgtacctctcaccagcggtgtcttcggtatgtgaaaacccaattcttcaaccctacaggatccaacaggcaatcgcagctggcatcttacctttatcacccttgttcctccaacaatcatcagccctattacagcagttacctttggtgcatttattggcacaaaacatcagggcacaacaactacaacaacttgtgctagcaaaccttgctgcctactctcagcaacagcagtttcttccattcaaccaactagctgcattgaactctgcttcttatttgcaacaacaacaactaccattcagccagctacctgttgcctacccccaacaatttcttccattcaaccaactggcagcattgaactctcctgcttatttacagcagcaacaactactaccattcagccagctagctggtgtgagccctgctaccttcttgacacaaccacagttgttgccgttctaccagcacgctgcgcctaacgctggcaccctcttacaactgcaacaattg

SEQ ID NO: 9608 - DNA, 662 bp, Zea mays
  Clone ID: LIB3061-105-Q1-K6-E6
cctaaaccctaatcgcgacctgcgttcgtcaaaaccctacctggccatggacggcggaggaggaggcggtggaggaggaggtggagttggggcaggtgtcatggtgggtggcggagtcgtgccgggcggcgggggcggcgacgtggaactcgtcagcaagacgctgcagttcgagcacaagctgttctactttgatctgaaggagaacccgcgggggaggtacctcaagatctccgagaagacatcggccacgcgctccaccatcatcgtccccatcgacggcgtcgcctggttcctcgacctcttcgactactacatccgcaccgacgagcgcgacgtcttcagcaaggagctgcgactccagaccaaggtgttctatttcgatatcggggagaacaagaggggccgattcctcaaggtttctgaggcctctgtcaacagaaaccggagtaccataattgttccagctggcagctctggtgaagagggctgggaagcattcagaaatgtactgttggaaataaataacgaggcttccagattgtatgtcctaccaaatcatccaaatcagcaacacttggagccgccagagcgtcttcctggcttgtcagatgatgtgggtgccggatttatagctggacatggtagccagtccgcttctg

SEQ ID NO: 9609 - DNA, 503 bp, Zea mays
  Clone ID: LIB3061-105-Q1-K6-F10
gagaccagcaagcaacatagaaagtagaatccattagcaacaatagagcaacaatggcgaccaagatattttccctccttatgctccttgctctttctacatgtgttgctaacgcgacaattttccctcaatgctcacaagctcctatagcttcccttcttcccccataccttccatggagaggatagcttcagtatgtgaaaacccagctcttcaaccatataggcttcaacaagcaatcgcagcaagcaacatacctttatcgcccttgttgtttcaacaatcaccaaccctatcttaggtgcagacattggaacaaaccatcagggcacaacagctgcagcaactcgtgctacctgtgatcaaccaagtaactctggcaaacctttctacctactctaagcaacaacaatttcttccattcaaccaactgactacactgaaccctgctgcttattagcaacaacaactataaccataaaaacaactagctgctgactact

SEQ ID NO: 9610 - DNA, 493 bp, Zea mays
  Clone ID: LIB3061-105-Q1-K6-F3
gttggcttctcctccccctccggttcgggttcgggttcgtgaggttctccggggttcggtttcgtgggtgagcggatcgagatggcggcgtcggatgttgagtaccgctgcttcgtcggcggcctcgcctgggccacggacgaccactccctccacaacgccttcagcacctacggcgaggtcctcgagtccaagatcatcctcgatcgggagacgcagaggtcccgcggcttcggcttcgtcaccttctccacggaggaggcgatgcggaacgccatcgagggcatgaacggcaaggagctggacggccgcaacatcaccgtcaacgaggcccagtcccgcggcggccgtggaggcggcggcggcggcgggtacggtggtggccgtggaggcggcggctactgcggtggcgggcgccgtgatggcggcggcggctacggcggtggcggcggctaccgtggtggcggcggcggctaccgtggtggtggcggcg

SEQ ID NO: 9611 - DNA, 641 bp, Zea mays
  Clone ID: LIB3061-105-Q1-K6-F4
cccgggcctcgatcggcctccctcccccatagatcctccactcgatcccaaacaaaccaacaaatccatccatcgcacatggacgcgttcttctcggcctcctccgcgtcggcgccctacggctacggcgccggcggatggagctacgactcgctcaagaacttccgccagatcacccctgccgtccagacccgcgcaatgagcatttcgtatttttttaaaaatatatatcagtcgctggtttcgtgcgttccagaaattctcctgcgggttgcgtgtagctgatgcgtaattccctgacgtaatctatgattcgcgcgcgtcgtgttccttgcatttagaactgcaactgtgcggatgccaccgattcgattgattcgtcactttaagaacatgatccggttagaacagcaagatatgataaatcgatttgaatccaaatctgaccatctggttcggcttggttgcctgcaggtctacctcaccctgtgcgcggcgctggcctcgtcggcggtgggcgcttacctgcacgtggtctggaacatcggcgggacgctgacaatgctcggttgcgtcggcagcatcgcctggctcttctcggtgcccgtctacgaggagaggaagaggtatgggctgctgat

SEQ ID NO: 9612 - DNA, 677 bp, Zea mays
  Clone ID: LIB3061-105-Q1-K6-F5
attttcattattcaaaaacacaccaagcgaagcgcactagcaacgacctaacaccaatggctaccaagatattagccctccttgcgcttcttgcccttttagtgagcgcaacaaatgcgttcattattccacagtgctcacttgctcctagtgccattattccacagttcctcccaccaggtacttcaatgggcttcgaacatccagccgtgcaagcctacaggctacaactagcgcttgcggcgagcgccttacaacaaccaattgcccaattgcaacaacaatccttggcacatctaaccctacaaaccattgcaacgcaacaacaacaacaacaacagtttctgccatcactgagccacctagccgtggtgaaccctgtcacctacttgcaacagcagctgcttgcatccaacccacttgctctggcgaacgtagctgcataccagcaacaacaacagctgcaacagtttatgccagtgctcagtcaactagccatggtgaaccctgccgtctacctacaactactttcatctagcccgctcgcggtgggcaatgcacctacgtacctacaacaacagttgctgcaacaaattgtaccagctctgactcagctagctgtggcaaaccctgctgcctacttacaacagttgcttccattcaaccaactggctgtg

SEQ ID NO: 9613 - DNA, 651 bp, Zea mays
  Clone ID: LIB3061-105-Q1-K6-F8
caactagtaacatagaaagcacaatagtgtaccaacaatggcagccaaaatattttgcttccttatgctccttggtctttctgcaagtgttgctaccgcaaccattttcccacaatgctcacaagctcctatagcttcccttcttcccccatacctctcaccagcggtgtcttcaatgtgtgaaaccccaattgttcaaccctacaggatccaacaggcaatcgcaacaggcatcttaccattatcacccttgttcctccaacaaccgtcagccctattacagcagttacctttggtccatttggtggcacaaaacatcagggcacaacaactacaacaacttgtgctagcaaaccttgctgcatactctcagcaacatcagtttcttccattcaaccaactggctgcattgaactctgctgcttatttgcaacaacaattaccattcagccagctagttgctgcctacccccagcaatttcttccattcaaccaactagcagcattgaactctgctgcttatttacagcagcaacaactactaccattcagccagctagctgatgtgagccctgctgccttcttgacacaacaacagttgttgccgttctacctgcacgctatgcctaacgctggcaccctcttacaact

SEQ ID NO: 9614 - DNA, 565 bp, Zea mays
  Clone ID: LIB3061-105-Q1-K6-F9
gcattcataaacacaccaagcgaagcgcactagcaacgacctaacaccaatggctaccaagatattagccctccttgcgcttcttgcccttttagtgagcgcaacaaatgcgttcattattccacagtgctcacttgctcctagtgccattattccacagttcctcccaccagttacttggagtgggcttcgaacatccagccgtgcaagcctacaggctacaactagcgcttgcggcgagcgccttacaacaaccaattgcccaattgcaacaacaatccttggcacatctaaccctacaaaccattgcaacgcaacaacaacaacaacaacagtttctgccatcactgagccacctagccgtggtgaaccctgtcacctacttgcaacagcagctgcttgcatgcaacccacttgctctggcggacgtatctgcataccatcaacaacaacagctgcaacagtatatgccagtgctcatgcaactagccatggtgaaccctgacctctacctacaactactatcatcttatcccactcggggtgggcaatgcacctactttcc

SEQ ID NO: 9615 - DNA, 665 bp, Zea mays
  Clone ID: LIB3061-105-Q1-K6-G1
cagaaacacaccaagcgaagcgcactagcaacgacctaacaacaatggctaccaagatattagccctccttgcgcttcttgccctttttgtgagcgcaacaaatgcgttcattattccacaatgctcacttgctcctagtgccattattccacagttcctcccaccagttacttcaatgggcttcgaacacctagctgtgcaagccaacatgcaacaacaagcgcttgcggcgagcgtcttacaacaaccaattgcccaattgcaacaacaatccttgccacatctaacaatacaagccatcacaacgcaacagcaacaacagttcctaccagcactgagccacctagccatggtgaaccctgccgcctacttgcaagagcagctgcttgcatccaacccacttgctctggcgaacgtagttgcaaaccagcaacaacaacagctacaacagtttctgccaacgctcagtcaactagccatggtgaaccctgccgcctacgtacaacaacaacaactgctttcatctagcccgctcgctgtgggcaatgcacctacatacctgcaacaacaattgttgcaacagattgtaccagctctgactcaactagctgtggcaaaccctgttgcctacttgcaacagctgcttccattcaaccaactgact

SEQ ID NO: 9616 - DNA, 683 bp, Zea mays
  unsure (1)..(683): unsure at all n locations; Clone ID: LIB3061-105-Q1-K6-G11
cgggtcgacccagcgtacgggatcgtctaacagaacagcatgacgagggtcatcgttctcgtcgtgtgcctggctctgtcagctgccagcgcctctgcaatgcagatgccctgcccctgcgcggggctgcagggcttgtacggcgctggcgccggcctgacgacgatgatgggcgccggcgggctgtacccctacgcggagtacctgaggcagccgcagtgcagcccgctggcggcggcgccctactacgccgggtgtgggcagccgagcgccatgttccagccgctccggcaacagtgctgccagcagcagatgaggatgatggacgtgcagtccgtcgcgcagcagctgcagatgatgatgcagcttgagcgtgccgctgccgccagcagcagcctgtacgagccagctctgatgcagcagcagcagcagctgctggcagcccagggtctcaaccccatggccatgatgatggcgcagaacatgccggccatgggtggactctaccagtaccagctgcccagctaccgcaccaacccctgtggcgtctccgctgccattccgccctactactgattcatgatatntgggaaatctnctctatccatctctctctatctatatatgtaataatgcagnaagacgacacacattatcatgtgtggtatgaccaataatatatg

SEQ ID NO: 9617 - DNA, 658 bp, Zea mays
  Clone ID: LIB3061-105-Q1-K6-G12
gcgatttcgatctcgcagccaccttttttttgttctgttgtgtatctagtagttggaggagatatgcagtttgcacttgcattggacacgaactcaggtcctcaccagataagatcttgtgagggtgatgggattgacaggttggaaaaattaagtattgggggcagaaagcaggagaaagctttgagaaataggtgctttggtggtagagttgctgcaactacacaatgtattcttacctcagatgcttgtcctgaaactcttcattctcaaacacagtcctctaggaaaaattatgctgatgcaaaccgtgtatctgctatcattttgggcggaggcactggatctcagctctttcctctgacaagcacaagagctacgcctgctgtacctgttggaggatgttacaggcttattgatatccctatgagtaactgcttcaacagtggtataaataagatatttgtgatgagtcagttcaattctacttcgcttaaccgccatattcatcgtacataccttgaaggcgggatcaactttgctgatggatctgtacaggtattagcggctacacaaatgcctgaagagccagctggatggttccagggtacagcagactctatcagaaaatttatctgggtactcgaggattattaca

SEQ ID NO: 9618 - DNA, 650 bp, Zea mays
  Clone ID: LIB3061-105-Q1-K6-G5
cccagcgtccggaccaactagcaacatagaaagcacaatagtgtaccaacaatggcagccaaaatattttgcctccttatgctccttggtatttctgcaagtgctgctacggcgaccattttcccgcaatgctcacaagctcctatagcttcccttcttcccccgtacctctcaccagcggtgtcttcggtatgtgaaaacccaattcttcaaccctacaggatccaacaggcaatcgcagctggcatcttacctttatcacccttgttcctccaacaatcatcagccctattacagcagttacctttggtgcatttattggcacaaaacatcagggcacaacaactacaacaacttgtgctagcaaaccttgctgcctactctcagcaacagcagtttcttccattcaaccaactagctgcattgaactctgcttcttatttgcaacaacaacaactaccattcagccagctacctgttgcctacccccaacaatttcttccattcaaccaactggcagcattgaactctcctgcttatttacagcagcaacaactactaccattcagccagctagctggtgtgagccctgctaccttcttgacacaaccacagttgttgccgttctaccagcacgctgcgcctaacgc

SEQ ID NO: 9619 - DNA, 649 bp, Zea mays
  Clone ID: LIB3061-105-Q1-K6-G6
ctagcaacatagaaagcacaatagtgtaccaacaatggcagccaaaatattttgcttccttatgctccttggtctttctgcaagtgttgctaccgcaaccattttcccacaatgctcacaagctcctatagcttcccttcttcccccatacctctcaccagcggtgtcttcaatgtgtgaaaccccaattgttcaaccctacaggatccaacaggcaatcgcaacaggcatcttaccattatcacccttgttcctccaacaaccgtcagccctattacagcagttacctttggtccatttggtggcacaaaacttcagggcacaacaactacaacaacttgtgctagcaaaccttgctgcatactctcagcaacatcagtttcttccattcaaccaactggctgcattgaactctgctgcttatttgcaacaacaattaccattcagccagctagttgctgcctacccccagcaatttcttccattcaaccaactagcagcattgaactctgctgcttatttacagcagcaacaactactaccattcagccagctagctgatgtgagccctgctgccttcttgacacaacaacagttgttgccgttctacctgcacgctatgcctaacgctggcaccctcttacaactg

SEQ ID NO: 9620 - DNA, 485 bp, Zea mays
  Clone ID: LIB3061-105-Q1-K6-G8
cagtttctgccagcgctcagtcaactagccatggtgaaccctgccgcctacctacaacagcaacaactgctttcatctagccctctcgttgtgggtaatgcacctacatacctgcaacaacaattgctgcaacagattgtaccagctctgactcagctagctgtggcaaaccctgctgcctacttgcaacagctgcttccattcaaccaactgactgtgtcgaactctgctgcgtacctacaacagcgacaacagttacttaatccactagcagtgcctaacccattggtcactgccttcctacagcagcaacaattgctaccatacagccagttctctttgatgaaccctgccttgtcgtggcagcaacccatcgttggaggtgccatcttttagattacatatgagatgtaatcgataatggtgccctcataccggcatgtgtttcctagaaataatcaatatattgattgacatttatctcg

SEQ ID NO: 9621 - DNA, 611 bp, Zea mays
  Clone ID: LIB3061-105-Q1-K6-H10
cagaatcataccaagcgaagcgcactagcaacggcctaacaacaatggctaccaagatattagccctccttgcgcttcttgccctttttgtgagcgcaacaaatgcgttcattattccacaatgctcacttgctcctagtgccattattccacagttcctcccaccagttacttcagggggcttcgaacacctagctgtgcaagccaacatgcaacaacaagcgcttgcggcgagcgtcttacaacaaccaattgcccaattgcaacaacaatccttgccacatctaacaatacaagccatcacaacgcaacagcaacaacagttcctaccagcactgagccacctagccatggtgaaccctgccgcctacttgcaagagcagctgcttgcatacaacccacttgctctggcgaacgtagttgcaaaccagcaacaacaacagctacaacagtttctgccaacgctcattcaactagccatggtgaaccctgccgtctacgtacaacaacaacaactgctttcatctagcccgctcgctgagggcaatgcacctacatacctgcaacaacaattgatgcaacagattgtgccaaatctgactcaactagct

SEQ ID NO: 9622 - DNA, 444 bp, Zea mays
  Clone ID: LIB3061-105-Q1-K6-H11
gcaccaatggcagccaatatttttgccatccttgccctccttgctctttcagcaagcgttgctaccgcgactattattccacaatgctcacaacaatacctctctccggtgacagccgcgagatttgaatacccaacggacgatgcgacaggctacaagaggccatcgcaacaagcatcttacggtcgttagcattgaccgtgcaacaaccatatgccctatagcaacaaccatccttaatgaatctatatatccaaagaatcgcagcacatcaactacaacaacagtggcttgcaacaatcaatcaagtagttgcagtgaaccttgctgctaaccttcagcaacaacaattaataacattcaatcaactagctggggagaaccctactgataactagcaggcacaacagatactaccattaaaccaactagacaggagaccct

SEQ ID NO: 9623 - DNA, 639 bp, Zea mays
  Clone ID: LIB3061-105-Q1-K6-H2
ctaagctattggaggaatacaacactggtggtgacctaggagaagcctgcagatgcatccgtgatcttgggatgcccttcttcaaccatgaggtggtaaagaaggcactggtcatggcgatggagaagcagaatgacaccagcatcttggtcctgctgcaggagtgtttcggcgaggggctcataaccatcaaccagatgaccaaaggctttgcccgtgtcaaggaaggccttgatgatctgatcctcgacatcccaaatgcccaggagaagtttggagagtatgtggagctggcaacagagcgcggctggctgctgccgaccttcgcctccgttccctgagcatccaccactggcgataccttccttatgtgtacatttgtgcccatgatgtcattagctccgtaccaaagttttcctattcctagtttacttatgttaccgtatactggaggattgtaggatggatgtggtgtcggttgttgagatagtgtcctattggtctagtctgggagggtacttttgagagttaaaagaataaagccatttcgtttcaggttatgagatgtacgctgcaacctttgtccctggatggacctggtggtaccatattcttaatatgatttattgccgatctggg

SEQ ID NO: 9624 - DNA, 311 bp, Zea mays
  Clone ID: LIB3061-105-Q1-K6-H3
tgcttatttacagcagcaacaactactaccattcagccagctagctggtgtgagccctgctaccttcttgacacaaccacagttgttgccgttctaccagcacgttgcgcctaacgctggcaccctcttacaactgcaacaattgctgccattcaaccaacttgctttgacaaacccagcagtgttctaccaacaacccatcattggtggtgccctcttttagatttcttatgagttatagttcaataataaagttttttatctgatgtttgtggcttcccagaaataagaaagtacatttctagattctt

SEQ ID NO: 9625 - DNA, 592 bp, Zea mays
  Clone ID: LIB3061-105-Q1-K6-H6
caacatataaagtggaatccagtagcaacaacagagcaacaatggcgaccaagatattttccctccttatgctccttgctctttctgcatgtgttgctaacgcgacaattttccctcaatgctcacaagctcctatagcttcccttcttcccccataccttccatcaatgatagcttcagggtgtgaaaacccagctcttcagccctataggctccaacaagcaatcgcagcaagcaacatacctttatcacccttgttgtttcaacaatcgccagccctatctttggtgcagtcattggtacaaaccatcagggcacagcagctgcagcaactcgtgctacctgtgatcaaccaagtagctctggcaaacctttctccctactctcagcaacaacaatttcttccattcaaccaactgtctacactgaaccctgctgcttatttgcagcaacaactattaccattcagccagctagctactgcctactctcagcaacaacaacttcttccatttaaccaattggccgcactgaaccccgctgcttatttgcagcagcaaatactactaccatttagccagctagctgcagc

SEQ ID NO: 9626 - DNA, 162 bp, Zea mays
  unsure (1)..(162): unsure at all n locations; Clone ID: LIB3061-105-Q1-K6-H7
aaaaaaaaaaaaaaaaaaaaaaaagggagaaaaaaaaaaaaggaaaaaaaaaaaaaaaaaaaaaaaaaaaaaaanaaaaaagaggaaaaaaaaaaaaaggaaaaagaaaaaaaagggaaagaaaggaaaaagagggaagaaggagaaaaanaagggaggaag

SEQ ID NO: 9627 - DNA, 641 bp, Zea mays
  Clone ID: LIB3061-106-Q1-K6-A1
tctttctgcaagtgctgctaccgcaaccattttcccacaatgctcacaagctcctatagcttcctttcttcccccatacctctcaccagcggtgtcttcagtatgtgaaaacccaattcttcaaccctacaggatccaacaggcaatcgcagcaggcatcttacctttatcacccttggggctccaacaaccgtcagccctattacagcagttacctttggtgcatttgttggcacaaaacatcaaggcacaacaactacaacaacttgtgctaggaaaccttgctgcctactctcagcaacagcagtttcttccattcaaccaactggctgcattgaactctgctgcttatttgcaacaacaactaccattcagtcagctagctgctgcctacccccagcaatttcttccattcaaccaactggcagcattgaactctgctgcttatttacaacagcaacagctaccaccattcagccagctagctgatgtgagccctgttgccttcttgacacaacaacagttgttgccgttctacctgcacgctgcgcctaacgctggcaccctcttacaactgcaacaattgctgccattcaaccaacttgctttgacaaacccaacagcgttctaccaacaaccca

SEQ ID NO: 9628 - DNA, 623 bp, Zea mays
  unsure (1)..(623): unsure at all n locations; Clone ID: LIB3061-106-Q1-K6-A11
ccgggtcgaccttgcgtccggcaaatttctagtgaantacactaggggatcgtggcaccaatgggatccaanatttttttccctccttgccctccttgctctttcagcaagcgctgctacctctactattattccacaatgctcacaacaatacctctctccggtgacagccgcgggatttcaacacccaactatgggggggtgcatgctacatgaggccatcatancaagcatcttacggtcattagcattaaccctccaacagccatatgccctattgcaacaaccatccttagtgcatctgtatctccaaagaatcgcgacacaacaactacaacaacagttgctaccaacaatcaatcaagtagttgcagcgaaccttgctgcttatctccagcaacaacaatttcttccattcaatcaactagctggggtgaaccctgctgtctacttgcaggcacaacaactactaccatttaaccaacttgtcgggagccctgatgccttcttactgcaacaacagcttctgccattccatctgcaagctgtggaaaacattgcttctttcttgcgacaacaacaattgttgccattttacccacaggttgtgggaaacattaatg

SEQ ID NO: 9629 - DNA, 663 bp, Zea mays
  Clone ID: LIB3061-106-Q1-K6-A2
caactagcaacatagaaagcacaatagtgtaccaacaatggcagccaaaatattttgcttccttatgctccttggtctttctgcaagtgctgctaccgcaaccattttcccacaatgctcacaagctcctatagcttcctttcttcccccatacctctcaccagcggtgtcttcagtatgtgaaaacccaattcttcaaccctacaggatccaacaggcaatcgcagcaggcatcttacctttatcacccttgttcctccaacaaccgtcagccctattacagcagttacctttggtgcatttgttggcacaaaacatcaaggcacaacaactacaacaacttgtgctaggaaaccttgctgcctactctcagcaacagcagtttcttccattcaaccaactggctgcattgaactctgctgcttatttgcaacaacaactaccattcagtcagctagctgctgcctacccccagcaatttcttccattcaaccaactggcagcattgaactctgctgcttatttacaacagcaacagctaccaccattcagccagctagctgatgtgagccctgttgccttcttgacacaacaacagttgttgccgttctacctgcacgctgcgcctaacgctggcacctctaacaactgcaacaattgctg

SEQ ID NO: 9630 - DNA, 660 bp, Zea mays
  unsure (1)..(660): unsure at all n locations; Clone ID: LIB3061-106-Q1-K6-A4
aggatccaacaggcaatcgcagctggcatcttacctttatcacccttgttcctccaacaatcatcagccctattacagcagttacctttggtgcatttattggcacaaaacatcagggcacaacaactacaacaacttgtgctagcaaaccttgctgcctactctcagcaacaacagtttgttccattcaaccaactagctgcattgaactctgcttcttatttgcaacaacaacaactaccattcagccagctatctgctgcctacccccagcaatttcttccattcaaccaactgacagctttgaactctcctgcttatttacagcagcaacaactactaccattcagccagctagctggtgtgagccctgctaccttcttgacacaaccacaattgttgccgttctaccagcacgctgcgcctaacgctggcaccctcttacaactgcaacaattgctgccattcaaccaacttgctttgacaaacccaacagcattctaccaacaacccatcattggtggtgccctcttttagatttcttatgagttatagttcaataataaagttttttgtctgatgtttgtggcttcccagaaataagaaagtacatttctagaaaaaaaaaaaaaaaaggaaaaaaaaaannaaaaaggaaaa

SEQ ID NO: 9631 - DNA, 642 bp, Zea mays
  Clone ID: LIB3061-106-Q1-K6-A7
caacaagcaatcgcagcaagcaacatacctttatcgcccttgttgtttcaacaatcgccagccctatctttggtgcagtcattggtacaaaccatcagggcacaacagctgcagcaactcgtgctacctctgatcaaccaagtagctctggcaaacctttctccctactctcagcaacagcaatttcttccattcaaccaactgtctacactgaaccctgctgcttatttgcagcaacaactattaccatttagccagctagctactgcctactctcagcaacaacaacttcttccatttaaccaattggccgcactgaaccccgctgcttatttgcagcagcaaatactactaccatttagccagctagctgcagcaaaccgtgcttccttcttgacacagcaacagttgctgcctttctaccagcagtttgcggctaaccccgcaaccctcttacaactacaacaattgttgccctttgtccaacttgctttgacagacccagcggcctcctaccaacaacacatcattggtggtgccctcttttagattgcttattagttgtaattcaataataaagttttttggatgatgtatgtggccaaccagaaataagaagttacatttccagattctaatgtg

SEQ ID NO: 9632 - DNA, 662 bp, Zea mays
  Clone ID: LIB3061-106-Q1-K6-B10
agctgctataacgatgaccaaccagggcgttcaagtctttccagagataatggttcctcttgttggaacaccgcaggaattgggacatcaggtggcccttatccgtcaagtcgctaacaaagttttcaccagtatgggtaaaactattgggtacaagatcgggacgatgattgagattcccagggcagctctagtggctgacgagatcgcggagcaggctgaattcttctcctttggaacgaacgacctcacgcagatgacctttggctacagcagggatgatgtggggaagttcatccccatttatctggctcagggcatcctccagcatgaccccttcgaggttctcgaccagagaggagtgggcgagctggttaagcttgctacagagaggggccgcaaagctaggcctaacttgaaggtgggcatttgtggagaacatggtggagagccttcatcggttgctttcttcgccaagactgggctggattacgtttcttgctcccctttcagggtcccgatcgctaggctagctgcagctcatgtgcttgtctgagggtgcctctgctcgttggcagccggatcgcctgctgttggtgcatctggtgattaataatactactatgacagagccatgctctgtgaagagtattagtagcagc

SEQ ID NO: 9633 - DNA, 691 bp, Zea mays
  Clone ID: LIB3061-106-Q1-K6-B6
ccgggcagaaaacaccaagcgaagcacattagcaacaacctaacaacaatggctaccaagatattatccctccttgcgcttcttgcgctttttgcgagcgcaacaaatgcgttcattattccacaatgctcacttgctccaagttccattattacacagttcctcccaccagttacttcaatgggcttcgaacacccaggggtgcaagcctataggctacaacaagcaattgcggcgagcgtcttacaacaaccaatttcccagttgcaacaacaatccttggcacatctaacaatacaaaccatcgcaacgcaacagcaacaacaattcctaccagcactgagccacctagccatggtgaaccctgccgcctacttgcaacagcagttgcttgcatcaaacccacttgctctggcaaacgtagttgcaaaccagccacaacaacagctgcaacagtttctgccagcgctcagtcaactagccatggtgaaccctgccgcctacctacaacagcaacaactgctttcatctagcccgctcgctgtggccaatgcacctacatacctgcaacaacaattgttgcaacagattgtaccagctctgactcagctagttgtggcaaaccctgctgcctacttgcacagctgcttcattaaccaactgactatgtcaactctgctgcgtcctacac

SEQ ID NO: 9634 - DNA, 669 bp, Zea mays
  Clone ID: LIB3061-106-Q1-K6-B8
gaagcgcactagcaacgacctaacaacaatggctaccaagatattatccctctttgcgcttcttgccctttttgtgagcgcaacaaatgcgttcattattccacaatgctcacttgctcctagtgccattattccacagttcctccctccagttacttcaatgggcttcgaacacccagctgtgcaagcctacaggctacaacaagcgcttgcggcgagcgtcttacaacaaccaattgcccaattacaacaacaatccttggcacatctaaccatacaaaccatcgcaacgcaacagcaacaacaatttctaccagcactgagccaactagctgtggtgaaccctgtcgcctacttgcaacagcagttgcttgcatccaacccacttgctctggcaaacatagttgcataccaacaacaacaacaattgcaacagtttctaccagcgctcagtcaactagccatggtgaaccctgccgcctacctacaacagcaacaactgatttcatctagccctctcgctgtggttaatgcacctacatacctgcaacaacagttgctgcaacagattgtaccagctctgactcagctagctgtggcaaaccctgctgcctacttgcaacagctgcttccattcaaccaactgactgtgtcgaactctgctgcgta

SEQ ID NO: 9635 - DNA, 642 bp, Zea mays
  Clone ID: LIB3061-106-Q1-K6-B9
caaaaacacaccaagcgaagcgcactagcaacgacctaacaccaatggctaccaagatattagccctccttgcgcttcttgcccttttagtgagcgcaacaaatgcgttcattattccacagtgctcacttgctcctagtgccattattccacagttcctcccaccagttacttcaatgggcttcgaacatccagccgtgcaagcctacaggctacaactagcgcttgcggcgagcgccttacaacaaccaattgcccaattgcaacaacaatccttggcacatctaaccctacaaaccattgcaacgcaacaacaacaacaacaacagtttctgccatcactgagccacctagccgtggtgaaccctgtcacctacttgcaacagcagctgcttgcatccaacccacttgctctggcgaacgtagctgcataccagcaacaacaacagctgcaacagtttatgccagtgctcagtcaactagccatggtgaaccctgccgtctacctacaactactttcatctagcccgctcgcggtgggcaatgcacctacgtacctacaacaacagttgctgcaacaaattgtaccagctctgactcagctagctgtggcaaaccctgctgcctacttacaacagttgc

SEQ ID NO: 9636 - DNA, 658 bp, Zea mays
  Clone ID: LIB3061-106-Q1-K6-C6
ggccaacaacaacatcaccaacaatcacaaggccatgtgcaacaacacgaacagagccatgagcaacaccaaggacagagccatgagcaacaacatcaacaacaattccagggtcatgacaagcagcaacaaccacaacagcctcagcaatatcagcagggccaggaaaaatcacaacagcggcaatgtcattgccaggagcagcaacagactacaaggtgcagctataactactatagcagtagctcaaatctaaaaaattgtcatgaattcctaaggcagcagtgcagccctttggtaatgccttttctccaatcacgtttgatacaaccaagtagctgccaggtattgcagcaacaatgttgtcatgatcttaggcagattgagccacaatacattcaccaagcaatctacaacatggttcaatccataatccaggaggagcaacaacaacaaccatgtgagttatgtggatctcaacaagctactcaaagtgcggtggcaatcttgacagcagcacaatacctaccatcaatgtgcggcttgtaccactcatactaccaaaataatccatgcagcagcaatgacattagtggtgtttgcaattgaagaattgtgtctacctagccgttatactcctataacggtgttaagcaat

SEQ ID NO: 9637 - DNA, 157 bp, Zea mays
  unsure (1)..(157): unsure at all n locations; Clone ID: LIB3061-106-Q1-K6-C7
cccttctttccccatacctctcaccagcggtgtgttcaatgtgtgaaaacccaattgttcaaccctacaggatccaacaggcaatcgcaacaggcatcttaccattatcacccttgttcctncaacaaccgtcagccctattacagcagttaccttt

SEQ ID NO: 9638 - DNA, 350 bp, Zea mays
  Clone ID: LIB3061-106-Q1-K6-D12
gcaacagttgctgcctttctacaagcagtttgcggctaaccccgcatccctcttacaactacaacaattgttgccctttgtccaacttgctttgacaaacccagcagccttctaccaacaacacatcattggtggtgccctcttttagattgattattagttgtaattcaataataaagttttttggatgatgtatgtggccaaccagaaataagaagttacatttccagatactaaaaaaaaaaaaaaaaaaaaataaataaaaaaataaaaaaaaaaaaataaaaaaaaaaaaaaaagaattttaatttgtttttaaataaaacttttttttttatattttttttttt

SEQ ID NO: 9639 - DNA, 677 bp, Zea mays
  unsure (1)..(677): unsure at all n locations; Clone ID: LIB3061-106-Q1-K6-D2
acgaaatcaacccaaaccctagcatccgctttgctcgagggagacgaagatggcgccgaagaggaagacgagtggcgacggcgtggtagaatcgccagctgacgagttcgcaaagccggcggacgacacgaagggatcgccagccgagttcgccaaaccggtttaccttgtggcggcgcgcgacgacgacccggcggcctactccgttctggagatcgacgccgctgccggtggcgacgagccgccgcgcatccgcaccgttgccggtctgacgggcttcatctccgagcctggcatgtccttcgtcgcggcgcattcgaagcacggctcctggattgtcggcgtcggcggtgggttaagagcgggcaccatcatcttcgacccgaggacattgaagactttccgcggcccgcggctcatgtaccccaagcgcgaacccgtcctgatctcgcacggcagcgagatatacgctatctcacgccgccccctggtggtgcgcccgatcgactgcgaaccatggttcgaatgcctcagcttcaacaagggtgtgccctccaaagattgcggcctttgcgtncactggagcatcctgccaccaccacccttcttcccttgcttcctgaacccctatgaatttcgcaatccacccaaaattacagtctcatcctatgctggcg

SEQ ID NO: 9640 - DNA, 650 bp, Zea mays
  Clone ID: LIB3061-106-Q1-K6-D4
caagcgacatagaaagtggaatccaggagcaacaatagagcaacaatggcgaccaagatactttccctccttatgctccttgctctttctgcatgtgttgctaacgcgacaattttccctcaatgctcacaagctcctatagcttcccttcttcccccataccttccatcaatgatagcgggagtatgtgaaaacccagctcttcaaccctataggctccaacaagcaatcgcagcaagcaacatacctttatcacccttgtttcaacaatcgccagccctatctttggtgcagtcattggtacaaaccatcaaggcacagcagctgcagcaactcgtgctacctgtgatcaaccaagtagctctggcaaacctttctccctactatcagcaacaacaatttcttccattcaaccaactatctacactgaaccctgctgcttatttgcagcaacaactattaccattcagccagctagctactgcctactctcatcaacaacaacttcttccatttaaccaattggccgcactgaacctcgctgcttatttgcagcagcaaatattactaccatttagccagctagctgcagcaagccgtgcttccttcttgacacagcaacagttgctgcctttctaccagcagtttgc

SEQ ID NO: 9641 - DNA, 661 bp, Zea mays
  Clone ID: LIB3061-106-Q1-K6-D7
agcaacatttaaagcacaatagtgtaccaacaatggcagccaaaatattttgcctccttatgctccttggtctttctgcaagtgctgctacggcgaccattttcccgcaatgctcgcaagctcctatagcttcccttcttcccccgtacctctcaccagcggtgtcttcggtatgtgaaggcgcaattcttcaaccctacaggatccaacaggcaatcacagctggcatcttacctttatcacccttgttcctccaacaatcatcagccctattacatcagttacctttggtgcatttattggcacaaaacatcagggcacaacaactacaacaacttgtgctagcaaaccttgctgcctactctcagcaacagcagtttcttccattcaaccaactagctgcattgaactctgcttcttatttgcaacaacaacaactaccattcagccagctacctgctgcctacccccagcaatttcttccattcaaccaactggcagcattgaactctcctgcttatttacagcagcaacaactactaccattcagccagctagctggtgtgagccctgctaccttcttgatacaaccacagttgttgccgttctaccagcacgctgcgcctaacgctggcaccctcttacaactgcaacaattgct

SEQ ID NO: 9642 - DNA, 191 bp, Zea mays
  Clone ID: LIB3061-106-Q1-K6-E11
ggaaactatgtactgtagtaataatgtaatggagccgctgactagctacctatagggctatagctagttcactcgtttagcggcgatgagtaacggagtgtcacccatcaccatgggtggcagtgtgagcaatgacctgaatgaaccattgaaatggaaaggaataatatataggggggggggatgtttgg

SEQ ID NO: 9643 - DNA, 614 bp, Zea mays
  unsure (1)..(614): unsure at all n locations; Clone ID: LIB3061-106-Q1-K6-E2
ctgaagcctgaagtgaaccgatcgatcgatcgatcgagcgagcgagctcccatgaaggcgttgattctggcggcggtgctgctgctgcagcacgggggagccgcgagcgccggcggcaacttctaccaggacgtggacatcacctggggcgacggccgcggcaagatcctcgacaacggccagctcctgacgctgtccatggacaggtcctccggctcgggcttccagtccaaggcccagtacctctacggccgcttcgacatgcagctcaagctcgtcccgggggactccgccggcaccgtcgccaccttctatctttcgtcgcagggttcgcagcacgacgagatcgacttcgagttcctggggaacgcgagcggngagccgtacacggtgcacacgaacgtgtacagccagnggaagggcgggcgggagcagcagttccggatgtggttcgaccccacggcggccttccacgcctactccgtgctgtggaaccccgcccacgtcgtcttctacgtggacggcgtccccatccgggagtttcggcgccgcggcgacgggaccgtgccgttcccgacgtcgcagccgatgcgggtgtacgccagcgtgtggga

SEQ ID NO: 9644 - DNA, 670 bp, Zea mays
  Clone ID: LIB3061-106-Q1-K6-E3
gccgcctctaggtgcagagtctttcgtgatggggtctccggcgaagaacccccagtcgcccaccagatcacttgttaaactttgttgaggggtgatggcggtttctttcgcaaacctcagctccgaggcagggcttaaaaagcttgatgagtaccttctcactcgcagctacatcagttgctgccaagcttccaaggatgacttggctgtctacacttcgttttcgtctgctccctcgtccaagtatatcaacgtagcaaggtggtttaatcacattgatgcgctcgtgaggctgagcggaattactgcagagggccaaggtgtgaaggttgaatcgtcagcagttccttcagccccaactccagatgttgctgaagcacaggccccagttgctgaggaggacgacgacgatgatgttgacctttttggtgaggagaccgaagatgagaagaaggctgctgaagagcgtgctgcagctgccaaggcttctggcaagaagaaagaatctgggaagtcatcagttttacttgatgtgaagccatgggacgatgagactgacatggccaagctcgaggaagctgttaggagtgtccagatggaagggttgctctggggcgcatccaagcttgtcccagttggatatgggatcaagaagctgcaaatcatgatg

SEQ ID NO: 9645 - DNA, 659 bp, Zea mays
  Clone ID: LIB3061-106-Q1-K6-E6
ctactcaacgcaagacccgatcgaaccatgagggtgttgctcgtgcctgctctctggctctcgctgcagcgccacctccagctacaagcggcggctgcggctgccagccaccgccgccggttcatctaccgccgccggtgcatctgccacgtgcggttcacctgccacctccggtgcatctcccaccgccggtccacctgccgccgccggtccacctgccaccgccggtccatgtgccgccgccggttcatctgccgccgccaccatgccactaccctactcaaccgccccggcctcagcctcatccccagccacacccatgcccgtgccaacagccgcatccaagcccgtgccagctgcagggaacctgcggcgttggcagcaccccgatcctgggccagtgcgtcgagtttctgaggcatcagtgcagcccgacggcgacgccctactgctcgcctcagtgccagtcgttgcggcagcagtgttgccagcagctcatgcaggtggagccgcagcaccggtaccaggcgatcttcggcttggtcctccagtccatcctgcagcagcagccgcaaagcggccaggtcgcggggctgttggcggcgcatatagcgcagcaactgacggcgatgtgcggcctgcagcagccgactccatgc

SEQ ID NO: 9646 - DNA, 688 bp, Zea mays
  Clone ID: LIB3061-106-Q1-K6-E8
ccgggtcgaccatgcgtccgggagttttaccattgaatgattcagattcacagtcaaaaccaaagggtcgatccaagaattttaatgaagctgaagacattttgttgatgtcagcttatcttaacataagtaaagatgcaattactggaagggatcaataagaaggcaacttttgggaaagagttgagaagtacttgggcgttaacaggacatttgagtcagatcgtaactggtcatcgttgaagcatcggtggggtataattcacaaataagttagtagtttccaaggtttccatgacagtatcgaaaggaaaaatgaaagtgggaagacaagtgatgataagctggctgaagcaaatgtaatgttccatcaatttaaaaataaggccttttctttgttccatgcgtggaacattctcagacatgagccaaagtgggctgaagataaaacatctaatgaagggaatgcaaatggggacagtcatcccaatgctcaaagacctgcaggaaggaaagctgaaaaggaaaagatgaaagcaaaaaggcgcaacagtgatgaagagtctgatccttccattgaagaggtaaaaaaaaatgagagaatcgagagagaaaactgagagcgaacgaaaggagcgtgatgaaagatactttgagctgcataagaaaaaagtagacttggagcaag

SEQ ID NO: 9647 - DNA, 654 bp, Zea mays
  Clone ID: LIB3061-106-Q1-K6-F12
accatataggcttcaacaagcaatcgcagcgagcaacatacctttatcgcccttgttgtttcaacaatcgccagccctatctttggtgcagtcattggtacaaaccatcagggcacaacagctgcagcaactcgtgctacctctgatcaaccaagtagctctggcaaacctttctccctgctctcagcaacaacaatttcttccattcaaccaactgtctacactgaaccctgctgcttatttgcagcaacaactattaccatttagccagctagctactgcctactctcagcaacaacaacttcttccatttaaccaattggccgcactgaaccccgctgcttatttgcagcagcaaatactactaccatttagccagctagctgcagcaaaccgtgcttccttcttgacacagcaacagttgctgcctttctaccagcagtttgcggctaaccccgcaaccctcttacaactacaacaattgttgccctttgtccaacttgctttgacagacccagcggcctcctaccaacaacacatcattggtggtgccctcttttagattgcttattagttgtaattcaataataaagttttttggatgatgtatgtggccaaccagaaataagaagttacatttccagattctaatgt

SEQ ID NO: 9648 - DNA, 625 bp, Zea mays
  Clone ID: LIB3061-106-Q1-K6-F9
cagaccattagctttatctactccagagcgcagaagaacccgatcgacaccatgagggtgttgctcgttgccctcgctctcctggctctcgctgcgagcgccacctccacgcatacaagcggcggctgcggctgccagccaccgccgccggttcatctaccgccgccggtgcatctgcggggggcggttcacctgccacctccggtgcatctcccaccgccggtccacctgccgccgccggtccacctgccaccgccggtccatgtgccgccgccggttcatctgccgccgccaccatgccactaccctactcaaccgccccggcctcagcctcatccccagccacacccatgcccgtgccaacagccgcatccaagcccgtgccagctgcagggaacctgcggcgttggcagcaccccgatcctgggccagtgcgtcgagttcctgaggcatcagtgcagcccgacggcgacgccctactgctcgcctcagtgccagtcgttgcggcagcagtgttgccagcagctcatgcaggtggagccgcagcaccggtaccaggcgatcttcggcttggtccttcagtccatcctgcagcagcagccgcaaagcggccaggtcgcggggc

SEQ ID NO: 9649 - DNA, 633 bp, Zea mays
  Clone ID: LIB3061-106-Q1-K6-G1
atctgaaggaagtgaaggttattgataaatgcagcatgccatatacattgcatgactcatttgcatctgaagttttgtcgtgacctatggtccgaccgtaccggtacaatttagcatcgtacgttgcccgaggaggggtacgatgcggcttcatacccttagaggtatgaaggcagaggacatatgcattgcattcatatgcattcattgaagtgatatttgcagatgatgtggttttatactctcagaggtatgaagatagagtacctacacattgcattcctatgcatacatcgaagtgataattgcaggtattgttgacgcggggaggtgttatagaacctattgtggttgttcgaggaaatgagatgatattggttatattgggactactaagttctatatctacaagtatttctgatcttgattgtgattcttttaaaatgttgattaattcaatttgtggtttaaatatctcatcagaacaattagcttgctgagatgtttcatctcactcttgcattactcaatgcaggtgcttgttgctcatcaaggggagtgggaagtagcagcacatccaccttcactctcataataatgctgcccagacacagtcatgatttaattagaaac

SEQ ID NO: 9650 - DNA, 661 bp, Zea mays
  Clone ID: LIB3061-106-Q1-K6-G10
agcacacatacagttatcctaagggagagttacagtaaaggatatctgattgagcctaaccctgtgtacattgtgcggaggaagatgctggacttggtattatctggatctcgtaacgttggtgaatgccaacaggatagtgcaacttggtcagctgaggagcatggtctgggaagcagtgatgggtgccaggataacatatgccaggtggattctgcaattccatactggaacatggagttagaagtgacgcatggaaagaaccaattaactcaaccgtgatcttgctgtaatctctacatataaaaatacctactgatatcgtctgcctagggtgaaccggtgaagcgatgcctagctgcggcattggtaatctgtcaagcagtgaccaaaacaagcagcaatccccgccgtcgtgaaacgccgccgtgtgccatgtcgatttaggctatccagcttgctgccttgctcacctgctttcctgagtatctgtgttcatcaattgcgaattatccttccttcgattccgacctcctcgggtggctcctgccgtcctgcgtgcattcccattttcaaaccagcatgttcagcactgcttggcgtgggggttcgccgctagtgggggtccaagaggcgccattcctgttccaaattcttaggc

SEQ ID NO: 9651 - DNA, 542 bp, Zea mays
  Clone ID: LIB3061-106-Q1-K6-G6
ggtctttataccattagctttatcgggggcagggggcagaagaacccgatcgacaccatgagggtgttgctcgttgccctcgctctcctggctctcgctgcgagcgccacctccacgcatacaagcggcggctgcggctgccagccaccgccgccggttcatctaccgccgccggtggagcgggcacctccggttcacctgccacctacagtgcatctcccaccgccggtccacctgccgccgccggtccacctgccaccgacggtccatgtgccgccgccggttcatctgccgccgccaccatgccactaccctactcaaccgccccggcctcagcctcatccccagccacacccatgcccgtgccaacagccgcatccaagcccgtgccagctgcagggaacctgcggcgttggcagcaccccgatcctgggccagtgcgtcgagttcctgaggcatcagtgcagcccgacggcgacgccctactgctcgcctcagtgccagtcgttgcggcagcagtgttgccagcagctcaggcaggt

SEQ ID NO: 9652 - DNA, 444 bp, Zea mays
  Clone ID: LIB3061-106-Q1-K6-G8
gcagtttcttccattcaaccaactagctgcattgaactctgcttcttatttgcaacaacaacaactaccattcagccagctatctgctgcctacccccagcaatttcttccattcaaccaactgacagcattgaactctcctgcttatttacagcagcaacaactactaccattcagccagctagctggtgtgagccctgctaccttcttgacacaaccacagttgttgccgttctaccagcacgctgcgcctaacgctggcaccctcttacaactgcaacaattgctgccattcaaccaacttgctttgacaaacccagcagcattctaccaacaacccatcattggtggtgccctcttttagatttcttatgagttatagttcaataataaagttttttgtctgatgtttgtggcttcccagaaataagaaagtacatttct

SEQ ID NO: 9653 - DNA, 507 bp, Zea mays
  unsure (1)..(507): unsure at all n locations; Clone ID: LIB3061-106-Q1-K6-G9
gcacaacaacgacaacaaccgggaccagcaaacccagccagacaacccgcagcaacagcaggncaccccaagcaaccaanaaccgaanggaacccngccagcgatagattaacaacaacaactaccatttcagacagttaactgactgcctacccacagcaatttcttccattcaaaccaactggcagcattgaactcttcctgcttatttacagcagcaacaactactaccattcatccagctagctggngtgagccctgctaccttcttgatacaaccacagttgttgncgttctaccagcacgctgcgcctaacgctggcaccctcttacaactgcaacaattgctgccattcaaccaacttgcttgacaaacccagcagagttctaccaacaacccatcattggtggtgcccttttaagatttctaatgagttatagatcaataataaaggtnntngaccgatatttgtggcttccagaaataagaaagtacattttagattc

SEQ ID NO: 9654 - DNA, 621 bp, Zea mays
  unsure (1)..(621): unsure at all n locations; Clone ID: LIB3061-106-Q1-K6-H5
cgggntcgacccactgcgtccgcacatatttactatactatanctctaggggagctgatagcaccaccgccatggcatgccaagatgccttgcnnattgttcgctctcctagctcttntgtgcaagcgccactatgtgcgacccatattccagggcacttgccaccagtcatgccattgggtaccatgaacccatgcatgcagtactgcggggggcaacaggggcttgccagcttgatggcgtgtccgtccctgatgctgcagcaactgttggccttaccgcttcagacgatgccagtgatgatgccacagatgatgacgcctaacatgatgtcaccattgatgatgccgagcatgatgtcaccaatggtcttgccgagcatgatgtcgcaaatgatgatgccacaatgtcactgcgacgccgtctcgcagattatgctgcaacagcagttaccattcatgttcaacccaatggccatgacgattccacccatgttcttacagcaaccctttgttggtgctgcattctagatagaaatatttgtgttgtatcgaataatgagttgacatgccatcgcgtgtgactcattattaacaataaaacaagtttcctcttattatc

SEQ ID NO: 9655 - DNA, 189 bp, Zea mays
  unsure (1)..(189): unsure at all n locations; Clone ID: LIB3061-106-Q1-K6-H8
ccgggtcgacgctgcgcgagcggacgatttcgacgatcgaccagatggtggggggagccgccgacgcgtaaagcgcgccggtttcgccgaagtacggatgcgcgacccggtaggccacccagggcagcagcaggttgacgaagagttcgaggatcagtccggctcgcggnttcacggntcgccattcca

SEQ ID NO: 9656 - DNA, 631 bp, Zea mays
  unsure (1)..(631): unsure at all n locations; Clone ID: LIB3061-062-Q1-K6-A3
aaaaccccggtcgtcccagcgtttttgttttggaagagaaacagccaatatcagtatcaaggtcaaatggaaggatcacagtcagctacagctacatattatttgttaatgaggcacggcaaggaatttaatgcatatcctgctggctcttggtttaatttcagtaaaattgcacagtacaaacaattgacactggaggaggctgaagaaaagatgaataagaggaagaccagtgcaactggttatgaacgctggatgatgaaagcagcggcaaatggaccagctgcctttggttcagacatgaagaagcttgaggccacaaatggtggggaaaaagaaagtgctcgtcctaagaaaggaaaaaataatgaagagggtaataattctgataagggtgaggaggatgaagaagaggaagcaacacgcaagaatagacttggactaactaaaaagggcatggatgatgatgaggaaggtggaaaagatctagatttcgatttggatgatgaaattgagaaaggtgatgactgggagcatgaagaaacattcactgacgatgatgaggctgtagacattgatccagaagaacgggcagatntagctcctgaaatttctgctccacctgaaatca

SEQ ID NO: 9657 - DNA, 571 bp, Zea mays
  Clone ID: LIB3061-062-Q1-K6-A4
cagtatcaaggtcaaatggaaggctcacagtcagctacagctacatattattcgctaatgaggcacgcgcaaggtaatttaatgcatatcctgctggctctcggtttaatttcagttaaactgctcagtacaaacaattgacactggcaggaggcgtgaagccaaagatgaatcagaggaagaccagtgcaactggttatgaacgctggatgatgaaagcagcggcaatatggaccagctgcctttggttcacacatgaataagcttgtggccacaaatggtggggaaaaagaaagtgctcgtcctaagaaaggaaaaaataatgaacagggtaataattccgataagggtgaggaggctgacgaagaggaagcaacacgcaagaatagacttgggctaactcaaaagggcatggatgatgatgaggaatgtggaaaacactacatttcgattcggatgatgaaattgacgaaatgtgatgactgggagcctgaagaaacattcactgacgatgatgaggctgcagacattgttcccagagaacgggcacatttagctccctgaaattcct

SEQ ID NO: 9658 - DNA, 578 bp, Zea mays
  Clone ID: LIB3061-062-Q1-K6-A8
ggatacagtagcaacaatagagcaacaatggcggccaagatattttccatccttatgctccttgctctttctgcatgtgttgctaacgcgaccatttttcctcaatactcacaagctcctatagctgcccttcttcccccataccttccatcaatgaccgcttcagtttgtgaaaacccagcccttcaaccctacaggctccaacaagcaatcgcaacaagcaacttacctttatcacccctgttctttcaacaatcgccagccctatctttggtgcagtcattggtacaaaccatcagggcacaacagctgcaacaactcgtgctaccagtgatcagccaagtagctctggcaaacctttctccctactctcagcaacaacaatttcttccattcaaccaactgtctacactgaaccctgctgcttatttacaacaacaacaactactaccattcagccagctagctactgcctactctcagcagcaacaatttcttccatttaaccaattggccgcactgaacccctctgcttatttccagcagcaaatactactaccatttggccagctagctac

SEQ ID NO: 9659 - DNA, 508 bp, Zea mays
  Clone ID: LIB3061-062-Q1-K6-B2
cattagcaacaatagagcaacaatggcgaccaagatattttccctccttatgctccttgctctttctacatgtgttgctaacgcgacaattttccctcaatgctcacaagctcctatagcttcccttcttcccccataccttccatcaattatagcttgagtatgtgaaaacccagctcttcaaccatataggcttcaacaagcaatcgcagcaagcaacatacctttatcgcccttgttgtttcaacaatcaccagccctatctttggtgcagtcattggtacaaaccatcagggcacaacagctgcagcaactcgtgctacctgtgatcaaccaagtagctctggcaaacctttctccctactctcagcaacaacaatttcttccattcaaccaactgtctacactgaaccctgctgcttatttgcagcaacaactattaccatttagcccgctagctactgccctactctcagcaacaaccaacttcttccatttaaccaattgg

SEQ ID NO: 9660 - DNA, 620 bp, Zea mays
  Clone ID: LIB3061-062-Q1-K6-B3
gggtcgtcccagcgttcttttaacgcgacattttccctcaacgctcacaagctcctatagcttcccttcttcccccataccttccatcaatgatagcttcagtatgtggaaaacccagctcttcagccctataggctccaacaagcaatcgcagcaagcaacatacctttatcacccttggtggttcaacaatcgccagccctatctttggtgcagtcattggtacaaaccatcagggcacagcagctgcagcaactcgtgctacctgtgatcaaccaagtagctctggcaaacctttctccctactctcagcaacaacaatttcttccattcaaccaactgtctacactgaaccctgctgcttatttgcagcaacaactattaccattcagccagctagctactgcctactctcagcaacaacaacttcttccatttaaccaattggccgcactgaaccccgctgcttatttgcagcagcaaatactactaccatttagccagctagctgcagcaaaccgtgcttccttcttgacacagcaacagttgctgcctttctaccagcagtttgcgggtaaccccgcaaccctcttacaactacaacaattgttgccctttgt

SEQ ID NO: 9661 - DNA, 644 bp, Zea mays
  unsure (1)..(644): unsure at all n locations; Clone ID: LIB3061-062-Q1-K6-C3
ccggtcgacccagcgtccgcagnccattagctttatctactccagagcgcagaagaacccgatcgacaccatgagggtgttgctcgttgccctcgctctcctggctctcgctgcgagcgccacctccacgcatacaagcggcggctgcggctgccagccaccgccgccggttcatctaccgccgccggtgcatctgccacctccggttcacctgccacctccggtgcatctcccaccgccggtccacctgccgccgccggtccacctgccaccgccggtccatgtgccgccgccggttcatctgccgccgccaccatgccactaccctactcaaccgccccggcctcagcctcatccccagccacacccatgcccgtgccaacagccgcatccaagcccgtgccagctgcagggaacctgcggcgttggcagcaccccgatcctgggccagtgcgtcgagtttctgaggcatcagtgcagcccgacggcgacgccctactgctcgcctcagtgccagtcgttgcggcagcagtgttgccagcagctcaggcaggtggagccgcagcaccggtaccaggcgatcttcggcttggtcctccagtccatcctgcagcagcagccgcaaagcggccaggtcgcggggc

SEQ ID NO: 9662 - DNA, 64 bp, Zea mays
  unsure (1)..(64): unsure at all n locations; Clone ID: LIB3061-062-Q1-K6-D1
aagaaaaaagaaggggggggggggagagaggaaggagaggttntaggaggggggnggggggggg

SEQ ID NO: 9663 - DNA, 522 bp, Zea mays
  unsure (1)..(522): unsure at all n locations; Clone ID: LIB3061-062-Q1-K6-D6
gnaaatgtctacactgnaaccctgctgcttatttgcagcaacaactattaccatttagccagctagctactgcctactctcagcaacaacaacttcttccatttaaccaattggccgcactgaaccccgctgcttatttgcagcagcaaatactactaccatttagccagctagctgcagcaaaccgtgcttccttcttgacacagcaacagttgctgcctttctaccagcagtttgcggctaaccccgcaaccctcttacaactacaacaattgttgccctttgtccaacttgctttgacagacccagcggcctcctaccaacaacacatcattggtggtgccctcttttagattgcttattagttgtaattcaataataaagttttttggatgatgtatgtggccaaccagaaataagaagttacatttccaaaaaaaaaaaaaaaaaaaaaaaaaaaaaaaaaaaaaaaaaaaaaaaaaaaaaaaaaaaaaaaaaananaaaaaaaaaaaaaaaanana

SEQ ID NO: 9664 - DNA, 605 bp, Zea mays
  Clone ID: LIB3061-062-Q1-K6-D8
acaatagtgtaccaacaatggcagccaaaatttttgcttccttatgctccttggtctttctgcaagtgctgctaccgcaaccattttcccacaatgctcacaagctcctatagcttcctttcttcccccatacctctcaccagcggtgtcttcagtatgtgaaaacccaattcttcaaccctacaggatccaacaggcaatcgcagcaggcatcttacctttatcacccttgttcctccaacaaccgtcagccctattacagcagttacctttggtgcatttgttggcacaaaacatcaaggcacaacaactacaacaacttgtgctaggaaaccttgctgcctactctcagcaacagcagtttcttccattcaaccaactggctgcattgaactctgctgcttatttgcaacaacaactaccattcagtcagctagctgctgcctacccccagcaatttcttccattcaaccaactggcagcattgaactctgctgcttatttacaacagcaacagctaccaccattcagccagctagctgatgtgagccctgttgccttcttgacacaacaacagttgttgccgttctacctgcacgctgcga

SEQ ID NO: 9665 - DNA, 615 bp, Zea mays
  Clone ID: LIB3061-062-Q1-K6-D9
taccaacctagcaaaatacatagtgaagtacactagcaacatcttagcaccaatgggagccaagatttttttccctccttgccctccttgctctttcagcaagcgctgctacctctactattattccacaatgctcacaacaatacctctctccggtgacagccgcgggatttcaacacccaactatacaatcctacatgctacatgaggccatcgtagcaagcatcttacggtcattagcattaaccctccaacagccatatgccctattgcaacaaccatccttagtgcatctgtatctccaaagaatcgcgacacaacaactacaacaacagttgctaccaacaatcaatcaagtagttgcagcgaaccttgctgcttatctccagcaacaacaatttcttccattcaatcaactagctggggtgaaccctgctgtctacttgcaggcacaacaactactaccatttaaccaacttgtcgggagccctgatgccttcttactgcaacaacagcttctgccattccatctgcaagctgtggaaaacattgcttctttcttgcgacaacaacaattgttgccattttacccacaggttgtgggaaacattaatg

SEQ ID NO: 9666 - DNA, 593 bp, Zea mays
  Clone ID: LIB3061-062-Q1-K6-E12
catcttaccattatcacccttgggcctccaacaaccgtcagccctattacagcagttacctttggtccatttggtggcacaaaacatcagggcacaacaactacaacaacttgtgctagcaaaccttgctgcatactctcagcaacatcagtttcttccattcaaccaactgggggggtggaactctgctgcttatttgcaacaacaattaccattcagccagctagttgctgcctacccccagcaatttcttccattcaaccaactagcagcattgaactctgctgcttatttacagcagcaacaactactaccattcagccagctagctgatgtgagccctgctgccttcttgacacaacaacagttgttgccgttctacctgcacgctatgcctaacgctggcaccctcttacaactgcaacaattgctgccattcaaccaacttgctttgacaaacccaacagtgttctaccaacaacccatcattggtggtgccctcttttagattgcttatgagttatagttcaataatgaagttttttggatgatgtttgtggcgtcccagaaataagaaagtacatttctagatt

SEQ ID NO: 9667 - DNA, 112 bp, Zea mays
  Clone ID: LIB3061-062-Q1-K6-F1
gttgtataccaactaacaacatacaaaagcacaatagtgctaccaacaatggcagaccaaaatatttctgtcttccttcagactctttgatactttgctgcaagtgattgct

SEQ ID NO: 9668 - DNA, 605 bp, Zea mays
  Clone ID: LIB3061-062-Q1-K6-F12
tgttactgcattagaactttcaaactatcctcgggttatggattatcttgataatgctacaaccaaagtgatggctgtggtaataattcaaagcataatgaaaaacacaacctgcatatctacttctgacaagattgaggcactattcgatttaattaaggggctgataaaggatatggatggagctcaagatgatgagcttgatgaagaagactttaaggaggaacaaaactctgtagcgcgtctcattcacatgctgcacaatgatgatcctgaagagatgctgaagatcttatgtactgtacagaagcatatacttcagggaggccccaagcgtctaactttcactgtgccttcgttagtattctcttctcttaagctggtcaggcgattacaaggccaagatggagatgtcactggggaggatgttcctgcaactccaaagaaaatattccagatattgcatcagactattgaagcactttcttgtgttccttctccagagttagctctgagactatatttgcagtgtgcagaggctgccaatgactgtgatttggaaccagttgcttatgagttctttactcaagcgttcattttatatg

SEQ ID NO: 9669 - DNA, 410 bp, Zea mays
  Clone ID: LIB3061-062-Q1-K6-F2
ctactttcatctagcccgctcgcggtgggcaatgcacctacgtacctacaacaacagttgctgcaacaaattgtaccagctctgactcagctagctgtggcaaaccctgctgcctacttacaacagttgcttccattcaaccaactggctgtgtcaaactctgctgcgtacctacaacagcgacaacagttacttaatccattggcagtggctaacccattggtcgctaccttcctgcagcagcaacaacaattgctgccatacaaccagttctctttgatgaaccctgccttgcagcaacccatcgttggaggtgccatcttttagattacatatgagatgtactcgacaatggtgccctcataccgacatgtgtttcctagaaataatcaatatattgattgagattt

SEQ ID NO: 9670 - DNA, 486 bp, Zea mays
  Clone ID: LIB3061-062-Q1-K6-G1
gatcaaccatagatgcatactgaaacaataaagcctacatgcagctacgacacgacctctccattaataacaactgagtacactgtaccctgcagaaaataagcagggccaactgttataaaggaccaagctaacttccgcctacttgcaacatcatcaattttttatattgaaacaaaagtccaatctagtagccgctgcttacaagcagcagcaaagactactgccattcagcgagctagctgcagcaaggcgtgctatcttcttgacacagcaacaggtgctgcctttctacaagcagcttgcggctaaccccgcaaccctcttacaactacaacaattgttgacctttgttcaacttgctttgacaaacccagcagcctgctaccaacaacacatcattggcggtgccctgttttagatcgtttattacttgtaattcaataataaacttttttggatgatgtatgtggccaaccagaaata

SEQ ID NO: 9671 - DNA, 413 bp, Zea mays
  unsure (1)..(413): unsure at all n locations; Clone ID: LIB3061-062-Q1-K6-G10
anacgatgtccgatctgattctgagatgaggagtaatgggagaatcattctttgacatctgcaacgtggcatttcctcgtcaatacttttctatgcctgcttccagaattgattgcttttaatcttggcaagtctcgggaacgtataggaaagtttaatctctgtatattgccttatgatatcaaacatggctagaccgggaatggatctatacatgatgacgggcatagctagcaagcttacttcaaggttccttaaaaaattttggttcacctttatttgatatggggaaagacatgagagggtgtacagctttttcctgaagcttgcagaacccccctctgtaccatgatcaatatacttcacttgtgagtagatttagttctaattgatgataataaattgattctttt

SEQ ID NO: 9672 - DNA, 617 bp, Zea mays
  unsure (1)..(617): unsure at all n locations; Clone ID: LIB3061-062-Q1-K6-G3
agcaacatagnaaagcacaatagtgtaccaacaatggcagccaaaatttttgcttccttatgctccttggtctttctgcaagtgttgctaccgcaaccattttcccacaatgctcacaagctcctatagcttcccttcttcccccatacctctcaccagcggtgtcttcaatgtgtgaaaacccaattgttcaaccctacaggatccaacaggcaatcgcaacaggcatcttaccattatcacccttgttcctccaacaaccgtcagccctattacagcagttacctttggtccatttggtggcacaaaacatcagggcacaacaactacaacaacttgtgctagcaaaccttgctgcatactctcagcaacatcagtttcttccattcaaccaactggctgcattgaactctgctgcttatttgcaacaacaattaccattcagccagctagttgctgcctacccccagcaatttcttccattcaaccaactagcagcattgaactctgctgcttatttacagcagcaacaactactaccattcagccagctagctgatgtgagccctgctgccttcttgacacaacaacagttgttgccgttctacctgcacgct

SEQ ID NO: 9673 - DNA, 610 bp, Zea mays
  unsure (1)..(610): unsure at all n locations; Clone ID: LIB3061-062-Q1-K6-G4
gtcgacccagcgttcgcatctcgcagccgcagctagttacagttcagagagaagaaananaccgagatctcgccgatagctagcatcatggcgtccaaggcgctcctcgtgctaacgctcctgctcgccgccaccttcctcgccgcctccgctaacgagcaagccaaggcggccaaagaggagaagaaggtggaggtccaagactggcacggcggcggcggctacccgggtcacggcggcggcggcggcggcggctacccgcactgccggtggggctgctgcaaccgcgggtaccatggcggctgccggtgctgctcgcaccctgatcagataccagagcccatgtaccgtcctgagctcgtcgaggtccacaactaaatagtatacgggtacgtatgccccgatgggaatgaatgggaagcaagagcacacgcgtagtacgctcgtcgtagtagtcaataaaagtttggttccatcaccgtcatgaaataaaagtaaggaggttgcacgctttgtgtgcgtgcttggaaacgtcgactgtatctcatgcatcgaataaatagatgttaatgaatatcattgggacaactttttacggaacataaaatca

SEQ ID NO: 9674 - DNA, 565 bp, Zea mays
  Clone ID: LIB3061-062-Q1-K6-H11
caatggcgaccaagatattttccctccttatgctccttgctctttctacatgtgttgctaacgcgacaattttccctcaatgctcacaagctcctatagcttcccttcttcccccataccttccatcaattataggtggggggggggaaaactcatctcttcaaccatataggcttcaacaagcaatcgcagcaagcaacatacctttatcgcccttgttgtttcaacaatcaccagccctatctttggtgcagtcattggtacaaaccatcagggcacaacagctgcagcaactcgtgctacctgtgatcaaccaagtagctctggcaaacctttctccctactctcagcaacaacaatttcttccattcaaccaactgtctacactgaaccctgctgcttatttgcagcaacaactattaccatttagccagctagctactgcctactctcagcaacaacaacttcttccatttaaccaattggccgcactgaaccccgctgcttatttgcagcagcaaatactactgccatttagcgagctagctgcagcaagtcgtgcttc

SEQ ID NO: 9675 - DNA, 641 bp, Zea mays
  unsure (1)..(641): unsure at all n locations; Clone ID: LIB3061-062-Q1-K6-H3
aaccccggtcgacccagcgttcgttccgncatcctactttcgtcctcacgagtgaccgataatccgccggcgctaagatgttggtttatcaagatctcctatctggcgacgagctcctgtcggattcattcacctacaaggagctcgagaacggcgtcctgtgggaggtcgagggaaagtgggtcacccaaggtcctgttgatgtagacattggtgccaatccatccgccgagggtggtgaggacgaaagcgttgatgacacagccgtgaaggtggttgatattgttgacacattccgtctacaggagcaacctccttttgacaagaaatcatttgtctcttacattaaaaaatacatcaagaatctcactgctgtgttggagccagagaaagcggatgagttcaaaaagggtgtcgagggtgcaaccaagtttctccttagcaagctgaaggaccttcaattttttgttggtgagagcatgaaggatgatgcgtccgtggtattcgcctattacaaggatggtgccactaatccgacattcctctatttctctcatggtcttaaggagatcaagtgctaggcttgcggcgagattagttacccatgttgggtactatctatgtactattgttatatccac

SEQ ID NO: 9676 - DNA, 598 bp, Zea mays
  unsure (1)..(598): unsure at all n locations; Clone ID: LIB3061-063-Q1-K6-A10
gngacttcagnaacacaccaagcgagacacattagcaacaacctaacaacaatggctaccaaggaattatccctccttgcgcttcttgcgctttttgcgagcgcaacaaatgcgttcattattccacaatgctcacttgctccaagttccattattacacagttcctcccaccagttacttcaatgggcttcgaacacccagctgtgcaagcctataggctacaacaagcaattgcggcgagcgtcttacaacaaccaatttcccagttgcaacaacaatccttggcacatctaacaatacaaaccatcgcaacgcaacagcaacaacaattcctaccagcactgagccacctagccatggtgaaccctgccgcctacttgcaacagcagttgcttgcatcaaacccacttgctctggcaaacgtagttgcaaaccagccacaacaacagctgcaacagtttctgccagcgctcagtcaactagccatggtgaaccctgccgcctacctacaacagcaacaactgctttcatctagcccgctcgctgtggccaatgcacctacatacctgcaacaacaattgttgcaacagattgtac

SEQ ID NO: 9677 - DNA, 622 bp, Zea mays
  Clone ID: LIB3061-063-Q1-K6-A2
agcacatatatgcacaatatgtaccaacaatggcagccaaaaattttgcctccttatgctccttggtctttctgcaagtgctgctacggcgaccattttcccgcaatgctcgcaagctcctatagcttcccttcttcccccgtacctctcaccagcggtgtcttcggtatgtgaaaacccaattcttcaaccctacaggatccaacaggcaatcgcagctggcatcttacctttatcacccttgttcctccaacaatcatcagccctattacaacagttacctttggtgcatttattggcacaaaacatcagggcacaacaactacaacaacttgtgctagcaaaccttgctgcctactctcagcaacagcagtttcttccattcaaccaactaggttcattgaactctgcttcttatttgcaacaacaacaactaccattcagccagctacctgctgcctacccccagcaatttcttccattcaaccaactagcagcattgaactctcctgcttatttacagcagcaacaactactaccattcagccagctagctggtgtgagccctgctaccttcttgacacaaccacagttgttgccgttctaccagcacgttgcgcca

SEQ ID NO: 9678 - DNA, 635 bp, Zea mays
  unsure (1)..(635): unsure at all n locations; Clone ID: LIB3061-063-Q1-K6-A3
cccgggtcgtacccacgccgtttttgtcaagcaacattatttagtagnaacccattagcaacaatagagcaacaatggcgaccaagatattttccctccttatgctccttgctctttctacatgtgttgctaacgcgacaattttccctcaatgctcacaagctcctatagcttcccttcttcccccataccttccatcaattatagcttcagtatgtgaaaacccagctcttcaaccatataggcttcaacaagcaatcgcagcaagcaacatacctttatcgcccttgttgtttcaacaatcaccagccctatctttggtgcagtcattggtacaaaccatcagggcacaacagctgcagcaactcgtgctacctgtgatcaaccaagtagctctggcaaacctttctccctactctcagcaacaacaatttcttccattcaaccaactgtctacactgaaccctgctgcttatttgcagcaacaactattaccatttagccagctagctactgcctactctcagcaacaacaacttcttccatttaaccaattggccgcactgaaccccgctgcttatttgcagcagcaaatactactgccatttagcgagctagctgcagcaagtcgtgct

SEQ ID NO: 9679 - DNA, 505 bp, Zea mays
  Clone ID: LIB3061-063-Q1-K6-B3
cacaacaactacaacaacttgtgctagcaaaccttgctgcctactctcagcaacagcagtttcttccattcaaccaactaggttcattgaactctgcttcttatttgcaacaacaacaactaccattcagccagctacctgctgcctacccccagcaatttcttccattcaaccaactagcagcattgaactctcctgcttatttacagcagcaacaactactaccattcagccagctagctggtgtgagccctgctaccttcttgacacaaccacagttgttgccgttctaccagcacgttgcgcctaacgctggcaccctcttacaactgcaacaattgctgccattcaaccaacttgctttgacaaacccagcagtgttctaccaacaacccatcattggtggtgccctcttttagatttcttatgagttatagttcaataataaagttttttatctgatgtttgtggcttcccagaaataagaaagtacatttctagattc

SEQ ID NO: 9680 - DNA, 614 bp, Zea mays
  Clone ID: LIB3061-063-Q1-K6-B9
cccggcctccggcaacttccgcggccttgccttcctctgcttcgagtcagaagaagatgcaataaagtctcttgagcttgatggattcaaaattggcagcagatacatgagggttgaaaggtgcagggtgacggccacctcaaacaagaagaggaaggcagagttcgaaaccgaccccaagaagtccgaaggctgcctctcggcatatgttggcaacctctcatggaacgtggacgaaaacgacttgcgaggtttcttcgggccgtcgaagattgcatcggtaaggtttgccgtcgacaaaagaaccgggggttcccgtggcttctgccatgtcgaatttcaagacgacgagtcgctcgagaaggccatagcgatgaaccagtcgaaactgcagggcaggcctgtcaaagtggcgtattcagtcagcaaccggggctgaagagcgccgccccgtcgccagcggttatagtaccagtgaacttgtagtgttatggtttccgctccttcagtttcggttaggctttacggtgtggctaccagcagtaccagtgtgagcttgtagtgagacggtttcgctccctcagttttggcttaagcttttttttcgccgcttt

SEQ ID NO: 9681 - DNA, 603 bp, Zea mays
  Clone ID: LIB3061-063-Q1-K6-C1
ggtccggatatcgtgcccacctcgttacttacttagagcaggacccacgcctggcagccaagatgcttgcattgttcgctctcctagctctttgtgcaagcgccactagtgcgacccatattccagggcacttgccaccagtcatgccattgggtacccatgaacccatgcatgcagtactgcatgatgcaacaggggcttgccagcttgatggcgtgtccgtccctgatgctgcagcaactgttggccttaccgcttcagacgatgccagtgatgatgccacagatgatgacgcctaacatgatgtcaccattgatgatgccgagcatgatgtcaccaatggtcttgccgagcatgatgtcgcaaatgatgatgccacaatgtcactgcgacgccgtctcgcagattatgctgcaacagcagttaccattcatgttcaacccaatggccatgacgattccacccatgttcttacagcaaccctttgttggtgctgcattctagatagaaatatttgtgttgtatcgaataatgagttgacatgccatcgcgtgtgactcattattaacaataaaacaagtttcctcttaaaaaaatttaaaa

SEQ ID NO: 9682 - DNA, 605 bp, Zea mays
  unsure (1)..(605): unsure at all n locations; Clone ID: LIB3061-063-Q1-K6-C11
cccgggcagcaagacggcagtgtcgtagnaggggatcgtcgacagnacaggatgagggaggtcatcgttctcgtcgtgtgcctggctctgtcagctgccagcgcctctgcaatgcagatgccctgcccctgcgcggggctgcagggcttgtacggcgctggcgccggcctgacgacgatgatgggcgccggcgggctgtacccgtacgcggagtacctgaggcagccgcagtgcagcccgctggcggcggcgccctactacgccgggtgtgggcagccgagcgccatgttccagccgctccggcaacagtgctgccagcagcagatgaggatgatggacgtgcagtccgtcgcgcagcagctgcagatgatgatgcagcttgagcgtgccgctgccgccagcagcagcctgtacgagccagctctgatgcagcagcagcagcagctgctggcagcccaaggtctcaaccccatggccatgatgatggcgcagaacatgccggcccatggtggactctaccaataccagctgcccaactacccgaccaacccctggggcgtcttcgctggcattccggcctactactggattatgatatttgggaa

SEQ ID NO: 9683 - DNA, 609 bp, Zea mays
  unsure (1)..(609): unsure at all n locations; Clone ID: LIB3061-063-Q1-K6-C4
tcttacgcaaatgcactcaanaaatccatcgaggggccgtcngacaggggaattaatggcgtcgtcgtctagcagcagccaccgccgcctcatcctcgcagccgccgtcctgctctccgtgctcgcggctgccagcgccagcgccgggacctcctgcgtgccggggtgggccatcccgcacaacccgctcccgagctgccgctggtacgtgaccagccggacctgcggcatcgggccgcgcctcccgtggccggagctgaagaggagatgctgccgggagctggcggacatcccggcgtactgccggtgcacggcgctgagcatcctcatggacggcgcgatcccgccgggcccggacgcgcagctggagggccgcctagaggacctgccgggctgcccgcgggaggtgcagaggggattcgccgccaccctcgtcacggaggccgagtgcaacctggccaccatcagcggcgtcgccgaatgcccctggattctcggcggcggaacgatgccctccaagtaactgcgaagagcatagtgcatgaggaatgagcttgtagctagctcatatgtctgaataataagcacagcaagaagatgaatgcattt

SEQ ID NO: 9684 - DNA, 280 bp, Zea mays
  unsure (1)..(280): unsure at all n locations; Clone ID: LIB3061-063-Q1-K6-D1
gggggggggggcctttttctccccccctggggggggaaggggagggagggggggggnaaaaaaaaaaaaaatcccccccccccgggggggggggggggaaacaaaaaaaaaaaacacccgcgcgggggggggggggttatttatttttttttttnntngggggggggggggggggggggggccgggccccccccccccccccccccccnnnnggagggggggggggggtttttttctccccccggcgnnnnnngggnggggggggggggggggggggggg

SEQ ID NO: 9685 - DNA, 409 bp, Zea mays
  unsure (1)..(409): unsure at all n locations; Clone ID: LIB3061-063-Q1-K6-D2
acgcgacaancnnngcccgtcaatggctcacnnaagctgcctatagcttgccctgtctnntcccccataccccttccatncaatgtagtggggtggggtggtnngtgaagaacccagctcgttcaaccattatagggcttcaacaaggcaagtcgcgagcaaggcannacatacgctttatgcgcgcctttggttggtgttcaacccaatcgncccagcccgtatcgtttgggtggcagtngcattgggtaccaanaaccatcaggggcnaccaacagctggcanngcaactcgtggctgacctgtgggatcaaccaagttagcctctgggcaannacctttcgtccctaccctctcagcaaccaacaattttctttccatgtcaacccaactggtctacactggaacc

SEQ ID NO: 9686 - DNA, 637 bp, Zea mays
  unsure (1)..(637): unsure at all n locations; Clone ID: LIB3061-063-Q1-K6-D3
cccggtcgacccagcgttcttaacaagcaacatattaagtggnaatccagtagcaacaacanagcaacaatggcgaccaagatattttccctccttatgctccttgctctttctgcatgtgttgctaacgcgacaattttccctcaatgctcacaagctcctatagcttcccttcttcccccataccttccatcaatgatagcttcagtatgtgaaaacccagctcttcagccctataggctccaacaagcaatcgcagcaagcaacatacctttatcacccttgttgtttcaacaatcgccagccctatctttggtgcagtcattggtacaaaccatcagggcacagcagctgcagcaactcgtgctacctgtgatcaaccaagtagctctggcaaacctttctccctactctcagcaacaacaatttcttccattcaaccaactgtctacactgaaccctgctgcttatttgcagcaacaactattaccattcagccagctagctactgcctactctcagcaacaacaacttcttccatttaaccaattggccgcactgaaccccgctgcttatttgcagcagcaaatactactaccatttagccagctagctgcagcaaaccgtgcttccttct

SEQ ID NO: 9687 - DNA, 494 bp, Zea mays
  Clone ID: LIB3061-063-Q1-K6-D6
aacaatggcgaccaagaggttgtccctccttatgctccttggtcctcctgcatgtgttgctgacgcgacaatcgcaccttagtgctcacaggctcctatagcttgccttcttcccccatcaccttccatcattgaggggggggggggtgtcaaaacccagctcttcagccctattggctgcagcaagcaatcgcagccagcaacatacccttatcacccttggtggctcaacactcgccagccctctctccggtgcagcccttgggccacaccatcagggcacaccggcatgccggacctcgagctacctgggatcaaccaacctactctggccaacctttgtccctactctcaccatcagctctgtcttgcatactaccaactggttacactgcaaccctggtgcttgtttgtgccaacgcctatttccattcacccaggctaactgctgcctactcttacaaacaacaactatttccatttaccccattggt

SEQ ID NO: 9688 - DNA, 625 bp, Zea mays
  unsure (1)..(625): unsure at all n locations; Clone ID: LIB3061-063-Q1-K6-E1
ccgggtcgnacccacgccgtccgtgttcggnagcgcacacacacgcaaccatatctcccccaaatccagccgtcggcacctccgcttcaagatgcagatctttgtgaaaaccctgactggcaagactatcaccctcgaggtggagtcgtctgacaccattgacaacgttaaggccaagatccaggacaaggagggcatccccccagaccagcagcggctcatcttcgctggcaaacagcttgaggacgggcgcacgcttgctgactacaacatccagaaggagagcaccctccaccttgtgctccgcctcaggggaggcatgcagatcttcgtgaagaccctgaccggcaagactatcaccctcgaggtggagtcctccgacaccattgacaacgtcaaggccaagatccaggacaaggagggcatccctccagaccagcagcggctcatctttgctgggaagcagcttgaggacgggcgcacgcttgccgactacaacatccagaaggagagcaccctccacttggtgctgcgcctcagaggaggcatgcagatcttcgtgaagaccctgaccggcaagactatcaccctcgaggtagagtcttcagacaccatcgacaacgtc

SEQ ID NO: 9689 - DNA, 614 bp, Zea mays
  unsure (1)..(614): unsure at all n locations; Clone ID: LIB3061-063-Q1-K6-E10
ttaacacacctagcgaacgcactagcaacgacctaacaacaatggcttccaagacattatccctccttgcgcttcttgccctttttgtgagtgcaacaaatgcgttcattattccacaatgctcacttgctccgagtgccattattccacagttcctccctccagttacttcaatgggctgggggcacccagctgtgcaagcctataggctacaacaagcgcttgcggcgagcgtcttagaacaaccaattgcccaattacaacaacaatccttggcacatctaaccatacaaaccatcgcaacgcagcagcaacaagcactgagccacctagccgtggtgaaccctatcgcctacttgcaacaacagctgcttgcatccaacccacttgctttggcaaacgtagctgcataccaacaacaacaacagttgcaacagtttctaccagcgctcagtcaactagccatggtgaaccctatcgcctacctacaacagcaacaacttctntcatctagcccgctcgctatgggcaatgcacctacatacctgcaacaacagttgttgcaacaaccgttgctgcaacaaattgtaccagcttcttactcagctagctgt

SEQ ID NO: 9690 - DNA, 614 bp, Zea mays
  Clone ID: LIB3061-063-Q1-K6-E9
gcccattgccatttccagcgtctcgtctcgctgtatcgttcggtctcccacccctttcccctcttcgtcgatctcaccaccgcgccgaccccgatggcctccgccgcctcatcggccgccgccgctggcaaatcgctgttccaggggttccgcaggttcctcaaaaagccgtgggagatcacgggcccctgcgcctcgcccgagtaccgcagcgcgctgcctggcgcgctcgagtaccgcgtcaagtgcccggccaccgtgcgcgacgaccgcgacaaggccatcgtgcccacatccgatccggagacagtctacgacatcaagtacttcacccgcgaccgccgccggaaccgtccgcccgtgcgccgcaccctgctccgcaagcccgacctcgagcgctacatggtcaccaagcagtttgaccccaccaaggacttccccgtgccatacgtcaacaccactgtcgaggaggacgacaacacggtcggcggtggctaccagaaatgatccaggaaagcttactgatttgatgctggttaatttgccaggcatccttgttgtgcttggactccatgagcagctgcacaaatttcgtttcagctttcaaatatctc

SEQ ID NO: 9691 - DNA, 586 bp, Zea mays
  unsure (1)..(586): unsure at all n locations; Clone ID: LIB3061-063-Q1-K6-F1
cggcatcacgcgnaagcaggnagtaaataaatggcgcagctggtggagacgtacgcgtgctcgccggcgacggaacgcggccgtggaatcctcctggccggggaccccaagacggacacgatcgcctactgcaccggccgcagcgtcatcattcgccgcctcgatgcgcccctcgacacttgggtctaccccgaccacgcctaccccaccaccgtcgcccgcttctcccccaacggcgagtgggtcgcctccgccgacgcctccggctgcgtccgcgtctggggccgctacggcgaccgcgcgctcaaggccgagtttcgccccctctcgggacgcgtcgacgacctccgctggtccccggacggcttacgcatcgttgtctccggggacggcaagggcaagtccttcgtccgcgcattcgtatgggactctggcagcacagttggtgagtttgatgggcactcaaagagggttctgagctgtgacttcaagccaacacgtccatttcgcattgtgacatgcggggaagattttctggctaacttttatgaaggaccgccattcaaattcaagcattccataaggg

SEQ ID NO: 9692 - DNA, 605 bp, Zea mays
  Clone ID: LIB3061-063-Q1-K6-F8
atgatacgaaactagcaacatacatagtgaatacactagcaacatcttagcaccaatggcagccaagatttttgccatccttgccctccttgctctttcagcaagcgttgctaccgcgactattattccacaatgctcacaacaatacctctctccggtgacagccgcgagatttgaatacccaactatacaatcctacaggctacaagaggccatcgcagcaagcatcttacggtcgttagcattgaccgtccaacaaccatatgccctattgcaacaaccatccttaatgaatctatatctccaaagaatcgcagcacaacaactacaacaacagttgcttccaacaatcaatcaagtagttgcagcgaaccttgctgcttacctccagcaacaacaatttcttccattcaatcaactagctggggtgaaccctgctgcttacttgcaggcacaacagctactaccattcaaccaacttgtcaggagccctgctgccttcttactgcagcaacagttgcttccattccatctacaagttgtggcaaacattgctgctttcttgcaacaacaacaacaattgctgccattttacccacaggttg

SEQ ID NO: 9693 - DNA, 614 bp, Zea mays
  unsure (1)..(614): unsure at all n locations; Clone ID: LIB3061-063-Q1-K6-G1
gtcgacccagcgtccgttttacaatctcactcaggccaccacgcattcccaaanactgcagcaatcgcaccagcctgatataaccctataagtctataacccttttttcagaaatatgattgtttctcattttggagctaaggtgtaacagaatcagcatcccaaaactgagggccaagagtcatggaagtaggtgcacccgcttatcggcggtgcaggcactgctcattattgttggcacctttgtcagtgggggtactatggattcagcttccatacttcacagccttgcatgtaacagttgggtttcggatctcgtcctggctttggatcaacctgatctctaagctgctggtcgatgggtcgaagccggccattttatagtcttccacagttcttttcagaagtgcctgcaaactggaaactgccagttctgccgctttctcgaggctatcaggatatttattactccatcctagtaggagagcagttgtcaaatctccagttcccgtgaaatatgcaggtatctttggtatctcaatcttaaattgttctggctgttgttcctctgtttttttgtgacttccgataaggagcagcttgccttcaataag

SEQ ID NO: 9694 - DNA, 616 bp, Zea mays
  unsure (1)..(616): unsure at all n locations; Clone ID: LIB3061-063-Q1-K6-G11
aactagncaacatagnaaagcacaatagtgggccaacaatggcagccaaaaattttgcctccttatgctccttggtctttctgcaagtgctgctacggcgaccattttcccgcaatgctcgcaagctcctatagcttcccttcttcccccgtacctctcaccagcggtgtcttcggtgtggggggaacccaattcttcaaccctacaggatccaacaggcaatcgcagctggcatcttacctttatcacccttgttcctccaacaatcatcagccctattacaacagttacctttggtgcatttattggcacaaaacatcagggcacaacaactacaacaacttgtgctagcaaaccttgctgcctactctcagcaacagcagtttcttccattcaaccaactaggttcattgaactctgcttcttatttgcaacaacaacaactaccattcagccagctacctgctgcctacccccagcaatttcttccattcaaccaactagcagcattgaactctcctgcttatttacagcagcaacaactactaccattcagccagctagctggtgtgagccctgctaccttcttgacacaaccacagttgttgccgttcta

SEQ ID NO: 9695 - DNA, 385 bp, Zea mays
  unsure (1)..(385): unsure at all n locations; Clone ID: LIB3061-063-Q1-K6-G2
cccggtcgtcccagcgttctactcttgacccaacagcgtttgtgactgttgacaanaaagcaccgatcaaccaanacctcatcagcaacttcatgtctgaccctgtccacggtgccatcgaagtctgcgctcagctgaggcccactgttgacatctcagtgaccgctgatgctgatttcgtgcgtccagagcttcgacagtcttcataagcttgtatggatccgcagtgtgactgcaatggctagtttgtaagaacttaatatgcctgggcttttgaactcttagattgtgcctgtattgctcgtgcttgaggaccagaaaagtaaactcttggcggtgtggtactgttgtgatttgcaagaataaaaataaatttctgttgatc

SEQ ID NO: 9696 - DNA, 479 bp, Zea mays
  unsure (1)..(479): unsure at all n locations; Clone ID: LIB3061-063-Q1-K6-G3
gtcgacccagcgtccgtaattcttccattcaaccaacctgtctacactgnaaccctgctgcttatttgcagcaacaactattaccattcagccagctagctactgcctactctcagcaacaacaacttcttccatttaaccaattggccgcactgaaccccgctgcttatttgcagcagcaaatactactaccatttagccagctagctgcagcaaaccgtgcttccttcttgacacagcaacagttgctgcctttctaccagcagtttgcggctaaccccgcaaccctcttacaactacaacaattgttgccctttgtccaacttgctttgacagaccgagcggcctcctaccaacaacacatcattggtggtgccctcttttagattgcttattagttgtaattcaataataaagttttttggatgatgtatgtggccaaccagaaataagaagttacatttccagattttaatgtg

SEQ ID NO: 9697 - DNA, 623 bp, Zea mays
  Clone ID: LIB3061-063-Q1-K6-H10
tgcacaatagtgtaccaacatggcagccaaaaatggggcttccttatgctccttggtctttctgcaagtgttgctaccgcaaccattttcccacaatgctcacaagctcctatagcttcccttcttcccccatacctctcaccagcggtgtcttcaatgtgtgaaaccccaattgttcaaccgtacaggatccaacaggcaatcgcaacaggcatcttaccattatcacccttgttcctccaacaaccgtcagccctattacagcagttacctttggtccatttggtggcacaaaacatcagggcacaacaactacaacaacttgtgctagcaaaccttgctgcatactctcagcaacatcagtttcttccattcaaccaactggctgcattgaactctgctgcttatttgcaacaacaattaccattcagccagctagttgctgcctacccccagcaatttcttccattcaaccaactagcagcattgaactctgctgcttatttacagcagcaacaactactaccattcagccagctagctgatgtgagccctgctgccttcttgacacaacaacagttgttgccgttctacctgcacgcctatgcctaacgctggcaccc

SEQ ID NO: 9698 - DNA, 619 bp, Zea mays
  Clone ID: LIB3061-063-Q1-K6-H11
atcccggggttggctactctcctccttccggttcgggttcgggttcgtgtagggggtgggggttcggtttcacgggtgagcggtatcgaaaggcggcattcggatgtagagtaccggtgcttcgtcgggggcctcgcctgggccacggactaccactccctgcacaactccttcatcacctacagcgaggtcctcaactgggggggggggggacatttttatacgcagaggccccccggattctgcttcgtcaccttctccaccgtagaggcgatgcccaacgccatccagggcatgaactgaaaggagctggacggccgcaacatcaccgtaaacgaggcccagtcccgcggcggccgtggatgcggctgatgcggcgggtactgtggtggccctggaggctgcggctaccgcggtggcgggcgccgtgatggctgcggcagctactgaggtggcagcagctaccgtggtggcagcggctgctacagtggtggtggcggcggctaccgaagtggcaaccgtggcggcatgctacagcaactccgactggaactggacgaactgtatcgtgaggcccacacagtcaagttatcctgttcgctaccgtgttgtttaccct

SEQ ID NO: 9699 - DNA, 640 bp, Zea mays
  unsure (1)..(640): unsure at all n locations; Clone ID: LIB3061-063-Q1-K6-H2
cggtccgaaaccccggtcgcccaccgtcgtgagacgcagcacatanaagtagaatccattagcaacaatagagcaacaatggcgaccaagatattttccctccttatgctccttgctctttctacatgtgttgctaacgcgacaattttccctcaatgctcacaagctcctatagcttcccttcttcccccataccttccatcaattatagcttcagtatgtgaaaacccagctcttcaaccatataggcttcaacaagcaatcgcagcaagcaacatacctttatcgcccttgttgtttcaacaatcaccagccctatctttggtgcagtcattggtacaaaccatcagggcacaacagctgcagcaactcgtgctacctgtgatcaaccaagtagctctggcaaacctttctccctactctcagcaacaacaatttcttccattcaaccaactgtctacactgaaccctgctgcttatttgcagcaacaactattaccatttagccagctagctactgcctactctcagcaacaacaacttcttccatttaaccaattggccgcactgaaccccgctgcttatttgcagcagcaaatactactgccatttagcgagctagctgcagcaagtcgtgctt

SEQ ID NO: 9700 - DNA, 633 bp, Zea mays
  Clone ID: LIB3061-063-Q1-K6-H3
gtccgtagacacaatagtgtcaccaacaatgagcagcacacaaatatttctagcctcacttaatgactacctgtggtactcttctagctaagtgctcgtctacgagcgcacccattgtctcctcgccaatgactgcgctaaggctacctgatagacattctcctctctttccccgcgtcaccatctccaccagtcggttgtctttcggtatgtcgaaaacccaattcttcaaccctacagagatccaacaagcaatcgcagctggcatcttacctttatcacccttgttcctccaacaatcatcagccctattacaacagttacctttggtgcatttattggcacaaaacatcagggcacaacaactacaacaacttgtgctagcaaaccttgctgtctactctcatcaacagcagcttcttccattcaaccaactaggttcattgaactctgcttcttatttgcaacaacaacaactaccattcagccagctacctgctgcctacccccagcaatttcttccattcaaccaactagcagcattgaactctcctgcttatttacagcagcaacaactactaccattcagccagctagctggtgtgagccctgctaccttcttgacacaaccac

SEQ ID NO: 9701 - DNA, 621 bp, Zea mays
  unsure (1)..(621): unsure at all n locations; Clone ID: LIB3061-063-Q1-K6-H6
ccgggctcctttgtcngtcctctcctccaaccaggcgagccaacaagcaagcaaaagtaaacggggcgaggagctggagagacgccggcgacgcgaagcaaccgcccgatcggagccgcggctgagcaggagggagccggagatggtgggtctcgtcggcggcagcacggcgcgggcggagcacgtcgtcgccaacgccggaggggaggcagagtacgtgcgccgcatgcaccgccacgcgccgaccgagcaccagtgcacctccaccctcgtcaagcacatcaaggcgcccgtccacctcgtgtgggagctggtgcggaggttcgaccagccgcagcggtacaagccgttcgtcaggaactgcgtcgtgcgcggggaccagctcgaggtcggcagcctgcgcgacgtcaacgtcaagaccggcctgccggcgacgaccagcaccgagcgcctcgagcagctcgacgacgacctgcacatactcggtgtcaagttcgtcggcggggaccaccgcctccagaactactcatccatcataactgtccaccccgagagcattgacgggaggccgggcaccctggtgatcgagtcgttcgtggtcgatgtgcctgatggcaacac

SEQ ID NO: 9702 - DNA, 645 bp, Zea mays
  unsure (1)..(645): unsure at all n locations; Clone ID: LIB3061-064-Q1-K6-A6
ccgggtncgnacccacgccgtccggnaccaactagcaacatagnaaagcacaatagtgtaccaacaatggcagccaaaatattttgcttccttatgctccttggtctttctgcaagtgttgctaccgcaaccattttcccacaatgctcacaagctcctatagcttcccttcttcccccatacctctcaccagcggtgtcttcaatgtgtgaaaccccaattgttcaaccctacaggatccaacaggcaatcgcaacaggcatcttaccattatcacccttgttcctccaacaaccgtcagccctattacagcagttacctttggtccatttggtggcacaaaacatcagggcacaacaactacaacaacttgtgctagcaaaccttgctgcatactctcagcaacatcagtttcttccattcaaccaactggctgcattgaactctgctgcttatttgcaacaacaattaccattcagccagctagttgctgcctacccccagcaatttcttccattcaaccaactagcagcattgaactctgctgcttatttacagcagcaacaactactaccattcagccagctagctgatgtgagccctgctgccttcttgacacaacaacagttgttgccgttctacctg

SEQ ID NO: 9703 - DNA, 409 bp, Zea mays
  unsure (1)..(409): unsure at all n locations; Clone ID: LIB3061-064-Q1-K6-A7
cccgggcgcnacccacgcgcccggccacagcgaaccgaagcacgggggggggggaggggggggggacaacacgcccacncacgcgccggggggagcgcgcgcgcccgccgccccccagccggaccccgcacgccgccgccacgggcccggcccccgccggccccacgacccgggccccccggcccaggcccagcgcggcggggggggggggcgcggccgccgcngccgcggggaacgccggggcggggccacgcggccgcgccccaccgggcgccgcgcccgcgcgggccgaggcccgcggcgaccccaggcgccccggggggggccncgcgcgggggcacgggccccgcaggcgcgacggcgaccggggccggccgccccgcgggggccgcgcccggcgcgggccggg

SEQ ID NO: 9704 - DNA, 621 bp, Zea mays
  unsure (1)..(621): unsure at all n locations; Clone ID: LIB3061-064-Q1-K6-B5
ccgggtcgacccagcgttttttttagnacaactagcaacataggaagcacaggagggtaccaacaatggcagccaaaatattttgcctccttatgctccttggtatttctgcaagtgctgctacggcgaccattttcccgcaatgctcacaagctcctatagcttcccttcttcccccgtacctctcaccagcggtgtcttcggtatgtgaaaacccaattcttcaaccctacaggatccaacaggcaatcgcagctggcatcttacctttatcacccttgttcctccaacaatcatcagccctattacagcagttacctttggtgcatttattggcacaaaacatcagggcacaacaactacaacaacttgtgctagcaaaccttgctgcctactctcagcaacagcagtttcttccattcaaccaactagctgcattgaactctgcttcttatttgcaacaacaacaactaccattcagccagctacctgttgcctacccccaacaatttcttccattcaaccaactggcagcattgaactctcctgcttatttacagcagcaacaactactaccattcagccagctagctggtgtgagccctgctaccttcttgacac

SEQ ID NO: 9705 - DNA, 606 bp, Zea mays
  unsure (1)..(606): unsure at all n locations; Clone ID: LIB3061-064-Q1-K6-C3
cgncaggggnaattaatggcgtcgtcgtctagcagcagccaccgccgcctcatcctcgcagccgccgtcctgctctccgtgctcgcggctgccagcgccagcgccgggacctcctgcgtgccggggtgggccatcccgcacaacccgctcccgagctgccgctggtacgtgaccagccggacctgcggcatcgggccgcgcctcccgtggccggagctgaagaggagatgctgccgggagctggcggacatcccggcgtactgccggtgcacggcgctgagcatcctcatggacggcgcgatcccgccgggcccggacgcgcagctggagggccgcctagaggacctgccgggctgcccgcgggaggtgcagaggggattcgccgccaccctcgtcacggaggccgagtgcaacctggccaccatcagcggcgtcgccgaatgcccctggattctcggcggcggaacgatgccctccaagtaactgcgaagagcatagtgcatgaggaatgagcttgtagctagctcatatgtctgaataataagcacagcaagaagatgaatgcatttctcggatcgttcatccggaacaataattaaaggggat

SEQ ID NO: 9706 - DNA, 388 bp, Zea mays
  unsure (1)..(388): unsure at all n locations; Clone ID: LIB3061-064-Q1-K6-C4
atatatctgttaaactccatctccacaanaaatccgataggcgccanaggcgtctgacaaggtaaacaagngctnntgatgatgtatnngtcctccaagnntctccaaacccctncnnagcatcgnaaggggataatgatnnacctgggaactagnaaatcaccatcccttgcataaatggattgagacagaggttggatccggtaccaataataaagtaattgttaggacagacatttttctagcatcgtccagcacggtggacttttttattttgtgcctcatttccaatcgtttttctttttgactccttgtagagaaaagttgagacgtgtctatttgacaagtgcacatgttattgcgagtttgagaccttgtgtaagaacct

SEQ ID NO: 9707 - DNA, 175 bp, Zea mays
  unsure (1)..(175): unsure at all n locations; Clone ID: LIB3061-064-Q1-K6-C9
agctgtggnagtctttaagtcctagnataatagagaggctttcatgtcaacaatgaaccacaatgttcgaagaagtggctaaagcgcaaaattaggtgtgtccatagttaagcatgtaacaaaacatagctttatgattttggtttcagcttagcatgagcacatattgtgtggc

SEQ ID NO: 9708 - DNA, 624 bp, Zea mays
  unsure (1)..(624): unsure at all n locations; Clone ID: LIB3061-064-Q1-K6-D12
cccgggggtaatgatccatgttcttgctctagnatcagtcctatacaggatggggggaaggaacgaaaccagtaaatgtatatggcaacattggtggtgataatgcagatgctggcatgtctataactggtacagaaaggccctgccaagcaatgaacctgtgtccaccaatggtaaagatttagctgtgggttctgcagagggggggcagcctcagcgaatcaggaaagggcgtggttttactcagaagtatgggtttgcacgccggtacaggacaccatctcccgagcgcccccctgttcgaccccgctacgatggagggagagaggataggtggaacaatttcaataggtatggaagaactggtccttatagtagacgctctccagtaaggagataccatggctcgccaagagccaatagcccatccaggtaccaaagaagaggccggagcaggtcacgcagcccggcgacgcgtcatgaccgtggagggtatcgccgccccagcccaaggcgcagccgcagccctgcagacccgagacgcgatgcgaacgataggcctcgatcaggtcacggtggaggcggtcctgaccaccgtggccacagcccccctgccaacaacaa

SEQ ID NO: 9709 - DNA, 604 bp, Zea mays
  unsure (1)..(604): unsure at all n locations; Clone ID: LIB3061-064-Q1-K6-D5
cctactgtatggttttttcaaaaacaagcgcatagtactctatgacacattgattcagcagtgtagcaatgaggatgagatagtttctgttatagcacatgaacttgngacactggaaactcaatcatactgtctattcctttgtagctgtccagctgcttatgtttcttcaatttggaggatatactctagtaaggagctccaaagatctatttggaagttttggcttcaaggaccagccagtaataattggattgatcattttccagcacaccataatacccatccaacaccttctgagcttttgcctgaaccttgtcagcagagcatttgaatttcaggctgatgcctttgccaagaaccttggatatgcccctcagctccgagcagcccttgttaaactacaggaggagaacttgtctgcgatgaacaccgatccttggtattcggcatatcactactcccacccaccactcgtcgagaggctgcaagctcttgaagattcagacagcaaaaaagaagattagtcgatccttgtatgaggtttacatatggatttttccctgccacatgcacaccgattcagtgcttggatggtgagggt

SEQ ID NO: 9710 - DNA, 624 bp, Zea mays
  unsure (1)..(624): unsure at all n locations; Clone ID: LIB3061-064-Q1-K6-D6
tcccgggnagcaacatagnaaagcacaatagtgtaccaacaatggcagctaaaatttttgcctccttatgctccttggtctttctgcaagtgctgctacggcgaccattttcccacaatgctcacaagctcctatagcttcccttcttcccccgtacctctcaccaacggtgtcttcggtatgtgaaaacccaattcttcaaccctacaggatccaacaggcaatcgcagctggcatcttacctttatcacccttgttcctccaacaatcatcagccctattacagcagttacctttggtgcatttattggcacaaaacatcagggcacaacaactacaacaacttgtgctagcaaaccttgctgcctactctcagcaacagcagtttcttccattcaaccaactagctgcattgaactctgcttcttatttgcaacaacaacaactaccattcagccagctatctgctgcctacccccagcaatttcttccattcaaccaactgacagcattgaactctcctgcttatttacagcagcaacaactactaccattcagccagctagctggtgtgagccctgctaccttcttgacacaaccacagttgttgccgttctaccagca

SEQ ID NO: 9711 - DNA, 596 bp, Zea mays
  unsure (1)..(596): unsure at all n locations; Clone ID: LIB3061-064-Q1-K6-D7
cttcccttcttccccctacctctcaccagcggtgtcttcaatgtgtngaaaccccaattgttcaaccctacaggatccaacaggcaatcgcaacaggcatcttaccattatcacccttgttcctccaacaaccgtcagccctattacagcagttacctttggtccatttggtggcacaaaacatcagggcacaacaactacaacaacttgtgctagcaaaccttgctgcatactctcagcaacatcagtttcttccattcaaccaactggctgcattgaactctgctgcttatttgcaacaacaattaccattcagccagctagttgctgcctacccccagcaatttcttccattcaaccaactagcagcattgaactctgctgcttatttacagcagcaacaactactaccattcagccagctagctgatgtgagccctgctgccttcttgacacaacaacagttgttgccgttctacctgcacgctatgcctaacgctggcaccctcttacaactgcaacaattgctgccattcaaccaacttgctttgacaaacccaacagtgttctaccaacaacccatcattggtggtgcc

SEQ ID NO: 9712 - DNA, 610 bp, Zea mays
  unsure (1)..(610): unsure at all n locations; Clone ID: LIB3061-064-Q1-K6-E2
ccgggtctacccaacgcgttcgtgcagggcaacacgctggaccanagctggggccccggttcaaaatcccctcggcgacgctgtccatggtggacactatcagcgtcatcgtctgggtccccgtgtacgaccgcgccatcgtgcccctggtgcgctcttacaccgggaggccgcgcgggttcacgcagctgcagcgcatgggcatcggcctcgtcgtctccatcttctccatggtggcggcgggcgtgctggacatcgtgcggctgcgcgccatcgcgcggcacggcctgtacggcgagaacgacatcgtgcccatctccatcttctggcagataccgcagtacttcatcatcggatgcgcggaggtgttcaccttcgtggggcagctggagttcttctacgaccaggcgcccgacgccatgaggagcatgtgctcggcgctgtcgctcaccaccgtcgcgctcggcaactacctcagcacggtcctggtgaccatcgtcacccacatcaccaccaggcacggccgcatcgggtggatcccggagaacctcaaccgcggccacctcgactacttcttctggctgctcgcagtgctcagcctcctcaactt

SEQ ID NO: 9713 - DNA, 472 bp, Zea mays
  Clone ID: LIB3061-064-Q1-K6-E4
tcacctacagtaccgacacaggtggtcagacgcgcaccgctgggcgatggggtggacttggcggcaacgtccggaagctcgatcttggcgacgctgaatacgtcaaggaagtttctggaacgtacggcgcattcgaaggtgcgactacccttacctcgttcaggattgtcaccagcaccgccagagcttgggggccatggggcatcgagagcggcacacgtttctgcatcaccgcgcccatcggcagcagcatcgtgggattctatggacgcgcgacgaccaggctcgtcgctgcgatcggtgtctacctgcgccaactttagtctggtttcagcagcaggacgggtactacagatatgctagataaaggtcttatatatgtcatatgacctatcatggtcttatatgttcgatcgtcgtcgtgtctgtatgtacatacatggttgtcaaataaagctctttgcattttgat

SEQ ID NO: 9714 - DNA, 293 bp, Zea mays
  Clone ID: LIB3061-064-Q1-K6-F2
aacccgatcgacaccatgagggtggggctcgttgccctcgctctcctggctctcgctgcgagcgccacctccacgcttacaagcggcggctgcggctgccagccaccttttttttttcatctaccgcctccgttgcttgtggggggggggggcaccttccccctccccttcatctcccacctccggggcggcggccgcctcctgtccacctgccaccgcctgttcctgtgccgccgccggttcttctgtcgccgtctccttgccgctccccttctcatccgccccggcctcgg

SEQ ID NO: 9715 - DNA, 597 bp, Zea mays
  unsure (1)..(597): unsure at all n locations; Clone ID: LIB3061-064-Q1-K6-G10
tgatagctttatctactccanacgcagaagacccgatcgacaccatgagggtgttgctcgttgccctcgctctcctggctctcgctgcgagcgccacctccacgcatacaagcggcggctgcggctgccagccaccgccgccggttcatctaccgccgccggtgcatctgccacctccgggtcacctgccacctccggtgcatctcccaccgccggtccacctgccgccgccggtccacctgccaccgccggtccatgtgccgccgccggttcatctgccgccgccaccatgccactaccctactcaaccgccccggcctcagcctcatccccagccacacccatgcccgtgccaacagccgcatccaagcccgtgccagctgcagggaacctgcggcgttggcagcaccccgatcctgggccagtgcgtcgagttcctgaggcatcagtgcagcccgacggcgacgccctactgctcgcctcagtgccagtcgttgcggcagcagtgttgccagcagctcaggcaggtggagccgcagcaccggtaccaggcgatcttcggcttggtcctccagtccatcctgcagcagcagccga

SEQ ID NO: 9716 - DNA, 569 bp, Zea mays
  unsure (1)..(569): unsure at all n locations; Clone ID: LIB3061-064-Q1-K6-G11
ggggggccacggnagcctggcggaaccgcggcgctgcgcggcgtggcgngacctgataaagctgctcccgagcggcacggtgttcctgttccagttcctgagcccgctggcgagcaacaacgggcactgcgccacgctgaacaaggcgggggaggaggcgctttttgttctgtgcggcgcctcctgcgccttctcctgcttcaccgacagctacgtgggcgcggacgggcgcgtgtactacggcgtggtgacgcggcggggcctgcgcaccttcacgcccgacccggacgccgccgcccgggacctgtcggcgtaccgcctccgcgccggcgacttcgcgcacgccgcgctctcgctgctcgtcttcgccaccctcgcgctcctcgacgccgacaccgtcgcctgcctctacccggcgctggagctcgccgagcccaccatgatggccgtgctcccgcccgtcgtcggcgccgtcgcgggctacgtcttcatggtgttccccaacaaccggcacggcgtcgggtaccagcccacgcccgccaccgaagacttccagcacaaatactaac

SEQ ID NO: 9717 - DNA, 587 bp, Zea mays
  unsure (1)..(587): unsure at all n locations; Clone ID: LIB3061-064-Q1-K6-G2
cagtagcaaaaatanagcaacaatggcggccaagatattttccatccttatgctccttgctctttctgcatgtgttgctaacgcgaccatttttcctcaatactcacaagctcctatagctgcccttcttcccccataccttccatcaatgaccgctttagtatgtgaaaacccagcccttcaaccctacaggatccagcaagcaatcgcaacaagcaacttacctttatcacacctgttctttcaacaatcgccagccctatctttggtgcagtcattggtacaaaccatcagggcagaacagttgcagcaactcgtgctaccagtgatcagccaagtagctctggcaaacctttccccctactctcagcaacaacaatttcttccattcaaccaactgtctatactgaaccctgctgcttatttgcagcaacaacaactactaccattcagccagctagctactgcctactctcagcagcaacaatttcttccatttaaccaattggccgcactgaacccctctgcttatttccagcagcaaatactactaccatttggccagctagctacaacaagccccgctt

SEQ ID NO: 9718 - DNA, 626 bp, Zea mays
  unsure (1)..(626): unsure at all n locations; Clone ID: LIB3061-064-Q1-K6-G3
ccgggtcgnacccacgccgtccgtataccaacaagcaacatagnaagtggnaatccagtagcaacaacagnagcaacaatggcgaccaagatattttccctccttatgctccttgctctttctgcatgtgttgctaacgcgacaattttccctcaatgctcacaagctcctatagcttcccttcttcccccataccttccatcaatgatagcttcagtatgtgaaaacccagctcttcagccctataggctccaacaagcaatcgcagcaagcaacatacctttatcacccttgttgtttcaacaatcgccagccctatctttggtgcagtcattggtacaaaccatcagggcacagcagctgcagcaactcgtgctacctgtgatcaaccaagtagctctggcaaacctttctccctactctcagcaacaacaatttcttccattcaaccaactgtctacactgaaccctgctgcttatttgcagcaacaactattaccattcagccagctagctactgcctactctcagcaacaacaacttcttccatttaaccaattggccgcactgaaccccgctgcttatttgcagcagcaaatactactaccatttagccagctagctgc

SEQ ID NO: 9719 - DNA, 403 bp, Zea mays
  Clone ID: LIB3061-064-Q1-K6-G9
atcgaggaaaatctcaatcaatatattgattatttctaggaaacacatgccgctatgagggcaccattatcgagtacatctcatatgtaatctaaaagatggcacctacatacctgcaacaacagttgctgcaacagattgtaccagctctggggggggggggtggggcaaaccctgctgcctacttgcaacagctgcttccattcaaccaactgactgtgtcgaactctgctgcgtacctacaacagcgacaacagttacttaatccactagcgggggctaacccattggtcgctgccttcctacagcagcatcaattgctgccctacaaccagttctctttggtgatccctgcctcgggggggcggccgcccctcgggggcggggccctttttgggccctc

SEQ ID NO: 9720 - DNA, 606 bp, Zea mays
  unsure (1)..(606): unsure at all n locations; Clone ID: LIB3061-064-Q1-K6-H4
attaaaacaactagcaacatagnaagcacaatagtgtaccaacaatggcagccaaaaattttgcctccttatgctccttggtatttctgcaagtgctgctacggcgaccattttcccgcaatgctcacaagctcctatagcttcccttcttcccccgtacctctcaccagcggtgtcttcggtatgtgaaaacccaattcttcaaccctacaggatccaacaggcaatcgcagctggcatcttacctttatcacccttgttcctccaacaatcatcagccctattacagcagttacctttggtgcatttattggcacaaaacatcagggcacaacaactacaacaacttgtgctagcaaaccttgctgcctactctcagcaacagcagtttcttccattcaaccaactagctgcattgaactctgcttcttatttgcaacaacaacaactaccattcagccagctacctgttgcctacccccaacaatttcttccattcaaccaactggcagcattgaactctcctgcttatttacagcagcaacaactactaccattcagccagctagctggtgtgagccctgctaccttcttgacacaaccaca

SEQ ID NO: 9721 - DNA, 201 bp, Zea mays
  unsure (1)..(201): unsure at all n locations; Clone ID: LIB3061-065-Q1-K6-A12
agcttcagtattgtgaaaacccaggtcttcagacgcatataggcttcaacaagggcgatgaaggtatgttgcttgctgcgattgcttgttgaagcctatatggttgaagagctgggttttgacatactggagctataatttgtgtttgtttttcgncccgaaaaaccctttttgggtttgaaaggggttttttttttaaca

SEQ ID NO: 9722 - DNA, 498 bp, Zea mays
  unsure (1)..(498): unsure at all n locations; Clone ID: LIB3061-065-Q1-K6-A3
ggtcgtcgccgtgttgcttgttcgcggnaagcgcgctgccctggcccgntctcgaatacatcaggttgttgccgacggtgccgcgcttcagcgacaacgcggcctcgcgcgcctcgccgagcagcgcgagcgagatgcaagctcgcgttcgccttctcggtgcccgcgatcgactggaacaccagatcgaccggcgcgcccttctcgaccgccgcgatcgtgttggtcacgtgcgtgagcacacacgactgcgtcggcacgccgtagcgctcgcggaagccgtcgatcatcgcgagcagcttcacgatcgcagccaggctgtcggtcgccgggttgatgccgatcatcgcgtcgccgcagccgtacatcagcccgtcgagcatcgatgcggcgatgcccttcacgtcatcggtcggatggttcggctgcagccgcaccgacatccggccggccagcccgaccgtgttgcgaaagcgcgtgaccacgcggcgcttgcgc

SEQ ID NO: 9723 - DNA, 393 bp, Zea mays
  unsure (1)..(393): unsure at all n locations; Clone ID: LIB3061-065-Q1-K6-C10
gggggggggggggcacaaaaaanaacggcggggccaggccgacgncaacagcccnggggcggggaggaccacacgccgcaccagccacaagngccccgnccgcaaccccgnacagaagagcgcggngcgggnagacccgnaccangacggggggggggggggcgnncnnnaacnncaacncccacagcgccangnacggcancaggggcagngcaaggggccaggncgccagcgacaacgggaccacgggggncgacgacgngccccgggcggggcagcggcgcagcggaccccagggcgaccgcgncgccaccaaggcgcagggagaaggcgnccagngcagcgcccgcgagacgaacccggcccccangggcagccacggccccggggaag

SEQ ID NO: 9724 - DNA, 425 bp, Zea mays
  unsure (1)..(425): unsure at all n locations; Clone ID: LIB3061-065-Q1-K6-C12
ccgggccgcgctattctactcgttcctttcggtcggcgacgcatacgttcggcgagggagaggaagaagtcagtaaagtaaattctgtcgctccaattcggacgaggagatgccgcggatccctttgatcaggttccccaagcgggatctcaaagccccatctccatccgcgccagcggtcgtcgcagctccgcagaccagcgcgcgggcctgatgttcctgttaggggctaaagcggaggctccatcttctggggagattcagaattaccggtttagatctgctgtgccttgtccaccttctcatactggtgttggaggtccagcttccctcctttctacgcgcaaacccctgtctgaagaagatattgnggctattgtgctggggggcttcctttgatttcccctcttgtgaatgggaaattc

SEQ ID NO: 9725 - DNA, 601 bp, Zea mays
  Clone ID: LIB3061-065-Q1-K6-C2
cacaatagtgtaccaacatggcagccaaaaattttgcctccttatgctccttggtctttctgcaagtgctgctacggcgaccattttcccgcaatgctcgcaagctcctatagcttcccttcttcccccgtacctctcaccagcggtgtcttcggtatgtgaaaactcaattcttcaaccctacaggatccaacaggcaatcacagctggcatcttacctttatcacccttgttcctccaacaatcatcagccctattacatcagttacctttggtgcatttattggcacaaaacatcagggcacaacaactacaacaacttgtgctagcaaaccttgctgcctactctcagcaacagcagtttcttccattcaaccaactagctgcattgaactctgcttcttatttgcaacaacaacaactaccattcagccagctacctgctgcctacccccagcaatttcttccattcaaccaactggcagcattgaactctcctgcttatttacagcagcaacaactactaccattcagccagctagctggtgtgagccctgctaccttcttgatacaaccacagttgttgccgttctaccagcac

SEQ ID NO: 9726 - DNA, 609 bp, Zea mays
  unsure (1)..(609): unsure at all n locations; Clone ID: LIB3061-065-Q1-K6-C8
caactagcaacatagnaaagcacaatagtgtaccaacaatggcagccaaaaattttgcctccttatgctccttggtctttctgcaagtgctgctacggcgaccattttcccacaatgctcacaagctcctatagcttcccttcttcccccgtacctctcaccagcggtgtcttcggtatgtgaaaacccaattcttcaaccctataggatccaacaggcaatcgcagctggcatcttacctttatcacccttgttcctccaacaatcatcagccctattacagcagttacctttggtgcatttattggcacaaaacatcagggcacaacaactacaacaacttgtgctagcaaaccttgctgcctactctcagcaacaacagtttcttccattcaaccaactagctgcattgaactctgcttcttatttgcaacaacaacaactaccattcagccagctatctgctgcctacccccagcaatttcttccattcaaccaactgacagctttgaactctcctgcttatttacagcagcaacaactactaccattcagccagctagctggtgtgagccctgctaccttcttgacacaaccacaattgttgcc

SEQ ID NO: 9727 - DNA, 602 bp, Zea mays
  unsure (1)..(602): unsure at all n locations; Clone ID: LIB3061-065-Q1-K6-D2
cgcagcagcaacaagcactgnaccacctagccgtggtgaaccctatcgcctacttgcaacaacagctgcttgcatccaacccacttgctttggcaaacgtagctgcataccaacaacaacaacagttgcaacagtttctgccagcgctcagtcaactagccatggtgaaccctatcgcctacctacaacagcaacaacttctttcatctagcccgctcgctatgggcaatgcacctacatacctgcaacaacagttgttgcaacaacagttgctgcaacaaattgtaccagctcttactcagctagctgtggcaaaccctgctgcctacttgcaacaactacttccattcaaccaactgactgtgtcgaactctgctgcgtacctacaacagcgacaacagttacttaatccactagcggtggctaacccattggtcgctgccttcctacagcagcaacaattgctgccatacaaccagttctctttgatgaaccctgccttgtcgtggcagcaacccatcgttggtggtgccatcttttagattacatatgagatgtactcgataatggtgccctcatagcggcatgtgtttcctaaaaat

SEQ ID NO: 9728 - DNA, 609 bp, Zea mays
  unsure (1)..(609): unsure at all n locations; Clone ID: LIB3061-065-Q1-K6-D3
tcacaaaacaacaacatcaaccaccaccacaacatcaccagcagcagcaacaccaacaacaacaagttcacatgcaaccacaaaaacatcagcaacaacaagaagttcatgttcaacaacaacaacaacaaccgcagcaccaacaacaacaacaacaacaacagcaccaacaacaacatcaatgtgaaggccaacaacaacatcaccaacaatcacaaggccatgtgcaacaacacgaacagagccatgagcaacaccaaggacagagccatgagcaacaacatcaacaacaattccagggtcatgacaagcagcaacaaccacaacagcctcagcaatatcagcagggccagngaaaaatcacaacagcaacaatgtcattgccaggagcagcaacagactacaaggtgcagctataactactatagcagtagctcaaatctaaaaaattgtcatgaattcctaaggcagcagtgcagccctttggtaatgccttttctccaatcacgtttgatacaaccaagtagctgccaggtattgcagcaacaatgttgtcatgatcttaggcagattgagccacaatacattcaccaagcaatctacaacatg

SEQ ID NO: 9729 - DNA, 610 bp, Zea mays
  unsure (1)..(610): unsure at all n locations; Clone ID: LIB3061-065-Q1-K6-E12
cacttcaacagnagagcacaacaaggaattccagtctctgaacatggggttttagttgatatgatccgtgttcctgactgggcatttgaggctgttggcctggaaatgagagtgggtcaagatactgcatatcatcctggtctttatttaactgatgctcagagagaagcaggtgaggcactgattcaagatcttccaaaattcaggctgaaagctgttccaacggactgcagtgaatgccccatctgccttgaagaatttcatgttggcaatgaggtccgtgggctcccatgcgcgcacaattttcatgtggagtgcatcgaccagtggcttcggctgaatgtcaagtgcccacggtgccggtgctccgtcttccccaacctggacctgagtgcgttgaacaatcttcggtcgaccagcgagccggaccatccgtccgccagcgccagcaatgtaacaacggcaactgcagcgacgagatacgtgaggtcgcagccggcaggtcaaagctatttggtgcggttgcaagggctgctgctccgccctgtccggcacgatagcgtggaggagagtgacggtgagccggcggtgggcaacagtcgcttggttg

SEQ ID NO: 9730 - DNA, 622 bp, Zea mays
  Clone ID: LIB3061-065-Q1-K6-E6
cccagcgtccgcaactagcaacataggaaagcacaatagtgtaccaacaatggcagccaaaatattttgcctccttatgctccttggtctttctgcaagtgctgctacggcgaccattttcccgcaatgctcgcaagctcctatagcttcccttcttcccccgtacctctcaccagcggtgtcttcggtatgtgaaaacccaattcttcaaccctacaggatccaacaggcaatcacagctggcatcttacctttatcacccttgttcctccaacaatcatcagccctattacatcagttacctttggtgcatttattggcacaaaacatcagggcacaacaactacaacaacttgtgctagcaaaccttgctgcctactctcagcaacagcagtttcttccattcaaccaactagctgcattgaactctgcttcttatttgcaacaacaacaactaccattcagccagctacctgctgcctacccccagcaatttcttccattcaaccaactggcagcattgaactctcctgcttatttacagcagcaacaactactaccattcagccagctagctggtgtgagccctgctaccttcttgatacaaccacagttgttgccg

SEQ ID NO: 9731 - DNA, 540 bp, Zea mays
  Clone ID: LIB3061-065-Q1-K6-F12
aaatttgttttcttactttcaactagggcaggtggccttggtatcaacttggccactgctgatgttgtggttctttatgacagcgattgggaatccacaagctgatctgcaagctcaggaccgtgcacataggataggtcaaaagaaagaagttcaagtgttccgcttttgcactgagggcgcgatgcgatttattgtgattgagagagcatataagaagctagcattggatgctttagttattcagcaaggacgattggcagagcagaaaactgtcaataaggatgaccttctgcaaatggtgcggtttggtgctgaaatggttttcagttctaaggacagcacaataactgatgaggacattgaccgtattatagctaaaggagaggagacaacagctgaacttgatgcaaaaatgaaaaagttcacagaggacgccattaaatttaagatggatgataatgccgaactgtatgattttgatgatgagaaagatgaaaacaaggttgatttcaagaaactcgttagtgataactggat

SEQ ID NO: 9732 - DNA, 634 bp, Zea mays
  unsure (1)..(634): unsure at all n locations; Clone ID: LIB3061-065-Q1-K6-F2
ccgggtcaacccactgcgtccgcaacatagnaagcacaatagtgtaccaacaatggcagccaaaatttttgcttccttatgctccttggtctttctgcaagtgttgctaccgcaaccattttcccacaatgctcacaagctcctatagcttcccttcttcccccatacctctcaccagcggtgtcttcaatgtgtgaaaccccaattgttcaaccctacaggatccaacaggcaatcgcaacaggcatcttaccattatcacccttgttcctccaacaaccgtcagccctattacagcagttacctttggtccatttggtggcacaaaacatcagggcacaacaactacaacaacttgtgctagcaaaccttgctgcatactctcagcaacatcagtttcttccattcaaccaactggctgcattgaactctgctgcttatttgcaacaacaattaccattcagccagctagttgctgcctacccccagcaatttcttccattcaaccaactagcagcattgaactctgctgcttatttacagcagcaacaactactaccattcagccagctagctgatgtgagccctgctgccttcttgacacaacaacagttgttgccgttctacctgcacg

SEQ ID NO: 9733 - DNA, 618 bp, Zea mays
  Clone ID: LIB3061-065-Q1-K6-F3
ttttcagcattcaaaacacaccaagcgaagcgcactagcaacgacctaacaccaatggctaccaagatattagccctccttgcgcttcttgcccttttagtgagcgcaacaaatgcgttcattattccacagtgctcacttgctcctagtgccattattccacagttcctcccaccagttacttcaatgggcttcgaacatccagccgtgcaagcctacaggctacaactagcgcttgcggcgagcgccttacaacaaccaattgcccaattgcaacaacaatccttggcacatctaaccctacaaaccattgcaacgcaacaacaacaacaacaacagtttctgccatcactgagccacctagccgtggtgaaccctgtcacctacttgcaacagcagctgcttgcatccaacccacttgctctggcgaacgtagctgcataccagcaacaacaacagctgcaacagtttatgccagtgctcagtcaactagccatggtgaaccctgccgtctacctacaactactttcatctagcccgctcgcggtgggcaatgcacctacgtacctacaacaacagttgctgcaacaaattgtaccagctctgactcagctagct

SEQ ID NO: 9734 - DNA, 608 bp, Zea mays
  unsure (1)..(608): unsure at all n locations; Clone ID: LIB3061-065-Q1-K6-G2
tgnacattcanaaacacaccaagcgaacacattagcaacaacctaacaacaatggctaccaagatattatccctccttgcgcttcttgcgctttttgcgagcgcaacaaatgcgttcattattccacaatgctcacttgctccaagttccattattacacagttcctcccaccagttacttcaatgggcttcgaacacccagctgtgcaagcctataggctacaacaagcaattgcggcgagcgtcttacaacaaccaatttcccagttgcaacaacaatccttggcacatctaacaatacaaaccatcgcaacgcaacagcaacaacaattcctaccagcactgagccacctagccatggtgaaccctgccgcctacttgcaacagcagttgcttgcatcaaacccacttgctctggcaaacgtagttgcaaaccagccacaacaacagctgcaacagtttctgccagcgctcagtcaactagccatggtgaaccctgccgcctacctacaacagcaacaactgctttcatctagcccgctcgctgtggccaatgcacctacatacctgcaacaacaattgttgcaacagattgtaccagctctgac

SEQ ID NO: 9735 - DNA, 529 bp, Zea mays
  Clone ID: LIB3061-065-Q1-K6-G9
atcaaccaactagctgcattgaactctgcttcttatttgcaacaacaacaactaccattcagccagctatctgctgcctacccccagcaatttcttccattcaaccaactgacagcattgaactctcctgcttatttacagcagcaacaactactaccattcagccagctagctggtgtgagccctgctaccttcttgacacaaccacagttgttgccgttctaccagcacgctgcgcctaacgctggcaccctcttacaactgcaacaattgctgccattcaaccaacttgctttgacaaacccagcagcattctaccaacaacccatcattggtggtgccctcttttagatttcttatgagttatagttcaataataaagttttttgtctgatgtttgtggcttcccagaaataagaaagtacatttctaaaaaaaaaaaaaaaaaaaaaaaaaaaaaaaaaaaaaaaaaaaaaagaggggaaaaaaaaatttttaaaaaaaaaaaaaagattatatgcgggggcat

SEQ ID NO: 9736 - DNA, 603 bp, Zea mays
  unsure (1)..(603): unsure at all n locations; Clone ID: LIB3061-065-Q1-K6-H6
tttgnanaacaactagcaacatagnaaagcacaatagtgtaccaacaatggcagccaaaatattttgcctccttatgctccttggtctttctgcaagtgctgctacggcgaccattttcccgcaatgctcgcaagctcctatagcttcccttcttcccccgtacctctcaccagcggtgtcttcggtatgtgaaaacccaattcttcaaccctacaggatccaacaggcaatcgcagctggcatcttacctttatcacccttgttcctccaacaatcatcagccctattacaacagttacctttggtgcatttattggcacaaaacatcagggcacaacaactacaacaacttgtgctagcaaaccttgctgcctactctcagcaacagcagtttcttccattcaaccaactaggttcattgaactctgcttcttatttgcaacaacaacaactaccattcagccagctacctgctgcctacccccagcaatttcttccattcaaccaactagcagcattgaactctcctgcttatttacagcagcaacaactactaccattcagccagctagctggtgtgagccctgctaccttcttgacac

SEQ ID NO: 9737 - DNA, 612 bp, Zea mays
  unsure (1)..(612): unsure at all n locations; Clone ID: LIB3061-065-Q1-K6-H7
gcaacatagnaagtagaatccattagcaacaatagagcaacaatggcgaccaagatattttccctccttatgctccttgctctttctacatgtgttgctaacgcgacaattttccctcaatgctcacaagctcctatagcttcccttcttcccccataccttccatcaattatagcttcagtgtgtgaaaacccagctcttcaaccatataggcttcaacaagcaatcgcagcaagcaacatacctttatcgcccttgttgtttcaacaatcaccagccctatctttggtgcagtcattggtacaaaccatcagggcacaacagctgcagcaactcgtgctacctgtgatcaaccaagtagctctggcaaacctttctccctactctcagcaacaacaatttcttccattcaaccaactgtctacactgaaccctgctgcttatttgcagcaacaactattaccatttagccagctagctactgcctactctcagcaacaacaacttcttccatttaaccaattggccgcactgaaccccgctgcttatttgcagcagcaaatactactgccatttagcgagctagctgcagcaagtcgggcttccttcttg

SEQ ID NO: 9738 - DNA, 208 bp, Zea mays
  unsure (1)..(208): unsure at all n locations; Clone ID: LIB3061-066-Q1-K6-A4
ctgaattactgacaagcttggtctgcattccctgcgacagcggcactggtacatccagagcacttgtgctacatctggtgaagggttgtatgaggggcttgactggctttccagcaacatctccagcaagtcttgaagcttttcggcgagnggnggggnnnnnncccccctttttttttnnncccccccccccccccccttttttttt

SEQ ID NO: 9739 - DNA, 613 bp, Zea mays
  Clone ID: LIB3061-066-Q1-K6-A7
atagcttcagtatgtgaaaaacccagtcttcaaccatataggcttcaacaagcaatcgcagcaagcaacatacctttatcgcccttggtgtttcaacaatcaccagccctatctttggtgcagtcattggtacaaaccatcagggcacaacagctgcagcaactcgtgctacctgtgatcaaccaagtagctctggcaaacctttctccctactctcagcaacaacaatttcttccattcaaccaactgtctacactgaaccctgctgcttatttgcagcaacaactattaccatttagccagctagctactgcctactctcagcaacaacaacttcttccatttaaccaattggccgcactgaaccccgctgcttatttgcagcagcaaatactactgccatttagcgagctagctgcagcaagtcgtgcttccttcttgacacagcaacagttgctgcctttctacaagcagtttgcggctaaccccgcaaccctcttacaactacaacaattgttgccctttgtccaacttgctttgacaaacccagcagcctcctaccaacaacacatcattgggtggtgcccctcttcttacattgattattagttgt

SEQ ID NO: 9740 - DNA, 572 bp, Zea mays
  unsure (1)..(572): unsure at all n locations; Clone ID: LIB3061-066-Q1-K6-B5
tttgagcattcagnaaacacaccaagcgaacgcactagcaacggacgctaacaacaatggctaccaagatattagccctccttgcgcttcttgccctttttgtgagcgcaacaaatgcgttcattattccacaatgctcacttgctcctagtgccattattccacagttcctcccaccagttacttcaatgggcttcgaacacctagctgtgcaagccaacatgcaacaacaagcgcttgcggcgagcgtcttacaacaaccaattgcccaattgcaacaacaatccttgccacatctaacaatacaagccatcacaacgcaacagcaacaacagttcctaccagcactgagccacctagccatggtgaaccctgccgcctacttgcaagagcagctgcttgcattcaacccacttgctctggcgaacgtagttgcaaaccagcaacaacaacagctacaacagtttctgccaacgctcagtcaactagccatggtgaaccctgccgcctacgtacaacaacaacaactgcttttatctagccccctcgctgtgggcaatgcacctacatac

SEQ ID NO: 9741 - DNA, 524 bp, Zea mays
  unsure (1)..(524): unsure at all n locations; Clone ID: LIB3061-066-Q1-K6-B8
cgataaatccgtgctcttcgtgagggtgggtgccgccgnaaccttccaatgtgaccaatttgcttgccacagtcttggtcttcctcatagttatctatttccaaggcttccgtgttgtgcttccagtgagatcaaagaatgctcgtggccagcaaggctcatatccaattaagctatgggggggtggaaacatgcccatcattctgcactctgcactgattaccaacctctatttcatatcccagcttctctacaggaagtacagtggaaacttccttgttaaccttcttgggatgtggaaggagtctgaatactctggccattctgttcctgttggtggtcttgcttactatgtaactgccccatcaagtttggctgatgtccttgcaaatccattccatgcactgttttatgtggtcttcatgctgtcagcttgcgctctgttctcaaaaacgtgattgaaatttctggttcatcagcaaaggatgttgctaaacagcttaaggaacaacaaatggtgatgc

SEQ ID NO: 9742 - DNA, 396 bp, Zea mays
  unsure (1)..(396): unsure at all n locations; Clone ID: LIB3061-066-Q1-K6-C1
ccagctttttgccggctttaaaaaggggggttagatgggtactaaacaaacttaatcttgaaaacaaaggtgctgattgattcttgagagtgagaccaattcctggcttgcttagatgagccagaatatccataccttgctcaatgggcattttggggggggaggagccttttagaccttctcaagtcaaaatatattcaanacatgactttggatctgaaatcctcccagagctgtctagatcatagtgtgcaggcatgcatttttacgggctattgggaggatgttggaacaatcaaatcattctttgatgcaaacttggccctcactgagcagccttccaagtttgatttttatgatccaaaaacacctttcttcactgcaccccgatgcttg

SEQ ID NO: 9743 - DNA, 591 bp, Zea mays
  unsure (1)..(591): unsure at all n locations; Clone ID: LIB3061-066-Q1-K6-C2
gngaccgacttctaaaatgggctagtngaagatgatcatactggacgtgtacttcaattctttgaaaaacaagggtgctgatttgaattctatgagagttgagaccaacttcctgagctatgctatagatgatgcacagaaatatccataccttgcatcaatgggcatttatgtcttcaagaaagatgcacttttagaccttctcaagtcaaaatatattcaattacatgactttggatctgaaatcctcccaagagctgtactagatcatagtgtgcaggcatgcatttttacgggctattgggaggatgttggaacaatcaaatcattctttgatgcaaacttggccctcactgagcagccttccaagtttgatttttatgatccaaaaacacctttcttcactgcaccccgatgcttgcctccgacgcaattggacaagtgcaagatgaaagatgcatttatctcagatggttgcttactgagagaatgcaacatcgagcattctgtgattggagtctgctcacgtgtcagctctggatgtgaactcaaggactccgtgatgatgggagcggacacctatgaaactga

SEQ ID NO: 9744 - DNA, 259 bp, Zea mays
  unsure (1)..(259): unsure at all n locations; Clone ID: LIB3061-066-Q1-K6-C6
cccgggtcgnacccacgncgtccgtaaaaaaaaaaaaaaaaaaaaaaaaaaagagggggggaaaaaaaaaaaaaaaaaaaaaaaagggcggaacgatataaagggtccaaagcttactaacgcatcgaatgctaacgtaactaaatgcttgtatagtggtcaccttaatttaatttcactgcgcccgtctttttacaactgtgccgcactggtaaaaacggtggggggggggcaaattaatgggccttggcgaactata

SEQ ID NO: 9745 - DNA, 493 bp, Zea mays
  Clone ID: LIB3061-066-Q1-K6-D1
ccgggcaatagtgtaccaacatggcagccaaaatttttgcctccttatgctccttggtctttctgcaagtgctgctacggcgaccattttcccgcaatgctcgcaagctcctatagcttcccttcttcccccgtacctctcaccagcggtgtcttcggtatgtgaaaacccaattcttcaaccctacaggatccaacaggcaatcgcagctggcatcttacctttatcacccttgttcctccaacaatcatcagccctattacaacagttacctttggtgcatttattggcacaaaacatcagggcacaacaactacaacaacttgtgctagcaaaccttgctgcctactctcagcaacagcagtttcttccattcaaccaactaggttcattgaactctgcttcttatttgcaacaacaacaacccatcattggtggtgccctcttttagatttcttatgagttatagttcaataataaagttttttatctg

SEQ ID NO: 9746 - DNA, 586 bp, Zea mays
  Clone ID: LIB3061-066-Q1-K6-D4
gcaacatacatagtgaagtacactagcaacatcttagcaccaatggcagccaagatttttgccatccttgccctccttgctctttcagcaagcgttgctaccgcgactattattccacaatgctcacaacaatacctctctccggtgacagccgcgagatttgaatacccaactatacaatcctacaggctacaagaggccatcgcagcaagcatcttacggtcgttagcattgaccgtccaacaaccatatgccctattgcaacaaccatccttaatgaatctatatctccaaagaatcgcagcacaacaactacaacaacagttgcttccaacaatcaatcaagtagttgcagcgaaccttgctgcttacctccagcaacaacaatttcttccattcaatcaactagctggggtgaaccctgctgcttacttgcaggcacaacagctactaccattcaaccaacttgtcaggagccctgctgccttcttactgcagcaacagttgcttccattccatctacaagttgtggcaaacattgctgctttcttgcaacaacaacaacaattgctgccattttacccac

SEQ ID NO: 9747 - DNA, 624 bp, Zea mays
  unsure (1)..(624): unsure at all n locations; Clone ID: LIB3061-066-Q1-K6-E3
tccgtattgaaaccaactagcaacatagnaaagcacaatagtgtaccaacaatggcagccaaaatttttgcttccttatgctccttggtctttctgcaagtgttgctaccgcaaccattttcccacaatgctcacaagctcctatagcttcccttcttcccccatacctctcaccagcggtgtcttcaatgtgtgaaaccccaattgttcaaccctacaggatccaacaggcaatcgcaacaggcatcttaccattatcacccttgttcctccaacaaccgtcagccctattacagcagttacctttggtccatttggtggcacaaaacatcagggcacaacaactacaacaacttgtgctagcaaaccttgctgcatactctcagcaacatcagtttcttccattcaaccaactggctgcattgaactctgctgcttatttgcaacaacaattaccattcagccagctagttgctgcctacccccagcaatttcttccattcaaccaactagcagcattgaactctgctgcttatttacagcagcaacaactactaccattcagccagctagctgatgtgagccctgctgccttcttgacacaacaacagttgttgccgttct

SEQ ID NO: 9748 - DNA, 595 bp, Zea mays
  unsure (1)..(595): unsure at all n locations; Clone ID: LIB3061-066-Q1-K6-F4
attgagaccaactagcaacatagnaaagcacaatagtgtaccaacaatggcagccaaaaattttgcctccttatgctccttggtctttctgcaagtgctgctacggcgaccattttcccgcaatgctcgcaagctcctatagcttcccttcttcccccgtacctctcaccagcggtgtcttcggtatgtgaaaacccaattcttcaaccctacaggatccaacaggcaatcacagctggcatcttacctttatcacccttgttcctccaacaatcatcagccctattacatcagttacctttggtgcatttattggcacaaaacatcagggcacaacaactacaacaacttgtgctagcaaaccttgctgcctactctcagcaacagcagtttcttccattcaaccaactagctgcattgaactctgcttcttatttgcaacaacaacaactaccattcagccagctacctgctgcctacccccagcaatttcttccattcaaccaactggcagcattgaactctcctgcttatttacagcagcaacaactactaccattcagccagctagctggtgtgagccctgctaccttct

SEQ ID NO: 9749 - DNA, 616 bp, Zea mays
  unsure (1)..(616): unsure at all n locations; Clone ID: LIB3061-066-Q1-K6-F5
anaaacacaatagtgtaccaacaatggcagccaaaatttttgcctccttatgctccttggtctttctgcaagtgctgctacggcgaccattttcccgcaatgctcgcaagctcctatagcttcccttcttcccccgtacctctcaccagcggtgtcttcggtatgtgaaaacccaattcttcaaccctacaggatccaacaggcaatcgcagctggcatcttacctttatcacccttgttcctccaacaatcatcagccctattacaacagttacctttggtgcatttattggcacaaaacatcagggcacaacaactacaacaacttgtgctagcaaaccttgctgcctactctcagcaacagcagtttcttccattcaaccaactaggttcattgaactctgcttcttatttgcaacaacaacaactaccattcagccagctacctgctgcctacccccagcaatttcttccattcaaccaactagcagcattgaactctcctgcttatttacagcagcaacaactactaccattcagccagctagctggtgtgagccctgctaccttcttgacacaaccacagttgttgccgttctaccagcacgttgcgcct

SEQ ID NO: 9750 - DNA, 622 bp, Zea mays
  unsure (1)..(622): unsure at all n locations; Clone ID: LIB3061-066-Q1-K6-G5
acagtattcgggnataacaacanaagctaaaccaagcgcttgaagacatgttttccccaatcctgttgagcctaatggttatatggtcatgctatgctacaaaaatggctccttgaccagagaagagtacgaaatcgctgtgcagacaaanatgggacgtttttaacagctatctgggagaaaacaccccctctaaatggtgggaagttaggattctactacaaagaccatgaaatcctccctccacttccagtgggtttccatcggtacactgtcgaaaacctcaacgacgtctcatcagacgctctgttggaccgtgaagtggaagaatttgacccaccgtccgaggttcgtgccatcattgagggccaaatgctgtcgatgcgaggccacgccgagaggtttggcatgccgaaccctcccaaacggatcatagcaaccggcggggcatcctccaacgaaagcatcctcaagtcggtcgcgcagatcttcggttgccctgtcttcacagtccagagacctgattcggcatcgctgggcgcagcgctgagagctgcccacgggtggctatgcaacgcgcaagggtagcttcgtccccatctcgtgcctgtaccagggcaac

SEQ ID NO: 9751 - DNA, 561 bp, Zea mays
  Clone ID: LIB3061-066-Q1-K6-H1
gtcgacccagcgttcgggccaactgctactagaaagcacatggggtgccaacaatggcagccaaaatttttgcttccttatgctccttggtctttctgcaagtgttgctaccgagaccattttcccacatgctcacaagctcctatagcttcccttcttcccccatacctctcaccagcggtgtcttcaatgggtgaaaccccaattgttcaaccctacaggatccaacaggcaatcgcaacaggcatcttaccattatcacccttgttcctccaacaaccgtcagccctattacagcagatacctttggtccatttggtggcacaaaacatcggggcacaacaactacaacaacttgtgctagcaaaccttgctgcatactctcagcaacatcagtttcttgcattcaaccaactggctgcgttgaactctgctgcttatttgccacaacaattaccattcagccagctagttggtgcctacccccagcaatttcttccattcaaccaactagcatgattgaactctgctgcttatttacagggtcatcaactactacca

SEQ ID NO: 9752 - DNA, 597 bp, Zea mays
  unsure (1)..(597): unsure at all n locations; Clone ID: LIB3061-066-Q1-K6-H4
caacatcaatgtgnaaggccaacaacagaggtgaggaacaatcacaaggccatgtgcaacaacacgaacagagccatgagcaacaccaaggacagagccatgagcaacaacatcaacaacaattccagggtcatgacaagcagcaacaaccacaacagcctcagcaatantcagcaggggccagggaaaaatcacaacagcaacaatgtcattgccaggagcagcaacagactacaaggtgcagctataactactatagcagtagctcaaatctaaaaaattgtcatgaattcctaaggcagcagtgcagccctttggtaatgccttttctccaatcacgtttgatacaaccaagtagctgccaggtattgcagcaacaatgttgtcatgatcttaggcagattgagccacaatacattcaccaagcaatctacaacatggttcaatccataatccaggaggagcaacaacaacaaccatgtgagttatgtggatctcaacaagctactcaaagtgcggtggcaatcttgacagcagcacaatacctaccatcaatgtgcggcttgtaccactcatactaccaaaataatccatgca

SEQ ID NO: 9753 - DNA, 268 bp, Zea mays
  unsure (1)..(268): unsure at all n locations; Clone ID: LIB3061-067-Q1-K6-A7
cggccgcgtggcgagcggccgcccggtttgttgggttttcatttcaatgttcattcagggcattgctcacactgacactgccacccaggtgatgcgtgacacattattactcaatcatcgccgctaaatgactcaactagctagctagccagcggctatactacancacatgggggggggggggggggacacccccnncagcanctcangcanntnnanccccancacccctaccanncnatcttcnncttnntcctccantccatcc

SEQ ID NO: 9754 - DNA, 607 bp, Zea mays
  unsure (1)..(607): unsure at all n locations; Clone ID: LIB3061-067-Q1-K6-A8
tatgagaccnctagcaacataggaggggggggggtaccaacaatggcagccaaaatattttgcttccttatgctccttggtctttctgcaagtgttgctaccgcaaccattttcccacaatgctcacaagctcctatagcttcccttcttcccccatacctctcaccagcggtggggggagtgggggaaaacccaattgttcaaccctacaggatccaacaggcaatcgcaacaggcatcttaccattatcacccttgttcctccaacaaccgtcagccctattacagcagttacctttggtccatttggtggcacaaaacatcagggcacaacaactacaacaacttgtgctagcaaaccttgctgcatactctcagcaacatcagtttcttccattcaaccaactggctgcattgaactctgctgcttatttgcaacaacaattaccattcagccagctagttgctgcctacccccagcaatttcttccattcaaccaactagcagcattgaactctgctgcttatttacagcagcaacaactactaccattcagccagctagctgatgtgagccctgctgccttcttgacacaacaacagttgt

SEQ ID NO: 9755 - DNA, 543 bp, Zea mays
  unsure (1)..(543): unsure at all n locations; Clone ID: LIB3061-067-Q1-K6-C2
acagctgtgtcgataccaaggccgcttccgccttcacccaatcagggatgaggatgctaagttcaagctttgcaaggttaggtctgttcagtttgggcagaagggcatcccttatctgaacacgtatgacggccgcaccatccgctaccctgaccccctcatcaaggccaacgacaccatcaagatcgatctggagaccaacaagattgtggacttcatcaagtttgatgttggcaacgtcgtcatggtgactggcggaaggaacactggccgcgtgggtgttatcaagaacagggagaagcacaagggcagctttgagaccattcacgtggaggactccctgggccaccagttcgccacccgtatgggcaacgtgttcaccatcggcaagggtaataagccgtgggtgagcctgcccaagggcaagggaatcaagctgaacatcataanaagagcaaaggaagcgggatgccgctgcccaggctgctgccaacgcataaattctttgaatgtgctgtgttgagagtttttttctagttgctc

SEQ ID NO: 9756 - DNA, 615 bp, Zea mays
  Clone ID: LIB3061-067-Q1-K6-D3
aaacacacctagcgaacgcactagcaacgacctaacaacaatggctaccaagatattatccctctttgcgcttcttgccctttttgtgagcgcaacaaatgcgttcattattccacaatgctcacttgctcctagtgccattattccacagttcctccctccagttacttcaatgggcttcgaacacccagctgtgcaagcctacaggctacaacaagcgcttgcggcgagcgtcttacaacaaccaattgcccaattacaacaacaatccttggcacatctaaccatacaaaccatcgcaacgcaacagcaacaacaatttctaccagcactgagccaactagctgtggtgaaccctgtcgcctacttgcaacagcagttgcttgcatccaacccacttgctctggcaaacatagttgcataccaacaacaacaacaattgcaacagtttctaccagcgctcagtcaactagccatggtgaaccctgccgcctacctacaacagcaacaactgatttcatctagccctctcgctgtggttaatgcacctacatacctgcaacaacagttgctgcaacagattgtaccagctctgactcagctagctgtggcaaa

SEQ ID NO: 9757 - DNA, 406 bp, Zea mays
  unsure (1)..(406): unsure at all n locations; Clone ID: LIB3061-067-Q1-K6-D4
cccccccccccanccccccccccccccccacncaaaccccaccccccccccccccncccnnccncccccccccaaggcgggggggcgcccnncaccccncccccccccccccccnncnccccccccccccccccccccccccnnccccccccccccccccccccccccccccccccccccccccccccnccnccccccnccccccccccccccccccncnccncccccccccccccccccccccccccccccccccccccccccccccccccccccccccccccccnnccccccnccccccccccccccnnnnccccccccccccccccccccccccccnccccccccnccccccccccccccccccccnccccnccccccnccancccaccnncccccccccccc

SEQ ID NO: 9758 - DNA, 610 bp, Zea mays
  Clone ID: LIB3061-067-Q1-K6-D6
atttcagcattcaaaacacaccaagcgaagcgcactagcaacgacctaacaccaatggctaccaagatattagccctccttgcgcttcttgcccttttagtgagcgcaacaaatgcgttcattattccacagtgctcacttgctcctagtgccattattccacagttcctcccaccagttacttcaatgggcttcgaacatccagccgtgcaagcctacaggctacaactagcgcttgcggcgagcgccttacaacaaccaattgcccaattgcaacaacaatccttggcacatctaaccctacaaaccattgcaacgcaacaacaacaacaacaacagtttctgccatcactgagccacctagccgtggtgaaccctgtcacctacttgcaacagcagctgcttgcatccaacccacttgctctggcgaacgtagctgcataccagcaacaacaacagctgcaacagtttatgccagtgctcagtcaactagccatggtgaaccctgccgtctacctacaactactttcatctagcccgctcgcggtgggcaatgcacctacgtacctacaacaacagttgctgcaacaaattgtaccagctctgactc

SEQ ID NO: 9759 - DNA, 614 bp, Zea mays
  unsure (1)..(614): unsure at all n locations; Clone ID: LIB3061-067-Q1-K6-E5
caactagcaacatagnaaagcacaatagtgtaccaacaatggcagccaaaatattttgcttccttatgctccttggtctttctgcaagtgctgctaccgcaaccattttcccacaatgctcacaagctcctatagcttcctttcttcccccatacctctcaccagcggtgtcttcagtatgtgaaaacccaattcttcaaccctacaggatccaacaggcaatcgcagcaggcatcttacctttatcacccttgttcctccaacaaccgtcagccctattacagcagttacctttggtgcatttgttggcacaaaacatcaaggcacaacaactacaacaacttgtgctaggaaaccttgctgcctactctcagcaacagcagtttcttccattcaaccaactggctgcattgaactctgctgcttatttgcaacaacaactaccattcagtcagctagctgctgcctacccccagcaatttcttccattcaaccaactggcagcattgaactctgctgcttatttacaacagcaacagctaccaccattcagccagctagctgatgtgagccctgttgccttcttgacacaacaacagttgttgccgttctac

SEQ ID NO: 9760 - DNA, 463 bp, Zea mays
  Clone ID: LIB3061-067-Q1-K6-F1
ggcacaacaactacaacaacttgtgctagcaaaccttgctgcctactctcagcaacagcagtttcttccattcaaccaactagctgcattgaactctgcttcttatttgcaacaacaacaactaccattcagccagctacctgctgcctacccccagcaatttcttccattcaaccaactggcagcattgaactctcctgcttatttacagcagcaacaactactaccattcagccagctagctggtgtgagccctgctaccttcttgatacaaccacagttgttgccgttctaccagcacgctgcgcctaacgctggcaccctcttacaactgcaacaattgctgccattcaaccaacttgctttgacaaacccagcagcgttctaccaacaacccatcattggtggtgccctcttttagatttcttatgagttatagttcaataataaagttttttgtctg

SEQ ID NO: 9761 - DNA, 641 bp, Zea mays
  unsure (1)..(641): unsure at all n locations; Clone ID: LIB3061-067-Q1-K6-G1
cggtaccagaacatccccgggtcgnacccacgccgtcctgcaatgggcttcgnaacatccagctgtgcaagcctacaggctacaacaagcgcttgcggcgagcgtcttacaacaaccaattgcccaattacaacaacaatccttggcacatctaaccatacaaaccatcgcaacgcaacagcaacaacaatttctaccagcactgagccaactagctgtggtgaaccctgtcgcctacttgcaacagcagttgcttgcatccaacccacttgctctggcaaacatagttgcataccaacaacaacaacaattgcaacagtttctaccagcgctcagtcaactagccatggtgaaccctgccgcctacctacaacagcaacaactgatttcatctagccctctcgctgtggttaatgcacctacatacctgcaacaacagttgctgcaacagattgtaccagctctgactcagctagctgtggcaaaccctgctgcctacttgcaacagctgcttccattcaaccaactgactgtgtcgaactctgctgcgtacctacaacagcgacaacagttacttaatccactagcggtggctaacccattggtcgctgccttcctacagcagcaacaattgctgccat

SEQ ID NO: 9762 - DNA, 484 bp, Zea mays
  unsure (1)..(484): unsure at all n locations; Clone ID: LIB3061-067-Q1-K6-G2
gtcgacccagcgttcgcttgtgcagctttggnatgtttgccaccggnaggtgtgatagatttgtgaatgtgtgggatgacattaataagaaatactatatcaaaacacagctgcggcgagctgggatggatcaagcacttgggtgagagttcttcgcgcagggctggagtgctacttccagtattgcttgcagctcgaggagttgatgagatgcaacggcggaatgccaagttggggtgagggctatgctggtcaggaacatgatgcaaattagggtgtcccttcattctataaggaatcataaaagcatacggaggaactatgtataagctacaaagaagcactacaaagaagcataaaaagaatttttatagcataagccaagtgttctgatgattttgttttttcaattgtattttctgttattggttcagcatgcacatatattgacatgatttatggcatggcatctgtcatctttgtt

SEQ ID NO: 9763 - DNA, 604 bp, Zea mays
  Clone ID: LIB3061-067-Q1-K6-G3
tcccgggccttcaaccagctaacataattaactcagggtgcatagagattgccgccgacgacccatcatatctatgggtccctccccttgcactgcatctccttcaattcctagtgtttgcttctccctttcttgacctttgcttggaaccattgattgatagttacttattattgggcatggagcacgtcatctcaatggaggagatcctcgggcccttctgggagctgctaccaccgccagcgccagagccagagccagagcgagagcagcctccggtaaccggcatcgtcgtcggcagtgtcatagacgttgctgctgctggtcacggtcatggtggcggcgacatgatggatcagcagcacgccacagagtggacctttgagaggttactggaagaggaggctctgacgacaagcacaccgccgccggtggtggtggtgccgaactcttgttgctcaggcgccctaaatgttgaccggccgccggtgatggaagaggcggtaatgatggcgcctgcggcggtgagtagtgccgtagtaggggaccccatggagtacaatgccatactgaggaggaagctggaggaggacctcgaggcctt

SEQ ID NO: 9764 - DNA, 620 bp, Zea mays
  unsure (1)..(620): unsure at all n locations; Clone ID: LIB3061-067-Q1-K6-G5
caactagcaacatagnaaagcacaatagtgtaccaacaatggcagccaaaatattttgcttccttatgctccttggtctttctgcaagtgttgctaccgcaaccattttcccacaatgctcacaagctcctatagcttcccttcttcccccatacctctcaccagcggtgtcttcaatgtgtgaaaccccaattgttcaaccctacaggatccaacaggcaatcgcaacaggcatcttaccattatcacccttgttcctccaacaaccgtcagccctattacagcagttacctttggtccatttggtggcacaaaacatcagggcacaacaactacaacaacttgtgctagcaaaccttgctgcatactctcagcaacatcagtttcttccattcaaccaactggctgcattgaactctgctgcttatttgcaacaacaattaccattcagccagctagttgctgcctacccccagcaatttcttccattcaaccaactagcagcattgaactctgctgcttatttacagcagcaacaactactaccattcagccagctagctgatgtgagccctgctgccttcttgacacaacaacagttgttgccgttctacctgcac

SEQ ID NO: 9765 - DNA, 339 bp, Zea mays
  unsure (1)..(339): unsure at all n locations; Clone ID: LIB3061-067-Q1-K6-H2
ccttcttctccttcctctttctncctnccctttcttctcncccttttttccttccttccttcancctcctttacctttctttttttttttctcccttccctctctcattttttttggggggggggccccactccttcaaccctccacactccctcacctatttccaacctcctcctctcctctctctcccttcttctttcaactctctccatccctctctttctttcattccttcctactntccctctcnacacctcttctccttcacctcctcctaccatttcttcctctctccttctttcctccttttcttcttcttctcttttaccccactttctt

SEQ ID NO: 9766 - DNA, 472 bp, Zea mays
  Clone ID: LIB3061-068-Q1-K6-A1
aagccgatcaacactacaagggctgcaaagtacactctcactacttgtaaccatgcctatgattccaaacccttctcttcctagggcctatatcatggtgggcggtgcggacggccctagcgtacatgcaacaacgcaatggtactcttggaactgaaacccatgactgctaggatcaataacatccatgcaacatccatttaatccgctgaaacccacaagaacccctggtgatgcggagccatatcattaagcaaattgacatatttactcttactgcgctgaatagcaaacaactcgcattcatgaggcaggactacctcatttatccgacatctaatccgaggatcaccaacgccgctttcagcatgacgactgtcccccatcttgcaaaagccatacacgcttcagtttctccactggactgaagatagtaacaaaactgttcgtgaataaaacctgaatcacccac

SEQ ID NO: 9767 - DNA, 561 bp, Zea mays
  Clone ID: LIB3061-068-Q1-K6-A3
gcggccagtgctctcctatctcctccgggccgctcgtctcttcgccatggtcgccatctccgctcacctcatcgccactcttccgtctctcccgacactccggccctgtcctcgccggcttcagccgagcgccttcgctgcatccgaggcctcgcaccgagcccccgcccccggcgtcgccctccgtggctgcagcaggcgttgcagcccttccgtaagaagatttcatgggtttcagaatgcaataagctttgggaaggagcacaacaggcaagccctattcgcttcaggcagaggttctcctagctccagtgacgatggctcgagttctcctgatggcccacctgtcctgaccattctggcaggtgtcaccgtgttccttcttgtcctctgggtcgttggatcggtcgttacctggattgtgggcttggtctttggcgctgcgaaatcttagaaggtaggatggtaggctaccaatcagttgtatatactttatttgtgctactgtgttggaatcgttacattgaatagctgcatttgctgctctcttttttctgacgg

SEQ ID NO: 9768 - DNA, 612 bp, Zea mays
  unsure (1)..(612): unsure at all n locations; Clone ID: LIB3061-068-Q1-K6-B1
gtcgacccagcgttcttggacttctcaggctcanactcgctaagacatgggattgtatggagagcgtgttggcgctttgagcattgtatgtaaaagtgccgatgtagctgttagggttgaaagtcaactcaaacttgtcatcaggcctatgtattcaaaccctcctcttcatggtgcctctatcgttgctaccatactcagggacagcgagatgttcaacgaatggactctggaactgaaggccatggctgataggatcattaacatgaggcaacaactatttaatgcgctgaaatccagaggaacccctggtgattggagccatatcattaagcaaattgggatttttactttcactgggctgaatagcgaacaagtcgcattcatgaggcaggaataccacatttatatgacatctgatgggaggatcagcatggccggtttgagcatgaggactgtgccccatcttgcagatgccatacacgctgcagttactcaactgaaatgaggatagtatcgcagctttcgtgaataaaacctgaatcacccacaacaatgttctaagtactcagccagtggtatttactggttgacctactgtagtttgcgtcg

SEQ ID NO: 9769 - DNA, 598 bp, Zea mays
  unsure (1)..(598): unsure at all n locations; Clone ID: LIB3061-068-Q1-K6-B7
gcaacatagnaaagcacaatagtgtgacgagcggggcgagccaaaaattttgcctccttatgctccttggtctttctgcaagtgctgctacggcgaccattttcccgcaatgctcgcaagctcctatagcttcccttcttcccccgtacctctcaccagcggtgtcttcggtatgtgaaagcggggggcttcaaccctacaggatccaacaggcaatcacagctggcatcttacctttatcacccttgttcctccaacaatcatcagccctattacatcagttacctttggtgcatttattggcacaaaacatcagggcacaacaactacaacaacttgtgctagcaaaccttgctgcctactctcagcaacagcagtttcttccattcaaccaactagctgcattgaactctgcttcttatttgcaacaacaacaactaccattcagccagctacctgctgcctacccccagcaatttcttccattcaaccaactggcagcattgaactctcctgcttatttacagcagcaacaactactaccattcagccagctaactggtgggagccctgctaccttcttgatacaaccacagtt

SEQ ID NO: 9770 - DNA, 562 bp, Zea mays
  unsure (1)..(562): unsure at all n locations; Clone ID: LIB3061-068-Q1-K6-B8
ttatagtataagcaccaaatcaaatctgcaacatcaattatctaactccaaaaaccatgaagctggtgcttgtggttcttgctttcattgctttagtatcaagtgtttcttgtacacagacaggcggctgcagctgtggggggggggggacnctnancancaacatcatccacaacaacatcatccacaaaaacaacaacatcaaccaccaccacaacatcaccagcagcagcaacaccaacaacaacaagttcacatgcaaccacaaaaacatcagcaacaacaagaagttcatgttcaacaacaacaacaacaaccgcagcaccaacaacaacaacaacaacaacagcaccaacaacaacatcaatgtgaaggccaacaacaacatcaccaacaatcacaaggccatgtgcaacaacaccaacagagccatgagcaacaccaaggacagagccatgagcaacaacatcaacaacaattccagggtcatgacaagcagcaacaaccacaacagcctcagcaatatcagccaggccaggaaaaacacaacagcaacaatgtc

SEQ ID NO: 9771 - DNA, 625 bp, Zea mays
  Clone ID: LIB3061-068-Q1-K6-C3
acagtaccatcaatcatcattcatcttagtagtataggcaccaaatcaaatctgcaacatcaattatctaactccaaaaaccatgaagctggtgcttgtggttcttgctttcattgctttagtatcaagtgtttcttgtacacagacaggcggctgcagctgtggtcaacaacaaagccatgagcagcaacatcatccacaacaacatcatccacaaaaacaacaacatcaaccaccaccacaacatcaccagcagcagcaacaccaacaacaacaagttcacatgcaaccacaaaaacatcagcaacaacaagaagttcatgttcaacaacaacaacaacaaccgcagcaccaccaccaacaacaacaacaacagcaccaacaacaacatcaatgtgaaggccaacaacaacatcaccaacaatcacaaggccatgtgcaacaacacgaacagagccatgagcaacaccaaggacagagccatgagcaacaacatcaacaacaattccagggtcatgacaagcagcaacaaccacaacagcctcagcaatatcagcagggccaggaaaaatcacaacagcaacaatgtcattgccaggagcagcaacagactacaaggtgcagc

SEQ ID NO: 9772 - DNA, 541 bp, Zea mays
  Clone ID: LIB3061-068-Q1-K6-E4
acccgatcgacaccatgagggtgttgctcgttgccctcgctctcctggctctcgctgcgagcgccacctccacgcatacaagcggcggctgcggctgccagccaccgccgccggttcatctaccgccgccggtgcatctgccacctccggttcacctgccacctccggtgcatctcccaccgccggtccacctgccgccgccggtccacctgccaccgccggtccatgtgccgccgccggttcatctgccgccgccaccatgccactaccctactcaaccgccccggcctcagcctcatccccagccacacccatgcccgtgccaacagccgcatccaagcccgtgccagctgcagggaacctgcggcgttggcagcaccccgatcctgggccagtgcgtcgagtttctgaggcatcagtgcagcccgacggcgacgccctactgctcgcctcagtgccagtcgttgcggcagcagtgttgccagcagctcaggcaggtggagccgcagcaccggtaccaggcgatcttcggcttggtcct

SEQ ID NO: 9773 - DNA, 585 bp, Zea mays
  unsure (1)..(585): unsure at all n locations; Clone ID: LIB3061-068-Q1-K6-F2
tagcgaacgcactagcaacgacctaacaacaatggctaccaanatttatccctctttgcgcttcttgccctttttgtgagcgcaacaaatgcgttcattattccacaatgctcacttgctcctagtgccattattccacagttcctccctccagttacttcaatgggcttcgaacacccagctgtgcaagcctacaggctacaacaagcgcttgcggcgagcgtcttacaacaaccaattgcccaattacaacaacaatccttggcacatctaaccatacaaaccatcgcaacgcaacagcaacaacaatttctaccagcactgagccaactagctgtggtgaaccctgtcgcctacttgcaacagcagttgcttgcatccaacccacttgctctggcaaacatagttgcataccaacaacaacaacaattgcaacagtttctaccagcgctcagtcaactagccatggtgaaccctgccgcctacctacaacagcaacaactgatttcatctagccctctcgctgtggttaatgcacctacatacctgcaacaacagttgctgcaacagattgtaccagctctg

SEQ ID NO: 9774 - DNA, 587 bp, Zea mays
  Clone ID: LIB3061-068-Q1-K6-F5
aaacacaccaagcgaactacctagcaacgacttaacaacaatggctaccaagatttagccctccttgcgcttcttgccctttttgtgagcgcaacaaatgcgttcattattccacaatgctcacttgctcctagtgccattataccacagttcctccgaccagttacttcaatgggcttcgaacacctagctgtgcaagcctacaggctacaacaagcgcttgcggcgagcgtcttacaacaactacaacaacttgtgctagcaaaccttgctgcctactctcagcaacaacagtttcttccattcaaccaactagctgcattgaactctgcttcttatttgcaacaacaacaactaccattcagccagctatctgctgcctacccccagcaatttcttccattcaaccaactgacagctttgaactctcctgcttatttacagcagcaacaactactaccattcagccagctagctggtgtgagccctgctaccttcttgacacaaccacaattgttgccgttctaccagcacgctgcgcctaacgctggcaccctcttacaactgcaacaattgctgccattcaa

SEQ ID NO: 9775 - DNA, 530 bp, Zea mays
  unsure (1)..(530): unsure at all n locations; Clone ID: LIB3061-068-Q1-K6-G3
ctctttattctctttggtggtgtgtgcacttgctgctccttattcccttttccctttatgcttccattctcctctcttttttcttacctcacctttcctttcatcttttctttctcctttttctccaataccctttgggtcgacggggcggcatccatcacgcacccacatctgccatcttacctttatcacccttcatactccatcattcatctccctttttcaatcattttccttcacttcatttctcgacacttatcatcntcactcattcactccatcacctcgctctatctaacctttctccctcctcctatcatcacctatttctttcattcatccctctctgcttattgaactctncttcttttttttcccatcaaccaataccattcactcatcctccttnttcctacccccttcactttcttcccttcaaccaactttcatcattcaacttttcttcttatttacattattnccttctactacctttcaaccatctaccttncttcatcccttctacctta

SEQ ID NO: 9776 - DNA, 616 bp, Zea mays
  unsure (1)..(616): unsure at all n locations; Clone ID: LIB3061-068-Q1-K6-H1
cggtcaaaaatcccggtcgacccagcgtccggtaanaaaagcgttcaagtgcgcagcctggacctgtacttgactggatgcagagggtcaaaattgctattgaggctgcaaaagtatagaatatctgcatgaaaggttcagccttcaatcatccatcgggacatcagatcaagcaatgtactgctgtttgaggatttcaaggcaaaaattgcagactttaatcttttgaaccaagcaccagatatggcagctcgtctccattcaactcgtgtattggggacttttggatatcatgctcctgagtatgctatgactggccagctgacacaaaaaagtgatgtctacagctttggtgtggttcttttggaacttttgactggaaggaaaccagtagatcacacaatgcctcgaggtcaacaaagtttagtcacatgggctactccaaggttaagtgaagacaaggtgaagcaatgtgtagatcccaggttgaagggagaatatcctccaaagggagtcgctaagcttgctgcagtggcagctctatgtgcacagtacgaagcagagttcaggcccaacatgagcatcgntgttaaggcgctttcgcctctccttcaac

SEQ ID NO: 9777 - DNA, 626 bp, Zea mays
  unsure (1)..(626): unsure at all n locations; Clone ID: LIB3061-068-Q1-K6-H4
cggaaatatcccgggtncgnacccacgccgtccgggngtcttacaaaaccattagctttatctagctggcaggagcgcaggaanaacccgatcgacaccatgagggtgttgctcgttgccctcgctctcctggctctcgctgcgagcgccacctccacgcatacaagcggcggctgcggctgccagccaccgccgccggttcatctaccgccgccggtgcatctgccacctccggttcacctgccacctccggtgcatctcccaccgccggtccacctgccgccgccggtccacctgccaccgccggtccatgtgccgccgccggttcatctgccgccgccaccatgccactaccctactcaaccgccccggcctcagcctcatccccagccacacccatgcccgtgccaacagccgcatccaagcccgtgccagctgcagggaacctgcggcgttggcagcaccccgatcctgggccagtgcgtcgagtttctgaggcatcagtgcagcccgacggcgacgccctactgctcgcctcagtgccagtcgttgcggcagcagtgttgccagcagctcaggcaggtggagccgcagcaccggtaccaggcgatcttcggcttggtcct

SEQ ID NO: 9778 - DNA, 596 bp, Zea mays
  unsure (1)..(596): unsure at all n locations; Clone ID: LIB3061-068-Q1-K6-H5
attgaaacaactagcaacatagnaagcacaatagtgtaccaacaatggcagccaaaatttttgcttccttatgctccttggtctttctgcaagtgttgctaccganaccattttcccacaatgctcacaagctcctatagcttcccttcttcccccatacctctcaccagcggtgtcttcaatgtgtgaaaccccaattgttcaaccctacaggatccaacaggcaatcgcaacaggcatcttaccattatcacccttgttcctccaacaaccgtcagccctattacagcagttacctttggtccatttggtggcacaaaacatcagggcacaacaactacaacaacttgtgctagcaaaccttgctgcatactctcagcaacatcagtttcttccattcaaccaactggctgcattgaactctgctgcttatttgcaacaacaattaccattcagccagctagttgctgcctacccccagcaatttcttccattcaaccaactagcagcattgaactctgctgcttatttacagcagcaacaactactaccattcagccagctagctgatgtgagccctgctgccttcttgacac

SEQ ID NO: 9779 - DNA, 96 bp, Zea mays
  Clone ID: LIB3061-068-Q1-K6-H6
aaaacaccaagcgaagcgcactagcaacgacctaacaacaatggctaccaagatttagccctccttgcgcttcttgccctttttgtgaaagcgcaa

SEQ ID NO: 9780 - DNA, 285 bp, Zea mays
  unsure (1)..(285): unsure at all n locations; Clone ID: LIB3061-069-Q1-K6-B1
ccaacaagcaacatanaagtggnaatccagtagcaacaacanagcaacaatggcgaccaagatttttccctccttatgctccttgctctttctgcatgtgttgctaacgcgacaattttccctcatgctcacaagctcctatagcttcccttcttcccccataccttccatcaatgatagcttcagtatgtgaaaacccagctcttcagccctataggctccaacaagcaatcgcagcaagcaacatacctttatcacccttgttgtttcaacaatcgccagccc

SEQ ID NO: 9781 - DNA, 636 bp, Zea mays
  unsure (1)..(636): unsure at all n locations; Clone ID: LIB3061-069-Q1-K6-B9
gggccaactagcaacatagnaaagcacaatagtgtaccaacaatggcaggcaaaaattttgcctccttatgctccttggtctttctgcaagtgctgctacggcgaccattttcccgcaatgctcgcaagctcctatagcttcccttcttcccccgtacctctcaccagcggtgtcttcggtatgtgaaaacccaattcttcaaccctacaggatccaacaggcaatcacagctggcatcttacctttatcacccttgttcctccaacaatcatcagccctattacatcagttacctttggtgcatttattggcacaaaacatcagggcacaacaactacaacaacttgtgctagcaaaccttgctgcctactctcagcaacagcagtttcttccattcaaccaactagctgcattgaactctgcttcttatttgcaacaacaacaactaccattcagccagctacctgctgcctacccccagcaatttcttccattcaaccaactggcagcattgaactctcctgcttatttacagcagcaacaactactaccattcagccagctagctggtgtgagccctgctaccttcttgatacaaccacagttgttgccgttctaccagcacgctgcgccta

SEQ ID NO: 9782 - DNA, 583 bp, Zea mays
  Clone ID: LIB3061-069-Q1-K6-C1
aaacggcagtgcgtagaaaaggacgtcgaacagaacagcatgaagatggtcatcgttctcgtcgtgtgcctggctctgtcagctgccagcgcctctgcaatgcagatgccctgcccctgcgcggggctgcagggcttgtacggcgctggcgccggcctgacgacgatgatgggcgccggcgggctgtacccctacgcggagtacctgaggcagccgcagtgcagcccgctggcggcggcgccctactacgccgggtgtgggcagccgagcgccatgttccagccgctccggcaacagtgctgccagcagcagatgaggatgatggacgtgcagtccgtcgcgcagcagctgcagatgatgatgcagcttgagcgtgccgctgccgccagcagcagcctgtacgagccagctctgatgcagcagcagcagcagctgctggcagcccagggtctcaaccccatggccatgatgatggcgcagaacatgccggccatgggtggactctaccagtaccagctgcccagctaccgcaccaacccctgtggcgtctccgctgccattccgccctactactgattcatga

SEQ ID NO: 9783 - DNA, 605 bp, Zea mays
  Clone ID: LIB3061-069-Q1-K6-C6
attgaaacaactagcaacataggaagcacaatagtgtaccaacaatggcagccaaaatattttgcttccttatgctccttggtctttctgcaagtgttgctaccgcaaccattttcccacaatgctcacaagctcctatagcttcccttcttcccccatacctctcaccagcggtgtcttcaatgtgtgaaaccccaattgttcaaccctacaggatccaacaggcaatcgcaacaggcatcttaccattatcacccttgttcctccaacaaccgtcagccctattacagcagttacctttggtccatttggtggcacaaaacatcagggcacaacaactacaacaacttgtgctagcaaaccttgctgcatactctcagcaacatcagtttcttccattcaaccaactggctgcattgaactctgctgcttatttgcaacaacaattaccattcagccagctagttgctgcctacccccagcaatttcttccattcaaccaactagcagcattgaactctgctgcttatttacagcagcaacaactactaccattcagccagctagctgatgtgagccctgctgccttcttgacacaacaacag

SEQ ID NO: 9784 - DNA, 604 bp, Zea mays
  unsure (1)..(604): unsure at all n locations; Clone ID: LIB3061-069-Q1-K6-D4
gcaacatagnaagcacaatagtgtaccaacaatggcagccaaaatattttgcctccttatgctccttggtctttctgcaagtgctgctacggcgaccattttcccgcaatgctcgcaagctcctatagcttcccttcttcccccgtacctctcaccagcggtgtcttcggtatgtgaaaacccaattcttcaaccctacaggatccaacaggcaatcacagctggcatcttacctttatcacccttgttcctccaacaatcatcagccctattacatcagttacctttggtgcatttattggcacaaaacatcagggcacaacaactacaacaacttgtgctagcaaaccttgctgcctactctcagcaacagcagtttcttccattcaaccaactagctgcattgaactctgcttcttatttgcaacaacaacaactaccattcagccagctacctgctgcctacccccagcaatttcttccattcaaccaactggcagcattgaactctcctgcttatttacagcagcaacaactactaccattcagccagctagctggtgtgagccctgctaccttcttgatacaaccacagttgttgccg

SEQ ID NO: 9785 - DNA, 164 bp, Zea mays
  Clone ID: LIB3061-069-Q1-K6-F1
gggggggggggctttctgcaagtgctgctgcggggaccattttcccgcattgctcgcgggctcctatcgcttcccttcttcccccgtacctctcacccgcggtggcttcggcctgtggcatcctcattctccaccccttcattttcggggtgggggggggggcc

SEQ ID NO: 9786 - DNA, 525 bp, Zea mays
  unsure (1)..(525): unsure at all n locations; Clone ID: LIB3061-069-Q1-K6-F6
gttccttttggtgacatcgaaccgccaggtgccttccagtactttgngccctgaagaaggaccagacaccccttatcctcatccaggatggtgactccaagaagttcttgaaggttcacgttgaggctgaccagatcgtcgcttggttgaaggagtactttgatggcaaattgacgccgttcaggaagtctgagcctattcctgaggtcaacaatgagcctgttaaggtggttgtcgctgacaacgtccacgacttcgtcttcaaatctggcaaaaatgtccttattgaattctatgccccctggtgcggacactgcaagaagctggcgcccatcttggacgaggcagccaccactctccagagcgacgaggaagtcgtgattgctaagatggacgcgactgccaatgacgttcccagtgagtttgacgtccaaggctacccgaccttgtacttcgtgaccccgagcgggaaggtgacatcctacgacagcggcaggacggcggacgacatcgtcgacttcatca

SEQ ID NO: 9787 - DNA, 607 bp, Zea mays
  unsure (1)..(607): unsure at all n locations; Clone ID: LIB3061-069-Q1-K6-G4
gccgatcctgnatgaaggccacgagcgcccgctgacgttcctgcgctacaaccgcgacggggacctcctgttctcctgcgccaaggaccacacccccacggtctggtacgccgacaacggcgatcgcctcggcacctaccgcggccacaacggcgccgtctggacctgcgacgtctcccacgactcggcgcgcctcattaccggatccgccgaccagaccgccaagctatgggaggtcagcacggggaaggagctcttcagctttcgtttcgacgcgcccgccaggtccgtcgagttcgccatcggggacgcgctcgccgtcgtcaccaccgacaacttcatggaccacgttcccaccgtttcaggtcaagcgcatcgccgaggacatcgacgaccagacggaggagtctgcactcgtcatcaccggcatcaagggaaggatcaacagggccgtttggggcccgctgaacaggaccattatcactgctggggaggatgccaccattcgcatctgggactcagagactggacagcttctgaatgagtctgataaagaatctggacatcagaagaccatttcatcgttgtcaaaatccttggactggtc

SEQ ID NO: 9788 - DNA, 598 bp, Zea mays
  unsure (1)..(598): unsure at all n locations; Clone ID: LIB3061-069-Q1-K6-H3
cccggtcgacccagcgttcgctagcaacatagnaaagcacaatagtgtaccaacaatggcagccaaaatttttgcctccttatgctccttggtctttctgcaagtgctgctacggcgaccattttcccgcaatgctcgcaagctcctatagcttcccttcttcccccgtacctctcaccagcggtgtcttcggtatgtgaaaacccaattcttcaaccctacaggatccaacaggcaatcacagctggcatcttacctttatcacccttgttcctccaacaatcatcagccctattacatcagttacctttggtgcatttattggcacaaaacatcagggcacaacaactacaacaacttgtgctagcaaaccttgctgcctactctcagcaacagcagtttcttccattcaaccaactagctgcattgaactctgcttcttatttgcaacaacaacaactaccattcagccagctacctgctgcctacccccagcaatttcttccattcaaccaactggcagcattgaactctcctgcttatttacagcagcaacaactactaccattcagccagctagctggtgtgagccctgcta

SEQ ID NO: 9789 - DNA, 421 bp, Zea mays
  unsure (1)..(421): unsure at all n locations; Clone ID: LIB3061-069-Q1-K6-H6
gcgaccaaaaattttccctccttatgctccttgctctttctgcatgtgttgctaacgcgacaattntccctcaatgctcacaagctcctatagcttcccttcttcccccataccttccatcaatgatagctccaccatgtgaaaagggagctcttcanccctatangctccaacaagcaatcncancaagcaacatacctttatcacccttgntgtttcaacaatccccacccctatctttggggcacncattggtacaaaccatcagggcacaacanctgcancaactcgngctacctgngatcaaccaagtagctctaacaaacctttctccctactctcancaacaacaatnncttccattcaaccaactgtctacactaaaccctgctgcttatttgcagcaacaactattaccatt

SEQ ID NO: 9790 - DNA, 675 bp, Zea mays
  unsure (1)..(675): unsure at all n locations; Clone ID: LIB3061-094-Q1-N6-A1
gggggggggggggggggggnnggtgnggggggggggngggnnggggggggggggnnnnngnngggttggnggggtgggttntgggggggttgggggggggggttggttgggtggtggntgtgggggggggggggggtgtgggggggggggggggggggtggtgtgggggtggggggggggggggggtggggggggggggggggggggggggggtggggggggtggggggggggggtgggggggggggggggggggggggggggggggggggggggggggggggggggggggggggggggggggggggggggggggggggtggggggggggggggggggggggggggnggggggggggggggggggggggggggggggtgggggggggggggggggggggggggggggggggggggggggggggngtgggggggggggggggggggggggggggtgtgtggnngtgggggggggggggggggggggggggggggggggggggggggggggggggggggggtggggggtggtgggggggggggngggggggggggggggggggggggggggggggntgtgngggtgggggggggtggggtggggggggggtgggggggggggtgggggggggggggggtgggggggggggggggggggggggggggggggggggggg

SEQ ID NO: 9791 - DNA, 296 bp, Zea mays
  unsure (1)..(296): unsure at all n locations; Clone ID: LIB3061-094-Q1-N6-A5
gggaatgtnnctttttntttgttgggggccccnttcttcagccccttgctttctttttggnttgctcctgatccgccctcttccttttggcccccgccttgctgggttgttggttgaacgctgctgggtttggcggggggggcggtcgtatggctgccgttgttgccgttgttagcgggtgccggcgtctggcgccgcgtgctggtggtccggcggcctcttgcgttgttgtcttgcggttgctgggctcgcccctgcttgctggctttttggttgttgttgttgctgtttgttgg

SEQ ID NO: 9792 - DNA, 545 bp, Zea mays
  Clone ID: LIB3061-094-Q1-N6-A9
agaaatgtactttcttatttctgggaagccacaaacatcagacaaaaactttattattgaactataactcataagaaatctaaaagaggcaccaccaatgatgggttgttggtagaatgctgttgggtttgtcaaagcaagttggttgaatggcagcaattgttgcagttgtaagagggtgccagcgttaggcgcagcgtgctggtagaacggcaacaattgtggttgtgtcaagaaggtagcagggctcacaccagctagctggctgaatggtagtagttgttgctgctgtaaataagcaggagagttcaaagctgtcagttggttgaatggaagaaattgctgggggtaggcagcagatagctggctgaatggtagttgttgttgttgcaaataagaagcagagttcaatgcacctagttggttgaatggaagaaactgttgttgctgagagtatgcagcaaggtttgctagcacaagttgttgtagttgttgtgccctgatgttttgtgccaataaatgcaccaaaagtaactgctgtaata

SEQ ID NO: 9793 - DNA, 490 bp, Zea mays
  Clone ID: LIB3061-094-Q1-N6-B10
ggaacaatacttttttcttttcatttcaattggtcattcagggcattgctcacactgaccctgccacccatggggatgcgggacacattattacccaatcatcgccgctaaatgacccaactagctagctagccagcggctttactacaacacatagtttcttcagggggggacaccccccgcagcaacgtaggggcatggagtcggctgctgcaagccccacatcgccctcagttgctgcgctatttgcgccgccaacaaccccgcgacctggcccctttgcggctgctgctgcaggatggactggaggaccaaacccaaaaacccctggtacccgggctgcggctccacctgcctgagctggtggcaacactggtgccccaaccactggcactgaagcgaacaatagggcgtccccctcgggctgcactgatgcctcaaaaactcgacccactggcccaagatcggggtgcttccccgacccctgggt

SEQ ID NO: 9794 - DNA, 555 bp, Zea mays
  unsure (1)..(555): unsure at all n locations; Clone ID: LIB3061-094-Q1-N6-B12
gggggggggggggggnnnnnnnnnnnttgtggggnggggggggggggggggggggggccccccgnnnnnnngggggggggngggggggnnnnngngggggggtttgtcngncttttgggnnnnnnggggggggttttttcccctggggggggggggggccccgcggnnccccnncccccttccccctccttgcgggggggggggggggcgcccccccgggggggggcggnnggcggggggcgggggggcggggggggggggggcgggtggccgggggggggggggcggcggccggtcgggggggggtggggcggcggggggcggggcggggggccggctgcggggggggggtctgggggggggtgggggggggggggggtggggggcggcggggcggggggggggggggtcgggggggggggggggggcgggggggggggggggggggggggggcggggggggcgggggggtgtgggggggggggggggcgggggcgggggggggggggtgttggcggcgggggggggggggggggggggggggcggcggcgggg

SEQ ID NO: 9795 - DNA, 447 bp, Zea mays
  unsure (1)..(447): unsure at all n locations; Clone ID: LIB3061-094-Q1-N6-B2
ctagaatgtactttcttatttctgggaagccacaaacatcagataaaaactttattattgaactataactcataagaaatctaaaagagggcaccaccaatgatgggttgttggtagaacactgctgggtttgtcaaagcaagttggttgaatggcagcaattgttgcagttgtaagagggtgccagcgttaggcgcaacgtgctggttgaacggcaacaactgtggttgtgtcaagaaggtagcngggctcacaccagcttgctggctgaatggtngtagttgttgctgctgtnaataagccggagagttcaatgctgctagttggttgaatggaagaaattgctgggggttggcagccggtagctggctgactggtcgttgttgttgttgttttttggccgcgcgttttttgaacctggttggttgaatggtagaaacttctgtt

SEQ ID NO: 9796 - DNA, 569 bp, Zea mays
  Clone ID: LIB3061-094-Q1-N6-B3
aggaacgaaaacttatttatttctgagaagttcaccacaggccgcagcttttgcgaccacacctcacaaacaaccatcagagttcaggcacttcacacctcaccaaaccaaacctcgaacactaaccaacttaatccacctcctcgatcttgggaccagcaccgctcccaccagacggggcatcctcatccatgccagcagcagcgcccatgcccgcgccctcgccctggtacatcttcgcgatgatggggttgcagatcccctcaagctccttcatcttgtcttcgaactcctccacctcagccagctggttgctgtccagccagctgatggcgccgtcaacggcatcttcgatcttcttcttgtcctcagcggggagcttggaggcgatcttgtcgtccttgatggtgttcctcatgttgtaggcataattctcgagcgcgttcttggcgtccaccttcttcttgacctcctcgtcctctgccttgtacttctcagccttctgcaccatcttctcgatctcctccttgctaagccggcccttgtcgctggtgatcgggatcttgttc

SEQ ID NO: 9797 - DNA, 577 bp, Zea mays
  Clone ID: LIB3061-094-Q1-N6-B4
aaaccataatttcacttgcatttctccgcttacaggaaaatagatttaacttagttaggttgcacttagaatagagcaatgaataatgatgagaaatgaacttgtcgatttctcaagaatatagagaatatttacctacctgtactacgagtcactgatctgtacaacaacagatataactggaacttcgtctgttgcattgacagcctttgtcttcagccccagcagtactgttactgacagtccgtgactcttaaaacaccacaaagggcagacggctcacgcttaaaatcacaataagattccaaaccttcctcttggcaggccacaagcaagtagccttgatagtttaactgtcattgaagcagtagtgaggaattggagaaaggttaaaactgtcttgatattatgtcacaagtcatcaacgtcgtgatcctcatcattatcactaaactctgcgtcactgcaagactcagaatctccatcacttgcagaattcgaagcctccaaattttctgacgaattccaatcaggtggaaatattcgctgaagtgcttctgttagtgcacctcctgta

SEQ ID NO: 9798 - DNA, 538 bp, Zea mays
  Clone ID: LIB3061-094-Q1-N6-B5
cgagataaatctcaatcaatatattgattatttctaggaaacacacgtcggtttgagggcaccattatcgagtacatctcatttgtaatctaaaaaaggcacctccaacgatgggttgctgcctcgacaagacaggattcatcaaagagaactggttgtatggcagcaattgttgctgctgtaggaaggcggcgaccaatgggttagccactaccaatggattaagtaactgttgtcgctgttgtaggtacccagcagagttcgacagagtcagttggttgaatggaagcagctgttgcaagtaggcaacagggtttgccacagctagttgagtcaaagctggtacaatctgttgcaacaattgttgttgcaggtatgtaggtgcattgcccacagcgagcgggctaaataaaagcagttgttgttgttgtacgtaggcggcagggttcaccatggctagttgactgagcgttggcagaaactgttgtagctgttgttgttgctggtttgcaactacgttcgccaaagcaagtgggtt

SEQ ID NO: 9799 - DNA, 522 bp, Zea mays
  Clone ID: LIB3061-094-Q1-N6-B7
cagacaaaaaactttattattgaactataactcataagaaatctaaaagagggcaccaccaatgatgggttgttggtagaacactgctaggtttgtcaaagcaagttggttgaatggcagcaattgttgcagttgtaagagggtgccagcgttaggcgcagcgtgctggtagaacggcaacaactgtggttgtgtcaagaaggtagcagggctcacaccagctagctggctgaatggtagtagttgttgctgctgtaaataagcaggagagttcaatgctgccagttggttgaatggaaaaaattgttgggggtaggcaacaggtagctggctgaatggtagttgttgttgttgcaaataagaagcagagttcaatgcagctagttggttgaatggaagaaactgctgttgctgagagtaggcagcaaggtttgctagcacaagttgttgtagttgttgtgccctgatgttttgtgccaataaatgcaccaaaggtaactgctgtaatagggctgatgattg

SEQ ID NO: 9800 - DNA, 579 bp, Zea mays
  Clone ID: LIB3061-094-Q1-N6-B9
gcagaagaaccatataatggttaattgtatactaacacatgcaaatacaatttggttgggctgtggcccatgaaagctcaaacctacaaggctacaccgccagtattgtaataagggttttgaaaatctgttttcaataatttcccagaccttttgctgggagccaggagacatctcactgcattatgttctcttattttctttcacgacggttttcaagaagtccaacataacatgtcaaaagtgccctagaatttttccagttactgacagtaattggctggttgctgctgcaatttagaactctggctattggccatagtggataggcatacagcctatttctggaaggcgactgaaataaaagggcctgcaggttgttcccttttatgtaatcccacattttcttcacgacatcagatcgtgataacatgctctcaccagtgccgataaattttactaaatcatccgaaagttgaaggggcacgagaaaaccagatccagctcctgaagagccacccttttgcttctttccttcactcctgtctctcttttgtggcttctctttgggtgttgatc

SEQ ID NO: 9801 - DNA, 582 bp, Zea mays
  Clone ID: LIB3061-094-Q1-N6-C10
ggaaatataacttcttatttctaggaggccacatacatcagccaaaaaacttcattattgaattacaactaataagcaatctaaaagaggcaccgccaatgatgtgttgttggtagaaggctgctgggtttgtcaaagcaagttggacaaagggcagcaactgttgcagttgtaagagggttgcggggttagccacaaactgctggtagaacggaagcacttgttgttgtgtcaagaaggaagcggggcttgttgtagctagctggccaaatggtagtagtatttgctgctggaaataagcagaggggttcagtgcggccaattggttaaatggaagaaattgttgctgctgagagtaggcagtagctagctggctgaatggtagtagttgttgttgctgcaaataagcagcagggttcagtatagacagttggttgaatggaagaaattgttgttgctgagagtagggggaaaggtttgccagagctacttggctgatcactggtagcacgagttgctgcaactgttctgccctgatggtttgtaccaatgactgcaccaaagatgggctggcgattgttg

SEQ ID NO: 9802 - DNA, 323 bp, Zea mays
  unsure (1)..(323): unsure at all n locations; Clone ID: LIB3061-094-Q1-N6-C11
gggggtggttttttttttttttttaatttttttttttttttttttatgttttttggggggggggggggggggttgggggtgttttggtgtggggggggggggggggggatgggttatatttgttggagaggggggaaggatggggggtgtggggggggggggggggggtttggnnntaantggtggtgggtggggtaggaaggttggttgtgtgtggggggggggggggttggtggtggtttttggggggggggtgggggtttggggttgtgggtggggggggggggggttgggggggggggtgggggttggggggggggggg

SEQ ID NO: 9803 - DNA, 575 bp, Zea mays
  Clone ID: LIB3061-094-Q1-N6-C4
aggaaatgtactttcttatttctgggaagccacaaatatcagcaaaaaaactttattattgaactataactcataagcaatctaaaaggggcaccaccaatgatgggttgttggtagaacactgctgggtttgtcaaagcaagttggtcgaatggcagcaattgttgcagttgtaagagggtgccaacgttaggcgcagtgtgcaggtagaacggcaacaaatgttgctgtgtcaagaaggcagcagggctcacagcagctagctggctgaatggtagtagttgttgttgttgtacataagcatgagagttcaatgctgccagttggttgaatggaagaaattgccgggggtaggcagcagctagctggctgaatggtagtagttgttgttgctgcaaataagcagcagagttcaatgcagctagttggttgaatggcagaaactgttgttgctgagagtaggcagcaaggtttgctagcacgagttgttgtagttgttgtgccctgatgttttgtgccaacaaatgcaccaaaggtaactgctgttgcttgagagtagcagcaaggtttgctag

SEQ ID NO: 9804 - DNA, 569 bp, Zea mays
  Clone ID: LIB3061-094-Q1-N6-C5
aagaatctagaaagtactttcttatttctgggaagccacaaacatcagataaaaaactttattattgaactataactcataagaaatctaaaagagggcaccaccaatgatgggttgttggtagaacactgctgggtttgtcaaagcaagttggttgaatggcagcaattgttgcagttgtaagagggtgccagcgttaggcgcaacgtgctggtagaacggcaacaactgtggttgtgtcaagaaggtagcagggctcacaccagctagctggctgaatggtagtagttgttgctgctgtaaataagcaggagagttcaatgctgctagttggttgaatggaagaaattgctgggggtaggcagcaggtagctggctgaatggtagttgttgttgttgcaaataagaagcagagttcaatgaacctagttggttgaatggaagaaactgctgttgctgagagtaggcagcaaggtttgctagcacaagttgttgtagttgttgtgccctgatgttttgtgccaataaatgcaccaaaggtaactgttgtaatagggctgatgattgtt

SEQ ID NO: 9805 - DNA, 571 bp, Zea mays
  Clone ID: LIB3061-094-Q1-N6-C6
atcgagaaaaatgtcaatcaatatattgattatttctaggaaacacatgccggtatgagggcaccattatcgattacatctcatatgtaatctaaaagaggcacctccaacgatgggttgctgccacgacaaggcagggttcatcaaagagaactggctgtatggtagcaattgttgctgctgtaggaaggcagtgaccaatgggttaggcactgctagtggattaagtaactgttgtcgctgttgtaggtacgcagcagagttcgacacagtcagttggttgaatggaagcagctgttgcaagtaggcagcagggtttgccacagctagctgagtcagagctggtacaatctgttgcagcaattgttgttgcaggtatgtaggtgcattacccacaacgagagggctagatgaaagcagttgttgctgttgtaggtaggcggcagggttcaccatggctagttgactgagcgctggcagaaactgttgcaattgttgttgttgttggtatgcagctacgtttgccagaagcaagtggttggatgcaagcacctgctgttgcaagtaggcg

SEQ ID NO: 9806 - DNA, 499 bp, Zea mays
  Clone ID: LIB3061-094-Q1-N6-C7
atcgagataaatctcaatcaatatattgattatttctaggaaacacatgtcggtttgagggcaccattgtcgagtacatctcatatgtaatctaaaaaaggcacctccaacgatgggttgctgcaaggcagggttcatcaaaaagaactggttgtatggcagcaattgttgttgctgctgcaggaaggtagcgaccaatgggttagccactgccaatggattaagtaactgttgtcgctgttgtaggtacccagcaaagtttgacacaaccagttggttgaatggaagcaactgttgtaagtaggcagcagggtttgccacagctagctgagtcaaagctggtacaatttgttgcaacaactgttgttgtaggtacctaggtgcattgcccaccgcgagcgggctaaatgaaagtagttgtaggtagacggcagggttcaccatggctagttgactgagcactggcataaactgttgcaactgttgttgttgctggtat

SEQ ID NO: 9807 - DNA, 354 bp, Zea mays
  Clone ID: LIB3061-094-Q1-N6-C8
aactgaaaccgccaaattgcctagctgtttgacatgcctgtcaaacaatcagaaggtggggccttcaaattggtccatggggacaaacaaattttttgcaaaacaattgccaaataagggggggctacattctacaattggcatgtacagcccccctacctccaattttagggttactaaaagcagttagggtggcagttacaaagggtttaatttatgccccaaccccaagttcaaaaatgtcacacaacataaagggccatcacaagggtggcctttttttcaccttttgggggtacaatttatcaagggcgtcaaccatggccttgcggaatgcattcttgtggaggaaaa

SEQ ID NO: 9808 - DNA, 399 bp, Zea mays
  unsure (1)..(399): unsure at all n locations; Clone ID: LIB3061-094-Q1-N6-D10
atgttgtgttggggggggggggtgtttggtgttgtttttggggggtgggttgtggggtttttttgtgggggggggaagaggggtggggggggggggggggggtggtgggggaaagggagtttttgttggtgtgtcccgtgggaagcacgagtagggggggggagcccggaaaatggggggggggggggggggtggaattttgccgcggggtttaggggcggggaagtggttaaatgggagaagggaaggggggggggggttccttcttgttttttttgtggggggggcgactaggtgggttgggtttaagagagccccctttgttgcgtggtttttttnttttgggggtgggtttttgtgtgtgggggtttaaggcgggggggggggtggggggggccc

SEQ ID NO: 9809 - DNA, 518 bp, Zea mays
  Clone ID: LIB3061-094-Q1-N6-D11
aacgaacggcaggtgttttggatagagtaccactaccagggtacagaaggagcgaaaactacagcccaaaacaagggcccggaatgaagttaaacacaacgggaggctactagtttaacaagtttatttattatcgctcatcgaccatgcacggacgccacagtagggggcggcacgtaggggcgggcgcgcgccacggcatcacatgatcacatcttcccctggcgatgcacgcaggacgagccggcgcaaccctccacgcacttttcgacgcactggtccacccgctccgccgcacgctgctgcatcagccggtccttctcctcgaagtacaccgacgccgccttttccgccgcgcgttccttcgccgtgcgcttgtcctcgccgcccagccggacgttgacgtgctgaccttggcccagcgtcagcttctccttgatcgcgcccgtcacgttccccagcgcccccagcagaccttgtccctgctccctatcagtgtcctgagtgctggccgtctc

SEQ ID NO: 9810 - DNA, 349 bp, Zea mays
  Clone ID: LIB3061-094-Q1-N6-D2
ggggaaagggttttttttttttttgggggggccctttcttttgccaaaaaatttttttttggttttcaactttttagcaatttaaaaaatgggccccccaattttttttttttggggaaagggttttgggttttttaaaaaaaggtgggcaaaggggggcccctttttcctttttaaaaggggtggggggtttgccccaaaatttttggtgaaaggaagcaatttttttttttttaaaaaagaaaggggggttttttttccttgctggccaaatgggggttgttttttgtgggggaaataaaccggggggttttcgggggcccttttttttaaaggaaaaaattttttt

SEQ ID NO: 9811 - DNA, 72 bp, Zea mays
  unsure (1)..(72): unsure at all n locations; Clone ID: LIB3061-094-Q1-N6-D3
ggcttatgagcacatgcatttctaccaggggtccaacttaaaattggttcacattttcaacacagnaaacct

SEQ ID NO: 9812 - DNA, 149 bp, Zea mays
  Clone ID: LIB3061-094-Q1-N6-D5
atgagaactttattattacagtataaagcataaaaaatctagaagaggcaccaccaatggtgggctgctgcaataaggtggtaggattcgtcaaagcaagttggttaaatggcagcaattgttgttgttgtaagaaggcgacattgttt

SEQ ID NO: 9813 - DNA, 162 bp, Zea mays
  Clone ID: LIB3061-094-Q1-N6-D6
gatcaaaacattgtcaaaacttatcaacaggttatgttaccacaatgcccaccaatttaatcgggcataagcaccggaccggaccacacagtttaacggtgacattgctctgacgctaggctcaggtcctgagtctacagaacactatagcttgtgcacggg

SEQ ID NO: 9814 - DNA, 402 bp, Zea mays
  Clone ID: LIB3061-094-Q1-N6-D7
aaaaagtacttttttttttttggggccccccaaacattattcaaaaaactttatttttggacttttactcataagcaatttaaaagagggcccccccaatggtgggttgttggtagaacactgttgggtttgtcaaaacaagttggttgaatggcaacaattgttgcagttttaaaagggtgccagcgttaggcattgcgtgcaggttgaacggcaacaacttttttttttttaaaaaggcaacagggctcacattaactagctggcttaatggtaatagttgttgcttctttaaataaacagcaaagttcaatgcttcttgttggttgaatggaaaaaattgcttggggtaggcaacaactaactggcttaatggtaattgttgttgcaaataaaccgcaa

SEQ ID NO: 9815 - DNA, 471 bp, Zea mays
  Clone ID: LIB3061-094-Q1-N6-E8
aaatgcaatccttaacttaattcactgcacttctcaatattatattctgactacaaagaaccgcagcgcatagacacaaccttattaagttgagagaaaaaaaaacatgcatctttaaccttataacttgcgatgtaaaaacggaatatcaaaagtgctaaaacagagaaagtttcgcctgtaaaaacggaatatcaaaagtgatttcgcctcgctaagttcccttcttctaaccgaatataaatacggtacccctcagtaagtcctcatctataactcccggcagagtccaacatttgtggttgtccaaaactttcatagcatgccagactgcagccttacactgcccagtctttaccgacgacctccaggctttcttgcaggcggggcctgctcgtcctcgtccgattcaacatctccgtactgccaaatccgcagcctttccttctttgccttgtcctggaactgttc

SEQ ID NO: 9816 - DNA, 439 bp, Zea mays
  Clone ID: LIB3061-094-Q1-N6-F10
agggtgacagattttgttgatccaaagcaggtaatggaaatacaaaggttcataaaaagggttgctgcaacttttagggcagcttataacagtacatactagcagcacaaatggtcaaagaacaacatgccaaactacccattttgcgcccgaacccttgactttctgtaaaacgggttttaccataccaaggttacacgatccattgatgcaataccattgtaggttcttgttttgtaaacccaaacccagcccatctatatgacaaacccatcgttgatgggtgcatttttcaagatcaccacgattccaaaccttatgtagtaccctttttccgggtgaacaacctcttggatgcccttactgtttgggatcaccacgtttttcccaatcctagcattcatgtcaaagatacaaatccttatttttgggttccttc

SEQ ID NO: 9817 - DNA, 272 bp, Zea mays
  unsure (1)..(272): unsure at all n locations; Clone ID: LIB3061-094-Q1-N6-F2
aaaccccgcccttttttttttttttttttttttatttttccttaaatctggaaatgtattttttttggtggccattctctcccnaactttttttggttcactttagcntctaaggggcccccaatgatggtgtggtggggccgttggctgcaagcagttggctgggctcattgtgtgttgtgagggtgtggggtgtcgttatgtggtgttggggttctgttgtggtttggggggccggtttgtgctgttgtgcttttggtgtggttttgttg

SEQ ID NO: 9818 - DNA, 350 bp, Zea mays
  Clone ID: LIB3061-094-Q1-N6-F3
gggaaattaaatttttattttttggggggcgcgttccttagccaaaaaaatcatttttggatttcaacttataagcaatttaaaaaaggggacccccaaaaatttgttgttgggagaagggtgctgggtttgtcaaaacaaggtgggcaaagggcgcaattggtgcagttgtaaaagggggccaaggtttggggcaacgtgctggttgaacgggaacaactgggggtgtgtcaaaaagggggcaggggttacaccaactagctgggtgaatgggggtagttggtgctgctggtaataagccggaaagttcaatgctgctagttgggtgaaaggaaaaaactgtttttgct

SEQ ID NO: 9819 - DNA, 433 bp, Zea mays
  Clone ID: LIB3061-094-Q1-N6-F6
ccgggaaaaaccccaaccaatttttgggttttttttgggaaccccatccccctttgggggcccccttttcgggtcccccccattgggaaccaaaaaagggcccccccaaccatgggttgctcctgtgggaaggcaccccccaaggggttacccccccctgggggataaagaaaccgtggcccctgtggtaggcccccaccaaagttccccccaaccagttggttaaatggaaatagttgttccaagtaggcaccagggtttcccccacctagctgagaaaaacctggtccaattggtggcaccacccgtggtggcaccacccgttgttgcaggtttttagggccattgcccaaagcgagcgggctaaataaaaaaaattgttcctgttgtaggtaggcaaaagggtccaccatggctagttacctgacccctg

SEQ ID NO: 9820 - DNA, 585 bp, Zea mays
  Clone ID: LIB3061-094-Q1-N6-F8
atcgagataaatctcaatcaatatattgattatttttaggaaacacatgccgctatgagggcaccattatcgagtacatctcatatgtaatctaaaagaggcaccaccaacgatgggttgctgccacgacaaggcagggttcatcaaagagaactggttgtatggcagcaattgttgctgctgtaggaaggcagcgaccaatgggttagccaccgctagtggattaagtaactgttgtcgctgttgtaggtacgcagcagagttcgacacagtcagttggttgaatggaagtagttgttgcaagtaggcagcagggtttgccacagctagctgagtaagagctggtacaatttgttgcagcaactgttgttgcaacaactgttgttgcaggtatgtaggtgcattgcccatagcgagcgggctagatgaaagaagttgttgctgttgtaggtaggcgatagggttcaccatggctagttgactgagcgctggtagaaactgttgcaactgttgttgttgttggtatgcagctacgtttgccaaagcaagtgggttggatgcaagcagctgttgttgcaagtaggc

SEQ ID NO: 9821 - DNA, 431 bp, Zea mays
  Clone ID: LIB3061-094-Q1-N6-G10
agcttgaatagcgctcatgatgaagttttgtacagccttaactaggtatttaaaggcttccaaaaatctggagttacgatttttcgaatacgaacagcattgacatctcattagatggactatcatctttagcatgaacatccaagtgtttattcgaaagttaagaagaatcggcgacaaatagattgcctgttcagggaagagctatcatccatctactctacacgccataaagcttgtttaaaccataggccatggagacaaactagtcctccagaatgacgaagcagctcactttggaaaatggtcagttggaatatgtatttagcttaaaacacatgtgcctttttgccagtaatgatttgagaaatgtgaagtcccctgctgaaagcttcattgaacaggatccttgtttgcattttctgaagccc

SEQ ID NO: 9822 - DNA, 420 bp, Zea mays
  unsure (1)..(420): unsure at all n locations; Clone ID: LIB3061-094-Q1-N6-G2
ggggggggggggngngggggggggggggggtgggggtggtgggggggggggggggggggggggggggntggggggggggggggtgtgggggnngggggggggggggggggggggggggggggggggggggggggggggggggggggtggggggggggggggggggggggggggggggggggggggtggggggggggggggggtgggggtggtgtgtgggggggtggggggggggggggggnggggggtgggggggggggggggggggggggggggggggtggggggggggggggtggggtggtggggtgggtgggggggggttgggggggggggggggttggtttnttttntgggggggggggtggggggggggggggggggggggggggtgtggggtgttggggggggggggtgggggg

SEQ ID NO: 9823 - DNA, 349 bp, Zea mays
  Clone ID: LIB3061-094-Q1-N6-G4
gggaaatgttcttttttttttttggggaggcccaaccttaggcaaaaaatttttttttggacttttacttcttagaaattttaaagagggcccccccaatggtggggtgttggttgaatgcttttgggtttgtcaaagcaagttggttggatgggggcaattgttgccgttgttagagggggcccgcgtttggggccccgtgcttgttggacggccaccattgtggttgtttttagaagggtgcaggggttccacccgcttgctggcttaatgggtgttgttgttggtgctgttaatttgccggggagttcaaagctgtcagttggttgaatgggcgaaattgctgggg

SEQ ID NO: 9824 - DNA, 284 bp, Zea mays
  Clone ID: LIB3061-094-Q1-N6-G5
cgggttaaatctcaatccattttttgattatttctaggaaacacatgtcgggttgagggcacccttggcgagttcatctcatttgtaatctaaaaaaggcacccccaaccatggggtgctgcaaggccggggccctcaaaaaaaactgggtgggtggcagcaattgttgttgctgctgcaggaagggagcgaccaatggggtagccaccgccaatgggttaaagaaccgggggccccgccggaggtacccaagagagtttggccccccccgttgggtgaatgga

SEQ ID NO: 9825 - DNA, 564 bp, Zea mays
  Clone ID: LIB3061-094-Q1-N6-G7
aaaattctgactagctatttcaatttatttcagttccacggtgtattgtacatggttcatcgcgcgcaaccagaaacattcccttggtggtgactggtgaggacgaccgcgcgcgttgggagggcgcaggctcagtgcttgcttattccaggagctaccgctacggacatggcgccatctatagagcagagtggaacagaatctccgccagttcctgtttgccggacggaacagtgggctcaccccactcaaggaccttcttctctagcgcctcaaagtctcctttcccagcctcgatcaaggcaccaatctcactatcaaagctctggtaccgcttgcggacgagagcatctagggaaccatcctcgatcagcttggcggcgttgcggaggccacgggccagggtgtccattccggagatatgagcaagaaacaagtcctcaacatcagtgctttccctccgcaatttggcgtcaaagttgaagccaccaggtgcaagtccaccattcttaaccacagttgacataaccaaagtagcctctgcaatgtctgtcatgaactgat

SEQ ID NO: 9826 - DNA, 600 bp, Zea mays
  Clone ID: LIB3061-094-Q1-N6-G8
agaaatgtactttcttatttctgggacgccacaaacatcatccaaaaacttcattattgaactataactcataagcaatctaaaaggggcaccaccaatgatgggttgttggtagaacactgttgggtttgtcaaagcaagttggttgaatggcagcaattgttgcagttgtaagagggtgccagcgttaggcatagcgtgcaggtagaacggcaacaactgttgttgtgtcaagaaggcagcagggctcacatcagctagctggctgaatggtagtagttgttgctgctgtaaataagcagcagagttcaatgctgctagttggttgaatggaagaaattgctgggggtaggcagcaactagctggctgaatggtaattgttgttgcaaataagcagcagagttcaatgcagccagttggttgaatggaagaaactgatgttgctgagagtatgcagcaaggtttgctagcacaagttgttgtagttgttgtgccctgatgttttgtgccaccaaatggaccaaaggtaactgctgtaatagggctgacggttgttggaggaacaagggtgataatggtaagatgcctgttgcgattgc

SEQ ID NO: 9827 - DNA, 503 bp, Zea mays
  Clone ID: LIB3061-094-Q1-N6-G9
cattaaaaccaaaactttattatgaccatgcatatattattggtcataccacacatgataatgtgtgtcgtcttactgcattattacatatatagatagagagagatggatagaggagatttcccaaatatcatgaatcagtagtagggcggaatggcagcggagacgccacaggggttggtgcggtagctgggcagctggtactggtagagtccacccatggccggcatgttctgcgccatcatcatggccatggggttgagaccctgggctgccagcagctgctgctgctgctgcatcagagctggctcgtacaggctgctgctggcggcagcggcacgctcaagctgcatcatcatctgcagctgctgcgcgacggactgcacgtccatcatcctcatctgctgctggcagcactgttgccggagcggctggaacatggcgctcggctgcccacacccggcgttgtagggcgccgccgccagcgggctgcactgcggctg

SEQ ID NO: 9828 - DNA, 322 bp, Zea mays
  unsure (1)..(322): unsure at all n locations; Clone ID: LIB3061-094-Q1-N6-H12
ggggggtgggtngtggggggggttgtggggggggggggggggggggggggggggggggggggtgttgggggggggggttggggggggggggggggggggggggggggggggggggggggggggtggtggggggggggggggggggggngggggggggggtggggggggggggggggggggggtgggggggggggggggggggggggggggggggggggggggggggggggggggggggggggggggtgggtggngggggggggggggggggggggggggttngggggggggttggggggtggggggggggtggggggggggg

SEQ ID NO: 9829 - DNA, 349 bp, Zea mays
  unsure (1)..(349): unsure at all n locations; Clone ID: LIB3061-094-Q1-N6-H7
gaaagnactttctnattnctgggaagccacaaacatcagacaaaaaactttattattgaactataactcataagaaatctaattttgggcaccaccaatgatgggttgttggtagaacgctgctgggtttgtgaaggcaggttggttgaatggcagcaattgttgccgttgtnagagggtgccagcgttaggcgcagcgtgctggttgaacggcaacaactgtggttgtttcaagaaggtngcagggctcacaccagctngctggctgaatggtngtngctgttgctgctgtcattcngccggngtgttcaatgctgcccgttggttgagtgggagaaattgctggggg

SEQ ID NO: 9830 - DNA, 694 bp, Zea mays
  unsure (1)..(694): unsure at all n locations; Clone ID: LIB3061-095-Q1-N6-A1
aaaaaaacacacggggggggggggggggggggggnnngngngnggggggggggggggggggggggggggggnngggggggggggggggnggggngggnngggggggggggggggggggggggggggggggggggggggggggggggnggggggggggggggggggaggggnnnggggggggggggggggggggggggannnagggagagggggggggggggggggggggggggggggggggggggggggggggggggggggggggggggggggggggagggaaggggggggggggggagggggggaggggagggggnggggggggggggnggggggggggggggggggggagggggggggggggggggggggggggggggggggggggggggggcggggcggggnggggggaggggggggggggggaggcggggggggggggggggggggggggggggggggggagggggagggggggggggggggggggggaggggggggggggggagggggagggagggggggcggggggcagggggggggggaaaggaggngaaggggggggggggggggggggggggagggggaggggggagggggggggaggggggangaagggggaaagaaggggggngaagaggggggggnaggggggggggggaggggaggggggggggagggggaaggggggggg

SEQ ID NO: 9831 - DNA, 66 bp, Zea mays
  Clone ID: LIB3061-095-Q1-N6-A2
ggggggggggggggggagagggggggggggggggaggggggggggggggggggggggggggggggg

SEQ ID NO: 9832 - DNA, 342 bp, Zea mays
  unsure (1)..(342): unsure at all n locations; Clone ID: LIB3061-095-Q1-N6-A4
gggggggggaannggggggggggggggnngnnnnnnnngnnnaagggggggggggggggggggggggggggggggggggggggggggaggggggggggggggggggagggggggggggggggggggggggggggggggggggngggggggggggggggaggggggggggggggggggggggggggggggggggggggggggggggggggggggaggagggggggggggggggaggggggggggggaggggggggggggggaggggggggagggangggggggggggggggggggggggggggggggggggggggggggggggggggggaggagagggggggg

SEQ ID NO: 9833 - DNA, 174 bp, Zea mays
  unsure (1)..(174): unsure at all n locations; Clone ID: LIB3061-095-Q1-N6-A5
ggggggggcacagncacnncgcaggaccccccggaacaaggcccgagggccaganacgccggggcggcacaaccacaggcagccgggggggggggcgacgaacagggaaccagcgccggacgcggggcaccacnncgggaagggcagggcgnaagccgcggcgggcgccgaccc

SEQ ID NO: 9834 - DNA, 253 bp, Zea mays
  Clone ID: LIB3061-095-Q1-N6-A9
ggggggcccggtggttacttgggttttttccttaaggggttccttttttattcggggcacggggttttttcccccattggtttttaaccaaacgccataaccaattttgggaaaaaaaaggtccttttggtctagggtgaattacttttggggggggggtcttaagggggtaaaaataaacttttttaacgcgggtttaaaccaagttaagtttcctttttgggggggaacaaaccaacacttggggaatttt

SEQ ID NO: 9835 - DNA, 382 bp, Zea mays
  Clone ID: LIB3061-095-Q1-N6-B1
ggaaattaacttcttatttctaggaggccacatacatcagccaaaaaacttcattattgaattacaactaataagcaatctaaaagaggcaccgccaatgatgtgttgttggtagaaggctgctgggtttgtcaaagcaagttggacaaagggcagcaactgttgcagttgtaagagggttgcggggttagccacaaactgctggtagaacggaagcacttgttgttgtgtcaagaaggaagcggggcttgttgtagctagctggccaaatggtagtagtatttgctgctcgaaataagcagaggggttcagtgcggccaattggttaaatggaataaattgttgttgctgagagtatgcagtagctagcttgctgaatggt

SEQ ID NO: 9836 - DNA, 586 bp, Zea mays
  Clone ID: LIB3061-095-Q1-N6-B10
agtgagaaatgaccttcctttaacttgtacttcagccagacagttctaagtccacacaagcacaacagcgggtgaccgtagagggtcacttgaattttggggagagcaactctagtccacccatatagggtcttagtggctctggaaccacaatcgacccatcgccctgctgaaaattctctagaatgcaaactatcagacgaggcaccgccactgctgtagcgttgagcgtgtggacgaactgcgtagggcctgaggcagctcccttccctttcttggtgctcgttgatggaggctccgagggtgatgggcggtaacggatgcctagtcgcctactttggtagtcggtacaatttgatgcactggagatctcaccataacgctctaggccgggcatccacgcctcgatatcaaatttccggtaggctggtgcacccagatccccagttgccatgtccagagttttgaaatgaagtccaagtgatgcataaagatcctcttcaattgtaataagttcttcatgccattttccactctcctctggccgacagaatatgaacatctcaaccttgctaaattgatgtac

SEQ ID NO: 9837 - DNA, 533 bp, Zea mays
  Clone ID: LIB3061-095-Q1-N6-B11
ggaaatgtaacttcttatttctaggaggccacatacatcagccaaaaaacttcattattgaattacaactaataagcaatctaaaagaggcaccgccaatgatgtgttgttggtagaaggctgctgggtttgtcaaagcaagttggacaaagggcagcaactgttgcagttgtaagagggttgcggggttagccacaaactgctggtagaacggaagcaattgttgttgtttcaaaaaggaagtggggcttgttgtagctagctggccaaatggtagtagtatttgctgctggaaataagcagaggggttcagtgcggccaattggttaaatggaagaaattgttgctgctgagagtaggcagtagctagctggctgaatggtagtagttgttgttgttgtaaataagcagcagggttcagtgtagacagttggttgaatggaagaaattgttgttgctgagagtagggagaaaggtttgccagaactacttggctgatcactggtagcacgagttgttgcagctgttgtgcc

SEQ ID NO: 9838 - DNA, 582 bp, Zea mays
  Clone ID: LIB3061-095-Q1-N6-B2
gtattcgaattcgatatccgaataaaatatccgtatttgtatccgttatccgaaaaagtccggatagccgaaattccatccgaaccagtattcaccatcttcgagtatggatctggacggatattttctgaatcatattacatccctagctccaaatcgatatactcctagacgaacgaattggtctgtggaaacgattcttgtactgtttccgtcattgtatacggcagccttgttcggaatcacggagtagctccaaatcgatatactcctagacgaacgaattggtacgtggaaacgattcttgtactgtttccgtcattgtacacggcagccttgttcggaatcacggagtagctccaaatcgatatactcctagacgaacgaattggtctgtggaaacgattcttgtactgtttccgtcattgtacacggcagccttgttcggaatcacggagcaaactgatgctactagaaattctctccctagtgtcgcgaaggcgtaacgtatctaatctatccgagggcctcaaacttatcaagttggctagccagaaactaaatttttccgggtcctgtggc

SEQ ID NO: 9839 - DNA, 185 bp, Zea mays
  Clone ID: LIB3061-095-Q1-N6-B4
gagcacaaacatttttttaattgctaataatagcctgaaacatagttcatttgtacacttgtagtcctctttaggatactattagcaattaaactatgtttcaggctattattacaagcgcaggtgacacaccacggtaccacgccatcttattcagtagactacagttcatttgtacacctgta

SEQ ID NO: 9840 - DNA, 432 bp, Zea mays
  Clone ID: LIB3061-095-Q1-N6-B9
cgggggaaatcccgacccaggcctttgctttggaaaatcccgaaacagggaacaacaggagggggacgtacgtacaaaaacacgccgttgttaaaaggcccccttctagaccgacgatcgaacgcttaaacacacgacgacgatacaattgggcataaaaaaccggccacacccttgtttttcatgcatggacccatggactggtcgcaacccaatcaacgggaaccccagccggccgttgggcaaacaaataaagggcagggcggggggcaaaaacaggggggggggaagccccggaacctgcccccggggaacccctcggtcctgcaaactttggcccaattggaccgggggaggcaggggccccgaaacctggggctttggaactggaaagttcgggcctccgccaccgacaccggcccaacctttggg

SEQ ID NO: 9841 - DNA, 459 bp, Zea mays
  Clone ID: LIB3061-095-Q1-N6-C12
gactaatcaatgtgttagattcagctgattcatacaatacaaattgaacaagaatatctcaatgtgtggtatatgacgtgccaaatgactagctcagctagaggtttcagaaggttctacataacagaaaaactgcaagttaaaatacagtaaaaacaggggaaagagtttccaccttgtccccaggaaattactccgagtgacatggcatgtcaagcacttcagtactgccattaaacacattatagaatctagacccttgcagcatcctcatgtgctacttctagccctgcgctctggctagcaagccagacaatgatacggggttgttcctcatttgctcttgagcttgcttcatctcctcaggatctatgttctccatcatcttgggcatcacaaagaccattaagaccataaaaccaaccatcaaccccatgggactcttcaaaagtgacatga

SEQ ID NO: 9842 - DNA, 577 bp, Zea mays
  Clone ID: LIB3061-095-Q1-N6-C3
agaaagtactttcttatttctgggaagccacaaacatcagacaaaaaactttattattgaactataactcataagaaatctaaaagagggcaccaccaatgatgggttgttggtagaacgctgctgggtttgtcaaagcaagttggttgaatggcagcaattgttgcagttgtaagagggtgccagcgttaggcgcagcgtgctggtagaacggcaacaactgtggttgtatcaagaaggtagcagggctcacaccagctagctggctgaatggtagtagttgttgctgctgtaaataagcaggagagttcaatgctgccagttggttgaatggaagaaattgctgggggtaggcagcaggtagctggctgaatggtagttgttgttgttgcaaataagaagcagagttcaatgcagctagttggttgaatggaagaaactgctgttgctgagagtaggcagcaaggtttgctagcacaagttgttgtagttgttgtgccctgatgttttgtgccaataaatgcaccaaaggtaactgatgtaatagggctgatgattgttggaggaacagggtgat

SEQ ID NO: 9843 - DNA, 550 bp, Zea mays
  Clone ID: LIB3061-095-Q1-N6-C4
aaaaaaacaaagcctgaaaaacatagtaacatgttgacacggaccctctgtttcttggttttagcttgacaagttttttttggacaatactaccaaacatgttcccgttgtaatgcacagaaaatctagtagtttatttgtcccacattaaatgttgaccaccacatcattacgaatttgaaatggatgactatgaaatttgcgcagtctgccggtagcaatgaacagggcattgcctaattgttgatcaggtttatatggacacacctaaatgtagttgcagggactctcactttgtccattgctcaaaaacgagtttctggccaccattttttccaagcacctggcgctgtcaaccccgtccccacggttatgcagttggaatgacttatttccgtccattgctcgaaaagatttttgccccccgccattcttccaagcacctcgcgctggcaaccctgtctcagggccttgcaattccctttctgaacgttcagggcttgcacttggacgacttaaatcaagtgtggctaatgagttgtcacctaaa

SEQ ID NO: 9844 - DNA, 565 bp, Zea mays
  Clone ID: LIB3061-095-Q1-N6-C7
aatcgagataaatctcaatcaatatattgattatttctaggaaacacatgccgctatgagggcaccattatcgagtacatctcatatgtaatctaaaagatggcacctccaacgatgggttgctgccacaacaaggcagggttcatcaaagagaactggttgtatggcagcaattgttgctgctgtaggaaggcagcgaccaatgggttagccaccgctagtggattaagtaactgttgtcgctgttgtaggtacgcagcagagttcgacacagtcagttggttgaatggaagcagctgttgcaagtaggcagcagggtttgccacagctagctgagtcagagctggtacaatctgttgcagcaactgttgttgcaggtatgtaggtgcattaaccacagcgagagggctagatgaaatcagttgttgctgttgtaggtaggcggcagggttcaccatggctagttgactgagcgctggtagaaactgttgcaattgttgttgttgttggtatgcaactatgtttgccagagcaagtgggttggatgcaagcaactgctgttgca

SEQ ID NO: 9845 - DNA, 567 bp, Zea mays
  Clone ID: LIB3061-095-Q1-N6-C9
ggagactataccatcctcatcatgaatcggttatcacactgtaaggatgatttaaagcttgttactcccaatcttagcaaaagtaattatcgaacacccttggagaccaatatcacattagaatctggaaatgtaacttcttatttctggttggccacatacatcatccaaaaaactttattattgaattacaactaataagcaatctaaaagagggcaccaccaatgatgtgttgttggtaggaggctgctgggtttgtcaaagcaagttggacaaagggcaacaattgttgtagttgtaagagggttgcggggttagccgcaaactgctggtagaaaggcagcaactgttgctgtgtcaagaaggaagcacggcttgctgcagctagctggctaaatggtagtaatatttgctgctgcaaataagcagcgaggtttagtgcggccaattggttaaatggaagaagttgttgttgatgagagtaggcagtagctagctggctgaatggtaatagttgttgctgcaaataagcagcagggttcagtgtagatagttggttgaatgga

SEQ ID NO: 9846 - DNA, 229 bp, Zea mays
  Clone ID: LIB3061-095-Q1-N6-D1
cgctgaatgaatctaattaatcactaccggcaaagcaacagatctttacacacagttttgcaaaaccatccatttgtttgcactactgctgatgacatgaagggaataaggggactagatggtgccaatgatcaggcctggctgctgcagccgctggacgcgctgtgcgtgggggcgcggccgacggacttctccattgcttctcgtggctgggtttccacggtgccgt

SEQ ID NO: 9847 - DNA, 424 bp, Zea mays
  unsure (1)..(424): unsure at all n locations; Clone ID: LIB3061-095-Q1-N6-D11
acacaatacaccagnnaaactttactcctccaaagaattgggatgtaacaacaaaaaaaagtgcaaaaccatggatatacttattctaaggaggagaggatacaaagagtaatacagccgttacaacagattctgggtgtccatatcctgatcgctctactgtactgtacatatatctctgtggagagaaaaagggttacacttcatctaagctcactggtagagtttgtccttccaatcgcacttggttctccaatcgaaacagatgctaatgatttggaggcccaagcggtagcgttcattgccccctcctgcagatttcctcgcttcgaacttgaagggtatagccgatgaaacttctgtcttccttgctcaaggtaggtgaggaaatattcatgtgcccccatcaagtttgcaaacagat

SEQ ID NO: 9848 - DNA, 447 bp, Zea mays
  unsure (1)..(447): unsure at all n locations; Clone ID: LIB3061-095-Q1-N6-D12
tcgctgccgcgtctttacttggtcctttaaagcgcccgccttttttttaacatcataagtatggtactttattgcttaaaccgttataggagtataacggctaggtagacacaattcttcaattgcaaacaccactaatgtcattgctgctgcatggattattttggtcgtatgagtggttcatggcgtgcgtggatggtnggtnttgtgctgctgtcaaaattgccaccgcactttgagtagctcgttgagatccacataactcacatggttgttgttgttgctcctcctggattatggtttgaaccatgttgtggattgctcggtgagtgtcttgtggctcaatctgcctgtggtcttgaccccattggtgctgcccttcctggctgctgcttggttgtttttaacgtgattggggaaaaggcctttctcgtgggctgccctgct

SEQ ID NO: 9849 - DNA, 229 bp, Zea mays
  Clone ID: LIB3061-095-Q1-N6-D2
atcgaggaaaatctcaatcaatatattgattatttttagggaacgacagccgctatgagggcgccgttgtcgagtgcagcccatgtgtaagctaacaggaggccccaccaacgatgggttgctgccgcgacaaggcggggggcatcaaagagaactggccgtctggcagccattgttgctgctggcggaaggccgtgaccactgggttagccaccgcctgtggattaag

SEQ ID NO: 9850 - DNA, 374 bp, Zea mays
  Clone ID: LIB3061-095-Q1-N6-D3
gttggttgtttggggtgctgggggggggggggggggggttgggggggccggggggggggggggggggggggggggggcgggcgggggggggggggtgggggggggggggggggggggggggttggggggggggggccggggggggggggggggcggggccggggggggggggggggggggggcctgggcggggggggtggggggggccgtttcttcgggggcgggccgggggggtgggcgcggggccttggccctggggttgcgccctctcctcgcccttcttggggggggacgtttcgggccgcttttgcccgggttggttgcgccgcccggggggggattttgcgggggcgcctttgggggtgggggggggg

SEQ ID NO: 9851 - DNA, 176 bp, Zea mays
  Clone ID: LIB3061-095-Q1-N6-D5
cacattaaaatctggaaatgtaacttcttatttctggttggccacatacatcatccaaaaactttattattgaattacaactaataagcaatctaaaagagggcaccaccaatgatgtgttgttggtaggaggccgctcggtctgtcaaagcaagttggacaaagggcaacaattg

SEQ ID NO: 9852 - DNA, 543 bp, Zea mays
  Clone ID: LIB3061-095-Q1-N6-D7
aaatctcaatcaatatattgattatttctaggaaacacatgtcggtttgagggcaccattgtcgagtacatctcatatgtaatctaaaaaaggcacctccaacgatgggttgctgcaaggcagggttcatcaaagagaactggttgtatggcagcaattgttgttgctgctgcaggaaggtagcgaccaatgggttagccactgccaatggattaagtaactgttgtcgctgttgtaggtacccagcaaagtttgacacaaccagttggttgaatggaagcaactgttgtaagtaggcagcagggtttgccacagctagctgagtcagagctggtacaatttgttgcagcaactgttgttgtaggtacctaggtgcattgcccaccgcgagcgggctagatgaaagtagttgtaggtagacggcagggttcaccatggctagttgactgagcactggcataaactgttgcagctgttgttgttgctggtatgcagctaccttcgccagagcaagtgggttggatgcaagcagctgctgttgca

SEQ ID NO: 9853 - DNA, 578 bp, Zea mays
  Clone ID: LIB3061-095-Q1-N6-D9
gaaatatattgagataaatctcaatcaatatattgattatttctaggaaacacatgccggaatgagggcaccattatcgagtacatctcatatgtaatctaaaagaggcacctccaacgatgggttgctgcctcgacaagacagggtttatcaaagagaactggttgtatggcagcaattgttgctgctgtaggaaggcagcgaccaatgggttagccactgctagtggattaagtaactgttgtcgctgttgtaggtacgcagcagagttcgacatagtcagttggttgaatggaagcagctgttgcaagtaggcagcagggtttgccacaactagctgagtcagagctggtacaatctgttgcaacaattgttgttgcaggtatgtaggtgcattggccacagcgagcgggctagatgaaagcagttgttgctgttgtaggtaggcggcagggttcaccatggctagttgactgagcgctggcagaaactgttgcagctgttgttgtggctggtttgcaactacgtttgccagaacaagtgggtttgatgcaagcaactgctgttgcaagtaggcg

SEQ ID NO: 9854 - DNA, 298 bp, Zea mays
  Clone ID: LIB3061-095-Q1-N6-E1
tcgcatgcacgcgtttttttagcttggttcttttaaaacccccgccctttttttttttttttcgagaaaaatctcaaccaatatattgattttttctaggtaaaacatgccggtctgagggcaccattatcgagttcatcttatatgtatatctaaaagatggttaccttcaacgatgggcttgctgctctcgacaagtacaggatttattaaagagaaccggttgtttggcagcaattgttgctgttgtaggaaggtatctactaatgggttagcccctgacaatggcattaagtta

SEQ ID NO: 9855 - DNA, 579 bp, Zea mays
  Clone ID: LIB3061-095-Q1-N6-E10
agaaatgtactttcttatttctgggaagccacaaacatcagacaaaaaactttattattgaactataactcataagaaatctaaaagagggcaccaccaatgatgggttgttggtagaacgctgctgggtttgtcaaagcaagttggttgaatggcagcaattgttgcagttgtaagagggtgccagcgttaggcgcagcgtgctggtagaacggcaacaactgtggttgtatcaagaaggtagcagggctcacaccagctagctggctgaatggtagtagttgttgctgctgtaaataagcaggagagttcaatgctgccagttggttgaatggaagaaattgctgggggtaggcagcaggtagctggctgaatggtagttgttgttgttgcaaataagaagcagagttcaatgcagctagttggttgaatggaagaaactgctgttgctgagagtaggcagcaaggtttgctagcacaagttgttgtagttgttgtgccctgatgttttgtgccaataaatgcaccaaaggtaactgatgtaatagggctgatgattgttggaggaacaagggtgat

SEQ ID NO: 9856 - DNA, 504 bp, Zea mays
  Clone ID: LIB3061-095-Q1-N6-E11
attcactgaaacaaaaccggacccccttcaacaagggcaccgggggaacgacccgggaaagggacccggcgggggggggggcgaacggcccagacaaaggagcgggccccaagcccaacccaaaagcacaaggcacagcccagcaccaggggggggaggggccccccgccgccgagcaaggggcgggcggggcccccgcagacgggggccaggcggcaccccgcccccgggacgagggggggggcgaagcccccctgcaccggccgggggggggcccgcagggcccctaggggggcccccaccggggggcccgggcccggcgggagcgcgccccccctggggagggggaggcccgggccccgccgggacgccgggagggccgccaccccccggcagcaggaattttccaccttccgccccgggaggggcgggccaattccgcacgggcggggggggacccaccaccggcagttcgggggggggtggggccggaaggcccacccc

SEQ ID NO: 9857 - DNA, 219 bp, Zea mays
  unsure (1)..(219): unsure at all n locations; Clone ID: LIB3061-095-Q1-N6-E12
aaaaaaaacaacgtcgnatgcacgcgttctttgtcttggnatcctttaaaaggccgccctttgggggggggggtttttttttttttttttttggggnntttgggtgcttggntttttttcccgggggtctggatcgggtggtggggtgtgggtttttttttttggtgcctttttgttctttttttttggtgggttggctgtgtttggggtggggggggg

SEQ ID NO: 9858 - DNA, 552 bp, Zea mays
  Clone ID: LIB3061-095-Q1-N6-E2
cgagataaatctcaatcaatatattgattatttctaggaaacacatgtcggtatgagggcaccattgtcgagtacatctcatatgtaatctaaaagaggcacctccaacgatgggttgctgcaaggcagggttcatcaaagagaactggttgtatggcagcaattgttgttgctgctgcaggaaggtagcgaccaatgggttagccactgccaatggattaagtaactgttgtcgctgttgtaggtacgcagcagagtttgacacagccagttggttgaatggaagcaactgttgtaagtaggcagcagggtttgccacagctagctgagtcagagctggtacaatttgttgcagcaactgttgttgtaggtacgtaggtgcattgcccaccgcgagcgggctagatgaaagtagttgtaggtagacggcagggttcaccatggctagttgactgagcactggcataaactgttgcagctgttgttgttgctggtatgcagctacgttcgccagaacaattgggttggatgcaagcagctgctgttgcaagt

SEQ ID NO: 9859 - DNA, 492 bp, Zea mays
  Clone ID: LIB3061-095-Q1-N6-E3
ccctatatattattcctttccatttcaatggttcattcaggtcattgctcacactgccacccatggtgatgggtgacactccgttactcatcgccgctaaacgagtgaactagctatagccctataggtagctagtcagcggctccattacattattactacagtacatagtttcctcagtagtagacaccgccggcagctgcgttgcaagggcagggacctggctgctgcagctgcagaccgcacatcgccgtcagctgctgcgctacctgggccgccatcagcgccgcgagctcgccctgcggctgctgctgcaggaaggactgcaggaccacaccgtatgtcgcctggtaccggtgcagcggctccacctgcctgatctggtggcagcactgctgctgcagcgcctggcactgtggcgagccgtagggcgtcgccgccgggctgcactggtgcctcaggaactcgacgcactggcccaggaacgggctg

SEQ ID NO: 9860 - DNA, 367 bp, Zea mays
  Clone ID: LIB3061-095-Q1-N6-E7
gaagcaaaccagccagttgcattcaccggagtctagagttctaccgaaaagaatcagctttttcgaggcttaatttgaggggggcctcaatagggggaatgtgcagcaatggcctcaacaacgacatgcacaccttacaccaagaaaaccctcagttttaagcatgaacagtttggaagttttacatagctgaaaaaaaagacggaactgtagcttttatgagcgctgctactaatactcttcacagagcatggctctgtcatagtagtattattaatcaccagatgcaccaacagcaggcgatccggctgccaacgagcagaggcaccctcagacaagcacctgagctgcagctagcctagcgatc

SEQ ID NO: 9861 - DNA, 400 bp, Zea mays
  Clone ID: LIB3061-095-Q1-N6-E9
aaaaaccaaccccccagttggggatccccgggccccccaaaaaaggggccggaatgggaaaaacccggccaaaaaaaaaaaagggggaaagagaaatttttaaatccaaaaaaaaaccccttttttaaggacccggggttaaacccccccttttaaggcccccatttcccctgggggggttcccaaaaaccaccaaacccaaagggtataatccggagggggggggtttttaaaccccccaaaggggaaaagaaaaatctgttttgggggaaaaaaaacccccaggttaaaaaccccggcaaaaaagggtccggccaaaaaaacccttccgccgggggggggccaaaaaaacaacccccacaaccagggggggcccgggaaaaaaccccccgtgggggga

SEQ ID NO: 9862 - DNA, 563 bp, Zea mays
  Clone ID: LIB3061-095-Q1-N6-F10
ctaaaaagtactttcttatttctgggaagccacaaacatcagacaaaaaactttattattgaactataactcataagaaatctaaaagagggcaccaccaatgatgggttgttggtagaacgctgctgggtttgtcaaagcaagttggttgaatggcagcaattgttgcagttgtaagagggtgccagcgttaggcgcagcgtgctggtagaacggcaacaactgtggttgtatcaagaaggtagcagggctcacaccagctagctggctgaatggtagtagttgttgctgctgtaaataagcaggagagttcaatgctgccagttggttgaatggaagaaattgctgggggtaggcagcaggtagctggctgaatggtagttgttgttgttgcaaataagaagcagagttcaatgcagctagttggttgaatggaagaaactgctgttgctgagagtaggcagcaaggtttgctagcacaagttgttgtagttgttgtgccctgatgttttgtgccaataaatgcaccaaaggtaactgatgtaatagggctgatgattgtt

SEQ ID NO: 9863 - DNA, 582 bp, Zea mays
  Clone ID: LIB3061-095-Q1-N6-F11
gattattagttgtaattcaataataaagttttttggatgatgtatgtggccaaccagaaataagaagttacatttccagattctaatgtgataaaaaaaaaaaaaaaaaaaaaaaggaaaaaaaaaaaaaaaaaaaaaaaaaaaaaaaaaaaaaaaaaaaaaaaaaaaaaaaaaaaaaaaaaaaaaatattttaaaaaaaaaaaaaaaaaaaaaaaaaaaaaaaaagggggggggccttttattttaaaaaccgccccggggggttccccgggaattttgggccgggcccttggggggacaaaatttttctttttagggggggttttaaaaatgggggaaaaaaggggaaaaagtttttcccggggaaaaatttttttcgcaaaaaatttcccaaaaaaattggcccgggaaaaaaaaattaaaaacccggggggccttaaggggggaccacccacaaaaaatggggtgggccccatgggccccttttcagggggaaaaccctgttgccccacttttttaaaaaaattgcccacccccggggggagggggttttgtttttggcccccggggggttttttttt

SEQ ID NO: 9864 - DNA, 322 bp, Zea mays
  unsure (1)..(322): unsure at all n locations; Clone ID: LIB3061-095-Q1-N6-F12
aacaaaagaaaggacccccaggcataacgagggncagcacgaggaaagcagggncacacaagacaaggcacgggaanaccccanacacnnaaaanncanggngcacaaagcaaaagagggaggggggaaagcaaaacggcggggancgcannccaacgggagangggacnnaagcaacggccncgaggaaagcccncccaggagcacgcnncncaaggcnnccaagggnaccgagcagcnnngcggngacaccancaggaacaanncnacccncacncnnggaccncaggggggcggcacggcggaaccgggggaagcccca

SEQ ID NO: 9865 - DNA, 456 bp, Zea mays
  Clone ID: LIB3061-095-Q1-N6-F2
gggaggaaacggggaatttttacaaccgggggagggaaaccaaaggccaaaagcgggggtggcccggcccccggttggggcagggaatatggacaaaaaaccccaaaagagggggttttgcataaaaggggaagggtgcacaggggggcacgggagctggcaagcaaaacccaaggggccgccgggggaaggaaaaacaaagggggggggtgtcggcctcctcctaaaaagggccgggggggggccattttggggggggggggcaaccaaaaaagcgcgcgcgccccctttggggaggggttgggcgccaacctcttcgtttggggccggtggagaattttccacaaaaacgggccgttctttttcccccacctttgggacctgggggggggttttaaaaagaacccgggggcgccgtttttttttttattttgcttttcaaggcggggggggggg

SEQ ID NO: 9866 - DNA, 573 bp, Zea mays
  Clone ID: LIB3061-095-Q1-N6-F4
gagagagaaaaaaactacataatttcacggcgggaaatgatggacaagcattcggtaccgcaagtgatatccatgaacagatggatgtacagtcgttttaggagtgaggatacagaatcaatcaacttgctcagacacatcgcacatgctgtgtctatttttttttcaacttctccaaattggccatgctcaaagtccaaacttcgctgggaatctgaatttccaccggacccccacagttcacgcgctttgggaatattcatcatgcctgcagctttcttttcttcttatgcctccttttgcgccgtggtttatgaacatcagaatttgagctcagattactgttattatccccgggacgatttggtactcttctatttttaaatgattcgccgcttgtgctgtttgaagtactgctcgagctggatatcgcacgtttatctgcatgtctgcctctatttggggctaatgagcgtggtggcggcataagaactcgagcatctctctgacgctggttcttttcatcacttgacatgccagatgctgccctacctgaagcactggatgctggtt

SEQ ID NO: 9867 - DNA, 566 bp, Zea mays
  Clone ID: LIB3061-095-Q1-N6-F5
cagaaattatcgagataaatctcaatcaatatattgattatttctaggaaacacatgtcggtatgagggcaccattgtcgagtacatctcatatgtaatctaaaagaggcacctccaacgatgggttgctgcaaggcagggttcatcaaagagaactggttgtatggcagcaattgttgttgctgctgcaggaaggtagcgaccaatgggttagccactgccaatggattaagtaactgttgtcgctgttgtaggtacgcagcagagtttgacacagccagttggttgaatggaagcaactgttgtaagtaggcagcagggtttgccacagctagctgagtcagagctggtacaatttgttgcagcaactgttgttgtaggtacgtaggtgcattgcccaccgcgagcgggctagatgaaagtagttgtaggtagacggcagggttcaccatggctagttgactgagcactggcataaactgttgcagctgttgttgttgctggtatgcagctacgttcgccagacaagtgggttggatgcaagcagctgctgttgcaagtaggtg

SEQ ID NO: 9868 - DNA, 563 bp, Zea mays
  Clone ID: LIB3061-095-Q1-N6-F6
ctagaaagtactttcttatttctgggaagccacaaacatcagacaaaaaactttattattgaactataactcataagaaatctaaaagagggcaccaccaatgatgggttgttggtagaatgctgctgggtttgtcaaagcaagttggttgaatggcagcaattgttgcagttgtaagagggtgccagcgttaggcgcagcgtgctggtagaacggcaacaactgtggttgtgtcaagaaggtagcagggctcacaccagctagctggctgaatggtagtagttgttgctgctgtaaataagcaggagagttcaatgctgtcagttggttgaatggaagaaattgctgggggtaggcagcagatagctggctgaatggtagttgttgttgttgcaaataagaagcagagttcaatgcagctagttggttgaatggaagaaactgctgttgctgagagtaggcagcaaggtttgctagcacaagttgttgtagttgttgtgccctgatgttttgtgccaataaatgcaccaaaggtaactgctgtaatagggctgatgattgtt

SEQ ID NO: 9869 - DNA, 575 bp, Zea mays
  Clone ID: LIB3061-095-Q1-N6-F8
agaaatgtactttcttatttctgggaagccacaaacatcagacaaaaaatttattattgaactataactcataagaaactaaaagaggcaccaccaatgatgggttgttggtagaacgctgctgggtttgtcaaagcaagttggttgaatggcagcaattgttgcagttgtaagagggtgccagcgttaggcgcagcgtgctggtagaacggcaacaactgtggttgtatcaagaaggtagcagggctcacaccagctagctggctgaatggtagtagttgttgctgctgtaaataagcaggagagttcaatgctgccagttggttgaatggaagaaattgctgggggtaggcagcaggtagctggctgaatggtagttgttgttgttgcaaataagaagcagagttcaatgcagctagttggttgaatggaagaaactgctgttgctgagagtaggcagcaaggtttgctagcacaagttgttgtagttgttgtgccctgatgttttgtgccaataaatgcaccaaaggtaactgatgtaatagggctgatgattgttggaggaacaaggtgat

SEQ ID NO: 9870 - DNA, 413 bp, Zea mays
  Clone ID: LIB3061-095-Q1-N6-F9
aaaaaaagggggaagggacccttttttttggggggggccccccccctttccaaaaaaattttttttttggatcccccccaaaaaccccctaaaaagggggccccccccattttttttttgggggggggggcccccttttttttaaaaaaaggggggaaaaagggcaaaaattttttttttttaaaaagggggggggggttccccccaaaccgggggaaaaaagggaaaaccttttttttttaaaaaaaaaaaacccggtttgccccccctccggggaaaaaaggggaaaattttttcgggcaaaaaaaaaccggggggttcaggccgccccatttttaaaaaaaaaaaaatttttttttttaaagaaggcccccccccccccggggaaagggaaaaaggggggggcacaaaaa

SEQ ID NO: 9871 - DNA, 491 bp, Zea mays
  unsure (1)..(491): unsure at all n locations; Clone ID: LIB3061-095-Q1-N6-G2
atggaacacgacacatatttcatacaaatattggtttatcgcctccacaaacatacgagaacatcacagtttacaaatagcaactgtaaaatgtacagaccgagctagcagtttgcaattatttgtaacagatccaagctaaatacattcacatttttttgctgggcacttccagatcatcgaacctgtcaggcggtggcgccggcaggtgtggcggattcacttgtcacggcctcagcctcccaaaacgaagtctttttgccagtcttggaaacagtttgcaggacggcgtcaggtgtcacattgcccttcacggggaccttctgttccatgatgtctacgtcgtaggactcgacgccttccattttgcccaggacccgcttgacagcttcaacacagcccttacaggacatgccaaccttgagcacaacagtctgggccatancgcgagagggaaggagggtccgggtggtcccgccgtggtggtggaa

SEQ ID NO: 9872 - DNA, 320 bp, Zea mays
  Clone ID: LIB3061-095-Q1-N6-G3
ggggggagaaaaaaactacataatttcacggcgggaaagatggacaagcattcggtaccgcaagtgatatccatgaacagatggatgtacagtcgttttaggagtgaggatacagaatcaatcaacttgctcagacacatcgcacatgctgtgtctatttttttttcaacttctccaaattggccatgctcaaagtccaaacttcgctgggaatctgaatttccaccggacccccacagttcacgcgctttgggaatattcatcatgcctgcagctttcttttcttcttatgcctccttttgcgccgtggtttatgaaca

SEQ ID NO: 9873 - DNA, 567 bp, Zea mays
  Clone ID: LIB3061-095-Q1-N6-G4
caatctagaaatgtactttcttatttctgggaagccacaaacatcagataaaaactttattattgaactataactcataagaaatctaaaagagggcaccaccaatgatgggttgttggtagaacactgctgggtttgtcaaagcaagttggttgaatggcagcaattgttgcagttgtaagagggtgccagcgttaggcgcaacgtgctggtagaacggcaacaactgtggttgtgtcaagaaggtagcagggctcacaccagctagctggctgaatggtagtagttgttgctgctgtaaataagcaggagagttcaatgctgctagttggttgaatggaagaaattgctgggggtaggcagcaggtagctggctgaatggtagttgttgttgttgcaaataagaagcagagttcaatgaacctagttggttgaatggaagaaactgctgttgctgagagtaggcagcaaggtttgctagcacaagttgttgtagttgttgtgccctgatgttttgtgccaataaatgcaccaaaggtaactgttgtaatagggctgatgattgtt

SEQ ID NO: 9874 - DNA, 429 bp, Zea mays
  Clone ID: LIB3061-095-Q1-N6-G6
aaaatcgggaaagggaacttcttattttgggggggccccatccattatccaaaaaactttttttttggattccacccaataagccatctaaaagggggcccccccaatgatgtgttgttgggagggggctgctgggtttgtcaaaacaaggtggacaaagggcaacaattgttgtatttgtaaaaggggtggggggttagccccaaactgctggtaaaaaggcaacaactgttgctgtgtcaaaaaagaaacacgggttgctgcaactagctggctaaaagggaaaaaaatttgctggtgcaaataaacagcgagggtcaaggcggccaattggttaaatggaaaaagtttttgttgatgaaagtaggcaatacctacctggccgaatgggaaaagttgttgctgcaaataaacaacagggttcaaggt

SEQ ID NO: 9875 - DNA, 436 bp, Zea mays
  Clone ID: LIB3061-095-Q1-N6-G7
aaaaagtactttcttatttctgggaagccacaaacatcagataaaaaatttattattgaactataactcataagaaatctaaaagagggccccaccaatgatgggttgttggtagaacactgctgggtttgtcaaagcaagttggttgaatggcagcaattgttgcagttgtaaaagggtgccagcgttaggcccaacgtgctggtagaacggcaacaactgtggttgtgtcaaaaaggtagcagggctcacaccaactagctggctgaatggtagtagttgttgctgctgtaaataaacaggaaagttcaatgctgctagttggttgaatggaaaaaatgctgggggtaggcaacaagtagctggctgaatggtaattgttgttgttgcaaataagaagcagagttcaatgaacctaattggttgaatggaaaaa

SEQ ID NO: 9876 - DNA, 592 bp, Zea mays
  Clone ID: LIB3061-095-Q1-N6-G8
aactcgaaaaaaaaaatcttattcataaacaaaatgggttcacagatatttctccatacgttcatgctcattgtggtagacgcagctgaccacctagagctgcatacttacttattcagactgatccagcatgtggcaacatcggaagttcacatgcttacagacgacaaattttcataacaatagcctggcttggctgcttcacagaataaccaaacgacaaccacgaaattgcgacgatataaaataaacaactcagaagcaaatcgaccccagaagcccgtcttactcatcaagcactcccgccttctcctccatggcatccgcttcctcctcccagcagagaagattagccagcttgtagtccttcttcataggaggaggagcactctccacgttctcgccgtcaaagcagtggaaaacagatttgggcgaggtagcaacagcgtcttcagcagcacagaagctctggtacacgaggagcccgcctccaggcagctcctgctccaccatgttgttgcagtcatagacctctgcaccaagtgcctttccccatgtcccggcatggccacgcccgccgaagaggtcacgg

SEQ ID NO: 9877 - DNA, 377 bp, Zea mays
  unsure (1)..(377): unsure at all n locations; Clone ID: LIB3061-095-Q1-N6-H10
ctgggaagccacaaacatcagacaaaaaactttatttttgaacttttactcataagaaatctaaaaggggccccaccaatgatgggttgttggtagaacccttctgggtttgtcaaagcaagttggttgaatggcaccaattgttgcagttgtaagagggtgccagcgttaggcgcagcgtgctggttgaacggcaacaactgtggttgtttcaagaaggtagcagggctcacaccagcttgctggctgaatggtagtagttgttgctgctgttaataagcgggagagttcaatgctgccagttggttgaatggaaaaaattgctgggggttggccgcaggtncctggctgaatggtggttgttgttgttgccactt

SEQ ID NO: 9878 - DNA, 549 bp, Zea mays
  unsure (1)..(549): unsure at all n locations; Clone ID: LIB3061-095-Q1-N6-H4
ggggggggggggggnnnnnggggaannnnngggggnnnggnnnggggggnnnnggggggngggggggggnnnngganngggnngggggaagnnnggggggggggggggggggnnnnggngggggnnngnnnnnaanngggaaganggnggggggggnnngggggnggngnngggggggggngggnggnnnnngnngggggggggggggggggggnnnggggnngnngggggggggnggnggngnggggggggggggggggggnggggggggggnngngnggggggggggggggggggggnngnannggnnggggggggngggggggggnggggngggggggggggggnnnggggggnggggggggggggggggnnnggggggggnggggggggannnnggnngggggngggggggnnagngngaaggggggggggggngggnngnngggggggggngnggggggggggnggggaggggggggggggggggggggngggggggggggaangggggggggggggggggggggggggggggggnnngggggg

SEQ ID NO: 9879 - DNA, 394 bp, Zea mays
  Clone ID: LIB3061-101-Q1-N6-A2
agaatctagaaatgtactttcttatttctgggacgccacaaacatcatccaaaaaacttcattattggaactataactcataagcaatttaaaagagggcaccaccaatgatgggttgttggtagaacactgttgggtttgtcaaagcaagttggttgaatggcagcaattgttgcagttgtaagagggtgccagcgttaggcatagcgtgcaggtagaacggcaacaactgttgttgtgtcaagaaggcagcagggctcacatcagctagctggctgaatggtagtagttgttgctgctgtaaataagcagcagagttcaatgctgctagttggttgaatggaaaaaattgctgggggtaggcagaaactagctggctgaatggtaattgttg

SEQ ID NO: 9880 - DNA, 372 bp, Zea mays
  Clone ID: LIB3061-101-Q1-N6-A3
ccttaaaaaatttttttttcaaaactgagcatgactcagtaaatcagtctgttctgtttttaacaatatgggacctatttgttttggtgtataacttgccacactttacctgaacttttctggttaagggtagttcttcaattcgaacgactataacttaaacaaagggtggtatagttaggtacaaaccaaacatgcccataatctctaatttatatgcatgaagggctttcactgtcagcatacttttcctgaggaattatcaaacgtagatcctcgttattgttgttgacctgaaccaaagctgcagtcttgtatgctaggaaacccatcattcctggaagaacccaaaaactgaaaaaactatttttt

SEQ ID NO: 9881 - DNA, 116 bp, Zea mays
  Clone ID: LIB3061-101-Q1-N6-A5
ggtggggggggtgtttttttttttttgtttttggggggaaaaaaaggtaaagtaggaagaaaaaaaaagggaggagaagaggggggggaaaaataaagggggggggggtggggggg

SEQ ID NO: 9882 - DNA, 542 bp, Zea mays
  Clone ID: LIB3061-101-Q1-N6-A6
aaggaacagacggtctttttatcacagcagtcacaaaaacagaacaaatttataggttcattacctgttcctataaataattggcctactctgaaacatggcaatctctagctgctcctgtcgcatgcgagagctaaccttttctatatctgggacctctcggtggggcaccaaaaacgggtacaactctgctgctcttcgtctcccagcaacagctcattcacacttgattgatttgtatatgtggcggacaaagaacagggcggcgcggaagcccaccatcccgagcatcaagaagaatgcatagcagatgcaggccatgtagccaaagaagaaagatgtctgcatgaagccagacatgtcggatcgcgcatagtagtagtacaggcagtagccgtacacgaaaaaaccagttgatcctccgcaaaggaatgacctccaccaccactcatggtcttcagcagcaagctggaagtatgtcagtgcaacagtgatgaacgcagtgacaataaggaggatgatgaagacaataaacagaatgc

SEQ ID NO: 9883 - DNA, 447 bp, Zea mays
  Clone ID: LIB3061-101-Q1-N6-A7
aagaatctagaaatgtctttcttatttctgggtatgcccaggcatcacacacaaaatttatggttgaactataactcactaagaaatctaaaagagggcacctccaatcatcggctgttggttgaacgctgctggggttgggaaagcaagttggttcaatggcagcggttgttgctgttgttagagggtgccagcgttaggcgcagcgtgctggtccaacggtgacaactgtggctgtttcaagaaggtggcagggctcacaccagctagctggctgaatgggagtggatggagctgctgtaaataagcaggagagttcaatgctgccagttggctgaatggaagatattgctggcggttggcaccacggagctggctgaatggtagttgctgttgccgcaaataaagaagcagattaaatgcatcttgtttgttgaatggaagaaa

SEQ ID NO: 9884 - DNA, 486 bp, Zea mays
  Clone ID: LIB3061-101-Q1-N6-B10
agaaagtactttcttatttctgggaagccacaaacatcatccaaaaaacttcatttttgaagtttaactcataagccatctaaaagagggcccccccaatgatgggttgttggtaaaacccttttgggtttgtcaaaacaagttggttgaatggcaacaattgttgcaattgtaaaagggtgccagcgttaggcccaacgtgcaggtaaaacggcaacaactgttgttgtgtcaaaaaggcaacagggctcacatcaactagctggctgaatggtggtagctgttgctgttgtaaataaacaacaaagttcaatgctgccaattggttgaatggaaaaaattgctgggggtaggcagcaactagctgactgaatggtagttgttgttgcaaataagccgcagagttcaatgcacccagttggttgaatggaaaaaactgctgttgcttaaagtaggcaacaaggtttcctaacacaagttgttgta

SEQ ID NO: 9885 - DNA, 528 bp, Zea mays
  Clone ID: LIB3061-101-Q1-N6-B7
aaaacaaacgaccatctccatttggtccattgcgattgctagtcatcacaagatcaagatcaaaatacaacaattcacaagcacactttttaagcaccctcaatcgaacagccaaaaaaatttattgatatgttctgcggtgtgcaagtagcattaatctaaatgcagaaactatctgctacttattgcattattacgggtacccatcggcgtggttgccccgctgttctgatacagacgttattcagagatgtatgacaaaccccccagatgtactagagatcctgaatctctcttagattgcttcccagttcttagctggtcttggtttcacttaggccgccactgattgttcttggatctcactgcgtccagcatcgcttgcagtagcaccattaacaggaacctcagtcacagcatccgatgcacttgaaccattcacctgcatttcaccagctgcctcagaggcattgctggagggctgctttggaagggcctttggttgacgtatggcagctgctgcttttg

SEQ ID NO: 9886 - DNA, 485 bp, Zea mays
  Clone ID: LIB3061-101-Q1-N6-C1
ctggttggccacatacatcatccaaaaactttattattgaattacaactaataagcaatctaaaagagggcaccaccaatgatgtgttgttggtaggaggccgctcggtctgtcaaagcaagttggacaaagggcaacaattgttgtagttgtaagagggttgcggggttagccgcaaactgctggtaaaaaggcagcaactgttgctgtgtcaaaaaggaagcacggtttgctgcagctagctggctaaatggtagtagtatttgctgctgcaaataagcagcggggttcagtgcggccaattggttaaatggaaaaagttgttgttgctgaaagtaggcagtagctagctggctgaatggtaatagttgttgctgcaaataaacagcagggttcagtgtaaacagttggttgaatggaagaaatgttgttgctgagagtgggaaaaaggtttgccagagctacttggttgatcacaggtagca

SEQ ID NO: 9887 - DNA, 547 bp, Zea mays
  Clone ID: LIB3061-101-Q1-N6-C10
aagaactagaaatgtactttcttatttctgggaagccacaaacatcagacaaaaaactttattattgaactataactcataagaaactaaagggggcaccaccaatgatgggttgttggtagaatgctgttgggtttgtcaaagcaagttggttgaatggcagcaattgttgcagttgtaagagggtgccagcgttaggcgcagcgtgctggtagaacggcaacaattgtggttgtgtcaagaaggtagcagggctcacaccagctagctggctgaatggtagtagttgttgctgctgtaaataagcaggagagttcaaagctgtcagttggttgaatggaagaaattgctgggggtaggcagcagatagctggctgaatggtagttgttgttgttgcaaataagaagcagagttcaatgcagctagttggttgaatggaagaaactgttgttgctgagagtaggcagcaaggtttgctagcacaagttgttgtagttgttgtgccctgatgttttgtgccaataaatgcaccaaaggtaactgctg

SEQ ID NO: 9888 - DNA, 208 bp, Zea mays
  unsure (1)..(208): unsure at all n locations; Clone ID: LIB3061-101-Q1-N6-C12
gaatgcataaatggaaccaagctgtttaagccgattgcggncaaaatgatgggtgaatcagtcaaaattgggatgctgcacacaaaaattaggatcgactagccagataaaaatcccctgcacttagaaaaactgctttcctagctgtaacctgattagtggataaccttcgatgcagtcgaccgtaatcacgccatttccactttgg

SEQ ID NO: 9889 - DNA, 549 bp, Zea mays
  Clone ID: LIB3061-101-Q1-N6-C2
atgacgtcggggcccttctgctcttccagcctgccgatgaacgccaccagcgggatgttccggtccaccgggagcccgacctccgcctgcagcgcctccttgttcagcgccttggcctccacggccgtcgacacgtcgtacttcacggcgatgtacttgtccctgctggggtcccactcgctgacgtccatgccgttgacgatgccggtgatgccggtgaggcgcatgatgttgtcgagctcgcagcccctggcgatgccggagatgagctcctcggcgtagtaggggctgacggtgaggaccctgtcggcctcgaggatcccggccttcatccagttgatctttcggccttcccgggctttttgtagccgtcgatgaaatcgaaggacgacttgaatctctccgggaggttcagctccgggtagtcggagaaggcgaaccggccctggtaggagatgttgtggatgcagaaagcgggctttgcgttcctgtagatgccgtgggactggtagttgctcttgaggtagcaccagagagggccggtgtgcc

SEQ ID NO: 9890 - DNA, 524 bp, Zea mays
  Clone ID: LIB3061-101-Q1-N6-C3
gagataaatctcaatcaatatattgattatttctaggaaacacacgtcggtatgagggcaccattatcgagtacatctcatttgtaatctaaaagatggcacactccaacgatgggttgctgcctcgacaagacaggattcatcaaagagaactggttgtatggcagcaattgttgctgctgttggaaggcggcgaccaatgggttagccactaccaatggattaagtaactgttgtcgctgttgtaggtacgcagcaaagttcgacagagtcagttggttgaatggaagcagctgttgcaagtaggcaacagggtttgccacagctagttgagtcaaagctggtacaatctgttgcaacaattgttgttgcaggtatgtaggtgcattgcccacagcgagcgggctaaatgaaagcagttgttgttgttgtacgtaggcggcagggttcaccatggctagttgactgagcgttggcagaaactggtgtaactgttgttgttgctggtttgcaactacgttcgc

SEQ ID NO: 9891 - DNA, 415 bp, Zea mays
  unsure (1)..(415): unsure at all n locations; Clone ID: LIB3061-101-Q1-N6-C4
ccatgncaaatttttttttatttttgtttgcaatcgaaggttatttaacatttggaataattttcggatccatttctaaccggaccagcccaacaaagggggggcgggtggagtttaccacctggctctatttttctttggccttggcaaccttgtcgatttttggatccacaattggatcaaccttttttttgatctggttaacctttttgattggggcctcggctttttgggggttttccttgattttatccgggaccggtttaatttttggggccgttttcctgagacccgtgttgccgggaaacgcgccggggaacttgcgggggaactttttcgccggctcccgcaccgtgtttgacaccttgatgggcaccttctgccgtctttttttttttctaaaattttgaacctc

SEQ ID NO: 9892 - DNA, 492 bp, Zea mays
  Clone ID: LIB3061-101-Q1-N6-C5
cacacggccgaccttcgtttttttttttgggtatttttagattttaaacttttttttaaacactccaatcaagtttattgggcataatacactcaaatggacttgattgtttatgcaatcacatattctttggttagaatcctctttttttaaaacaacttgcacattaacttaccaaggttttttcggatgttcctttttcaactaaactcaacgaaaacttgctgttgaggttgcaaattcttaggttaaatactctagccttggtatatttgggccaaaacttagattaatttatagagtgagactttttcactggttgaacaaatgatcaatcgtgcactacctttcttaaattaaaattttgagatggatctgattttttttattgacggtgaccaatttaattattgcggaaataatggtagagccgaggtcgaaaggtccgatttactggtaaaaccgcgcttgatatgacggtatctacatcaa

SEQ ID NO: 9893 - DNA, 288 bp, Zea mays
  unsure (1)..(288): unsure at all n locations; Clone ID: LIB3061-101-Q1-N6-C6
gtggtaccaatgttggttttttggggcgggggggggggggcattgggaggggtttctaagagggggggccccccgggggggggggggggggggcggcgcggggagtcggggccgggtcgtggggggggtcccgcttttccttggggggggcggtttgggggcgggggttattaggggttttgcttgttgctggggggaattggtttntggtgggggtggccccgggttgcgggcggtagcgtttagtggtaaaacgggggggcccaatggggggggtttcgccgctaa

SEQ ID NO: 9894 - DNA, 519 bp, Zea mays
  Clone ID: LIB3061-101-Q1-N6-C7
aaatctcaatcaatatattgattatttctaggaaacacatgccgctatgagggcaccattatcgagtacatctcatatgtaatctaaaagaggcacctccaacgatgggttgctgccacaacaaggcagggttcatcaaagagaactggttgtatggcagcaattgttgctgctgtaggaaggcagcgaccaatgggttagccaccgctagtggattaagtaactgttgtcgctgttgtaggtacgcagcagagttcgacacagtcagttggttgaatggaagcagctgttgcaagtaggcagcagggtttgccacagctagctgagtcagagctggtacaatctgttgcagcaactgttgttgcaggtatgtaggtgcattaaccacagcgagagggctagatgaaatcagttgttgctgttgtaggtaggcggcagggttcaccatggctagttgactgagcgctggtagaaactgttgcaattgttgttgttgttggtatgcaactatgtttgcca

SEQ ID NO: 9895 - DNA, 411 bp, Zea mays
  Clone ID: LIB3061-101-Q1-N6-C8
gggaggaacaaaggtttgttttttgccaacagattacacacatgattggcattccacacccaaccgatcgatttgacgattattctcctatttattagccccagctttttttttttagccatgtttggggtctggacttgcaagcaaccgagatcgatgatacaaagatagattcatcggtttgcatgaacatgacttgttggcagccacttttttacaccaccattcaccaacgcatgtacaaagttttgcattattatcgcattgcctccccctgatgatgatagatcagtgcaacgccgtcaggacagtaaacccttccaccaccttgaaagtggcaccgcaaatctttttttcgtcggcggggacaacggtgaccttttgcttggggttctcgtagcacttgaaccc

SEQ ID NO: 9896 - DNA, 561 bp, Zea mays
  unsure (1)..(561): unsure at all n locations; Clone ID: LIB3061-101-Q1-N6-D3
ggaaagcgaaaaagaaaactctatgtttaattgacaccttgaaggtcttaaatatatagagaggacaacgcagcgagatgcatgggctttccagcatcgattaaagtatcagaaccttattgtagcatgcatgcatgcatctgccggttttggaagaaggtttttcctcacatcgacagccccacacatgccgcgcagcaacgagtaccccgctatcactccactggagcatagacgacacatgttctgcttggtgtataaaccgagaatgaatatggcctattatcatgcgaacagtcggcggtgaagtgctcggctgcgtgatggatcctgctaaatccaccaaatagtccagcgtcggagtccaagaccaccttatacaccccaggctttcgacaaccaatacggtagtcaaaatagctgttgttgcagtggaagttgaacacaaataccaaatctcccttttcgaacacaatcaccttatcctcctcatgtttccgggaaatatactggntgatcagatgtcatgaattcatatttttgctcaagatgttgcattgc

SEQ ID NO: 9897 - DNA, 481 bp, Zea mays
  Clone ID: LIB3061-101-Q1-N6-D6
ggatgacagatatagttgatccaaagcaggtaatggaaatacaaaggttcataaaaaggtttgctgcaacttctagggcagcttataacagtacatactagcagcacaaatggtcaaggaacagcatgccagacaacgcattttgcgcccgaacgctcgacttcctgtcaagcggcttttaccataccaaggttacacgatccatcgatgcaataccattgtaggttcttgttttgtagacgcaaacgcagccgatctatatgacagacccatcgttgatggttgcattcttcaagatcaccacgattccagaccttatgtagtacccttcttccgggtgatcagcctcttggatgcccttactgtttgtgatcaccacgttcttcccaatcctagcattcatgtcaatgatacagttccttatctttgggttccttcctattccaactgggacctttccagctaacagtagctttgaagc

SEQ ID NO: 9898 - DNA, 499 bp, Zea mays
  Clone ID: LIB3061-101-Q1-N6-D7
ctaaaaatgtactttcttatttctgggaagccacaaacatcagacaaaaaactttattattgaactataactcataagaaatctaaaagagggcaccaccaatgatgggttgttggtagaacgctgctgggtttgtcaaagcaagttggttgaatggcagcaattgttgcagttgtaagagggtgccagcgttaggcgcagcgtgctggtagaacggcaacaactgtggttgtatcaagaaggtagcagggctcacaccagctagctggctgaatggtagtagttgttgctgctgtaaataagcaggagagttcaatgctgccagttggttgaatggaagaaattgctgggggtaggcagcaggtagctggctgaatggtagttgttgttgttgcaaataagaagcagagttcaatgcagctagttggttgaatggaagaaactgctgttgctgagagtaggcagcaaggtttgctagcacaagttgttgtagttgttg

SEQ ID NO: 9899 - DNA, 265 bp, Zea mays
  Clone ID: LIB3061-101-Q1-N6-D8
cacattagaatctggaaatgtaacttcttatttctggttggccacatacatcatccaaaaaatttattattgaattacaactaataatcaatctaaaagaggcaccaccaatgatgtgttgttggtaggaggctgctgggtttgtcaaagcaagttggacaaagggcaacaattgttgtagttgtaagagggttgcggggttagccgcaaactgcttgtagaaaggcagcaactgttgctgtgtcaagaaggaagcacgacttgc

SEQ ID NO: 9900 - DNA, 560 bp, Zea mays
  Clone ID: LIB3061-101-Q1-N6-D9
atgacgtcggggcccttctgctcttccagcctgccgatgaacgccaccagcgggatgttccggtccaccgggagcccgacctccgcctgcagcgcctccttgttcagcgccttggcctccacggccgtcgacacgtcgtacttcacggcgatgtacttgtccctgctggggtcccactcgctgacgtccatgccgttgacgatgccggtgatgccggtgaggcgcatgatgttgtcgagctcgcagcccctggcgatgccggagatgagctcctcggcgtagtaggggctgacggtgaggaccctgtcggcctcgaggatcccggccttcatccagttgatcttccggccttccacgggcttctcgtagccgtcgatgaaatcgaaggacgacttgaatctctccgggaggttcagctccgggtagtcggagaaggcgaaccggccctggtaggagatgttgtggatgcagaaagcggtctttgcgtccctgtagatgccgtgggactggtagttgctcttgaggtagcacgagaagagggcccgtgtgccagtcgttgc

SEQ ID NO: 9901 - DNA, 474 bp, Zea mays
  unsure (1)..(474): unsure at all n locations; Clone ID: LIB3061-101-Q1-N6-E12
ggggggggggggggggggggggggggcggccggcggngggnngggnnngnggggcgggggccnngggcccggggcggggggcggcgcccggcccgggggggggggggggcccggggcgcggggggccggggcgcgggcgcggggggggggcggcccggggggcccacccccggggggagcggggggggngggcgggggcaaggcgggggggggggggggggggggggggggggggggggggggggggggggcgggggcggggcggcgcggggaggcgcggggggacaccgggcgccggggggggggggggggggggggcgggcgccagccagggcggaggggggggagggggggggggggggggggggccggggggggggggggggggggggcgccgggcgggggggcgggggggggggggcgggggggcgggggggncgggggggggggggggaggggggggggggagggggg

SEQ ID NO: 9902 - DNA, 389 bp, Zea mays
  Clone ID: LIB3061-101-Q1-N6-E2
aaaaaccgcactccaaaccagcaacgcttattttcgtcaggcacaaaagtggggcatggtctccatggcttcgctcaaagcgcacagtttggtaattaaactgatcaatttacagcatgatgtatccccaaatccaggcccccaatgtcgattcaacatgtaactaacatttgctggtacaacattctaccctacaacattgaagggcacaaaagagcaaaaagaaagaaaaaatgccttggatgacacttttattgctccgatgatctccaacagactgatctgcagatcacgcatgtaaccaggtgctgatcattgtcgaatgtcgaggaacacagctgcatgtcgcacgttcactttatataactgttcccctagggagtaaaaca

SEQ ID NO: 9903 - DNA, 178 bp, Zea mays
  Clone ID: LIB3061-101-Q1-N6-E4
ggtaagaaatccctttcagtgggggggggggagggggaaagtatatctgaaaagaagaagaaaggaggggacccggagggaggggggggaaacaagggagggggagggaaagagaagagggcggggggggggaaggggaaggggggagaggagggagaggcaaaaggaagggggagcg

SEQ ID NO: 9904 - DNA, 489 bp, Zea mays
  Clone ID: LIB3061-101-Q1-N6-E5
aggtggaatttgtatcttacgttcataccatgtagagccaaaaggggatggttcataccatataattaccgacacgggaagctaccctactgcttggcaaaagccaaactgaacgcgacacacaagcgcggtccattgccagcgtgtatgtacctcctcatcgaaagggcaggctagcattgccttttttattaaccccaagcccaggccagatcacaaactagacagcgaaatctagttttccatgccgatgatgcaacggatgccctcccccttggccattaagtcgaacgccttgttgatctcggcgaacgggaccctgtgcgtgatgaacttttccacctccagcttctttttcatgtacagctccaccacatttggcaaatcaatgcgtggcttgtagttgccaaaaaaggtcccctttagggtcctttcgttcaggaagttcatcgggtgggtcttgaactcaacgtccttatgtgggacacc

SEQ ID NO: 9905 - DNA, 318 bp, Zea mays
  Clone ID: LIB3061-101-Q1-N6-E6
ggtattgtgtaattctaaaaggaggagggagggaaaaggggaaagcagggaggggggaggggggaggggggggggaggagggggaggggggaggaaaagaaaaggggggggggaggagggggggggggagaagggggaggaaagggaggaggggagggggagggggggggggggagagaggagaggggggggaggggggggggggaagataaaaaacaaggagaagagaaaaagggagaaggggaagggggggggaaagaggagagggggggggagggggagggggaagaggggggggggagagggaacgggggggag

SEQ ID NO: 9906 - DNA, 503 bp, Zea mays
  Clone ID: LIB3061-101-Q1-N6-E7
agaatctggaaatgtaacttcttatttctggttggccacatacatcatccaaaaactttattattgaattacaactaataatcaatctaaaagagggcaccaccaatgatgtgttgttggtaggaggctgctgggtttgtcaaagcaagttggacaaagggcaacaattgttgtagttgtaagagggttgcggggttagccccaaactgcttgtagaaaggcagcaactgttgctgtgtcaagaaggaagcacgacttgctgcagctagctcgctaaatggcagtagtatttgctgctgcaaataaacagcggggttcagtgccgccaattggttaaatggaagaagttgttgttgctgaaagtaggcagtagctagctggctaaatggtaatagttgttgctgcaaataagcagcagggttcagtgtaaacagttggttgaatggaaaaaattgttgttgcttgagatagggagaaaggtttgccagagctacttggttgat

SEQ ID NO: 9907 - DNA, 204 bp, Zea mays
  Clone ID: LIB3061-101-Q1-N6-E8
gggaaagggggaggggggtttttttttggggggggggggggtccccaaaggaaaaaattttttttttttttaagcagaaagaggggtagagagggggggcccccccaaagtttttttttggggggggggccgggggttttttaaaagaggggggacaaggggggaaaaggttgttgttttagaaagggggggggggggcccccc

SEQ ID NO: 9908 - DNA, 504 bp, Zea mays
  Clone ID: LIB3061-101-Q1-N6-F4
cacactataaggatgatttatagcttgcttcccaatcttagggaaaataattatcgaacacccttgcaggccaatagcacattagaatttggaaatgtaacttcttatttctaggaggccacatacatcagccaaaaaacttcattattgaattacaactaataagcaatctaaaagatggcaccgccaatgatgtgttgttggtagaaggctgctgggtttgtcaaagcaagttggacaaagggcagcaactgttgcagttgtaagagggttgcggggttagccacaaactgctggtagaacggaagcaattgttgttgtttcaaaaaggaagtggggcttgttgtagctagctggccaaatggtagtagtatttgctgctggaaataagcagaggggttcagtgcggccaattggttaaatggaagaaattgttgctgctgagagtaggcagtagctagctggctgaatggtagtagttgttgttgttgtaaataagcagca

SEQ ID NO: 9909 - DNA, 545 bp, Zea mays
  unsure (1)..(545): unsure at all n locations; Clone ID: LIB3061-101-Q1-N6-F6
cagatagaactgttttggccccaatatacgcaaatatttgattcatccgtgagtcatcgtcacccaacacggattgatacacatccgttctcacttttcctacaaacgaatgctcacagcaagcaaaagtaaacgataagtngaaaaaacaagtgctacatgctatggcaaccatcccatgggagtccactagcccactactggtgggctgcttactcttcgttaccctcttcttccttggtaagcttgatcatgtcgtcaatcctcaggatagtaatggcagcctccgtggcaaactgaatgatctttactttgctcatcgatggctctatcacgccatactcaaggttgttgcgaatgatacccttagagaggtcaaggcccatacttgaataatgttgcttgtcggcctttgtttgagcagtatgatgatatgccctaagctttgctacaagctcagttgcatcttttgcagcattaacagatagtacctttggtatgattaacaaagactcagcaaattcagcaattgccaattgttcccg

SEQ ID NO: 9910 - DNA, 256 bp, Zea mays
  Clone ID: LIB3061-101-Q1-N6-G1
agaaaaaaacccggggggaaaaaaatataatataaaagggggaagagaaatttttaatgggggggggggagaataataaaaaaaaaaaattttttttagagaaaaaagaaaaagaggtaaaaaagggggggccccccagtagtgggggggggggaagggggggcggggttttaaaagaaggaggagaagaagggagaaaaattgtgttataaaaagaggggggggggggtaaaaaaaaaactggaggaaaaaaaga

SEQ ID NO: 9911 - DNA, 431 bp, Zea mays
  Clone ID: LIB3061-101-Q1-N6-G10
ggggaaaaagggcaaacaaatttttggttttttttgggaaaaacatcccgggttggggggccccttttcggttccccttcatttggaatcaaaaaaagagggccccccaaccaggggggggtgcccccacaaggggggggttataaaaaaaaaacgggtttttgggaaaaatttttttttttttaaaaagggagggcccaaagggttaggccccccttggggataaaaaaaactttggcccttttgtggggcccccccaaaatttcacccaacaaatttgtttaatagaaaaaactttttcaaaaaggcaaaagggttttccccaacttgcttgttaaaaactgggacaaatttttgcaaaaattttttttccaggtttttaggggctttcccccaaacaaaagggcttaataaaaacaattttttttttt

SEQ ID NO: 9912 - DNA, 555 bp, Zea mays
  unsure (1)..(555): unsure at all n locations; Clone ID: LIB3061-101-Q1-N6-G11
agaattcagacttctggcccttgcctttataaaaagcttaagatgttagagcgaagtgcacacttaacattaaccacagcacatgagnaaaagcgaggggaggagcgagngaaaaagattattattactgtatgtagtgctctatcctgcatgtatatcccatcgtcctcctgggattgctgttttggaggactgagaatttcttctagggttgctgttgctgatcgagctggcgtcagttctgctttgctggggtcgggtgtcgggtctatagcagtcatgctgtttcctcccccgcttctctgctctcccggggcttgtcgtcgtcgtcattcttgggcgaccggcgcgggcgtccctccttgttctccggcaggagcttgatgacgatgcccatggttatgaggaggagtcccgtcgcgtgctgctccgtcaggggcttggtgaatatcaggtacgacagcagcagcgtcaccgccttcctcgccgtcgtcaccatggctgtggttgctgcaccgaaaagcgcgatgagggagagcacggagacctggccga

SEQ ID NO: 9913 - DNA, 519 bp, Zea mays
  Clone ID: LIB3061-101-Q1-N6-G3
aagaaaaaaaaaagcctcccattctcatcaagaattgcaaccaactagctgctggagagaacctcctgctatcaaaggcaattaggcagcactctcaaatctttgccttacttccattctacttgctaagcccagatggctagagatgccatggccatggcaccaaggaacaaggcaatgtatgagccgacttgaagcctcaagttacagctcatcctcttgctgagaaaatcagctgcgatgaggtccaccaaggccatgtagatcagaataccagccgaaatggaatccagaattccctctaccacaagtgccctagggctgttgggattgtagaacgacgcgataccagaccccacggtaatcccagcaggtgttgtgatagcgaaaaaaaaagccataaggagtgcaggagaaactcttgaactgagcctcggaaatgcagccgcccaatgcaaagccctcaaaaaacggtggaaggagaaagcagcacctaaaggtttgatggtgcaaggattc

SEQ ID NO: 9914 - DNA, 538 bp, Zea mays
  Clone ID: LIB3061-101-Q1-N6-G5
cgagaaaaatctcaatcaatatattgattatttctaggaaacacatgtcggtatgagggcaccattgtcgagtacatctcatatgtaatctaaaagaggcacctccaacgatgggttgctgcaaggcagggttcatcaaagagaactggttgtatggcagcaattgttgttgctgctgcaggaaggtagcgaccaatgggttagccactgccaatggattaagtaactgttgtcgctgttgtaggtacgcagcagagtttgacacagccagttggttgaatggaagcaactgttgtaagtaggcagcagggtttgccacagctagctgagtcagagctggtacaatttgttgcagcaactgttgttgtaggtacgtaggtgcattgcccaccgcgagcgggctagatgaaagtagttgtaggtagacggcagggttcaccatggctagttgactgagcactggcataaactgttgcagctgttgttgttgctggtatgcagctacgttcgccagtacaagtgggttggatgcaagcag

SEQ ID NO: 9915 - DNA, 497 bp, Zea mays
  Clone ID: LIB3061-101-Q1-N6-G7
attactgggaagttgcccattttagtttgagaaatttttttttacagtttaaaggctaaaaaatctagaagatgggcccaccaatggggggctgatgcaataagggggtaggattcgtcaaagcgagttggctaaatggcaacaattgctgttgttgtaaaaaggcgacaatgtttgccacatcctgtgggtagaatggcagcaattgttgttgttgcaagaaggcgttaatgtttcccacaacctgtgggtaaaatggcagcaattgttgttgttgcaagaaaacagcaatgtttgcaacaacttgtaaacggaatggcaacaactgttgctgcaataaaatggcagcagggctcccgacaagttggttgaatggtagtagctgttgtgcctgcaagtaaacagcagggttcaccccagcttgttgattgaatggaaaaaattgttgttgctgaaggtaaacaacaaggttcgctgcaactacttgattaattgtt

SEQ ID NO: 9916 - DNA, 487 bp, Zea mays
  Clone ID: LIB3061-101-Q1-N6-G9
gaagaaacaagagggagatacatttttttcacaaaaacaacgaaaatacagttgttttgggccagttggaagaacagactgcaaaaggtctttaagtccaactttacacaggaggtaaaagaatattacggaaaaagaataatcaaacagtaacaatggggggctcaactggtagcttatttgaattgccatagatacacaacatatatatttatatatttataatcacaagctagcagcgtccgcgtaccgccctgaaaatttgatactcatacctaacctcggaagatattttatacactccacctctggggtcttctgtctttctgaggatcacctgagcctggcattaccttccttgcttcggaatgttgacagggaaaagaaagaacgtggcgctcttccagtcagttgatcttttctcggtctgaaatttgcaggtgggtttggaattgagctgcgtagtgattgttcttgttcagcaaaa

SEQ ID NO: 9917 - DNA, 367 bp, Zea mays
  Clone ID: LIB3061-101-Q1-N6-H6
aggcccaactaaatggggcattttatttggaacattgacctgtacatttgttggtgaaaagatgaaacgggtggggaccaagttagtcatgataacatatttacagattatttttgtccggggcagcagcgcaaccattagttgcttatgtcaaagtacttgggatcggcggggaaataatgctccactcgcagctcgccttcatttgcatttgagtgcctttgaggaaatacaactctaaaatcattgtaaaaatagaacctccgttcttcctcaggtagcgttttgctgttatatggggccgttgatagatcaaatttgcaacaaagcatttatttaaaggattttttttttggggggcacaaaa

SEQ ID NO: 9918 - DNA, 265 bp, Zea mays
  Clone ID: LIB3061-101-Q1-N6-H7
ataccaccactactatatatttatacatataaacccatactagtgtctctcatgacaaaccatattctgcctgccagcccacactttatttgggataaataccactaaatgaatcgattgatttgctctctcctcgtgatacatgtcatgtcgaccggaactctcaggtcgtgtggagaaacgatgaacacgagaagagaacaaaatctgtacatggcgagcgcgtcagtgacagtgtacttgaggtgcatctctcaaggttaca

SEQ ID NO: 9919 - DNA, 255 bp, Zea mays
  Clone ID: LIB3061-101-Q1-N6-H8
ggcaatcaagttcatataattaaacaacatactataattaacatatatataatatataggttcacgataatattgtaccaaactcgaatctgctttttacaaccatcagtcatcagcacaaccaagcagattactaacaccaaacgagacatataccacacatgcaatgatacggtgcatgtactagctagtacatccatacacacacatagcttaccaactactggttattacggaatatacaaaccatgcatg

SEQ ID NO: 9920 - DNA, 502 bp, Zea mays
  unsure (1)..(502): unsure at all n locations; Clone ID: LIB3061-102-Q1-N6-A1
cgaggtaaatctcaatcaatatattgattatttttaggaaacacatgccgctttgagggccccattatcgagtacattttatatgtaatctaaaaaaggcaccttcaacgatgggttgctgccacaacaagggagggttcattaaaaaaaactggttgtatgggagcaattgttgctgctgtaggaagggaaccaccaatgggttagccaccgcttgtggattaaataactgttgtcgctgttgtaggtacccagcaaagtttgacacagtcagttggttgaatggaagcagctgttgcaagtaggcagcagggtttgccacagatagctgagttagagctggtacaatctgttgcagcaactgttgttgcaagtatgtaggtgcattaaccacagcgagagggctagatgaaatcagttgttgcttttgtaggtaggcggnagggtttaccatggctagttgactgagcgctggtaaaaactgttgcaattgttgttgttg

SEQ ID NO: 9921 - DNA, 51 bp, Zea mays
  unsure (1)..(51): unsure at all n locations; Clone ID: LIB3061-102-Q1-N6-A11
gttgggggtttttttntttgggttgggggtnnnntgttttttttttttttt

SEQ ID NO: 9922 - DNA, 339 bp, Zea mays
  unsure (1)..(339): unsure at all n locations; Clone ID: LIB3061-102-Q1-N6-A5
atcgtggtcgtcgtgaccattcattcaatcnatagatgaaatggttcatgttgttgttgtgctggggtaagaatcggtggctggtcggtttttagccttggtaaattaaagagcaagcgctggttgggggggggggggggcaaatggggggggcaaaaccacgggcgtggccgtcttagctggatgggttgggtttgggattaggattaggattaggaccaagaaacctggtggtgcctcgtgacgcgttattgttcaaatgccaaaccacccaccaatttttggtgctgatttatggggttttgtttcttttggctggtgtcttgttcttgtcccgat

SEQ ID NO: 9923 - DNA, 241 bp, Zea mays
  unsure (1)..(241): unsure at all n locations; Clone ID: LIB3061-102-Q1-N6-A6
tgagaactttgtgtgtttcagtttttaatcattttaaaatcttgtaagatggcaccactcaatgggtggtgctggttgctnttttgggtggtnggtattcgttcaaagcttgtttggctttaatggtnngcaattgttggggggtttgtatggggcaatcatttgtttgccacatttctgtggtgtttgtntgggttgctattgttgcttgtttgcttgtaggcttttaatgttttcccac

SEQ ID NO: 9924 - DNA, 399 bp, Zea mays
  unsure (1)..(399): unsure at all n locations; Clone ID: LIB3061-102-Q1-N6-A9
caattgttcattcaggtcattgctcacactgacactgccacccatggtgatgcgtgacacattattactcaatcatcgccgcttattttctcaactagctagctagccagcgggggtggagggggcatanttgcggggggggggacaccgcctgcagcagcaaaaaggcatggagtcggctgctgcaggccgcacatcgccgtcagttgctgcgctatctgcgccgccaacagccccgcgacctggccgttttgcggctgctgctgcatgatggactggaggaccaagccgaagatcgcctggttccggtgctgcgggttcacctgcctgagctgctggcatcactgctgccgtaacgactggcactgatgcgagcagttgggcgttgccgttgggctg

SEQ ID NO: 9925 - DNA, 544 bp, Zea mays
  Clone ID: LIB3061-102-Q1-N6-B1
agcaccaaacaagatagcatacttgtcattgtattgaaaacatacgcattggtgcattacaagctttagaacagggctgagcatgcgcaaagcagtatatagacgatacgtcccttattcttacatagtactgtactatacacattcgtcagacctgtgccatacagccatactaaacaaagtcttcttgattctcatacgccttcacataaggcccaaggtgtgtgtcgtgccctggtgagtgccagacccagggccatgtagctggtaagtctggctcggcacaacctggagaacacctggttgctccttgagatccttgacctgctggggggtgagcttcgcggagaagccgctggcggcgttcttgtagtggtagagcactgcgtccctggccttctgttcgctgccgaggacgggggtgagggtgcggatgtggaactccttagggtcggcgtactcggggcggtcaacgtacacgatgtgcacggccgtctcctgtgccgagggggccgactgcttctccggctcggccgccatggct

SEQ ID NO: 9926 - DNA, 510 bp, Zea mays
  Clone ID: LIB3061-102-Q1-N6-B7
agataagaattcaccaatccaatactaatgagaaacagagtggaagacttgttaagcctacaaagtagaccagatgtcttaaaaatactccatatcctagctggcggaccaacaagttacaagcaagtctgcttaacataaaagagaagttacaaatcactacacacagttctcggatcctatccatgatgtgctctttctctgttaaattggacctcaacatgtaacggtgtgcctccaaaacagcaaagttataatggcacagatctaattaaccctttgaaatgccactatgagcatttgcatcacatgacatcagcactatttgtagggcagctgttttgattttctcaatcctcccaaaaataaaatggcacaccgtgcaagatccaccttcctgctacctccagtctgattaacattggtgacctcgacgacaacaagagcttgagttccaactgcagggcctgctactatcctgtctggctaaatcatattcaagcaatacat

SEQ ID NO: 9927 - DNA, 309 bp, Zea mays
  Clone ID: LIB3061-102-Q1-N6-B8
ggccgccctggggggggggggggttttttttttttttgggggggggttttttttttttttttttttttttttgttttttttttttttttgggcgccgtggggcggccctgggtttccttgctctcttttttttcctttcagggaccgggcccttcggggcgggggggggggttttttgggggggggaaaaaattccccgggtccaccggggcccccgccctccccccggggggggttgcccacgggtcttccccccaacggggggggggcctccccctttggcccattccactttcccgttgggtgccc

SEQ ID NO: 9928 - DNA, 362 bp, Zea mays
  Clone ID: LIB3061-102-Q1-N6-C1
gaatctggaaatgtaacttcttatttctggttggccacatacatcatccaaaaaactttattattgaattacaactaataagcaatctaaaagagggcaccaccaatgatgtgttgttggtaggaggctgctgggtttgtcaaagcaagttggacaaagggcaacaattgttgtagttgtaagagggtagcggagttagcccaaaactgctggttaaaaggcagcaactgcagctgagtcaagaaggaagcacggtttgctgtagctagctgactaaatggtaaaaatattaagctgctgcaaataaaccacgaggaaaagatgcggacaattggttaaatggaagaagttgctgttcatga

SEQ ID NO: 9929 - DNA, 260 bp, Zea mays
  unsure (1)..(260): unsure at all n locations; Clone ID: LIB3061-102-Q1-N6-C11
ctctagnacggccggcggggggggggggggggggtttttttttttttttttttggcgggcccccccnncccgtggatcatgtggtttctgtcgttgtctcaagtggnttttcagaaaacccgggccatttgccccttttttttttttttttcccaagggtcttgctgggggggggggggtttctttccgggggcctnaccctgcgcccgctggtgttgtcgccgtcggatagctggcgccccacgctctggctttggaag

SEQ ID NO: 9930 - DNA, 378 bp, Zea mays
  Clone ID: LIB3061-102-Q1-N6-C12
aagggaacatctattgactttggattgagctgatcccttactcttggggatcactgtcccttttgttaacaaagccagatgcccccagtaaaacaggttcacttcgtgtcgggtgccgaccagccaggctgccgcgagccatcaggatagcaaaatcggtggacaccgtgttgttgttccttagatgtcaaatcactgccgctgctaacaaataatctaacttttttttacctcgctttcagttcactaattaccaggcggggtttagacagtatttttgcaaagagcaacaacacaacaggtgtaactgtaacgctacacttgattgctgtttttttttcttttaccactgcagatttgcaccgggttcttcctttt

SEQ ID NO: 9931 - DNA, 496 bp, Zea mays
  unsure (1)..(496): unsure at all n locations; Clone ID: LIB3061-102-Q1-N6-C2
atagatctctaatcttttattactgagaagttgcacatatcagtatgagaaatttattattacagtataaagcataaaaaatctagaagatggtaccaccaatggtgggctgatgcaataagggggtaggattcgtcaaaggggggtggctaaatggcagcaattgctgttgttgtaagaaggcgacaatgtttgccacatcctgtgggtagaatggcagcaattgttgttgttgcaagaaggcgttaatgtttcccacaacctgtgggtaaaatggcagcaattgttgttgttgcaagaaagcagcaatgtttgcaacaacttgtagacggaatggcaagaactgttgctgcaataagatggcagnagggcttccgacaagatggttgaatggtagtagctgttgtgcctgcaagtaaacagcagggttcaccccagctagttgattgaatggaagaaaatgttgttgctgaaagtaagcagnaagggtcgctgc

SEQ ID NO: 9932 - DNA, 533 bp, Zea mays
  Clone ID: LIB3061-102-Q1-N6-C3
atatcgagataaatctcaatcaatatattgattatttctaggaaacacatgccgctatgagggcaccattatcgagtacatctcatatgtaatctaaaagaggcacctccaacgatgggttgctgccacaacaaggcagggttcatcaaagagaactggttgtatggcagcaattgttgctgctgtaggaaggcagcgaccaatgggttagccaccgctagtggattaagtaactgttgtcgctgttgtaggtacgcagcagagttcgacacagtcagttggttgaatggaagcagctgttgcaagtaggcagcagggtttgccacagctagctgagtcagagctggtacaatctgttgcagcaactgttgttgcaggtatgtaggtgcattaaccacagcgagagggctagatgaaatcagttgttgctgttgtaggtaggcggcagggttcaccatggctagttgactgagcgctggtagaaactgttgcaattgttgttgttggtggtatgcaactatgtttgccagaac

SEQ ID NO: 9933 - DNA, 247 bp, Zea mays
  unsure (1)..(247): unsure at all n locations; Clone ID: LIB3061-102-Q1-N6-C8
tttaaaacttaaatcttttaatttcatggcgcatcagctcagacctgaaaccatttttttcttcatactttnttccatttgtttgggttttgtcatgcgcctngcggtgccggcgcccntttgcatggcggtgccacaaggagacttccttcaccccatttcccatgctggggttgtccgctccctgggggtggcctccctttgtgtttaccccaaggcttctcaaccttggactgggatagccttt

SEQ ID NO: 9934 - DNA, 502 bp, Zea mays
  Clone ID: LIB3061-102-Q1-N6-D1
agaaatgtactttcttatttctgggacgccacaaacatcatccaaaaaacttcattattgaactataactcataagcaatctaaaagagggcaccaccaatgatgggttgttggtagaacactgttgggtttgtcaaagcaagttggttgaatggcagcaattgttgcagttgtaagagggtgccagcgttaggcatagcgtgcaggtagaacggcaacaactgttgttgtgtcaagaaggcagcagggctcacatcagctagctggctgaatggtagtagttgttgctgctgtaaataagcagcagagttcaatgctgctagttggttgaatggaagaaattgctgggggtaggcagcaactagctggctgaatggtaattgttgttgcaaataagcagcagagttcaatgcagccagttggttgaatggaagaaaccgatgttgctgaaagtatgcaacatggtttgctagcacaaattgttttatttgatgagcccctg

SEQ ID NO: 9935 - DNA, 557 bp, Zea mays
  Clone ID: LIB3061-102-Q1-N6-D4
aagaatctagaaatgtactttcttatttctgggacgccacaaacatcatccaaaaaacttcattattgaactataactcataagcaatctaaaagaggcaccaccaatgatgggttgttggtagaacactgttgagtttgtcaaagcaagttggttgaatggcagcaattgttgcagttgtaagagggtgccagcgttaggcatagcgtgcaggtagaacggcaacaactgttgttgtgtcaagaaggcagcagggctcacatcagctagctggctgaatggtagtagttgttgctgctgtaaataagcagcagagttcaatgctgctagttggttgaatggaagaaattgctgggggtaggcagcaactagctggctgaatggtaattgttgttgcaaataagcagcagagttcaatgcagccagttggttgaatggaagaaactgatgttgctgagagtatgcagcaaggtttgctagcacaagttgttgtagttgttgtgccctgatgttttgtgccaccaaatggaccaaaggtaactgctgtaatagggctg

SEQ ID NO: 9936 - DNA, 532 bp, Zea mays
  Clone ID: LIB3061-102-Q1-N6-D7
ctagaaagtactttcttatttctgggaagccacaaacatcagacaaaaaactttattattgaactataactcataagaaatctaaaagagggcaccaccaatgatgggttgttggtagaacgctgctgggtttgtcaaagcaagttggttgaatggcagcaattgttgcagttgtaagagggtgccagcgttaggcgcagcgtgctggtagaacggcaacaactgtggttgtatcaagaaggtagcagggctcacaccagctagctggctgaatggtagtagttgttgctgctgtaaataagcaggagagttcaatgctgccagttggttgaatggaaaaaattgctgggggtaggcagcaggtagctggctgaatggtagttgttgttgttgcaaataagaagcagagttcaatgcagctagttggttgaatggaagaaactgctgttgctgagagtaggcagcaaggtttgctagcacaagttgttgtagttgttgtgcccttgatgtttgtgccaataaatgcaccaaa

SEQ ID NO: 9937 - DNA, 347 bp, Zea mays
  Clone ID: LIB3061-102-Q1-N6-E2
ggaagaaagctccaatctaacccactttcattcagatccattcaatgtaacgacgaacacagcagggtttactcggatcccagttacgcaacacacccacgggggacagaccctggcattccgaccctacgggagaaaaaggagtttttggggctataagcaaactgaaacggggaacacaagaggaagagaaacttgggaaaccgttaacaactagccaactgctctccatccagtagcgatgaggagatcgagcaacgcttatggggccatgctgccagttccaaagcctgccttggttggtcaccaattcccttgccccgcatttgagttttcaggacacccac

SEQ ID NO: 9938 - DNA, 554 bp, Zea mays
  unsure (1)..(554): unsure at all n locations; Clone ID: LIB3061-102-Q1-N6-E4
cttgaaaataagaatacattaatgatgatccacgtcttatcgcaatgcaacatgcaaacatcaagcacaactaaatttccagcaagattctcctgcatccatgtccagcagagtacaaactcagttacaaattaaattcaactggngaaaactacagtaacaccctactagtataaaaatttcaatcatttggtcccgtttccgtgacactgcgtgaagttgtacccatccatgtccagaggacatcaaaaaagaaattacaggccccgatcaggacgcaggctgacaaacgctcagggcagcaggttcattatccagaaaatgactacaagtgtcacaatgcatctcatcaccttgctgaccaagcctctcgcggaagtgtaacaggtgctaaattaggcagcaacaagatcaggtgtttctgcctcaactgaaagcaatgtagtatgcacctttccaacccaggcatccaggcggtcgcgcaaagccttaacctgtgggattccaagcactctgggctggacccacgagacatgaactgtactgtccacttc

SEQ ID NO: 9939 - DNA, 526 bp, Zea mays
  Clone ID: LIB3061-102-Q1-N6-E5
aaatctcaatcaatatattgattatttctaggaaacacatgtcggtatgagggcaccattgtcgagtacatctcatatgtaatctaaaagaggcacctccaacgatgggttgctgcaaggcagggttcatcaaagagaactggttgtatggcagcaattgttgttgctgctgcaggaaggtagcgaccaatgggttagccactgccaatggattaagtaactgttgtcgctgttgtaggtacgcagcagagtttgacacagccagttggttgaatggaagcaactgttgtaagtaggcagcagggtttgccacagctagctgagtcagagctggtacaatttgttgcagcaactgttgttgtaggtacgtaggtgcattgcccaccgcgagcgggctagatgaaagtagttgtaggtagacggcagggttcaccatggctagttgactgagcactggcataaactgttgcagctgttgttgttgctggtatgcagctacgttcgccagagcaagtgggttggatgc

SEQ ID NO: 9940 - DNA, 543 bp, Zea mays
  Clone ID: LIB3061-102-Q1-N6-E6
ggaacagatggagtactttttttcttttcatttcaattgttcattcaggtcattgctcacactgacactgccacccatggtgatgcgtgacacattattactcaatcatcgccgctaaatgactcaactagctagctagccagcggctatactacagcacatagtttcttcagtgggggacaccgccggcagcagcgtaggggcatggagtcggctgctgcaggccgcacatcgccgtcagttgctgcgctatctgcgccgccaacagccccgcgacctggccgctttgcggctgctgctgcaggatggactggaggaccaagccgaagatcgcctggtaccggtgctgcggctccacctgcctgagctgctggcaacactgctgccgcaacgactggcactgaggcgagcagtagggcgtcgccgtcgggctgcactgatgcctcaggaactcgacgcactggcccaggatcggggtgctgccaacgccgcaggttccctgcagctggcacgggcttggatgcggctgttggcacgggcatg

SEQ ID NO: 9941 - DNA, 490 bp, Zea mays
  Clone ID: LIB3061-102-Q1-N6-E7
atctggcaacattcccatatttattccgcatagttattatcattattggaacacgcgacaatgcgagcccacgttagaactaccccattctggacttgcacgcgcacaggacacatgctgcgttttgcacctcgcgccgactcgcattttttttaaccatggtagctagtactggtcgccgccggaaaaaatgctgcactcctgtggctccgacagccggcacattattggcaaccccgcggggtactcccgggcctttgtaagccttacgcggccgatccttggcccggtggtgccgggaccacacgggggatacatttgcgtttggtatccctctcctgcccggctgcaggggtagtagtaacccccctgtcctcctcctccctgcgggggggggtgttgccgccgcccccatgggcaccagcctttcttcagcggcggcatggcctccttttatcccctgaccatgctccggatgggggcgcaacgg

SEQ ID NO: 9942 - DNA, 553 bp, Zea mays
  Clone ID: LIB3061-102-Q1-N6-E8
agaatctggaaatgtaacttcttatttctggttggccacatacatcatccaaaaactttattattgaattacaactaataagcaatctaaaagagggcaccaccaatgatgtgttgttggtaggaggctgctgggtttgtcaaagcaagttggacaaagggcaacaattgttgtagttgtaagagggttgcggggttagccgcaaactgctggtagaaaggcagcaactgttgctgtgtcaagaaggaagcacggcttgctgcagctagctggctaaatggtagtaatatttgctgctgcaaataagcagcgaggttcagtgcggccaattggttaaatggaagaagttgttgttgatgagagtaggcagtagctagctggctgaatggtaatagttgttgctgcaaataagcagcagggttcagtgtagatagttggttgaatggaagaaattgttgttgctgatagtagggagaaaggtttgccagagctacttggttgatcacaggtagcacgagttgctgcagctgctgtgccttggatggtttgtacc

SEQ ID NO: 9943 - DNA, 337 bp, Zea mays
  Clone ID: LIB3061-102-Q1-N6-E9
ggggggggggggggttatattttttgttggtttgggttttttttattatattttttttttttaaggggggaccccttgtgtttggggggggggaaagactattgtttttttttttggcggatatcccggaggggttgtgggtttttgggggcccccaggggggggcccgcgccccccttcggctgttggggcgggggggggggggggggacaggggcaaagggccgggggccccgggggcggggttccctgtggggggggggggggcccccgttgccccctgaactggggcaatggggcgcgccggggggggtccccggagggggggggttttctct

SEQ ID NO: 9944 - DNA, 312 bp, Zea mays
  Clone ID: LIB3061-102-Q1-N6-F1
ggggaaaaaaaccctgtttattggccttaactgcttggtacacagcgcactggtcaatgggccaaagagtaagggtagaaatatccggcccaataataataggcccgaaaacaagaaccaacagacagttacggacgcacctgaacaaccagccttcaggatgcagtttaaccaccctgtacagggtgcaccatgactcggtatatgctattatgctccttcatccaacacacaaattacacaagcatagcaatgcttctgagtttaacggaagaaagcggcactatgttccaacaatttatttacccaata

SEQ ID NO: 9945 - DNA, 333 bp, Zea mays
  Clone ID: LIB3061-102-Q1-N6-F3
gaactccaacctggaaaataaaggaaagaaacccgaaaaagatgggtttcaatgggacaggtggaaaggatttacagttttgcaaagggcaaacaaaacttttggtgcctaaaacagggagatgtaaagctttttccttcgtagctttgttatcaagtcatcaaggggctggggcccaaagggcgtggcatcccatattttttttttgggccttgttcgtttgtgtaaaattacatccaaaatttttcccgttgggatttatttaaactagagaagcaatccccgggaatgtaccagtttgggtttatataaactaaaacattccgattagga

SEQ ID NO: 9946 - DNA, 561 bp, Zea mays
  Clone ID: LIB3061-102-Q1-N6-F4
agaaatgtactttcttatttctgggaagccacaaacatcagacaaaaactttattattgaactataactcataagaaatctaaaagagggcaccaccaatgatgggttgttggtagaatgctgttgggtttgtcaaagcaagttggttgaatggcagcaattgttgcagttgtaagagggtgccagcgttaggcgcagcgtgctggtagaacggcaacaattgtggttgtgtcaagaaggtagcagggctcacaccagctagctggctgaatggtagtagttgttgctgctgtaaataagcaggagagttcaaagctgtcagttggttgaatggaagaaattgctgggggtaggcagcagatagctggctgaatggtagttgttgttgttgcaaataagaagcagagttcaatgcagctagttggttgaatggaagaaactgttgttgctgagagtaggcagcaaggtttgctagcacaagttgttgtagttgttgtgccctgatgttttgtgccaataaaagcaccaaaagtaactgctgtaatagggcttgagattgtt

SEQ ID NO: 9947 - DNA, 448 bp, Zea mays
  unsure (1)..(448): unsure at all n locations; Clone ID: LIB3061-102-Q1-N6-F6
gggggggggntataatatttttttttgtgttttttttttttttttntttttttttttttttgttttttttttttgttgttttgtttttttttttttttttttttttttttttttttttttttttttttttttttttttttttggtgttttgtntgggtttttttttntttnntnttnttttatttttttatgttttttgtttttttttttttttttttgttttngttttttttgtatttttttttttgttttggtttgttgttttttttttttttttttttttttttttttttttttttttttttgttttttttttgttttttttttttttttttttttttgttttttttttatttttttatatttttttttattgttttattttttttttttttgttttggttattttttttatttttttttttttttttttttttttatatttttt

SEQ ID NO: 9948 - DNA, 229 bp, Zea mays
  Clone ID: LIB3061-102-Q1-N6-G12
cctctgtacggccgggggggggggggggggggttttttcttcttcttggggggcgcgtggtggaatgctgggagtgtgctttgcttgttgtctgggttagcctcctgcgtgtggcgtcgggctgggttgtgggggctgtggctgcgttttatttctcctcgggggcgccccccgtggtgggggggggggggaacgctgctgggtttgtcttctcctgttggttgtttgg

SEQ ID NO: 9949 - DNA, 374 bp, Zea mays
  Clone ID: LIB3061-102-Q1-N6-G3
gcagcaccaagaagcaccatttttttccttaggatttaacttagaataaagcctgacgggggtaacagcacccatcgatccgcagtccatgctggttgatgcatgggtctgctggagccgaggatgaacacagtactaacaactgacacagagcgaccttcaatcaaaaacacagatgggcaacaacaaacacgagacgaacgaagataaacactttggtcttgggttaacaacacggtagcgaacaggataacttgggcgcgcgggccccaccgctcaattccttcagtttccattggaattgccgtagccgccgccacggttgccaccgtcgtagccgccgccaccaccaccgtaaccgacgtcgtcaccac

SEQ ID NO: 9950 - DNA, 539 bp, Zea mays
  unsure (1)..(539): unsure at all n locations; Clone ID: LIB3061-102-Q1-N6-G9
atagaacacgcacgtgtcattatttatttatgggacttgcctcagtagcatacagcatcgtatccgcacgtacatactacagagccacacttattgcactgcctgccgcttacgtacatagttaacacgcagagaggtatatacatacacgtccaacgtctccactcaggctcatgctacgtacgcacgtcggtcgcgcgccaccctcttgttgcttcttgctcgttttggcgagcgcggcggcctcacatcctggcggtaaccatcctcatgagcgtctccgccacctcctcgcggcgcccgcggccgtggcgtccttcgcgttcctcctcctctttctcccgctcctcacgtccgtggcgttccctctccccacggccgccgtggcgttcttcgcgttcctcctcctcctcttgctcccgctcctcgtggccgccgctctccttggggccaggaaggaaccccttctcgcgccgcgagccgagcacctngtccacctcctccgccttggaggcgaatgacagcgcctttggcgaccc

SEQ ID NO: 9951 - DNA, 537 bp, Zea mays
  Clone ID: LIB3061-102-Q1-N6-H2
atcgagataaatctcaatcaatatattgattatttctaggaaacacatgtcggtatgagggcaccattgtcgagtacatctcatatgtaatctaaaagaggcacctccaacgatgggttgctgcaaggcagggttcatcaaagagaactggttgtatggcagcaattgttgttgctgctgcaggaaggtagcgaccaatgggttagccactgccaatggattaagtaactgttgtcgctgttgtaggtacgcagcagagtttgacacagccagttggttgaatggaagcaactgttgtaagtaggcagcagggtttgccacagctagctgagtcagagctggtacaatttgttgcagcaactgttgttgtaggtacgtaggtgcattgcccaccgcgagcgggctagatgaaagtagttgtaggtagacggcagggttcaccatggctagttgactgagcactggcataaactgttgcaactgatgttgatgctggtattcaactaccttcgtcagaacaagtgggttggatgcaag

SEQ ID NO: 9952 - DNA, 457 bp, Zea mays
  Clone ID: LIB3061-102-Q1-N6-H4
gtggggttggggtgggggtggggggggggggggggggggggggtgagtggggggtgggggggggggggggaggggggggggggggggggggggtggggggggggggggggagggggggggggggggggggggggggggggggggggggggggggggggggggggggggggggggggaggggggggggtggggggggggggggggggggggggggcggaggggggggggggggggagggggggggggggggggggggggggggggaggggggggggggggggggggaggagggggaggcgaggggggggggggcgggggggcgggagggggagaggggccggggggggcggggggggggggggggagataaagggggggggaggggggggggggggggggcggcggggggggggaggggggggggaggggggggggggggagggggggaggggggggg

SEQ ID NO: 9953 - DNA, 582 bp, Zea mays
  Clone ID: LIB3061-106-Q1-N6-A10
aagccaaatacccgtctcagcgagaccaccataaatagagcttacacaacatagccaacatgcaaatcattttagaactgaccagatgcagaggcaggaattctcgaggcgggctacacaagtgtgcaccgtgcactgcaatgcccaacaacaagattgtagcagcaaacatggaagagaaaggcgcggggggcaaggcagcagttccgcatgacgagttaccgcggtttacaatcttcctgatacccaaccgtagggaaccccccctagatcttgtcgagcttgtctgccttcaccaccggattagccttggcaatggcgtccctggcagcagtccggtagtcgaacttgcagtcgtgcttgtcggagtagcggtggagtgcgcagtacaagttcccacaccggcagttgaatcccgtaagtccaaccctcttcctgcaggcgctgcaccggttcggccctaccttcccccctttggagatcgccgccaccccctcgctgggtccggcaacatcagcgggctgctgcacgttcattgtttgcaactcaacttgggcaacagctactaccgtgttgctgcca

SEQ ID NO: 9954 - DNA, 515 bp, Zea mays
  Clone ID: LIB3061-106-Q1-N6-A12
ggagcatgaaaaacgtcagtttcacggttgcaacgatgcgcacaatccaacatccagccagttcaacattgcaggttagttcaatcaactcgacatggcgcacaatgcgctgaccactctatgtacattcactcagattcccaaagccacaccaaatcagagtatttcatgattaggagatgaaagccctgacacactctgaaacgtcataaacatctcctgtcctggggcatgtaatcttgccgtcatttttcttggacatctcttgaagcgccttctcactgtagacatagccgttcggcagaacctgaggcgggttctcagtgtccatgagctccttggtgatgtaacaaacaagcttcgagtggtgctgtttagagaagggcagaggctcggctagtttcctgaagccctccagagacaaggggtcttctttgggacagctaccctcagagcagaacggggtcttgagagctgtcaggcctgcttgcagatatatgttcagcagcggctct

SEQ ID NO: 9955 - DNA, 454 bp, Zea mays
  unsure (1)..(454): unsure at all n locations; Clone ID: LIB3061-106-Q1-N6-A4
gggggggggaaaattttttttttttttttggggggggcgattttttggaaaaaaattttttttttgggnttttttttttaaaaaatttaaaggggggcccccccaattttgggtttttggggaaatttttttggttttttcaaaaaagggtgtttgtttgggccctttttttggttttttgggggggggcccctttttggccccctgttttttttaacccgccaaaattttggtttgttttctgggggggggggggttccccccttttttttgtttttggttttttttttttgttttttttatttaggggggggttttaaggtttgtattgtggttgggggggaaaaatttggggggggggggcggnaaaacttttccttttggggttttttttttttggttgtattgccgccgtttttttcctttttttttggtgggaaaaaatttttttttt

SEQ ID NO: 9956 - DNA, 442 bp, Zea mays
  Clone ID: LIB3061-106-Q1-N6-A5
aattacaattttttttcttattcaaatttatagaacaaacatcataatgtatgggcacattatagcttaacaccgttataggggtaggacggctagggagaaacaccggttgaggggcaaacaccactagtggcaacgctgctgcaagggcaaacaccgcaaaaggagtggcacaagccgggcatttttgggagggatgggggggccaagccgaacaccaccggacggtgaggagcttgttgaaaaacacacaacccacatggggggggttggtgggacccccagaacatagatggaaccaggtggtgcaccgcctggggaatggattgaaccccaatgtgcctaggatggtgaaagcattggggctgaaatacccggaaaatactagaacgttttaaacgggataggggaaaaggccttggcaaagggcaaacactgttgg

SEQ ID NO: 9957 - DNA, 600 bp, Zea mays
  unsure (1)..(600): unsure at all n locations; Clone ID: LIB3061-106-Q1-N6-A7
cacattagaatctgggaatgtaacttcttatttctggttggccacatacatcatccaaaaactttattattgaattacaactaataagcaatctaaaaggggcaccaccaatgatgtgttgttggtaggaggccgctgggtctgtcaaagcaagttggacaaagggcaacaattgttgtagttgtaagagggttgcggggttagccgcaaactgctggtagaaaggcagcaactgttgctgtgtcaagaaggaagcacggtttgctgcagctagctggctaaatggtagtagtatttgctgctgcaaataagcagcggggttcagtgcggccaattggttaaatggaagaagttgttgttgctgagagtaggcagtagctagctggctaaatggtaatagttgttgctgcaaataagcagcagggttcagtgtagacagttggttgaatggaagaaattgttgttgctgagagtagggagaaaggtttgccagagctacttggttgatcagaggtagcacgagttgctgcagctgttgtgccctgatggtttgtaccaatgactgcaccaaanatagggctggcgattgttgaaacaaca

SEQ ID NO: 9958 - DNA, 584 bp, Zea mays
  Clone ID: LIB3061-106-Q1-N6-A8
agacatgcagtttagccataacaaacatgttttgcttacaacaatctgctcatttttttcctggcaaatcactcggtgtatcaaaaactttagagctatgtagttgaaagactaatcaacacgcagtttaaccatgagcaagctttgtttaattattacagtctacgagtacttattcaggcagatcactctgaggttgtgcctactgttgggcgctgccagcttgaccttgttggtagctgccactgccagcaggagtaagcacagccagctcatgcttcctaccgttcttgagctctgcagcttcctccatggagatggcatacgagctggcgatgacggcggccggcaagtcgctcaggacggagttcttcccggcaacgtggctgaccatggtgtcagggttcgtctcgaaggcgatgtactggaagccttctccctgcgccttggtggcgacgaggtagccctggggtacgatgagcagctgccccgcacggagcacgtcgtcgaacaccgtggtcccgttgtcgctggcgacctggacccttgcactgcccctgatgccgtacatggcgctgtgggcg

SEQ ID NO: 9959 - DNA, 551 bp, Zea mays
  Clone ID: LIB3061-106-Q1-N6-A9
ggattctcgttttggttttcataataaagttcgattacaagcattgacaagagagggacaatgcatactagcatgcatatacagcaagtctctcttctgagttattggcgcccacgccagttctgaatcatgatcgcacggacaacagcagcagggaggaacaaaggtttgttatttgccaacagattacacacatgattggcattccacacgcaaccgatcgatatgacgattatactcctatttattagcaccagctatatatatatagccatgtctggagtctggactagcaagcaaccgagatcgatgatacagagatagattcatcggtttgcatgagcatgacttgttggcagccactatgttacaccaccatccaccaacgcatgtacaaagttctgcatcatcatcgcatcgcctccgcctgatgatgatagatcagtgcagcgccgtcaggacagtagacccttccaccaccttgaaagtggcaccgcaaatctcttcttcgtcggcggggacagcggtgaccttgtgcttggggttctcgt

SEQ ID NO: 9960 - DNA, 575 bp, Zea mays
  unsure (1)..(575): unsure at all n locations; Clone ID: LIB3061-106-Q1-N6-B1
agaaagtactttcttattctgggaagccacaaactcagacaaaaaatttattattgaactataactcataagaaatctaaaagagggcaccaccaatgatgggttgttggtagaatgctgctgggtttgtcaaagcaagttggttgaatggcagcaattgttgcagttgtaagagggtgccagcgttaggcgcagcgtgctggtagaacggcaacaactgtggttgtgtcaagaaggtagcagggctcacaccagctagctggctgaatggtagtagttgttgctgctgtaaataagcaggagagttcaatgctgtcagttggttgaatggaagaaattgctgggggtaggcagcagatagctggctgaatggtagttgttgttgttgcaaataagaagcagagttcaatgcagctagttggttgaatggaagaaactgctgttgctgagagtaggcagcaaggtttgctagcacaagttgttgtagttgttgtgccctgatgttttgtgccaataaatgcaccaaaggtaactgctgtaatanggctgatgattgttggaggaacaagggtgat

SEQ ID NO: 9961 - DNA, 608 bp, Zea mays
  Clone ID: LIB3061-106-Q1-N6-B10
acgaaaagaatcagctttttcgaggcttaatttgaggagggcctcaataggtggaatgtgcagcaatggcctcaacaacgacatgcacacctcacaccaagaaaaccctcagttttaagcatgaacagtttggaagttttacatagctgagaaaagagacggaactgtagcttttatgagcgctgctactaatactcttcacagagcatggctctgtcatagtagtattattaatcaccagatgcaccaacagcaggcgatccggctgccaacgagcagaggcaccctcagacaagcacctgagctgcagctagcctagcgatcgggaccctgaaaggggagcaagaaacgtaatccagcccagtcttggcgaagaaagcaaccgatgaaggctctccaccatgttctccacaaatgcccaccttcaagttaggcctagctttgcggcccctctctgtagcaagcttaaccagctcgcccactcctctctggtcgagaacctcgaaggggtcatgctggaggatgccctgagccagataaatggggatgaacttccccacatcatccctgctgtagccaaaggtcatctgcgtgaggtcgttcgttcc

SEQ ID NO: 9962 - DNA, 518 bp, Zea mays
  Clone ID: LIB3061-106-Q1-N6-B3
caatggtccattcaggtcattgctcacactgaccctgccccccatggggatgcgggacacattattactcaatcatcgccgctaaatgactcaactagctagctagccagcggctatactacagcacatagtttcttcagggggggacacccccggcagcagcgtaggggcatggagtcggctgctgcaggccccacatcgccgtcagttgctgcgctatttgcgccgccaacagccccgcgacctggccgttttgcggctgctgctgcaggatggactggaggaccaacccgaaaatcgcctggtaccggtgctgcggctccacctgcctgagctgctggcaacactgctgccgcaacgactggcactgaggcgagcagtagggcgtccccgtcgggctgcactgatgcctcaggaactcgacgcactggcccaggatcggggtgctgccaacgcccgcagttccctgcagctggcacgggcttggatgcggctgttggcacgccatgggtgtggct

SEQ ID NO: 9963 - DNA, 580 bp, Zea mays
  Clone ID: LIB3061-106-Q1-N6-B4
cattaaaaaagagaaaaaatttgagtagatgatggaccaccatttctttacaccaaacaaaacttcagagaaccagccaactgggcaatggttttccccgtctcgagtcctttctgagaactgagatccaccaggtgtgggtgcacataccgacatgcgcatgtaaactaccgacaacagagcaaccccaacattttccagtttccactgcatgctacagcctagagaacaaccgctatagtatactctattgtatctgcttctttcagacatcagggcgcaatacaaggatgatggaggagtagctgagcataggatagagattggagttgaggaaatgagagaactggtagacggtgacagcacgatctggcaggccatcggtgaggaagtcatatggtgcctccttgccggtgtccaccaccggctcccatcggaacccagagcgctctggaagcccaacaaccaccggaaggtgactggtgttgaaggccacgtagatctcgcctttggtttcgtccttcatggtgaaggcaacgaatcggcttgcctctgaccagtcaggcttcccgggctgatg

SEQ ID NO: 9964 - DNA, 351 bp, Zea mays
  Clone ID: LIB3061-106-Q1-N6-B5
cctctagacaacccccctttttttttttttttttttttaaccttgataccacggtgttctttcttttcttttttcaatcccgtttgcgaggaatctccacaacttggagcctctcgcccttacaaaatatgttcactgttttttttttagcaagggagggatttgttgcgggcgcgcgacacaaaagatcacagcgaatacgcacacacaagacccagacttgagctcaaaagactagcacactagaacggagctcaaatcactagaatgtcgaacaagtgcgcaagattgatgtgtgagtgatcaagagtgctcaaggaatgcttggtgtgttcctccatgcgcctaggg

SEQ ID NO: 9965 - DNA, 580 bp, Zea mays
  Clone ID: LIB3061-106-Q1-N6-B6
gaaattattgagataaatctcaatcaatatattgattatttctaggaaacacatgccggaatgagggcaccattatcgagtacatctcatatgtaatctaaaattggctccttcaacgatgggttgctgcctcgacaaggacagggtttatcaaagagaactggttgtatggcagcaattgttgctgctgtaggaaggcagcgaccaatgggttagccactgctagtggattaagtaactgttgtcgctgttgtaggtacgcagcagagttcgacatagtcagttggttgaatggaagcagctgttgcaagtaggcagcagggtttgccacaactagctgagtcagagctggtacaatctgttgcaacaattgttgttgcaggtatgtaggtgcattggccacagcgagcgggctagatgaaagcagttgttgctgttgtaggtaggcggcagggttcaccatggctagttgactgagcgctggcagaaactgttgcagctgttgttgtggctggtttgcaactacgtttgccagagcaagtgggtttgatgcaagcaactgctgttgcaagtaggcggc

SEQ ID NO: 9966 - DNA, 608 bp, Zea mays
  Clone ID: LIB3061-106-Q1-N6-B8
atcgagataaatctcaatcaatatattgattatttctaggaaacacatgccgctatgagggcaccattatcgagtacatctcatatgtaatctaaaagatggcacctccaacgatgggttgctgccacaacaaggcagggttcatcaaagagaactggttgtatggcagcaattgttgctgctgtaggaaggcagcgaccaatgggttagccaccgctagtggattaagtaactgttgtcgctgttgtaggtacgcagcagagttcgacacagtcagttggttgaatggaagcagctgttgcaagtaggcagcagggtttgccacagctagctgagtcagagctggtacaatctgttgcagcaactgttgttgcaggtatgtaggtgcattaaccacagcgagagggctagatgaaatcagttgttgctgttgtaggtaggcggcagggttcaccatggctagttgactgagcgctggtagaaactgttgcaattgttgttgttgttggtatgcaactatgtttgccagagcaagtgggttggatgcaagcaactgctgttgcaagtaggcgacagggttcaccacagctagttggctcagtgctggt

SEQ ID NO: 9967 - DNA, 589 bp, Zea mays
  Clone ID: LIB3061-106-Q1-N6-B9
aaatctcaatcaatatattgattatttctaggaaacacatgtcggtatgagggcaccattgtcgagtacatctcatatgtaatctaaaagatggcacctccaacgatgggttgctgcaaggcagggttcatcaaagagaactggttgtatggcagcaattgttgttgctgctgcaggaaggtagcgaccaatgggttagccactgccaatggattaagtaactgttgtcgctgttgtaggtacgcagcagagtttgacacagccagttggttgaatggaagcaactgttgtaagtaggcagcagggtttgccacagctagctgagtcagagctggtacaatttgttgcagcaactgttgttgtaggtacgtaggtgcattgcccaccgcgagcgggctagatgaaagtagttgtaggtagacggcagggttcaccatggctagttgactgagcactggcataaactgttgcagctgttgttgttgctggtatgcagctacgttcgccagagcaagtgggttggatgcaagcagctgctgttgcaagtaggtgacagggttcaccacggctaggtggctcagtgatggca

SEQ ID NO: 9968 - DNA, 445 bp, Zea mays
  unsure (1)..(445): unsure at all n locations; Clone ID: LIB3061-106-Q1-N6-C1
ggggtgttggtggggagagcggggggggggtggtccccgggggggggggaaaaaatattggggggggggggggggggggggcccccccggggggggggggggggggggggggggccccttttttgggggggggcccccccctttgggtggggggggggggggggtttttggggggggggggggggggcccccccccccggggggggggggggggggggggtnnaaagggcccccccccggggggggggggggggggggcccccccccaccccgggggggggggggggcgccccccccggggggggggggccccccccgggggggggggggggggggtgtggggggggtcttttcccaaagaaaaaaacaccgggggggggggcccccgggggggcctggggggggtttcacggcggggggggggggggggccccggggggggggg

SEQ ID NO: 9969 - DNA, 597 bp, Zea mays
  unsure (1)..(597): unsure at all n locations; Clone ID: LIB3061-106-Q1-N6-C3
aacaaatcgagtatttcgacatagcaaagccattatttcaatcccnagtacttgaaaacaaagtattggtcatggtttacataacaaaagaacaacatagttctaatttccacttaacctccagcatagtcctaattcccggtcctcataatctaaggaaaggtctcactaacgaaccgagcaagcaaacttatctgatatgtcaatgggagagtagggaactgccttgctaatccaggatttttcactagatatgcaaagtaaaaggccttgtgtgtgtcatcaaaacctagaatactttgcaatgtttgaagcaagtcaggtggtaggtcatctcaaccagccttctcaatagccattgcaagcctttcagcaccatctttgaatgctccaatcagccctgcctcttcattactagtaacctttgccttcttcctaggtctaggagctgaggatgaagccccaatatcatctataggactaggaacagcattaacatcttcctcatcaatctctgtttcagccatactgtttctatcttcagtacctagagcttcacttgatccttttgcatactttcctgtagccatattgttt

SEQ ID NO: 9970 - DNA, 430 bp, Zea mays
  Clone ID: LIB3061-106-Q1-N6-C6
caaaaaaaaaaaaaggggggggggggggaggggaaaaacccggtaggggggaaaaaggggggggggaaaaaaatttttaaaggggaaacccccaaaagggaaggggggggggggggatttttggggggggggggggggccaaacccccaaatgggggggggggttggggggggggaaaaaagggcccccccccttggggggggggggggaaaccaaaaaaaaaaaaagggggggggggggggcccccccgggatagggggggaaaccaggtggaaaaaggggggggaaaagtttgggggcaaaatcggccaaaaaaaaaaaaaaatggggggggaaaacccggggagcttctggggggttaaaaacgggggggggaaaagggataacaaagggggggcacggggccctaagaaaaaaaaaaaatttttaa

SEQ ID NO: 9971 - DNA, 595 bp, Zea mays
  Clone ID: LIB3061-106-Q1-N6-C7
agaaagtactttcttatttctgggacgccacaaacatcatccaaaaaacttcattattgaactataactcataagcaatctaaaagagggcaccaccaatgatgggttgttggtagaacactgttgagtttgtcaaagcaagttggttgaatggcagcaattgttgcagttgtaagagggtgccagcgttaggcatagcgtgcaggtagaacggcaacaactgttgttgtgtcaagaaggcagcagggctcacatcagctagctggctgaatggtagtagttgttgctgctgtaaataagcagcagagttcaatgctgctagttggttgaatggaagaaattgctgggggtaggcagcaactagctggctgaatggtaattgttgttgcaaataagcagcagagttcaatgcagccagttggttgaatggaagaaactgatgttgctgagagtatgcagcaaggtttgctagcacaagttgttgtagttgttgtgccctgatgttttgtgccaccaaatggaccaaaggtaactgctgtaatagggctgacggttgttggaggaacaagggtgataatggtaagatgcctgttgc

SEQ ID NO: 9972 - DNA, 604 bp, Zea mays
  Clone ID: LIB3061-106-Q1-N6-C8
gagcattcaaaacaagaaagatcgactgagcttctttcccatacattgtacaaaaaagtgttttaacaagtgtatgaactacaagatctctcgacatgcctttttttttgtaagaacggagtctagtgactgccatcgatactgggaagaatgaatgtatttcccttgtaacgctcaactacgttatcggcagtcactgtaataaatataacgcaaaaaacataaatggcaatggcagcctcccgacatgggagtttatttctcaacgaagggcacacgcctaaactaaggttcaacacaaaaaacagcggtgcaggcactctgtggctgtttcaagatcgttcacatgaggaagtccctggggtccgtgacgtaccccgtcagggccgaggctgcagcggtgtagggggacgccaggtagatctgcccttccttgtgccccatcctgcccgggaagttcctgttcgtggtggacacgcagaccgtaggttcattcatccgtgcatacgtatcgcgagggccacccagacaagcgccgcaattaggacttgctggtgtatcacaaccagcctcctcgaatatctgggcgcaagttttgccgcca

SEQ ID NO: 9973 - DNA, 497 bp, Zea mays
  Clone ID: LIB3061-106-Q1-N6-C9
atatcgagataaatctcaatcaatatattgattatttctaggaaacacatgtcggtatgagggcaccattgtcgagtacatctcatatgtaatctaaaagaggcacctccaacgatgggttgctgcaaggcagggttcatcaaagagaactggttgtatggcagcaattgttgttgctgctgcaggaaggtagcgaccaatgggttagccactgccaatggattaagtaactgttgtcgctgttgtaggtacgcagcagagtttgacacagccagttggttgaatggaagcaactgttgtaagtaggcagcagggtttgccacagctagctgagtcagagctggtacaatttgttgcagcaactgttgttgtaggtacgtaggtgcattgcccaccgcgagcgggctagatgaaagtagttgtaggtagacggcagggttcaccatggctagttgactgagcactggcataaactgttgcagctgttgttgttgctg

SEQ ID NO: 9974 - DNA, 495 bp, Zea mays
  Clone ID: LIB3061-106-Q1-N6-D10
attggggtgatttgtttttttttttgttttccgtttttatcccgggtggggggggggggggctgtaaccccacacactgcgggccgtgcttggagctgctccaccttggtttttttcccggcaagtagaaatggtggtttttggaattggggggggcctcctttggttttaacggtggggacatgttggggatcctggggggggatgtgggggacttgggggggttcccgggggggattcttgggggtctgggggcgggggaccccgggggctaggtatgctttacccggtggtttcttggccggttggtgggggtgtaaaacccggtttacccttgtgttgggggtggccggtgccgccgggggcactggtttttttgccatcctttttttccagttggctgggggggcaggtttttcctgaacctccttgtcaaggagcggttggcccccgggggggtctcctcttggagccgcttgggcttcctgggggggg

SEQ ID NO: 9975 - DNA, 191 bp, Zea mays
  Clone ID: LIB3061-106-Q1-N6-D12
gggggggtgtatcttttttggtttacttattcttttgttcgacgggggacaaaaagttttttttgttgggggctgggggttgatgccttcaaactttgctttttcatgaatgaagggctgattgctgtagataattggctaacatggacatattttttttgtgggagatattgtttttctttaaagctgcc

SEQ ID NO: 9976 - DNA, 535 bp, Zea mays
  Clone ID: LIB3061-106-Q1-N6-D2
aaataattatatttcgataaatatattatttaatcaaagtttatagaaaccgtagcagtgtatggataactaactaccattttatgtctgaccaagtttgtttaaatgaatcagacacgaccaaatgggagagtgagaagggacatctacatctgtttaacacaaaagttggcactcatcagcctatgcgaattacaggtgcttcgaagacagtgctattagtggcgcagcttgcatttgtatccatcgtttcatcccccagctcaacattttcagtgtccatggagaaggcagcaaccacagccatgccaaataggcccttggatttgcatgtatgactctgttccttcacttgaactgcaactagcagatccttagccttggctccctgggactgacagtgagtcatgatagcctcaatgttttcgatccataaggcagtcaagctaaccttaagccgcttcaaggctttgcggctctgccgacgacaagaggaccccaacctgatgaaacagagctgccctttccagggggc

SEQ ID NO: 9977 - DNA, 590 bp, Zea mays
  Clone ID: LIB3061-106-Q1-N6-D3
agttccaaacatacatttttttacgcaaactggtccttagccttgttctggcacaatacatgcgaacctatttaacattaatctccataataataatcacatgcaccatatagatagaacgaacaagctgtactcacattatcgctagtaagtttttttttactcctcatgatgtatatgtacttctttactgatgggaatgtcaaaagcatgccttttccaacgtgctcacagcagactggcctggagctgaccatcccttatctgcgctgcgatgtctctgacagcacctggtccatgagggatgaaaaccgacgaggacttggacgaggccccaatctccttcatggtgtcgaagtactgggtaaccagaaccatgtccatgacatcctttgcagaggtcccaggcacattctcagagaaagcaagaacactgtctctgagcccatccactatagcctggcgctgtcttgcgatacccagacccgccaagtacttggattctgcatcaccttcggctctcttgatctgcagtatcttctctgcctcagctttctcgctggcagccaacctcagcctagcagctgcat

SEQ ID NO: 9978 - DNA, 593 bp, Zea mays
  Clone ID: LIB3061-106-Q1-N6-D4
agaatctggaaatgtaacttcttatttctggttggccacatacatcatccaaaaaatttattattgaattacaactaataagcaatctaaaagaggcaccaccaatgatgtgttgttggtaggaggctgctgggtttgtcaaagcaagttggacaaagggcaacaattgttgtagttgtaagagggttgcggggttagccgcaaactgctggtagaaaggcagcaactgttgctgtgtcaagaaggaagcacggcttgctgcagctagctggctaaatggtagtaatatttgctgctgcaaataagcagcgaggttcagtgcggccaattggttaaatggaagaagttgttgttgatgagagtaggcagtagctagctggctgaatggtaatagttgttgctgcaaataagcagcagggttcagtgtagatagttggttgaatggaagaaattgttgttgctgatagtagggagaaaggtttgccagagctacttggttgatcacaggtagcacgagttgctgcagctgctgtgccttgatggtttgtaccaatgactgcaccaaagatagggctggcgattgttgaaacaaa

SEQ ID NO: 9979 - DNA, 268 bp, Zea mays
  unsure (1)..(268): unsure at all n locations; Clone ID: LIB3061-106-Q1-N6-D8
ggggggggggttttttttttttggggggggggtgtttttttttgggggggggggggggttgggggggagggtttttttttttggtgttttggttttggggggttggggggggggggcccnttgggggggggggggggggggggttggggggttttttnnngggggggggggggggggggnttttttgggggttttggggggggggnntgnttggggggggttgggttttttgttgggggtttttggggggggttgtgtgggggggggg

SEQ ID NO: 9980 - DNA, 549 bp, Zea mays
  Clone ID: LIB3061-106-Q1-N6-E1
cataagaatctaaaaatgtctttctttttctgggaagccacaaacatcagacaaaaactttattattgaactataactcataagaaatctaaaagagggcaccaccaatgatgggttgttggtagaatgctgctgggtttgtcaaagcaagttggttgaatggcagcaattgttgcagttgtaagagggtgccagcgttaggcgcagcgtgctggtagaacggcaacaactgtggttgtgtcaagaaggtagcagggctcacaccagctagctggctgaatggtagtagttgttgctgctgtaaataagcaggagagttcaatgctgtcagttggttgaatggaagaaattgctgggggtaggcagcagatagctggctgaatggtagttgttgttgttgcaaataagaagcagagttcaatgcagctagttggttgaatggaagaaactgctgttgctgagagtaggcagcaaggtttgctagcacaagttgttgtagttgttgtgccctgatgttttgtgccaataaatgcaccaaaggtaactgct

SEQ ID NO: 9981 - DNA, 458 bp, Zea mays
  Clone ID: LIB3061-106-Q1-N6-E2
aaaaaaaccatttttttttatatatggggggatatttttgcatgtaaatgtacgaggcagggtttcggggggccatacgaattacgatttatacgaatacgatacatgccaagacacatgcatggggtttagccgtctacgtatacatatttccgccgaacttatgccggagtacaatggggaaaccaaaaaccaagcgacggggcgattaaaataaatgattggtttttgtatccgatcaattttactcatttactacttggccggggacaagcacttggggggggggccctgggggaaccggtacttatcggggcagtagttgtaaatcatgtaactggcctgcgcccgggggagctgtttctggccggggctgtcaagctcctgggacattcatgccccgttggagcgcgcgcaggcgggggcttccggcgcggtgcacccggggggggggtacc

SEQ ID NO: 9982 - DNA, 540 bp, Zea mays
  Clone ID: LIB3061-106-Q1-N6-E3
gaattccaactggaacggggtttcgaattaaagcaaattaactctggtactggtacattcgactcgaataggatccaaaaaactcacggcaatatcactggccgcacaaggcagacatatagctatggataaattaggctggggcattgcccagccaccaccatcgccagcaccccaggggaaggactgatcgaaagtcacccctagatcttgttgaaggcaactatgtcgcaactctgtacgtactcgttaactggctcagcgcacagatagtcctcaatgagagggtcgacagagacaaggtcgtcgccgatggtcatcatgatttgcagcttcttgataccatatccaactgggacaagcttggatgcgccccagagcaacccttccatttggacactcctaacagcttcctcgagcttggccatgtcagtctcatcggcccatggcttcacatcaaggaaaactgatgacttcccagattctttcttcttgccagaagccttggcagctgcagcacgctcttaagcagcctttttt

SEQ ID NO: 9983 - DNA, 81 bp, Zea mays
  unsure (1)..(81): unsure at all n locations; Clone ID: LIB3061-106-Q1-N6-E5
ggggttgggtgtnngttngttttttggttttttnttgggnnnnggtgtnggtttggggggnnngttggttttttttttttt

SEQ ID NO: 9984 - DNA, 597 bp, Zea mays
  unsure (1)..(597): unsure at all n locations; Clone ID: LIB3061-106-Q1-N6-E6
caattgttcattcaggtcattgctcacactgacactgccacccatggtgatgcgtgacacattattactcaatcatcgccgctaaatgactcaactagctagctagccagcggctatactacagcacatagtttcttcagtgggggacaccgccggcagcagcgtaggggcatggagtcggctgctgcaggccgcacatcgccgtcagttgctgcgctatctgcgccgccaacagccccgcgacctggccgctttgcggctgctgctgcaggatggactggaggaccaagccgaagatcgcctggtaccggtgctgcggctccacctgcctgagctgctggcaacactgctgccgcaacgactggcactgaggcgagcagtagggcgtcgccgtcgggctgcactgatgcctcagaaactcgacgcactggcccaggatcggggtgctgccaacgccgcaggttccctgcagctggcacgggcttggatgcggctgttggcacgggcatgggtgtggctggggatgaggctgaggccggggcggntgagtagggtagtggcatggtggcggcggcagatgaaccggcggcggcacat

SEQ ID NO: 9985 - DNA, 578 bp, Zea mays
  Clone ID: LIB3061-106-Q1-N6-E7
gcaaacaagttccctcactcattcaattaagtagcaaaacttccgacaaggtgcaaaagacaggtatgtaatcaacggcccccaataacactcaaacttgcaaacaactgatttgccttaacggcagtacaccgcagagtgcaaatacgaaaacagcactcaagtccaaccatagaagaaaaaaaaggagcaatactgtcatgtgccagataacctctggaaacatcactcaattgcaaactgaagatagtttgttatggctttcaagttaggagataatgccttcggttagtgataatgcagcaagctgactggtcggggtgtttgcgttttgctgatgggccacattgtggagaacatccatcgcctcagcaacctttgacttgagggcatcaggggactcaagcaggtggaggacctcagtctgatccatctccaaaagcattccagtgacctttgccgcttggtttggttccagttgctcaaccagtgggtataggttttcaccaaggatcgttctttgctgttcaggattagcatttgcaagggcagaagtcagagtcccaatttgggcagcc

SEQ ID NO: 9986 - DNA, 517 bp, Zea mays
  Clone ID: LIB3061-106-Q1-N6-E8
cagaagcaaaatttcaactcaacttttacagtaaccagaaaacatgtcaacacagattgttgcaaacatcaagataatctgttttgaatgaaatatgttcttacatcacatgaacatcaagataatctgttttgaatggaaaaagtctaaagttttaaaaactaaataactatggctgcctactcccaaagcgtcgagctaaaatcttttctttcatcaactgaaaatactgttttccttggtcatccattgtgctcgtgtcaagtgccattatcaacttgtcatgctggtcttgctccaagtctacttttttcttatgcagctcaaagtatctttcatcacgctcctttcgttcgctctcagttttctctctcgattctctcatttttttttacctcttcaatggaaggatcagactcttcatcactgttgcgcctttttgctttcatcttttccttttcagctttccttcctgccagtctttgagcattgggatgactggccccatttgcattcc

SEQ ID NO: 9987 - DNA, 261 bp, Zea mays
  unsure (1)..(261): unsure at all n locations; Clone ID: LIB3061-106-Q1-N6-F1
cgggcgggggcgggcgntccgnnnctctntcggctgggctcctcccnggggnggcctggccccggcgggccntgntggcgcccgcggggcggttctctttctgcgcngggncggccggcgggggggggggggctcggccgggtcctggggnnctctcgcgccgggtcgncggcggccgccccgcttgggggggggcgggcgggggcggtggcgccgncgtgctgggcggcgcggtcccggcgggggttgggccgcgccggc

SEQ ID NO: 9988 - DNA, 599 bp, Zea mays
  unsure (1)..(599): unsure at all n locations; Clone ID: LIB3061-106-Q1-N6-F12
acattagaatctggaaatgtaacttcttatttctggttggccacatacatcatccaaaaactttattattgaattacaactaataagcaatctaaaagagggcaccaccaatgatgtgttgttggtaggaggccgctgggtctgtcaaagcaagttggacaaagggcaacaattgttgtagttgtaagagggttgcggggttagccgcaaactgctggtagaaaggcagcaactgttgctgtgtcaagaaggaagcacggtttgctgcagctagctggctaaatggtagtagtatttgctgctgcaaataagcagcggggttcagtgcggccaattggttaaatggaagaagttgttgttgctgagagtaggcagtagctagctggctaaatggtaatagttgttgctgcaaataagcagcagggttcagtgtagacagttggttgaatggaagaaattgttgttgctgagagtagggagaaaaggtttgccagagctacttnggttgatcagaggtagcacgagttgctgcagctgttgtgccctgatggtttgtaccaatgactgcaccaaagaagggctggcgattgttgaaacac

SEQ ID NO: 9989 - DNA, 338 bp, Zea mays
  Clone ID: LIB3061-106-Q1-N6-F4
cccgggggggggtttttttgaagcccccttgcggaggcattcttatagcacatttgactgacacagcctctcaactagtacacgcgggcttaggcgggccgtgtacacgccaggcgtggtttttttttttcttcacacgtacccaggtggggggggggggggggagccatggccgccgtccgcgcatgcggctccccctcggtattcccacgtctcccttcgagggagcaggcgctcttggcggctgggtccctggcgactggcgagtgccgctcccggcggcccgtacgtccgcggctggcgttcactacccttctgtgtgtagctgtgtgccgcgc

SEQ ID NO: 9990 - DNA, 571 bp, Zea mays
  Clone ID: LIB3061-106-Q1-N6-F5
gagataaatctcaatcaatatattgattatttctaggaaacacatgccggaatgagggcaccattatcgagtacatctcatatgtaatctaaaaaaggcacctccaacgatgggttgctgcctcgacaagacagggtttatcaaagagaactggttgtatggcagcaattgttgctgctgtaggaaggcagcgaccaatgggttagccactgctagtggattaagtaactgttgtcgctgttgtaggtacccagcaaagttcgacatagtcagttggttgaatggaagcagctgttgcaagtaggcagcagggtttgccacaactagctgagtcagagctggtacaatctgttgcaacaattgttgttgcaggtatgtaggtgcattggccacagcgagcgggctagatgaaagcagttgttgctgttgtaggtaggcggcagggttcaccatggctagttgactgagcgctggcagaaactgttgcagctgttgttgtggctggtttgcaactacgtttgccagagcaagtgggtttgatgcaagcaactgctgttgcaagtaggcggca

SEQ ID NO: 9991 - DNA, 606 bp, Zea mays
  Clone ID: LIB3061-106-Q1-N6-F6
agaaatgtactttcttatttctgggacgccacaaacatcatccaaaaaacttcattattgaactataactcataagcaatctaaaagagggcaccaccaatgatgggttgttggtagaacactgttgggtttgtcaaagcaagttggttgaatggcagcaattgttgcagttgtaagagggtgccagcgttaggcatagcgtgcaggtagaacggcaacaactgttgttgtgtcaagaaggcagcagggctcacatcagctagctggctgaatggtagtagttgttgctgctgtaaataagcagcagagttcaatgctgctagttggttgaatggaagaaattgctgggggtaggcagcaactagctggctgaatggtaattgttgttgcaaataagcagcagagttcaatgcagccagttggttgaatggaagaaactgatgttgctgagagtatgcagcaaggtttgctagcacaagttgttgtagttgttgtgccctgatgttttgtgccaccaaatggaccaaaggtaactgctgtaatagggctgacggttgttggaggaacaaggtgataatggtaagatgcctgttgcgattgcctgtt

SEQ ID NO: 9992 - DNA, 404 bp, Zea mays
  unsure (1)..(404): unsure at all n locations; Clone ID: LIB3061-106-Q1-N6-F7
gggttgggggggttgtttttgggtttagggggggtttggggggggggggggggggggggaaggggggggggggggggggggggggggggggaagggggggggggttggttgttgggggggggtggggggggggggggggggggggggggtaaggggggtggtggggttggggggttgtgggtgggggggtgggggggggggggggttttggaaatggggggggttgtttgggggaaggggatttttttgaaaaagttggtgttggggttgggaaaaatttgggtatgtaagaatggggtatttgggnggttaatttggtggggggtgaaatggtgttggagggtttttggggtttaaaaatttggggggggggttttttaagggatttggtnattggggggggt

SEQ ID NO: 9993 - DNA, 568 bp, Zea mays
  Clone ID: LIB3061-106-Q1-N6-G1
aaaagacattaataatctgctagcaatgggaagacaaccataacaacatgaactgaattaatcagtgcgcacgactagttaaaaacaaacatcctttgacaagaagtttctaattaaatcatgactgtgtctgggcagcattattatgagagtgaaggtggatgtgctgctacttcccactccccttgatgagcaacaagcacctgcattgagtaatgcaagagtgagatgaaacatctcagcaagctaattgttctgatgagatatttaaaccacaaattgaattaatcaacattttaaaagaatcacaatcaagatcagaaatacttgtagatatagaacttagtagtcccaatataaccaatatcatctcatttcctcgaacaaccacaataggttctataacacctccccgcgtcaacaatacctgcaattatcacttcgatgtatgcataggaatgcaatgtgtaggtactctatcttcatacctctgagagtataaaaccacatcatctgcaaatatcacttcaatgaatgcatatgaatgcaatgcatatgtcctctgcct

SEQ ID NO: 9994 - DNA, 372 bp, Zea mays
  Clone ID: LIB3061-106-Q1-N6-G10
gtaggaaaaaaaaaaaaagggggggggggtggagttaaatttatattgggttttttttttttttggtgggttaaaaaaaaaaaaaaaaatgtggggggtttttttaaaaaaaaattgtggtttgggggtgttttttttggaaaaaaaaaagccggcccttgggaaggtttttctgttttaggggtaaaattaatgggggctcttttgggtggaaaggggggcaaattttttcacgttaaacctttgaaggggggccttttttttgtttttcccgggggtgggcccccggagaaaattttttttttttttttttcccccaaattgggggggggaaagagccttttttttttaaaaaaggggcggggccttttt

SEQ ID NO: 9995 - DNA, 64 bp, Zea mays
  Clone ID: LIB3061-106-Q1-N6-G3
gggggggggttttttctttttttttttgggggggccgttgtttttgtggggtggttgttttttg

SEQ ID NO: 9996 - DNA, 360 bp, Zea mays
  Clone ID: LIB3061-106-Q1-N6-G6
aattggggcccggggggggacgggtttcctttgcttttggggggggggggcagggcattggtcaccctgcccctgccccccaggggggggcgggacccctttttacccaaacatcgccgggaaagggcccaactggctagctggcccggggttttcccccagcccatagtttctttggggggggacccccccgggagcagcggaggggcctggggtggggtggtgcaggccccacatccccgctgggtggtgggctttttgggcccccaacagccccgggacctggcccctttgggggtgctgttgcaggatgggctgggggaccaagccggaaaacggctgggcccggggctgggggtc

SEQ ID NO: 9997 - DNA, 551 bp, Zea mays
  Clone ID: LIB3061-106-Q1-N6-G7
ctaaaaagtactttcttatttctgggacgccacaaacatcatccaaaaaacttcattattgaactataactcataagcaatctaaaaggggcaccaccaatgatgggttgttggtagaacactgttgggtttgtcaaagcaagttggttgaatggcagcaattgttgcagttgtaagagggtgccagcgttaggcatagcgtgcaggtagaacggcaacaactgttgttgtgtcaagaaggcagcagggctcacatcagctagctggctgaatggtagtagttgttgctgctgtaaataagcagcagagttcaatgctgctagttggttgaatggaagaaattgctgggggtaggcagcaactagctggctgaatggtaattgttgttgcaaataagcagcagagttcaatgcagccagttggttgaatggaagaaactgatgttgctgagagtatgcagcaaggtttgctagcacaagttgttgtagttgttgtgccctgatgttttgtgccaccaaatggaccaaaggtaactgctgtaatagggctga

SEQ ID NO: 9998 - DNA, 387 bp, Zea mays
  unsure (1)..(387): unsure at all n locations; Clone ID: LIB3061-106-Q1-N6-G8
ggggggttccttggggggggggggggtgggtgtttggtggtgggggggggggggggggggggggggggggggggggtgggggggggggggggggggggggggggggggggggggggggggggggggggggggggggctgggggggggggggggggggggggggcgtcctccgggtgggtgggtgggtgggtgttgttggtgctgctgttttttggggggggggttcgctgctggcngttggttgggtgggggcctttggtgggggggggctggtggttgctgggtgggtggggggtgtgggtggtgcgggtnngccccttgttccctgccggttggtgggtgggtgggntntgctggcgggcgggtgggtcggcccgggttttccgg

SEQ ID NO: 9999 - DNA, 300 bp, Zea mays
  unsure (1)..(300): unsure at all n locations; Clone ID: LIB3061-106-Q1-N6-H10
gcgggggttgttttttttttttttttttgttttggtcttggtttgtgttgtttcttggggttgttggggcntgtttgcgcccgttgttctttcctttttctctcngggtcnnccttctggggggggggggggctgnctgtttcttggtgttctctcgtcgccgggtcgccgggggtcgccccccttttcgggtttcgggcngtggcgttcttgcctgcgcgctgtgcgtccgcgtccctgccgggcttcttcctgtcgtctcttcgctgtcctggtctttgctgtctcctgtttggtgtt

SEQ ID NO: 10000 - DNA, 413 bp, Zea mays
  unsure (1)..(413): unsure at all n locations; Clone ID: LIB3061-106-Q1-N6-H12
aaaatgggtttttttttttttttnttgttggtnnggaggggggggggggtgtnaaagnaagttgganaaaggggaaaaattgttgtagttgtaagagggttgnggggttagnngnaaattgttggtagaaagggagnaattgttgttgtgtnaagaaggaagnanggtttgttgnagttagntggttaaatggtagtagtatttgttgnttgaaataagnagnggggtttagtgnggnnaattggttaaatggaagaagttgttgttgttgagagtaggnagtagttagttggttaaatggtaatagttgttggtggaaataagnaggagggtttagtgtagaaagttggttgaatggaagaaattgttgttgttgagagtggggagaaaggtttgnnaagattatttggttg

SEQ ID NO: 10001 - DNA, 593 bp, Zea mays
  Clone ID: LIB3061-106-Q1-N6-H5
gataataagaggaaacttgttttattgttaataatgagtcacacgcgatggcatgtcaactcattattcgatacaacacaaatatttctatctagaatgcagcaccaacaaagggttgctgtaagaacatgggtggaatcgtcatggccattgggttgaacatgaatggtaactgctgttgcagcataatctgcgagacggcgtcgcagtgacattgtggcatcatcatttgcgacatcatgctcggcaagaccattggtgacatcatgctcggcatcatcaatggtgacatcatgttaggcgtcatcatctgtggcatcatcactggcatcgtctgaagcggtaaggccaacagttgctgcagcatcagggacggacacgccatcaagctggcaagcccctgttgcatcatgcagtactgcatgcatgggttcatggtacccaatggcatgactggtggcaagtgccctggaatatgggtcgcactagtggcgcttgcacaaagagctaggagagcgaacaatgcaagcatcttggctgcatggcgggtggtgtccttgcttcctagagtatagtatagtaaaatatgtgcg

SEQ ID NO: 10002 - DNA, 608 bp, Zea mays
  Clone ID: LIB3061-106-Q1-N6-H7
aagaatctatgaatgtactttcttatttctgggaagccacaaacatcagacaaaaaactttattattggaactataactcataagaaatctaaaagagggcaccaccaatgatgggttgttggtagaatgctgctgggtttgtcaaagcaagttggttgaatggcagcaattgttgcagttgtaagagggtgccagcgttaggcgcagcgtgctggtagaacggcaacaactgtggttgtgtcaagaaggtagcagggctcacaccagctagctggctgaatggtagtagttgttgctgctgtaaataagcaggagagttcaatgctgtcagttggttgaatggaagaaattgctgggggtaggcagcagatagctggctgaatggtagttgttgttgttgcaaataagaagcagagttcaatgcagctagttggttgaatggaagaaactgctgttgctgagagtaggcagcaaggtttgctagcacaagttgttgtagttgttgtgccctgatgttttgtgccaataaatgcaccaaaggtaactgctgtaatagggctgatgattgttggaggaacagggtgataaaggtaagatgccagctgcg

SEQ ID NO: 10003 - DNA, 273 bp, Zea mays
  unsure (1)..(273): unsure at all n locations; Clone ID: LIB3061-106-Q1-N6-H8
atcgagcaactgcgcgcgttgatcgacggcgcgatcggcgcgcagttcgacgatcccgacgtcgtgcgcngatacgcgcaactcgacgccgccttcgacggccacctccttccgctcgtcgatgcgaccgtcgccgccggccagacgggcgcctatgcgacgagcgccgccgatttctcgcgaacgatcgtgccgtatttccggccgagcgaactgctgcgcgaccgcatcatcgaccttgcgcggcgccgngccatcgccgaccgggacacc

SEQ ID NO: 10004 - DNA, 593 bp, Zea mays
  Clone ID: LIB3061-106-Q1-N6-H9
gaatctagaaagtactttcttatttctgggaagccacaaacatcagacaaaaaactttattattgaactataactcataagaaatctaaaagagggcaccaccaatgatgggttgttggtagaacgctgctgggtttgtcaaagcaagttggttgaatggcagcaattgttgcagttgtaagagggtgccagcgttaggcgcagcgtgctggtagaacggcaacaactgtggttgtatcaagaaggtagcagggctcacaccagctagctggctgaatggtagtagttgttgctgctgtaaataagcaggagagttcaatgctgccagttggttgaatggaagaaattgctgggggtaggcagcaggtagctggctgaatggtagttgttgttgttgcaaataagaagcagagttcaatgcagctagttggttgaatggaagaaactgctgttgctgagagtaggcagcaaggtttgctagcacaagttgttgtagttgttgtgccctgatgttttgtgccaataaatgcaccaaaggtaactgatgtaatagggctgatgattgttggaggaacaaggcggacgcgtgggtc

SEQ ID NO: 10005 - DNA, 276 bp, Zea mays
  unsure (1)..(276): unsure at all n locations; Clone ID: LIB3061-107-Q1-K6-A2
cccgggnntcgccccgcgtttctgggcnnttcccgctggcttcttcccttggtggcccttgttcctccctctttcgtcggccctgttccatccgttccctttggtgcctttgttggcccccttcctcggggcgcnccctctgcggcagcttgtgcttgctttccttgctgcctcctctccgctcctgctgtttctttcgtggggcgcggcttgctgctttgntctctgcttcttctttgcttcggcttcttcttcctttctgctcgctgcctgctg

SEQ ID NO: 10006 - DNA, 549 bp, Zea mays
  unsure (1)..(549): unsure at all n locations; Clone ID: LIB3061-107-Q1-K6-A3
actcgacaccagtgaagtgcntgatcgttgcccttgctctcctggcgctcgctgcgagcgccgcctccagtacaagcggcggctgtggctgccagacaccaccgtttcatctaccgcctccgttctatatgccgcctccgttctatctgccggcgcagcagcagccgcagccatggcaataccccactcaaccaccgcagctaagcccgtgccagcagttcggatcctgcggcgtcggcagcgtcggcagcccgttcctgggccagtgcgtcgagttcctgaggcaccagtgcagcccggcggcgacgccctacggctcgccacagtgccaggcgctgcagcagcagtgctgccaccagatcaggcaggtggagccgctgcaccggtaccaggcgacatacggtgtggtcctgcagtccttcctgcagcagcagccgcagggcgagctcgcggcgctgatggcggcccaggttgcgcagcagctgacggcgatgtgcggcctgcagctgcagcagccaggtccctgcccttgctacgcatctgccggcg

SEQ ID NO: 10007 - DNA, 626 bp, Zea mays
  Clone ID: LIB3061-107-Q1-K6-A5
aactagcaacatagaaagcacagtggggggccaacaatggcagccaaaatttttgcttccttatgctccttggtctttctgcaagtgttgctaccgcaaccattttcccacaatgctcacaagctcctatagcttcccttcttcccccatacctctcaccagcggtgtcttcagtgtgtgaaaccccaattgttcaaccctacaggatccaacaggcaatcgcaacaggcatcttaccattatcacccttgttcctccaacaaccgtcagccctattacagcagttacctttggtccatttggtggcacaaaacatcagggcacaacaactacaacaacttgtgctagcaaaccttgctgcatactctcagcaacatcagtttcttccattcaaccaactggctgcattgaactctgctgcttatttgcaacaacaattaccattcagccagctagttgctgcctacccccagcaatttcttccattcaaccaactagagcattgaactctgctgcttatttacagcagcaacaactactaccattcagccagctagctgatgtgagccctgctgccttcttgacacaacaacagttgttgccggtctacctgcacgctatgccta

SEQ ID NO: 10008 - DNA, 673 bp, Zea mays
  unsure (1)..(673): unsure at all n locations; Clone ID: LIB3061-107-Q1-K6-A6
ccggaaccggccatcccggtagtgtttcttgttcttagncaggcggctgcagctgtggtcaacaacaaagccatgagcagcaacatcatccacaacaacatcatccacaaaaacaacaacatcaaccaccaccacaacatcaccagcagcagcaacaccaacaacaacaagttcacatgcaaccacaaaaacatcagcaacaacaagaagttcatgtggagcaacaacaacaacaaccgcagcaccaacaacaacaacaacaacaacagcaccaacaacaacatcaatgtgaaggccaacaacaacatcaccaacaatcacaaggccatgtgcaacaacacgaacagagccatgagcaacaccaaggacagagccatgagcaacaacatcaacaacaattccagggtcatgacaagcagcaacaaccacaacagcctcagcaatatcagcagggccaggaaaaatcacaacagcaacaatgtcattgccaggagcagcaacagactacaaggtgcagctataactactatagcagtagctcaaatctaaaaaattgtcatgaattcctaaggcagcagtgcagccctttggtaatgccttttctccaatcacgtttgatacaaccaagtagctgccaggtattgcagcaacaatgttgtcatgatcttaggca

SEQ ID NO: 10009 - DNA, 558 bp, Zea mays
  unsure (1)..(558): unsure at all n locations; Clone ID: LIB3061-107-Q1-K6-A7
ggcggccccctctttctccacgnccgccgccgtcttctggccgttcgcgactcgccgctggntgagagccgaggacgttattttcctctcgctggcgtctggtgtggagctgggagccgacgcgcagcgcgccgctcattagctgaaagcagtgtcagaggaacttggacatgagatccgggtttttttcaagtgagaactttgctctgcatccgagcaagctgcctagtgccgatcatgaggaaggtgacgacttttatgagcttcagcctgctgattactacaacttgatttcgaacaggatgggagagctctcttncntgcttnngactctcaagatgcgggaagcggaacttgctgctcagcgagcaacgcgaacaatggctgtaatgagggtgcgattccctgatggctacatacttgaggctggctttcttccatcggagaagattcatagtctagtggacctgcctctgaaagtcttgctngaccagatctgccattctaactgtattcagtcccttcaaataaacgaaaactgggcacataacaagactg

SEQ ID NO: 10010 - DNA, 624 bp, Zea mays
  Clone ID: LIB3061-107-Q1-K6-A8
acaatagtgtaccaacaatggcagccaaaaattttgcctccttatgctccttggtctttctgcaagtgctgctacggcgaccattttcccgcaatgctcgcaagctcctatagcttcccttcttcccccgtacctctcaccagcggtgtcttcggtatgtgaaaacccaattcttcaaccctacaggatccaacaggcaatcgcagctggcatcttacctttatcacccttgttcctccaacaatcatcagccctattacaacagttacctttggtgcatttattggcacaaaacatcagggcacaacaactacaacaacttgtgctagcaaaccttgctgcctactctcagcaacagcagtttcttccattcaaccaactaggttcattgaactctgcttcttatttgcaacaacaacaactaccattcagccagctacctgctgcctacccccagcaatttcttccattcaaccaactagcagcattgaactctcctgcttatttacagcagcaacaactactaccattcagccagctagctggtgtgagccctgctaccttcttgacacaaccacagttgttgccgttctaccagcacgttgcgcctaacgctggcaccct

SEQ ID NO: 10011 - DNA, 601 bp, Zea mays
  unsure (1)..(601): unsure at all n locations; Clone ID: LIB3061-107-Q1-K6-A9
cttggtnttttctgcaagtgccctgctacgtgcgacccatttttttcccgcaatggctcaacaagctcgctatttagcgttccctttctntgcccccgtaccttctctactcattcggtgtnncttcggtttggtgaggagacccganttgtgncaacncnnctacaggatcgcaacccaggcaatcgcagctttggcatcttaacctttatcaacccttgnttcctccaacaatcatcagcccctattacagcagttacctttggtgcattaattggcacaaaacatcagggcacaacaactacaacaacttgtgctagcaaaccttgctgcctactctcagcaacagcagtttcttccattcaaccaactagctgcattgaactctgcttcttatttgcaacaacaacaactaccattcagccagctacctgttgcctacccccaacaatttcttccattcaaccaactggcagcattgaactctcctgcttatttacagcagcagcaactactaccattcagccagctagctggggtgagccctgctaccttcttgacacaaccacagttgttgccgttctaccagcacgctgcgcct

SEQ ID NO: 10012 - DNA, 472 bp, Zea mays
  unsure (1)..(472): unsure at all n locations; Clone ID: LIB3061-107-Q1-K6-B11
gggggatggnttattggttggtgggggacgctctcgcggtcgggtgggagccgccggactttcccagcatctgcgagtcatgcctcggctacaacccctacctccggatgttaagagcgggggggggcaaataatgcacaatctgtacacgtcctttggctggattgcggcggcgtcctgtgcgagatgcatggttcaacatgactgagatctgccagacatgtcgcacgctaaggaatggctgccaggtctgcctgctggatcttgaatatggtctgtctgctcaggtccgnggttcagcactctctctcagttccaatgttgcacttccaatgagcgacgtcaatcgcgaatttttgccagagagcatgactggagggccatagctggcctcgactatgattcatcctatgggaagggttggccaaatgctacctttctgaacctttaaagacagctcctttttactaga

SEQ ID NO: 10013 - DNA, 469 bp, Zea mays
  unsure (1)..(469): unsure at all n locations; Clone ID: LIB3061-107-Q1-K6-B12
acaaatgcgtgcattcttccacagtgctcacttgctcctagtgccattattccacanncctccgctggggcggcgggggcttcgaacatccagccgtgcaagcctacaggctacaactagcgcttgcggcgagcgccttacaacaaccaattgcccaattgcaacagcaatccttggcacatctgaccctacaaaccattgcaacgcagcaccaacaacaacagcagtttctgccatcactgagccacctagccgtggtgaaccctgtcacctacttgcaacagcagctgcttgcatccaacccacttgctctggcgaacgtggctgcgtaccagcttcaacagccgctgcaacagtttatgccagtgctcagtcaactagccatggtgaaccctgccggctacctacaactacttttcatttagcccggtcgcggggggcaatgcacctacgtacctacaacaacagt

SEQ ID NO: 10014 - DNA, 655 bp, Zea mays
  unsure (1)..(655): unsure at all n locations; Clone ID: LIB3061-107-Q1-K6-C10
cggtccggccttcccgggcgtctcgtctcgtctcgcctgcccgcagccccttggcttcgttccatccggcttctcggcggcggcggagaggagggggatggcgcaccggctgctgcgggacgcgcaggcggacgggtgggagcggtcggacttccccatcatctgcgagtcatgcctcggcgacaacccctacgtccggatgttaagagctgaatatgacaaagaatgcaaaatttgtgcacgtccttttactgtattccggtggcgtcctgggcgagatgcaaggtacaagaagactgagatctgccagacatgttgcaagctaaagaatgtctgccaggtctgcctgctggatcttgaatatggtctgcctgttcaggtccgagatacagcactctctatcaattccaatgatgcaattccaaggagtgatgtcaatcgcgaatattttgcagaagagcatgataggagggccagagctggcatagactatgattcatcctatgggaaggctcgcccaaatgataccattctgaagcttcaaaggacagcaccatattacaagaggaacagagctcatgttttgcagnttnctttgtggcgagggtgaatgtacaagaggagnctgagtgcccttatcgtcatgagatgcctg

SEQ ID NO: 10015 - DNA, 634 bp, Zea mays
  Clone ID: LIB3061-107-Q1-K6-C2
gaaacccattcttcaaccctacagatccaacaggcaatcgcagcaggcatcttacctttatcacccttgttcctccaacaaccgtcagccctattacagcagttacctttggtgcatttgttggcacaaaacatcaaggcacaacaactacaacaacttgtgctaggaaaccttgctgcctactctcagcaacagcagtttcttccattcaaccaactggctgcattgaactctgctgcttatttgcaacaacaactaccattcagtcagctagctgctgcctacccccagcaatttcttccattcaaccaactggcagcattgaactctgctgcttatttacaacagcaacagctaccaccattcagccagctagctgatgtgagccctgttgccttcttgacacaacaacagttgttgccgttctacctgcacgctgcgcctaacgctggcaccctcttacaactgcaacaattgctgccattcaaccaacttgctttgacaaacccaacagcgttctaccaacaacccatcattggtggtgccctcttttagattgcttatgagttatacttcaataatgaagttttttggatgatgtttgtggcttcccagaaataagaaagtcatttct

SEQ ID NO: 10016 - DNA, 222 bp, Zea mays
  unsure (1)..(222): unsure at all n locations; Clone ID: LIB3061-107-Q1-K6-D1
gtcgccccgcttttttgccgggngtgccgttcgccccgtgcgggcgcgggngctgccgctcgggggactgcggcggcgtgctgccgtgctctgggttcgggcgcgcgcccttctctctggcggggtgcgcgctggtggngttgttcggcctcgtcttcttgggctttttcctcttcttctgctttgtggggggggtgggctttctcttggtcggctggtccg

SEQ ID NO: 10017 - DNA, 620 bp, Zea mays
  unsure (1)..(620): unsure at all n locations; Clone ID: LIB3061-107-Q1-K6-D2
acaatagtgtgccaacaatggcnngccaaaatattttgcctccttatgctccttggtctttctgcnagtgctgctncggcgaccattttcccgncatgctcgcnggctcctatngcttcccttcttcccccgtccctctcaccagcggtgtcttcggtttgggggggggggggtcttcaaccctacaggatccaacaggcnatcacagctggcgtcttacctttatcacccttgttcctccaacaatcatcagccctattacatcagttgcctttggtgcatttattggcccaaaacatcagggcgcancaactacaacaacttgtgctagcggaccttgctgcctactctcagctgcagcggtttcttcccttcaaccaactagctgcattgaactctgcttcttatttgcnacaacaacaactaccattcagccagcttcctgctgcctacccccagcaatttcttccattcaaccaactggcagcgttgaactctcctgcttatttacagcagcggcacctactaccattcagccagctagctggtgttgagccctgctaccttcttgatncaaccacagttgttgccggtctaccagcacgcttgtgcctaacgct

SEQ ID NO: 10018 - DNA, 350 bp, Zea mays
  unsure (1)..(350): unsure at all n locations; Clone ID: LIB3061-107-Q1-K6-E1
gctcaanncctctccttcccaccgtctctcagtgtctcactctgagcgctgctctctgccctcggcgtctctctctacacatatatgatcagtctagggatgggatgtgcaaacctgagctgtgctgccgcctgttctagctgcagaactgcagctgtacgctgtgtggggcggggtttccctcctccgctcttctatctcctcctctcttggctgctggtctgccgggcagctgcgtatcgatccgagagcactgctcgctgttacgtgcgggccggcgcgccggcggcgcgcggtctgtgggcggtagacgacgaccgcatcggtcagaaggaatgtcgttcggacca

SEQ ID NO: 10019 - DNA, 647 bp, Zea mays
  unsure (1)..(647): unsure at all n locations; Clone ID: LIB3061-107-Q1-K6-E10
ggcgcaccaccccgcgcgggcgagcgagcccaacgaaccagcgaccaacggaggccaccggcgcccggcggagaccgaccgaccgccagccccangacgaccncncgcgccccctagcatacctcgccaccaccagctgcccgggtccatgctaaagcagggagggtgcgcgggcgagtgcccggtcctgaagatcgggttccacgtggaggagtactcgaaccccgtctacttcgcggtgctggtggagtacgaggacggcgacggcgacgtggtgcaggtggacctgatggagtccaagacggcgcgcggcccgccgacggggcggtggacgccgatgcgcgagtcctggggctccgtctggcgcatggacaccaaccaccgcatgcagccgcccttctccatccgcatccgcaacgagtccggcaagacgctcgtcgccaacaacgtcatcccggccaactggcgccccaacaccttctaccgctccttcgtccagcacagataaccgatcgggatccgtgccctgcccgcaattggagctggctggctggggcgctactcggctcggccaccatcgtctacagtactatactatgctctactaccactagactgctgctgttactactagtctactaccacca

SEQ ID NO: 10020 - DNA, 634 bp, Zea mays
  unsure (1)..(634): unsure at all n locations; Clone ID: LIB3061-107-Q1-K6-E3
tcgcccacgcgtcccattttgaggaccggtgatcaaaagcgctggttttacctaatttgaaagatgaacatcgggctttgcctggctattcagattccgtgtcaccatgtgccggttcctccatatctgctaagaaagagaacaatgattccataagaatgccagcagaatatcctcctcagacagtaggaataggtaatttaagcctatgatggcatcttctgcattcatttctgctcccgcatcatgttgttgcactgcttatcagtaccatgaagtatgaatacccctgtacgtgatttgctttacgggtagacacatctctacgtttcacttaataacgtgatacatctgaatatattttgatttaatctttctaataccacaggcatttttacaggagttggtgctgtaggtgcacaagctgtcagcagaaatgtgaatggtgcagcaccagaattcaatatccccnaactggtggagtcaattgaaggtgcctgggcttagaccatccatgtcagtggatgatctggtcaaccacctaggcaactgcatctcagagcagatcacttcaggcgatcgggcattggccaacaacgaggtgccaaccaaagaacgctcgaggggattgctc

SEQ ID NO: 10021 - DNA, 88 bp, Zea mays
  Clone ID: LIB3061-107-Q1-K6-E7
cccggtcgcccaccttcgccctacgaacgcactacacgacctacaacatggcttccagaacatatccctccttgcgcttcttgccctt

SEQ ID NO: 10022 - DNA, 560 bp, Zea mays
  Clone ID: LIB3061-107-Q1-K6-E8
gaacgcatagcgggggcggcgccaaggctaccaagatattaggcggccttgcgcttcttgccctgttagtgagcgcaacaaatgcgttcattattccacagagctcactcgctcctagtgccattattccacagctcctcccaccagatactgcaatgggggggggggggccagccgcgcaagcctacaggctacaactagcgcttgcggcgagcgccttacaacaaccaattgcccaattgcaacaacaatccttggcacatctaaccctacaaaccattgcaacgcaacaacaacaacaacaacagtttctgccatcactgagccacctagccgtggtgaaccctgtcacctacttgcaacagcagccgcttgcatccaacccacttgctctggcgaacgtagctgcataccagcaacaacaacagctgcaacaggtgatgccagtgctcaggcaactagccatggtgaaccctgccggctacctacaactactttcatctagcccgctcgcggggggcaatgcacctacgtacctacaacaacagttgctgcaacaa

SEQ ID NO: 10023 - DNA, 137 bp, Zea mays
  unsure (1)..(137): unsure at all n locations; Clone ID: LIB3061-107-Q1-K6-F2
gctccttggtcttgctggcagtgctgctnccgcttcccttgtcccacantgctcacaagctcctatngcttcctttcttcccccttacctctcaccancnntgtctgggggggggggggggcccaattcttcaaccc

SEQ ID NO: 10024 - DNA, 621 bp, Zea mays
  Clone ID: LIB3061-107-Q1-K6-F4
ttgagcacactgaagaagttaatatatcactaaatgctgctgctggacggctcaaacaaacctagggaagagagggaccaatttgacgaagcaaacaatcaaatcatatttagcttgaaaaaaaagaggatgacctctcaaaatccattgccttatgtaatgtggaatccaatgggggcaagatctggatcggtttccttgaggactcgtggaagctgcagtcctcatacaatgaacagaaggataataaaacgtgtgatgagctggagaaatgtgtgagtgattttctaaagttgacaaaacatcatctttcagcattcaaggaagtcctaagccaattgattgagaatatcgaaacatatgtcggtaacttggctgtcttaacctcaagggaagaggaaaaagaacatggggatgatgaggcatctgagaggacagatccacgtaaatcccttgaagaggaatatctagaaacagaaaagaagattataattgcgttcagcatagttgatcacataaagaaattgttttattctggggaaggggctgattcaaggagagatgacccagaggtcaagagcttaattgaggagattgagaaaatgaggaatcgttcgagtc

SEQ ID NO: 10025 - DNA, 627 bp, Zea mays
  Clone ID: LIB3061-107-Q1-K6-F9
cagctacatccgtctgggtggactccaggccaggagcagttcgccgggtgcgttcgcatcacctacgcggttcgatccaactggcaggaaggaacgtgatggccaagacgagctcgttcaagctggagcacccccttgagaagaggcagtctgaggctaatcgggtggggggggaaggccctgacagaattccagtgattgttgagaaggctgagaggagtgacattcctgacatcgacaagaaaaagtcctcgtccctgctgatcttacggttggacaattcgtgtatgttgttaggaagagaatcaagctcagtgctgagaaagctatcttcatctttgtgaagaacacccttccaccaacagctgctctgatgtcttcaatctatgaagagaacaaggatgaggatggattcctctacatgacctacagtggtgagaacaccttcgggctcctctagatggctcaccacaatcgggtctgccttgcccttgcttccctactgatgccctgcctcgtgtaaataagacctgccaagcaattgtgtatattctggtttcctcgctcaactgctggaagtctaaaacctaccttatcatggacaccgtttaaattaagtaattgact

SEQ ID NO: 10026 - DNA, 622 bp, Zea mays
  unsure (1)..(622): unsure at all n locations; Clone ID: LIB3061-107-Q1-K6-G11
acaatagtgtaccaacaatggcagccaaaatattttgcttccttatgctccttggtctttctgcaagtgttgctaccgcaaccattttcccacaatgctcacaagctcctatagcttcccttcttcccccatacctctcaccagcggtgtcttcaatgtgtgaaaacccaattgttcaaccctacaggatccaacaggcaatcgcaacaggcatcttaccattatcacccttgttcctccaacaaccgtcagccctattacagcagttacctttggtccatttggtggcacaaaacatcagggcacaacaactacaacaacttgtgctagcaaaccttgctgcatactctcagcaacatcagtttcttccattcaaccaactggctgcattgaactctgctgcttatttgcaacaacaattaccattcagccagctagttgctgcctacccccagcaatttcttccattcaaccaactagcagcattgaactctgctgcttatttacagcagcaacaactactaccattcagccagctagctgatgtgagccctgctgccttcttgacacaacaacagttgttgccgttctacctgcacgctatgcctaacgcntgcaccct

SEQ ID NO: 10027 - DNA, 658 bp, Zea mays
  unsure (1)..(658): unsure at all n locations; Clone ID: LIB3061-107-Q1-K6-G12
cccggtcgaccagcttcgatttttgagcttcanaacacacctagcgaagcgcactagcaacgacctaacaacaatggcttccaagacattatccctccttgcgcttcttgccctttttgtgagtgcaacaaatgcgttcattattccacaatgctcacttgctccgagtgccattattccacagttcctccctccagttacttcaatgggcttcgaacacccagctgtgcaagcctataggctacaacaagcgcttgcggcgagcgtcttagaacaaccaattgcccaattacaacaacaatccttggcacatctaaccatacaaaccatcgcaacgcagcagcaacaagcactgagccacctagccgtggtgaaccctatcgcctacttgcaacaacagctgcttgcatccaacccacttgctttggcaaacgtagctgcataccaacaacaacaacagttgcaacagtttctaccagcgctcagtcaactagccatggtgaaccctatcgcctacctacaacagcaacaacttctttcatctagcccgctcgctatgggcaatgcacctacatacctgcaacaacagttgttgcaacaacagttgctgcaacaaattgtaccagctcttactcagctagctgtggcaaaccctgct

SEQ ID NO: 10028 - DNA, 583 bp, Zea mays
  unsure (1)..(583): unsure at all n locations; Clone ID: LIB3061-107-Q1-K6-G7
cccaccccgcccgagctgccctaatcggcgatggcgacgggggcgatggacatctcgaagcccactccagtggcgtccggcgacgaggccgcggcggcggccaaggggaggagcggcggagggggcgaggggctgtttttgtactacctgcagcacattctggggggggaggtccagatccggcagaagacccacaacctcaaccgtctcgaggcccagcgcaatgacctcaactcccgagttagaatgctcagggaagagttgcagttgcttcaagagcctggctcatatgttggtgaggtggtgaaggtcatggggaaatcaaaggttctggtgaaggtacaccccgaaggcaaatatgttgttgatatagataagagcattgntctcacaaagatcacaccttcaacaagagtcgctcttcgtaatgatagctatatgctccatctgatcctaccaagcaaagttgatccattggtcaatctcatgaaagttgagaaggttcctgattctacatatgatatgattggaggccttgaccagcaaattaaagagatcaaagaggtcattgagcttccaatca

SEQ ID NO: 10029 - DNA, 616 bp, Zea mays
  Clone ID: LIB3061-107-Q1-K6-H12
catgaagtgctgatcgttgcccttgctctcctggcgctcgctgcgagcgccgcctccagtacaagcggcggctgtggctgccagacaccaccgtttcatctaccgcctccgttctatatgccgcctccgttctatctgccgccgcagcagcagccgcagccatggcaataccccactcaaccaccgcagctaagcccgtgccagcagttcggatcctgcggcgtcggcagcgtcggcagcccgttcctgggccagtgcgtcgagttcctgaggcaccagtgcagcccggcggcgacgccctacggctcgccacagtgccaggcgctgcagcagcagtgctgccaccagatcaggcaggtggagccgctgcaccggtaccaggcgacatacggtgtggtcctgcagtccttcctgcagcagcagccgcagggcgagctcgcggcgctgatggcggcccaggtagcgcagcagctgacggcgatgtgcggtctgcagctgcagcagccaggtccctgcccttgcaacgcagctgccggcggtgtctactactgaggaaactatgtactgtagtaataatgtaatggagccgctgactagctacctatagggctatagc

SEQ ID NO: 10030 - DNA, 659 bp, Zea mays
  Clone ID: LIB3061-107-Q1-K6-H3
cccggtcgacccagcgttcgctccctcgcaccgacgaggtcaggtcagagaccttcgagtactactagtcatggcccgcatctagaaggcagcaagaaaggggcggatggggcgcgcgttcgtgtacgtgatcctgggcggcggcgtggccgcgggctacgccgcgctcgagttcgcccgccgcggtgggtactcccgcggagagctctgcatcatctccgaagaggccgttgctccttatgaacgtcctgcactaagcaaaggctatttactcccagaaggtgctgctcgtcttccaggatttcatacttgtgttggtgctaatgatgagttactgacaccgaaatggtacaaagaacaaggcattgaacttgttcttggaacaaaagtgatttctgctgatgtgaggcgcaagacattgcttacaggcactggtgaaactatcagctacaaaactctaattattgcgacaggtgctcgggctttgaagctgcaagaatttggaatacaaggttcagatgcttcaaacatatgttatttgcgcaacatcgatgacgcggataagttggtgagtgtgatgaaatcatgtcctggtggaaatgctgttgtcattggtggtggctacattggaatggagtgtgcagcggcattggttacta

SEQ ID NO: 10031 - DNA, 430 bp, Zea mays
  unsure (1)..(430): unsure at all n locations; Clone ID: LIB3061-107-Q1-K6-H4
gggggggggggggggtgccngccggcgccctgcgctggctgtccaccgacggcgtcgcgccgcttgtggcggtctacgtctctcgccgtgtaaccacaacatctaccagctcgagccgtccatttttttaattcttgctgcctcctttcttgttttggctgggccccactgggccgggaactctcctcgggcatcgacgcccggttcctgcgcgaagccctgggcgtttgcctgcgcgtcgccgacaagctgcggagccggtgtgacatgcgaggctagatcgtccgcgtggagccggtgcactgctttcaccagctgaatccgtcgccgtcttcgtcgtcgttttctttcccgtcgtctcttggccatttccaatcgtgccatcgcgacgttgtcatgctcttcgttctgcgccatggaggtgaggcac

SEQ ID NO: 10032 - DNA, 442 bp, Zea mays
  unsure (1)..(442): unsure at all n locations; Clone ID: LIB3061-107-Q1-K6-H7
actgaaccatggcggcgacaatggcngtgacgacgatggtgacgaggagcaaggagagcttttcttttttgcggtcccnctgttgggttccgtnggagcccnnaggggcaagaccgctgctcaaattccctcgccgggcgatgttcccagcgtcggcctcaacgtgtgcccgggcgtcccagcggggcgcgaccgcgggagcccgatcccaagtcgtccgggcggccgacaactgcgaatctcgcgccacttggcgccgcgtcccgggcgctggccgcctggaggcggggaagaggctgcgaatagaggaagcatagggcggcggtgcttgaagcacggcagctgggcgatctgagcctgggaaggtcgggtcaagatcgtcaaccctcacttcggcgcctggttagcggcgccatctccgggccgtgtccatgacttttgt

SEQ ID NO: 10033 - DNA, 589 bp, Zea mays
  unsure (1)..(589): unsure at all n locations; Clone ID: LIB3061-074-Q1-K6-A1
cttccatttaaccaattggncacagtggggctggctgcgnataggcagtagctnncnctcctncccctttccccgctcgctgccgcnccccgggcttccttcttgccccccgccccgccgctgccttcctccccgcggtttgcggctctccccccncccctctcccccctccgggggtggggggcctttgtccnncccgctctgcccgccccnncggcccgctgcccccgccccctcnttggcggcgccccctntccccncgctgcctcctcgccccccccccctcccccccccgcccgccgcccgcgcccccccccncccccccccccccttggccccccccccccccccccccccccccccccccccctccccccccccncgccccccccccccccccccccccntccccccgcccgccccccccttccgcccccccccctgcccccccccccccccccccctccgccccccctctcccccccccccccccccccccccccggcccccccccccccccccccccccccctcccccccccccccgcccgccccccccccccccccccccccccccccctccccccccc

SEQ ID NO: 10034 - DNA, 601 bp, Zea mays
  unsure (1)..(601): unsure at all n locations; Clone ID: LIB3061-074-Q1-K6-A10
caacaagcaacatagnaagtggggggccggtagcggcagcagagcaacaatggcgaccaagatattttccctccttatgctccttgctctttctgcatgtgttgctaacgcgacaattttccctcaatgctcacaagctcctatagcttcccttcttcccccataccttccatcaatggtggggggagtatgtgaaaacccagctcttcagccctataggctccaacaagcaatcgcagcaagcaacatacctttatcacccttgttgtttcaacaatcgccagccctatctttggtgcagtcattggtacaaaccatcagggcacagcagctgcagcaactcgtgctacctgtgatcaaccaagtagctctggcaaacctttctccctactctcagcaacaacaatttcttccattcaaccaactgtctacactgaaccctgctgcttatttgcagcaacaactattaccattcagccagctagctactgcctactctcagcaacaacaacttcttccatttaaccaattggccgcactgaaccccgctgcttatttgcagcagcaaatactactaccatttagccagctagctgcagca

SEQ ID NO: 10035 - DNA, 258 bp, Zea mays
  Clone ID: LIB3061-074-Q1-K6-A11
cagaccgaacccccagcgcgctgggggggcgggcccaattcggagatccacccccccaccgaatccgctcgcctgcgcctgcgcctgctacctgcgatccatctctcatggcgaccaccagcgccaggaggccgagcggcccggtgctctcggccgcgcactaccgctccgggtgggggacgcgcctctcgctcgccgggcagcccgtcagcgtcagcgtgtcctcgtcgtcgcggggcccggcgacctgcatgtgct

SEQ ID NO: 10036 - DNA, 602 bp, Zea mays
  unsure (1)..(602): unsure at all n locations; Clone ID: LIB3061-074-Q1-K6-A12
gcaacatagnaagtggnaatccaggggcgggggtgggagcacaatggcgaccaagatactttccctccttatgctccttgctctttctgcatgtgttgctaacgcgacaattttccctcaatgctcacaagctcctatagcttcccttcttcccccataccttccatcaatgatagctggggggggtgaaaacccagctcttcaaccctataggctccaacaagcaatcgcagcaagcaacatacctttatcacccttgtttcaacaatcgccagccctatctttggtgcagtcattggtacaaaccatcaaggcacagcagctgcagcaactcgtgctacctgtgatcaaccaagtagctctggcaaacctttctccctactatcagcaacaacaatttcttccattcaaccaactatctacactgaaccctgctgcttatttgcagcaacaactattaccattcagccagctagctactgcctactctcatcaacaacaacttcttccatttaaccaattggccgcactgaacctcgctgcttatttgcagcagcaaatattactaccatttagccagctagctgcagcaagccgtgctt

SEQ ID NO: 10037 - DNA, 589 bp, Zea mays
  Clone ID: LIB3061-074-Q1-K6-A2
attgagaccagcaagcaacataggaagtggagtccattagcaacaatagagcaacaatggcgaccaagatattttccctccttatgctccttgctctttctacatgtgttgctaacgcgacaattttccctcaatgctcacaagctcctatagcttcccttcttcccccataccttccatcaattatagcttcagtatgtgaaaacccagctcttcaaccatataggcttcaacaagcaatcgcagcaagcaacatacctttatcgcccttgttgtttcaacaatcaccagccctatctttggtgcagtcattggtacaaaccatcagggcacaacagctgcagcaactcgtgctacctgtgatcaaccaagtagctctggcaaacctttctccctactctcagcaacaacaatttcttccattcaaccaactgtctacactgaaccctgctgcttatttgcagcaacaactattaccatttagccagctagctactgcctactctcagcaacaacaacttcttccatttaaccaattggccgcactgaaccccgctgcttatttgcagcagcaaatactactgccatt

SEQ ID NO: 10038 - DNA, 593 bp, Zea mays
  Clone ID: LIB3061-074-Q1-K6-A3
tgcgttcattattccacagtgctcacttgctgctagtgccattattccacagttcctcccaccagttacttcaatgggcttcgaacatccagccgtgcaagcctacaggctacaactagcgcttgcggcgagcgccttacaacaaccaattgcccaattgcaacaacaatccttggcacatgtaaccctacaaaccattgcaacgcaacaacaacaacaacaacagtttctgccatcactgagccacctagccgtggtgaaccctgtcacctacttgcaacagcagctgcttgcatccaacccacttgctctggcgaacgtagctgcataccagcaacaacaacagctgcaacagtttatgccagtgctcagtcaactagccatggtgaaccctgccgtctacctacaactactttcatctagcccgctcgcggtgggcaatgcacctacgtacctacaacaacagttgctgcaacaaattgtaccagctctgactcagctagctgtggcaaaccctgctgcctacttacaacagttgcttccattcaaccaactggctgtgtcaaactctgctgcgtacctacaacagcgac

SEQ ID NO: 10039 - DNA, 696 bp, Zea mays
  unsure (1)..(696): unsure at all n locations; Clone ID: LIB3061-074-Q1-K6-A4
cccccccccccccccccgcccgcccgccccccccccccccccccccccccccccccccccnncccccccccccccccccccccccnccccccccnccccgccnncgcnnnccccccccccccccccccccccnccnccccccccccccccccccccccccgggggggggcgcgcccccccccccccccccccccccccccccccccccccccccccccccccccccccccccccccccgcgcccgggcccccgccnccccccnccccccccccccccccccccccccccccccccccccccccccccccccccnccccccccccccccgnnccccccccccccccgncccccnccccccccgccccccccccccccccccccccccccccccccccccccccccccccccccccccccncgcccccccccccccccccncccccccccccccccccccccgccccccccccccccccccccccccccccccccccccccccccccccccccccnccccccccccccnccccccccccccccccgccccccccccccccccccccgccccccccccccccccccccccccgccccnccccccgcgcccccccgcccgccccnccccccncgcccccgcncgccgccccccccccccaccccccccccccccccccccccccgcccgccccccccccc

SEQ ID NO: 10040 - DNA, 183 bp, Zea mays
  unsure (1)..(183): unsure at all n locations; Clone ID: LIB3061-074-Q1-K6-A5
gnaactatgtactgtagtaataatgtgggggaggcgctgactagctacctagctcgctagtttactcatttagcggcgatgagtaacgtagtgtcacccatcaccatgggtggcagtgtgagcaatgacctgaatgaaccattgaaatggaaaggaataatatataaggaaaaaagagagggg

SEQ ID NO: 10041 - DNA, 608 bp, Zea mays
  Clone ID: LIB3061-074-Q1-K6-A6
cagcaaatagcttcttccccctcttgtcaattgaccgcgggggggtgatttcaagcaacgcgttgcttcagctgagcttgagaagaacagaatggatcaaaatgggaactccaaagctgatactcatggaaaattacgctcattgagtgagatattatttagacctgatgttggtggttcatcagagggggggcgagaagattcagattatgatgatgaaatggagttggactatgagacatcagtatctggtgatgaaagccgagagaatgatcaagatatcttacggggcagattaagttaccgatttcatcaaagagaggatcaaaccaatgaacacactggtgagaatgggtcaatcgagttcgctcaaaacgatgattttgcttttcagtcagatgttgccatcgatatgaaacaaagatatgttgcacactgcaacgttggaacagatatcaaacaagccagctttcttggtgagcaaggggagttcattgccagtggaagtgatgatggtagatggtttatatgggagaaaagaacaggaaggcttattaaaatgcttgcaggggatggagctgttgtgaactgcatacagtctcatccct

SEQ ID NO: 10042 - DNA, 576 bp, Zea mays
  unsure (1)..(576): unsure at all n locations; Clone ID: LIB3061-074-Q1-K6-A7
gcgcgaactgcacgcgcggcccggggggtgttcggcgtgcgcatcggggacaagcccatccggnagnacgccagcatggggaacatcgcgcacctcgccgcggagggcagcggcggcagggaggaagggtacggctccgcggggagcgcccgcacaagaagcgaggtgaggcggggggctgaagaggagcacaagaagtttctgcttgggttgaataagctagggaaaggcgattggcgtggtatatcccgtaaatatgttgtttcaaggacacctactcaagtggctagccatgcgcaaaagtatttcaatcgccaaacaaatgtgcatagaagaaagagaagatcaagcctattcgatatggtgattgatgacccgtctgatcaacttccgctctcgcgttcatcttcacaagaaatggagcagcaacatttagatgatccacagcctgttgcagccctgcctgcacctgtggtctctccagctactgtggtacctcctgtgcctgtggaagtgtctgcttcagttccatcgccagttcaggtcccagttccagtttcagccccagggatgaca

SEQ ID NO: 10043 - DNA, 590 bp, Zea mays
  unsure (1)..(590): unsure at all n locations; Clone ID: LIB3061-074-Q1-K6-A8
ngaaccttttactgttctgtagtgagcgcggggggggctctcttactaaaacacttctggacattcttgccaagagaagcctggccagcgaggaactatcaaaggagactatggagatgctggctgagattcacctcctgaacagagcagtaaaaagaaagagtaggaacatggggcggggggggggaagttcgttgtaatttgccccgacaattccaaggtttaccccttccttccgaacttgcctggccctggtggtttaactccgctgcatcttgctgcgtccatcgagaatgcagaggatatagttgacgccttgacagacgaccctcaacagactggtgtaacctgttggcagacagttctagacgacgacggccaatctcccgaaacatatgccaagttgaggaaccataattcctataatgagctcgtagcgcaaaagctggtggacatgaagaacaaccaggtcacagtaagggttaacggcgatgggattcgtgcggatcggttaggaaatgatgttggtgaccgcaaaagatctggggttcaggcgctgcaaataagatcctgctcccagtgtgccattc

SEQ ID NO: 10044 - DNA, 597 bp, Zea mays
  Clone ID: LIB3061-074-Q1-K6-B11
gcacaatagtgtaccaacaatggggggggaagtggggggcctccttatgctccttggtctttctgcaagtgctgctacggcgaccattttcccacaatgctcacaagctcctatagcttcccttcttcccccgtacctctcaccaacggtgtcttcggtatgtgaaaacccaatgggggggggggggcaggatccaacaggcaatcgcagctggcatcttacctttatcacccttgttcctccaacaatcatcagccctattacagcagttacctttggtgcatttattggcacaaaacatcagggcacaacaactacaacaacttgtgctagcaaaccttgctgcctactctcagcaacagcagtttcttccattcaaccaactagctgcattgaactctgcttcttatttgcaacaacaacaactaccattcagccagctatctgctgcctacccccagcaatttcttccattcaaccaactgacagcattgaactctcctgcttatttacagcagcaacaactactaccattcagccagctagctggtgtgagccctgctaccttcttgacacaaccacagttgttgccgttct

SEQ ID NO: 10045 - DNA, 594 bp, Zea mays
  unsure (1)..(594): unsure at all n locations; Clone ID: LIB3061-074-Q1-K6-B2
caactagcaacatagnaagcacaatagtgtaccaacaatggcagccaaaaattttgcttccttatgctccttggtctttctgcaagtgttgctaccgcaaccattttcccacaatgctcacaagctcctatagcttcccttcttcccccatacctctcaccagcggtgtcttcaatgtgtgaaaccccaattgttcaaccctacaggatccaacaggcaatcgcaacaggcatcttaccattatcacccttgttcctccaacaaccgtcagccctattacagcagttacctttggtccatttggtggcacaaaacatcagggcacaacaactacaacaacttgtgctagcaaaccttgctgcatactctcagcaacatcagtttcttccattcaaccaactggctgcattgaactctgctgcttatttgcaacaacaattaccattcagccagctagttgctgcctacccccagcaatttcttccattcaaccaactagcagcattgaactctgctgcttatttacagcagcaacaactactaccattcagccagctagctgatgtgagccctgctgccttcttgacacaacaa

SEQ ID NO: 10046 - DNA, 612 bp, Zea mays
  unsure (1)..(612): unsure at all n locations; Clone ID: LIB3061-074-Q1-K6-C1
cgtctcggcaacatagnaaagcacaatagtgtaccaacagggcagccaaaaattttgcttccttatgctccttggtctttctgcaagtgttgctaccgcnaccattttcccacaatgctcacaagctcctatagcttcccttcttcccccatacctctcaccagcggtgtcttcaatgtgtgaaaccccaattgttcaaccctacaggatccaacaggcaatcgcaacaggcatcttaccattatcacccttgttcctccaacaaccgtcagccctattacagcagttacctttggtccatttggtggcacaaaacatcagggcacaacaactacaacaacttgtgctagcaaaccttgctgcatactctcagcaacatcagtttcttccattcaaccaactggctgcattgaactctgctgcttatttgcaacaacaattaccattcagccagctagttgctgcctacccccagcaatttcttccattcaaccaactagcagcattgaactctgctgcttatttacagcagcaacaactactaccattcagccagctagctgatgtgagccctgctgccttcttgacacaacaacagttgttgccgttcta

SEQ ID NO: 10047 - DNA, 616 bp, Zea mays
  unsure (1)..(616): unsure at all n locations; Clone ID: LIB3061-074-Q1-K6-C10
tagcaacattacatagtgaatacactggcggcatgttagcaccaatggcagccaagatttttgccatccttgccctccttgctctttcagcaagcgttgctaccgcgactattattccacaatgctcacaacaatacctctctccggtgacagccgcgagatttgaatacccaggtggggggggctacaggctacaagaggccatcgcagcaagcatcttacggtcgttagcattgaccgtccaacaaccatatgccctattgcaacaaccatccttaatgaatctatatctccaaagaatcgcagcacaacaactacaacaacagttgcttccaacaatcaatcaagtagttgcagcgaaccttgctgcttacctccagcaacaacaatttcttccattcaatcaactagctggggtgaaccctgctgcttacttgcaggcacaacagctactaccattcaaccaacttgtcaggagccctgctgccttcttactgcagcaacagntgcttccattccatctacaagttgtggcaaacattgctgctttcttgcaacaacaacaacaattgctgccattttacccacaggttgtgggaaaaattaacgccttttt

SEQ ID NO: 10048 - DNA, 598 bp, Zea mays
  unsure (1)..(598): unsure at all n locations; Clone ID: LIB3061-074-Q1-K6-C3
tagcaacatagnaagcacaatagtgtaccaacaatggcagccaaaatttttgcttccttatgctccttggtctttctgcaagtgttgctaccgcaaccattttcccacaatgctcacaagctcctatagcttcccttcttcccccatacctctcaccagcggtgtcttcaatgtgtgaaaccccaattgttcaaccctacaggatccaacaggcaatcgcaacaggcatcttaccattatcacccttgttcctccaacaaccgtcagccctattacagcagttacctttggtccatttggtggcacaaaacatcagggcacaacaactacaacaacttgtgctagcaaaccttgctgcatactctcagcaacatcagtttcttccattcaaccaactggctgcattgaactctgctgcttatttgcaacaacaattaccattcagccagctagttgctgcctacccccagcaatttcttccattcaaccaactagcagcattgaactctgctgcttatttacagcagcaacaactactaccattcagccagctagctgatgtgagccctgctgccttcttgacaaacaacagttgttg

SEQ ID NO: 10049 - DNA, 466 bp, Zea mays
  unsure (1)..(466): unsure at all n locations; Clone ID: LIB3061-074-Q1-K6-C4
cccgggtcgcccacgctccgtaatcaaaataaattttttggntgatgtgtgtggccaaccagaaataagaagttacatttccagaattctaatgtgaaaaaaaaaaaaaaaaaaaaaaaaaaaaaagaaaaaaaaaaataaaaggaaaaaaaaaaaaaaaaaacggtgcgtgcttactaagaggccccacctatagtgggggggtgggtggaaggcacatggcctgttgttttacaacgctctaaactgagtaaaaccccgccgtttcccaactcgttcgccttgcaaaaactcccgctttccccagctggctccattgggaacaggcccccatcgcccgcgcttcccaactgttgcgcagccccaatggntcctgtttcccccactgttgcggccccttaatggcgatgggccgtgccccttcccgcgccctttaccgccccgcttgccggggcgttaccccccg

SEQ ID NO: 10050 - DNA, 291 bp, Zea mays
  Clone ID: LIB3061-074-Q1-K6-C6
gcagcaacaactactaccattcagccagctagctggtgtgagccctgctaccttcttgatacaaccacagttgttgccgttctaccagcacgctgcgcctaacgctggcaccctcttacaactgcaacaattgctgccattcaaccaacttgctttgacaaacccagcagcgttctaccaacaacccatcattggtggtgccctcttttagatttcttatgagttatagttcaataataaagttttttgtctgatgtttgtggcttcccagaaataagaaagtacatttct

SEQ ID NO: 10051 - DNA, 712 bp, Zea mays
  unsure (1)..(712): unsure at all n locations; Clone ID: LIB3061-074-Q1-K6-C7
ccccccccccgcgcggcccgcnnggggggggggcncccccccccccccccccccccgcccggccccccccccccccccccccccccnnncccccccccnnnncccnnccccccccccccccccccccccccccccccccccccccccccccccccccccgccccgnccccccccccccccccccnnccccccccccccccccggcgcccgccgggccccccccccccccccccccccccccccccccccccccccccccnncccccccccccccccccccccccccccgncccccccccccccccccccccccccccccccccccccgcccccccgcggcgcccccccccccccccncccccccccccccccccccccccccccccccccccccccccccgnccnccccccccccccccccccccccccccccccccccccccccccccccccccccccccccccccccccgcccccccccccccccccccccccccccccccccccccccccccccccngncccccccccccccccccccccccgncccccccccccccccncccccccccccccccccccccccccccccccccccccccccccccccccccccccnccccccccncccccccccgcccccccccccccnccccccccccccccccccccccccgccccccccccgncgccccccccncccccccccccc

SEQ ID NO: 10052 - DNA, 584 bp, Zea mays
  unsure (1)..(584): unsure at all n locations; Clone ID: LIB3061-074-Q1-K6-C8
tccgctnagcaacatagnaaagcacaatagtgtgccaacatggcagccaaaaattttgcttccttatgctccttggtctttctgcagtgttgctaccgcaaccattttcccacaatgctcacaagctcctatagcttcccttcttcccccatacctctcaccagcggtgtcttcaatgggggaagaccccaattgttcaaccctacaggatccaacaggcaatcgcaacaggcatcttaccattatcacccttgttcctccaacaaccgtcagccctattacagcagttacctttggtccatttggtggcacaaaacatcagggcacaacaactacaacaacttgtgctagcaaaccttgctgcatactctcagcaacatcagtttcttccattcaaccaactggctgcattgaactctgctgcttatttgcaacaacaattaccattcagccagctagttgctgcctacccccagcaatttcttccattcaaccaactagcagcattgaactctgctgcttatttacagcagcaacaactactaccattcagccagctagctgatgtgagccctgctgccttc

SEQ ID NO: 10053 - DNA, 601 bp, Zea mays
  Clone ID: LIB3061-074-Q1-K6-C9
gaccaccgccgccggttcatctaccggcggcggggcatctgccacctccggttcacctgccacctccggtgcatctcccaccgccggtccacctgccgccgccggtccacctgccaccgccggtccatgtgccgccgccggttcatctgccgccgccaccatgccactaccctactgagggggcccggcctcagcctcatccccagccacacccatgcccgtgccaacagccgcatccaagcccgtgccagctgcagggaacctgcggcgttggcagcaccccgatcctgggccagtgcgtcgagttcctgaggcatcagtgcagcccgacggcgacgccctactgctcgcctcagtgccagtcgttgcggcagcagtgttgccagcagctcaggcaggtggagccgcagcaccggtaccaggcgatcttcggcttggtcctccagtccatcctgcagcagcagccgcaaagcggccaggtcgcggggctgttggcggcgcagatagcgcagcaactgacggcgatgtgcggcctgcagcagccgactccatgcccctacgctgctgccggcggtgtcccccactgaagaaactatgtgct

SEQ ID NO: 10054 - DNA, 576 bp, Zea mays
  unsure (1)..(576): unsure at all n locations; Clone ID: LIB3061-074-Q1-K6-D10
ctaacaacaatggctaccaanaattagccctccttgcgcttcttgccctttttgtgagcgcaacaaatgcgttcattattccacaatgctcacttgctcctagtgccattattccacagttcctcccaccagttacttcagtggggggnggaacacctagctgtgcaagccaacatgcaacaacaagcgcttgcggcgagcgtcttacaacaaccaattgcccaattgcaacaacaatccttgccacatctaacaatacaagccatcacaacgcaacagcaacaacagttcctaccagcactgagccacctagccatggtgaaccctgccgcctacttgcaagagcagctgcttgcatccaacccacttgctctggcgaacgtagttgcaaaccagcaacaacaacagctacaacagtttctgccaacgctcagtcaactagccatggtgaaccctgccgcctacgtacaacaacaacaactgctttcatctagcccgctcgctgtgggcaatgcacctacatacctgcaacaacaattgttgcaacagattgtaccagctctgactcaactagct

SEQ ID NO: 10055 - DNA, 615 bp, Zea mays
  unsure (1)..(615): unsure at all n locations; Clone ID: LIB3061-074-Q1-K6-D12
gnctccgggnacctgggcgcacaaagcgggggggtgtccacatgctcacttgctcctagtgccagtattccacagttcctcccaccattacttcatgggcttcgaacatccagccgtgcaagcctacaggctacaactagcgcttgcggcgagcgccttacaacaaccaattgcccgggggggcaacaatccttggcacatctaaccctacaaaccattgcaacgcaacaacaacaacaacagtttctgccatcactgagccacctagccgtggtgaaccctgtcacctacttgcaacagcagctgcttgcatccaacccacttgctctggcgaacgtagctgcataccagcaacaacaacagctgcaacagtttatgccagtgctcagtcaactagccatggtgaaccctgccgtctacctacaactactttcatctagcccgctcgcggtgggcaatgcacctacgtacctacaacaacagttgctgcaacaaattgtaccagctctgactcagctagctgtggcaaaccctgctgcctacttacaacagttgcttccattcaaccaactggctgtgtcaaactctgctgcgtacctacaacagcgacaacag

SEQ ID NO: 10056 - DNA, 607 bp, Zea mays
  unsure (1)..(607): unsure at all n locations; Clone ID: LIB3061-074-Q1-K6-D3
ccaacaagcaacatagnaagtggnaatccagtagcaacaatagagcaacaatggcgaccaagatctttccctccttatgctccttgctctttctgcatgtgttgctaacgcgacaattttccctcaatgctcacaagctcctatagcttcccttcttcccccataccttccatcaatgatagcttcagtatgtgaaaacccagctcttcaaccctataggctccaacaagcaatcgcagcaagcaacatacctttatcacccttgtttcaacaatcgccagccctatctttggtgcagtcattggtacaaaccatcaaggcacagcagctgcagcaactcgtgctacctgtgatcaaccaagtagctctggcaaacctttctccctactatcagcaacaacaatttcttccattcaaccaactatctacactgaaccctgctgcttatttgcagcaacaactattaccattcagccagctagctactgcctactctcatcaacaacaacttcttccatttaaccaattggccgcactgaacctcgctgcttatttgcagcagcaaatattactaccatttagccagctagctgcagcaagccgtgct

SEQ ID NO: 10057 - DNA, 593 bp, Zea mays
  unsure (1)..(593): unsure at all n locations; Clone ID: LIB3061-074-Q1-K6-D4
gnaacatttanaaaccacacctnagcggagacgcggctagcaacgacctaacaacaatggctaccaanatttagcccttcttgcgcttcttgccctttttgtgagcgcaacaaatgcgttcattatttcacaatgctcacttgctcctagtgccattattccacaattcctcccaccagttacttcaatgggcttcgaacacccagctgtgcatgcctacaggctacaacaagcgcttgcggcgagcgtcttacaacaaccaattgcccaattacagcaacaatccttggcacatctaacaatacaaaccatcgcaacgcaacagcaacaacagttcctaccagcactgagccacctagccatggtgaaccctgccgcctacttgcaacagcaactgcttgcatccaacccacttgctctggcaaacgtagttgcacaccagcaacaacaacagctgcaacagtttctgccagcgctcagtcaactagccatggtgaaccctgccgcctacctacaacagcaacaactgctttcatctaccccgctcgttctggccaatgcacctacatacctgcaacaacaattgttgcaat

SEQ ID NO: 10058 - DNA, 605 bp, Zea mays
  Clone ID: LIB3061-074-Q1-K6-D6
caccacggtgtcttcggtatgtggaaaacccaattcttcaaccctacaggatccaacaggcaatcacagctggcatcttacctttatcacccttgttcctccaacaatcatcagccctattacatcagttacctttggtgcatttattggcacaaaacatcagggcacaacaactacaacaacttgtgctagcaaaccttgctgcctactctcagcaacagcagtttcttccattcaaccaactagctgcattgaactctgcttcttatttgcaacaacaacaactaccattcagccagctacctgctgcctacccccagcaatttcttccattcaaccaactggcagcattgaactctcctgcttatttacagcagcaacaactactaccattcagccagctagctggtgtgagccctgctaccttcttgatacaaccacagttgttgccgttctaccagcacgctgcgcctaacgctggcaccctcttacaactgcaacaattgctgccattcaaccaacttgctttgacaaacccagcagcgttctaccaacaacccatcattggtggtgccctcttttagatttcttatgagttatagttc

SEQ ID NO: 10059 - DNA, 562 bp, Zea mays
  unsure (1)..(562): unsure at all n locations; Clone ID: LIB3061-074-Q1-K6-D7
aacaatggcgaccaanatttttccctccttatgctccttgctctttctactgtgttgctaacgcgacaattttccctcaatgctcacaagctcctatagcttcccttcttcccccataccttccatcaattgtggggtcagtatgtgaaaacccagctcttcaaccatataggcttcaacaagcaatcgcagcaagcaacatacctttatcgcccttgttgtttcaacaatcaccagccctatctttggtgcagtcattggtacaaaccatcagggcacaacagctgcagcaactcgtgctacctgtgatcaaccaagtagctctggcaaacctttctccctactctcagcaacaacaatttcttccattcaaccaactgtctacactgaaccctgctgcttatttgcagcaacaactattaccatttagccagctagctactgcctactctcagcaacaacaacttcttccatttaaccaattggccgcactgaaccccgctgcttatttgcagcagcaaatactactgccatttagcgagctagctgcagaaagttgtgc

SEQ ID NO: 10060 - DNA, 605 bp, Zea mays
  unsure (1)..(605): unsure at all n locations; Clone ID: LIB3061-074-Q1-K6-D9
anaagtggnaatccagtagcaacaacagagcaacaatggcgaccaagatattttccctccttatgctccttgctctttctgcatgtgttgctaacgcgacaattttccctcaatgctcacaagctcctatagcttcccttcttcccccataccttccatcaatgatagcttcagtatgtgaaaacccagctcttcagccctataggctccaacaagcaatcgcagcaagcaacatacctttatcacccttgttgtttcaacaatcgccagccctatctttggtgcagtcattggtacaaaccatcagggcacagcagctgcagcaactcgtgctacctgtgatcaaccaagtagctctggcaaacctttctccctactctcagcaacaacaatttcttccattcaaccaactgtctacactgaaccctgctgcttatttgcagcaacaactattaccattcagccagctagctactgcctactctcagcaacaacaacttcttccatttaaccaattggccgcactgaaccccgctgcttatttgcagcagcaaatactactaccatttagccagctagctgcagcaaaccgtgcttccttcttg

SEQ ID NO: 10061 - DNA, 594 bp, Zea mays
  unsure (1)..(594): unsure at all n locations; Clone ID: LIB3061-074-Q1-K6-E1
tagcaacatagnaaagcacaatagggtggcggacaatggcagccaaaaattttgcctccttatgctccttggtctttctgcaagtgctgctacggcgaccattttcccgcaatgctcgcaagctcctatagcttccctttcccccgtacctctcaccagcggtgtcttcggtgtgggaaaacccaattcttcaaccctacaggatccaacaggcaatcacagctggcatcttacctttatcacccttgttcctccaacaatcatcagccctattacatcagttacctttggtgcatttattggcacaaaacatcagggcacaacaactacaacaacttgtgctagcaaaccttgctgcctactctcagcaacagcagtttcttccattcaaccaactagctgcattgaactctgcttcttatttgcaacaacaacaactaccattcagccagctacctgctgcctacccccagcaatttcttccattcaaccaactggcagcattgaactctcctgcttatttacagcagcaacaactactaccattcagccagctagctggtgtgagccctgctaccttcttgatacaaccac

SEQ ID NO: 10062 - DNA, 619 bp, Zea mays
  Clone ID: LIB3061-074-Q1-K6-E10
caacaaatgcgttcattattccacagggcgggcgggctcctagtgccattattccacagttcctcccaccagttacttcaatgggcttcgaacatccagccgtgcaagcctacaggctacaactagcgcttgcggcgagcgccttacaacaaccaattgcccaattgcaacaacggggggtgggggcatctaaccctacaaaccattgcaacgcaacaacaacaacaacaacagtttctgccatcactgagccacctagccgtggtgaaccctgtcacctacttgcaacagcagctgcttgcatccaacccacttgctctggcgaacgtagctgcataccagcaacaacaacagctgcaacagtttatgccagtgctcagtcaactagccatggtgaaccctgccgtctacctacaactactttcatctagcccgctcgcggtgggcaatgcacctacgtacctacaacaacagttgctgcaacaaattgtaccagctctgactcagctagctgtggcaaaccctgctgcctacttacaacagttgcttccattcaaccaactggctgtgtcaaactctgctgcgtacctacaacagcgacaacagttacttaattcat

SEQ ID NO: 10063 - DNA, 559 bp, Zea mays
  Clone ID: LIB3061-074-Q1-K6-E11
ccaacatgcaacaacaagcgctggcggggagcgtcttacaacaaccaattgcccaattgcaacaacaatccttgccacatctaacaatacaagccatcacaacgcaacagcaacaacagttcctaccagcactgagccacctagccatggtgaaccctgccgcctacttgcaagaggggggggttgcatccaacccacttgctctggcgaacgtagttgcaaaccagcaacaacaacagctacaacagtttctgccaacgctcagtcaactagccatggtgaaccctgccgcctacgtacaacaacaacaactgctttcatctagcccgctcgctgtgggcaatgcacctacatacctgcaacaacaattgttgcaacagattgtaccagctctgactcaactagctgtggcaaaccctgttgcctacttgcaacagctgcttccattcaaccaactgactctgtcgaactctgctgcgtacctacaacagcgacaacagttacttaatccattggtagtggctaacccattggtcgccgccttcctacagcagcaaca

SEQ ID NO: 10064 - DNA, 571 bp, Zea mays
  unsure (1)..(571): unsure at all n locations; Clone ID: LIB3061-074-Q1-K6-E3
caacagcaaatanaagtggaatccagtagcaacaatagagcaacaatggcgaccaagatattttccctccttatgctccttgctctttctacatgtgttgctaacgcgacaattttccctcaatgctcacaagctcctatagcttcccttcttcccccataccttccatcaattatagcttcaatatgtgaaaacccagctcttcaaccatataggcttcaacaagcaatcgcagcaagcaacatacctttatcgcccttgttgtttcaacaatcgccagccctatctttggtgcagtcattggtacaaaccatcagggcacaacagctgcagcaactcgtgctacctctgatcaaccaagtagctctggcaaacctttctccctactctcagcaacaacaatttcttccattcaaccaactgtctacactgaaccctgctgcttatttgcagcaacaactattaccatttagccagctagctactgcctactctcagcaacaacaacttcttccatttaaccaattggccgcactgaaccccgctgcttatttgcagcagcaaatactac

SEQ ID NO: 10065 - DNA, 602 bp, Zea mays
  Clone ID: LIB3061-074-Q1-K6-E4
ttcagaaacacacctagcgaacgcactagcaacgacctaacaacaatggctaccaagatattatccctctttgcgcttcttgccctttttgtgagcgcaacaaatgcgttcattattccacaatgctcacttgctcctagtgccattattccacagttcctccctccagttacttcaatgggcttcgaacacccagctgtgcaagcctacaggctacaacaagcgcttgcggcgagcgtcttacaacaaccaattgcccaattacaacaacaatccttggcacatctaaccatacaaaccatcgcaacgcaacagcaacaacaatttctaccagcactgagccaactagctgtggtgaaccctgtcgcctacttgcaacagcagttgcttgcatccaacccacttgctctggcaaacatagttgcataccaacaacaacaacaattgcaacagtttctaccagcgctcagtcaactagccatggtgaaccctgccgcctacctacaacagcaacaactgatttcatctagccctctcgctgtggttaatgcacctacatacctgcaacaacagttgctgcaacagattgtaccagctctgac

SEQ ID NO: 10066 - DNA, 600 bp, Zea mays
  Clone ID: LIB3061-074-Q1-K6-E7
ggcgcacggcggctacccacgccgcgggggcggcgtacgcaggcccaagtcctcggcctctgccgcagttgccgaccgcaagcggaagcggaccgccgccgccgccaagaccacctcccttaagaaccagatccgctccaccgagcgcttcctccgcaaggaccttccggatgagaggaggggggctcaagagaagaaactggaagaactgaagaggcaacaagagcttcagaatcaacttgctgtccagcggacattacagtttagagatagaaagataaaattctttgagagacggaagattgagaggatgataaggcgactcgagaagcaacaacgttcaaatggtgatggtgtcaacaataatctgtcaaaattgcgagaagatcttgaatatgttagattcttccctaagaatgagaaatatgtctcgctgttcactggagggaacagtcaagatattgttcaagagaggaataaatggcgcaaacagatcaaggagaatctcatggctgctgcagcaaacggaaaagatttagaagagacagcaagcgatgacgataccttggatgtgagtgatgatgacttctttatgtctgg

SEQ ID NO: 10067 - DNA, 557 bp, Zea mays
  unsure (1)..(557): unsure at all n locations; Clone ID: LIB3061-074-Q1-K6-E8
anaaacacaatatgtaccaacatggcaggcaaaatttttgcctccttatgctccttggtctttctgcaagtgctgctacggcgaccattttcccgcaatgctcgcaagctcctatagcttcccttcttcccccgtacctctcaccagcggtgtcttcggtatgtgaaaaccgaatgcttcaaccctacaggatccaacaggcaatcgcagctggcatcttacctttatcacccttgttcctccaacaatcatcagccctattacaacagttacctttggtgcatttattggcacaaaacatcagggcacaacaactacaacaacttgtgctagcaaaccttgctgcctactctcagcaacagcagtttcttccattcaaccaactaggttcattgaactctgcttcttatttgcaacaacaacaactaccattcagccagctacctgctgcctacccccagcaatttcttccattcaaccaactagcagcattgaactctcctgcttatttacagcagcaacaactactaccattcagccagctagctggtgtgagc

SEQ ID NO: 10068 - DNA, 549 bp, Zea mays
  unsure (1)..(549): unsure at all n locations; Clone ID: LIB3061-074-Q1-K6-E9
gcactagcaacgacctaacaacaatggctaccaanatttagccctccttgcgcttcttgccctttttgtgagcgcaacaaatgcgttcattattccacaatgctcacttgctcctagtgccattattccacagttcctcccaccagttacttcaatgggcttcgaacacctagctgtgcaagccaacatgcaacaacaagcgcttgcggcgagcgtcttacaacaaccaattgcccaattgcaacaacaatccttgccacatctaacaatacaagccatcacaacgcaacagcaacaacagttcctaccagcactgagccacctagccatggtgaaccctgccgcctacttgcaagagcagctgcttgcatccaacccacttgctctggcgaacgtagttgcaaaccagcaacaacaacagctacaacagtttctgccaacgctcagtcaactagccatggtgaaccctgccgcctacgtacaacaacaacaactgctttcatctagcccgctcgctgtgggcaatgcacctacatacctgcaacaaca

SEQ ID NO: 10069 - DNA, 537 bp, Zea mays
  unsure (1)..(537): unsure at all n locations; Clone ID: LIB3061-074-Q1-K6-F1
ggggggcccccccccccncccccccgggcgcccccncccccccccccccccccccccccnnnccccccccccccccccccccccccccccccccccccccccccnccccccnccccncccccccccccccccccccccccnggggggggggggncccccccccccccccccccccccccccccncncccccccccncccccccccccccccccnnncccccccccccccccccccnccccncccccccccccnccccccccccccccccccccccccccccccccccccccnnccccccccccccccccccccnccccccccccccncccccccccccccccccccccccncccccccccccccccccccccccccccccccccccccccccccccccccccccccccccnccccccccccccccccncccccncccccccccccccccccccccccccccccccccccccccccccccccccccccccccccccccccccccccccccccccccccnccccccccccccccccccc

SEQ ID NO: 10070 - DNA, 423 bp, Zea mays
  unsure (1)..(423): unsure at all n locations; Clone ID: LIB3061-074-Q1-K6-F10
gggggcagggggctcccaggtcctggcgggcggcctcnccgggggggcgttggggctgtccgtgtacccgacggacgtggtgaagagcgtgatccaggtggacgattacaagaagcccaagtactccgggtccctcgacgcgctgaggaagatcgtggcggctgatggggtgaagggcctgtacaaggggttcgggaccggggctggcacncancgttccanccaatgccgcgacattcgtggcctacgagatcacgagatcggcgcttggttgatttgattggtgctggcctttgccatggccctttgcagtttattcattctccttgcgcggctggagcaacgcgaacaatgcgagacaattttagggaggaaagagagagagaaacttttcacttcaatgatgagattctttaatgaagc

SEQ ID NO: 10071 - DNA, 570 bp, Zea mays
  unsure (1)..(570): unsure at all n locations; Clone ID: LIB3061-074-Q1-K6-F11
cgtaccggtacgaacactgaccgcgggcggccgcaactcaaagagtgtgaccacggaactgaagccatggcggttacagttgagaagggctctatgggcgagccggcgctgctgctggagcgcagccgggcgatcaccctgcacggccgtgaccggaaaggccgtgccgggggggggacgtcnncaactactttccagcgcgcgcgctgggcggccgggcggaggaggcgctgcggtcgtacctgcgggagcgcatcctcccggagatcggggaccgcgagttcgtggtcgtgtacatgcactcccgcgtggatcgcggccacaacttccccggcgtcggtgcgatccgcggcgcgtacgagacgctgccggccgcggccaaggagaggctgcgcgccgtctacttcgtgcacccggccctccagtccaggatcttcttcgccaccttcgggcgcttcctcttcagctcanggttgtatgagaagctgcgatacatgagccggcttgagtacgtttgggcccacatagacaaggagcagctggaggtccccgaatgcgtgcgcgagcacg

SEQ ID NO: 10072 - DNA, 617 bp, Zea mays
  Clone ID: LIB3061-074-Q1-K6-F12
cccagcgtccggcaacatagaagggggggggagtggcaacaacagagcaacaatggcgaccaagatattttccctccttatgctccttgctctttctgcatgtgttgctaacgcgacaattttccctcaatgctcacaagctcctatagcttcccttcttcccccataccttggagcaggagggcttcagtatgtgaaaacccagctcttcagccctataggctccaacaagcaatcgcagcaagcaacatacctttatcacccttgttgtttcaacaatcgccagccctatctttggtgcagtcattggtacaaaccatcagggcacagcagctgcagcaactcgtgctacctgtgatcaaccaagtagctctggcaaacctttctccctactctcagcaacaacaatttcttccatttaaccaattggccgcactgaaccccgctgcttatttgcagcagcaaatactactaccatttagccagctagctgcagcaaaccgtgcttccttcttgacacagcaacagttgctgcctttctaccagcagtttgcggctaaccccgcaaccctcttacaactacaacaattgttgccctttgtccaacttgctttgac

SEQ ID NO: 10073 - DNA, 583 bp, Zea mays
  Clone ID: LIB3061-074-Q1-K6-F2
cgtcagcctagcattagctcacgactccggatgggagactcgacaccatgaagtgctgatcgttgcccttgctctcctggcgctcgctgcgagcgccgcctccagtacaagcggcggctgtggctgccagacaccaccgtttcatctaccgcctccgttctatatgccgcctgcgttctatctgccgccgcagcagcagccgcagccatggcaataccccactcaaccaccgcagctaagcccgtgccagcagttcggatcctgcggcgtcggcagcgtcggcagcccgttcctgggccagtgcgtcgagttcctgaggcaccagtgcagcccggcggcgacgccctacggctcgccacagtgccaggcgctgcagcagcagtgctgccaccagatcaggcaggtggagccgctgcaccggtaccaggcgacatacggtgtggtcctgcagtccttcctgcagcagcagccgcagggcgagctcgcggcgctgatggcggcccaggtagcgcagcagctgacggcgatgtgcggcctgcagctgcagcagccaggtccctgcccttgcaacgcagctgccggc

SEQ ID NO: 10074 - DNA, 617 bp, Zea mays
  Clone ID: LIB3061-074-Q1-K6-F3
gctaacgcgacaattttccctcaatgctcacaagctcctatagcttcccttcttcccccataccttccatcaatgatagcttcagtatgtgaaaacccagctcttcagccctataggctccaacaagcaatcgcagcaagcaacatacctttatcacccttgttgtttcaacaatcgccagccctatctttggtgcagtcattggtacaaaccatcagggcacagcagctgcagcaactcgtgctacctgtgatcaaccaagtagctctggcaaacctttctccctactctcagcaacaacaatttcttccattcaaccaactgtctacactgaaccctgctgcttatttgcagcaacaactattaccattcagccagctagctactgcctactctcagcaacaacaacttcttccatttaaccaattggccgcactgaaccccgctgcttatttgcagcagcaaatactactaccatttagccagctagctgcagcaaaccgtgcttccttcttgacacagcaacagttgctgcctttctaccagcagtttgcggctaaccccgcaaccctcttacaactacaacaattgttgccctttgtccaacttgctttgac

SEQ ID NO: 10075 - DNA, 535 bp, Zea mays
  unsure (1)..(535): unsure at all n locations; Clone ID: LIB3061-074-Q1-K6-F4
cgccccgccgccgcnncnnncaggcgccggccccccgccncccccccccccccccgccgccccccccggccccgccccccncccccccccccgcccccccccccnccccccccccggcgggggggcggcgcccccccccccccccccccnccnngccccccacccccccccggcccccccccccnccccccccccccccccccccccccccccncccccccccccccgggnccccccccccccccccccccccccccccccccccccccccccccccccccnccccccccccccccccccccccccccccccccccccccccccccccccccccccccccccccccncccccccccccccccccccccccccccccccccccccccccccccccccccccccgccccccccccccccgcccccccnccccccccccccccccccccccccccccccccccccccccgcccccccccccccccgccccccccccccccccccccncccccccccccccccccgcccgccccacacc

SEQ ID NO: 10076 - DNA, 591 bp, Zea mays
  Clone ID: LIB3061-074-Q1-K6-F5
cttgctcctagtgccattattccacaggtggtgccaccagttacttcaatgggcttcgaacatccagccgtgcaagcctacaggctacaactagcgcttgcggcgagcgccttacaacaaccaattgcccaattgcaacaacaatccttggcacatctaaccctacaaaccattgcagcggagcaacaacaacaacaacagtttctgccatcactgagccacctagccgtggtgaaccctgtcacctacttgcaacagcagctgcttgcatccaacccacttgctctggcgaacgtagctgcataccagcaacaacaacagctgcaacagtttatgccagtgctcagtcaactagccatggtgaaccctgccgtctacctacaactactttcatctagcccgctcgcggtgggcaatgcacctacgtacctacaacaacagttgctgcaacaaattgtaccagctctgactcagctagctgtggcaaaccctgctgcctacttacaacagttgcttccattcaaccaactggctgtgtcaaactctgctgcgtacctacaacagcgacaacagttacttaatccattggca

SEQ ID NO: 10077 - DNA, 513 bp, Zea mays
  unsure (1)..(513): unsure at all n locations; Clone ID: LIB3061-074-Q1-K6-F6
cacatcccttctntctttctccgggggctggcattctgctgctccgccccccgcccaggctcggcggtccggcgatctcgctcaccggcgggaacatgactacttcaaggcgccttgctgacaggaagaccgcaaagttccagaagaacatcaccaggaggggttctgtgcctgaaaccactgtcaagaagggaaatgactaccctgttggccctctagtgcttgggttcttcatctttgtcgtcattggatcatcgttgtttcagatcatcaggacggcaaccagcggcggggtggcttgagagccggcccacatctaatccccagtatagagagttgcttgttatacatgcatccagctaggattgggtagcagctaaaatgttaaacgtgacaagactgccctgcattccgttcatttggtgggccttgaatctggaactgaaccataaggcagaatcatgtaccttatataaagtgttaaatgggtaactggatctcagtgtttcattt

SEQ ID NO: 10078 - DNA, 370 bp, Zea mays
  unsure (1)..(370): unsure at all n locations; Clone ID: LIB3061-074-Q1-K6-F7
cccccgncccccccccccccccgggggggggggggcgcncccgccccccnccgcccgccgccgccgccgccccccccccccccngccccggcccccccccccccccggccccccccccccgccccccccgcgcgccccccnncncccccccccccccccccncccccggcgggggcgcgggggggnncccccccccccccccccccccccgccnccccccgnccccccccccgcccccgccccccccccccgcnccccccccccccccccgccccccccnccccccccgcgcccgcggccngcccgngccagcccccnccccccccccgcgccgcgccccccncccccgccccccccccccccccccccc

SEQ ID NO: 10079 - DNA, 609 bp, Zea mays
  unsure (1)..(609): unsure at all n locations; Clone ID: LIB3061-074-Q1-K6-F9
gcaacatagnaagtagaatccattagcaacaatagagcaacaatggcgaccaagatattttccctccttatgctccttgctctttctacatgtgttgctaacgcgacaattttccctcaatgctcacaagctcctatagcttcccttcttcccccataccttccatcaattatagcttgagggtgtgaaaacccagctcttcaaccatataggcttcaacaagcaatcgcagcaagcaacatacctttatcgcccttgttgtttcaacaatcaccagccctatctttggtgcagtcattggtacaaaccatcagggcacaacagctgcagcaactcgtgctacctgtgatcaaccaagtagctctggcaaacctttctccctactctcagcaacaacaatttcttccattcaaccaactgtctacactgaaccctgctgcttatttgcagcaacaactattaccatttagccagctagctactgcctactctcagcaacaacaacttcttccatttaaccaattggccgcactgaaccccgctgcttatttgcagcagcaaatactactgccatttagcgagctagctgcagcaagtcgtgcttccttc

SEQ ID NO: 10080 - DNA, 278 bp, Zea mays
  unsure (1)..(278): unsure at all n locations; Clone ID: LIB3061-074-Q1-K6-G11
ggcggccaaaatttttccatccttagctccttgctctttctgctgtgttgctaacgcgaccatttttcctcaatactcacaagctcctatagctgcccttcttcccccataccttccatcaatgaccgcttcaggggggggggggcaaacccancanccttctaccaacaacacatcattggcggtgccatcttttaaattgcttattagttgtaattcaataatgaagttttttggctgatgtatgtggcctcctagaaataagaagttacatttcc

SEQ ID NO: 10081 - DNA, 625 bp, Zea mays
  Clone ID: LIB3061-074-Q1-K6-G12
gcagcggcaactgcgcttcgaaatacagggggagggtggcctatctcgaagattttcaaaagttgtgtcctattacggtctcacaaccccgccatataaactggatgctctggaaccttatatgagcaagaggacagttgaacttcactggggtaagcaccatcaagattacgtgggggggtgggataatcagctggctaccagccctctgtatggatacactctggaggatctgataaaagaagcttataacaatggcaatccattaccagagtataacaacgcagcacagccaatcatcagcctagacttgtgggagcacgcttactacttagactacaaggatgataagctaacatatgtcacaaactttatggaccatcttgtctcttggcatactgtcactctacgcatgatgcgtgcagagtcttttgtgaaccttggtgagccaaatatcccagaggcttgagctacaaatacaccctagttatcatcatgaggcatttttcggatacatcggatcaaatcctgctggaggaaccagagagttggaaaatctcatgtctcacaagaaatgcttatcaccccaatgtcatacacgccaagataagctgctaggatttca

SEQ ID NO: 10082 - DNA, 537 bp, Zea mays
  unsure (1)..(537): unsure at all n locations; Clone ID: LIB3061-074-Q1-K6-G2
ccttcagggtggggggcgtcggcccttatgagtccgcgtgcgcatgaaagcgtggggatttgcggcagcgatgtgcactacctcagggnanagcgcatcgcgcacttcgtggtgaaggagccgatggtgatcgggcacgagtgcccggncgtggtcggggaggtgggcgccggcgtgacgcacctgtccgtgggcgaccgcgtggcgctggagccgggcgtcagctgctggcgctgccgccactgcaagggcgggcggtacaacctgtgcgaggacatgaagttcttcgccaccccgccggtgcacggctcgctggcgaaccaggtggtgcacccggccgacctgtgcttcaagctccccgacggggtgagcctggaggagggcgccatgtgcgagccgctgagcgtgggcgtgcacgcgtgccgncgcgcgggggtggggcccgagacgggcgtgctcgtggtgggcgccggccccatcggcctggtgtcgctgctggcggcgcgggcccttcgcgcgccgcgcgtggtggtcgtg

SEQ ID NO: 10083 - DNA, 613 bp, Zea mays
  unsure (1)..(613): unsure at all n locations; Clone ID: LIB3061-074-Q1-K6-G3
gcaacatagnaaagcacaatagtgtaccaacaatggcagccaaaaattttgcctccttatgctccttggtctttctgcaagtgctgctacggcgaccattttcccgcaatgctcgcaagctcctatagcttcccttcttcccccgtacctctcaccagcggtgtcttcggtatgtgaaaacccaattcttcaaccctacaggatccaacaggcaatcacagctggcatcttacctttatcacccttgttcctccaacaatcatcagccctattacatcagttacctttggtgcatttattggcacaaaacatcagggcacaacaactacaacaacttgtgctagcaaaccttgctgcctactctcagcaacagcagtttcttccattcaaccaactagctgcattgaactctgcttcttatttgcaacaacaacaactaccattcagccagctacctgctgcctacccccagcaatttcttccattcaaccaactggcagcattgaactctcctgcttatttacagcagcaacaactactaccattcagccagctagctggtgtgagccctgctaccttcttgatacaaccacagttgttgccgttctaccag

SEQ ID NO: 10084 - DNA, 575 bp, Zea mays
  Clone ID: LIB3061-074-Q1-K6-G5
gcaaagcggcagtgcgtagaaaggatgcggggagcaggaacagcatgaagaggtcatcgttctcgtcgtgtgcctggctctgtcagctgccagcgcctctgcaatgcagatgccctgcccctgcgcggggctgcagggcttgtacggcgctggcgccggcctgacgacgatgatgggggcgggcgggctgtacccctacgcggagtacctgaggcagccgcagtgcagcccgctggcggcggcgccctactacgccgggtgtgggcagacgagcgccatgtaccagccgctccggcaacagtgctgccagcagcagatgaggatgatggacgtgcagtccgtcgcgcagcagctgcagatgatgatgcagcttgagcgtgccgctgccgccagcagcagcctgtacgagccagctctgatgcagcagcagcagcagctgctggcagcccagggtctcaaccccatggccatgatgatggcgcagaacatgccggccatgggtggactctaccagtaccagtaccagctgcccagctaccgcaccaacccctgtggcgtctccgctgccattccgc

SEQ ID NO: 10085 - DNA, 603 bp, Zea mays
  unsure (1)..(603): unsure at all n locations; Clone ID: LIB3061-074-Q1-K6-G6
ggcttcanaacacactacgaacgcactacacgacctaacacatggcttccaanacttatccctccttgcgcttcttgccctttttgtgagtgcaacaaatgcgttcattattccacaatgctcacttgctccgagtgccattattccacagttcctccctccagttacttgaatgggcttcgaacacccagctgtgcaagcctataggctacaacaagcgcttgcggcgagcgtcttagaacaaccaattgcccaattacaacaacaatccttagcacatctaaccatacaaaccatcgcaacgcagcagcaacaagcactgagccacctagccgtggtgaaccctatcgcctacttgcaacaacagctgcttgcatccaacccacttgctttggcaaacgtagctgcataccaacaacaacaacagttgcaacagtttctgccagcgctcagtcaactagccatggtgaaccctatcgcctacctacaacagcaacaacttctttcatctagcccgctcgctatgggcaatgcacctacatacctgcaacaacagttgttgcaacaacagttgctgcaacaaattgtaccagctcttactca

SEQ ID NO: 10086 - DNA, 345 bp, Zea mays
  unsure (1)..(345): unsure at all n locations; Clone ID: LIB3061-074-Q1-K6-G9
ctgccattcaaccaacttgctttggcaaacccagcagcgttctaccaacaacccatcattggtggtgccctcttttagatttcttatgagttatagttcaataataaagttttttgtctngaaaaaaaaaaaaaaaaaaaaaaaaaaaaaaaaaaaaaaaaaaaaaaaaaaaaaaaaaaagggggggaaaaaaaaaaaaaaaaaaaaaaaaaaaaaaaaaaaaaaaaaaaaaaaaaaaaaaaaaaaaaaaaaaaaaaaaaaaaaagggggggccccttttaaaggaccaaattttacttcccggggtttgcaaggtaaaattttttttttggggcccccaaaata

SEQ ID NO: 10087 - DNA, 428 bp, Zea mays
  unsure (1)..(428): unsure at all n locations; Clone ID: LIB3061-074-Q1-K6-H2
ggcgcgctgnccaccttcgccgcggggggggggggggnagnagcgancgccgccaccgccgcggngccggngccgctggcgcccgcgcccgcgtcgtccgagaaggcgctgctgcagttcgaggacacggggcggctgttcgcgggggagccgacncccgcnctnctncncacgggggggggggcgggancnctntccctgggccccctggtggacgcggccactgcggcgctgcggtcgccggcggtggccggcagcgcgctgggccgggccgcccccagggccaccgcgtacccgcacttcttcgcgggcgagacccccggcgaagccctcgcggcccngcgcccgctgtggcgcggcggcatgggcggggtcctcccctaccggatcccagacccccnngaccgnggcgcgtgcgaccgtaaccc

SEQ ID NO: 10088 - DNA, 612 bp, Zea mays
  unsure (1)..(612): unsure at all n locations; Clone ID: LIB3061-074-Q1-K6-H3
gnaaaccaccagncgnaactacctgagcgcgggggtacaacatggctaccaanatttagccctccttgcgcttcttgccctttttgtgagcgcaacaaatgcgttcattattccacaatgctcacttgctcctagtgccattataccacagttcctccgaccagttacttcaatggggggggaacacctagctgtgcaagcctacaggctacaacaagcgcttgcggcgagcgtcttacaacaaccaattaaccaattgcaacaacaatccttggcacatctaaccatacaaaccatcgcaacacaacagcaacaacagttcctaccagcactgagccaactagatgtggtgaaccctgtcgcctacttgcaacagcaggtgcttgcatccaacccacttgctctggcaaacgtagctgcataccaacaacaacaacaattgcaacagtttctgccagcgctcagtcaactagccatggtgaaccctgccgcctacctacaacagcaacaactgctttcatctagccctctcgttgtgggtaatgcacctacatacctgcaacaacaattgctgcaacagattgtaccagctctgactcagctagctgtggc

SEQ ID NO: 10089 - DNA, 617 bp, Zea mays
  Clone ID: LIB3061-074-Q1-K6-H4
ctcgtgctctgttctcatcttctgctcgctggtgtccctgggggggggcgatggcttcggcggcggcggcaactcaggtggggacttacttcctgcggaactactacaacctgctgcaacaaacccccgatgtcgtccaccagttctacagcgaagccagcaccatggtccgcgtcgacgacctcaccggggcggggggggctgccaacaacatgatggacatacactcactcatcatgtctttgaacttcacccaaattgagatcaagactgccaattttgtgaactcatggggcgatggggtgctagttatggtctctggtctagtgcagaccaaggagtacagccaccaaaggaaatttatccagatgttcttccttgcccctcaagagaagggttactttgtcctcaacgattactttcacttcgttgaccaagaacatgtgcagcctgcgccagtgattgctcaggaagactacgagagcaatttggcacccaacacagttgttgagaccgctcctgagtacgttcacgaggaagaagctcaacaaatagcacctgaagtacatgatgtggtcgaaaactatacttattctgagccacaacagcaagtagtg

SEQ ID NO: 10090 - DNA, 515 bp, Zea mays
  unsure (1)..(515): unsure at all n locations; Clone ID: LIB3061-074-Q1-K6-H5
ccaacaatggcannnccaaaatattttgctttcctttatgccctccttggtctnnttctgcaagtgcctgcttaccgcanaccatnntttcccacaatgctcacnnaagctcctatagcttccttttcttcccccactacctctcaccancggggggggggagtgggtgtgaaaacccaattcttcaaccctacaggatccaacaggcaatcgcagcaggcatcttacctttatcacccttgttcctccaacaaccgtcagccctattacagcagttacctttggtgcatttgttggcacaaaacatcaaggcacaacaactacaacaacttgtgctaggaaaccttgctgcctactctcagcaacagcagtttcttccattcaaccaactggctgcattgaactctgctgcttatttgcaacaacaactaccattcaatcaactagctgctgcctacccccaccaatttcttccattcaaccaactggcaacattgaactctgctgcttattta

SEQ ID NO: 10091 - DNA, 205 bp, Zea mays
  Clone ID: LIB3061-074-Q1-K6-H6
ggttgttggtagtacactgctaggtttcttatgagttataggtgagtaataaagttttttgtctgatgtttgtggcttcccagaataagaaagtcatttctaaaaaaaaaaaaaaaaaaaaaaaaaaaaaaaaaaaaaaaaaaaaaaaaaaaaaaaaaaaaaaaaaaaaaaaaaaaaaaagggcgcgcccgttttgaggggggtg

SEQ ID NO: 10092 - DNA, 606 bp, Zea mays
  Clone ID: LIB3061-074-Q1-K6-H7
tcgcaccaagcgagcgcactagcaacgacgggggggcgtggctaccaagatattagccctccttgcgcttcttgccctttttgtgagcgcaacaaatgcgttcattattccacaatgctcacttgctcctagtgccattattccacagttcctcccaccagttacttcaatgggctgggggcgcggagctgtgcaagccaacatgcaacaacaagcgcttgcggcgagcgtcttacaacaaccaattgcccaattgcaacaacaatccttgccacatctaacaatacaagccatcacaacgcaacagcaacaacagttcctaccagcactgagccacctagccatggtgaaccctgccgcctacttgcaagagcagctgcttgcatccaacccacttgctctggcgaacgtagttgcaaaccagcaacaacaacagctacaacagtttctgccaacgctcagtcaactagccatggtgaaccctgccgcctacgtacaacaacaacaactgctttcatctagcccgctcgctgtgggcaatgcacctacatacctgcaacaacaattgttgcaacagattgtaccagctctgactcaactagctgt

SEQ ID NO: 10093 - DNA, 607 bp, Zea mays
  unsure (1)..(607): unsure at all n locations; Clone ID: LIB3061-074-Q1-K6-H9
ttttnggcttcanaacacactgggagcgcactacacgacctaacacatggctaccaanatttatccctctttgcgcttcttgccctttttgtgagcgcaacaaatgcgttcattattccacaatgctcacttgctcctagtgccattattccacagttcctccctgcaggggctgcatgggcttcgaacacccagctgtgcaagcctacaggctacaacaagcgcttgcggcgagcgtcttacaacaaccaattgcccaattacaacaacaatccttggcacatctaaccatacaaaccatcgcaacgcaacagcaacaacaatttctaccagcactgagccaactagctgtggtgaaccctgtcgcctacttgcaacagcagttgcttgcatccaacccacttgctctggcaaacatagttgcataccaacaacaacaacaattgcaacagtttctaccagcgctcagtcaactagccatggtgaaccctgccgcctacctacaacagcaacaactgatttcatctagccctctcgctgtggttaatgcacctacatacctgcaacaacagttgctgcaacanattgtaccagctctgactcagct

SEQ ID NO: 10094 - DNA, 574 bp, Zea mays
  Clone ID: LIB3061-075-Q1-K6-A1
cgccaattgcaccaagaaatccatcgaggggccgtgcgacaggggaattaatggcgtcgtcgtctagcagcagccaccgccgcctcatcctcgcagccgccgtcctgctctccgtgctcgcggctgccagcgccagcgccgggacctcctgcgtgccggggtgggccatcccgcacaaccggctgccgagctgccgctggtacgtgaccagccggacctgcggcatcgggccgcgcctcccgtggccggagctgaagaggagatgctgccgggagctggcggacatcccggcgtactgccggtgcacggcgctgagcatcctcatggacggcgcgatcccgccgggcccggacgcgcagctggagggccgcctagaggacctgccgggctgcccgcgggaggtgcagaggggattcgccgccaccctcgtcacggaggccgagtgcaacctggccaccatcagcggcgtcgccgaatgcccctggattctcggcggcggaacgatgccctccaagtaactgcgaagagcatagtgcatgaggaatgagcttgtagctagctcatatgtctgaat

SEQ ID NO: 10095 - DNA, 579 bp, Zea mays
  unsure (1)..(579): unsure at all n locations; Clone ID: LIB3061-075-Q1-K6-A10
ccgattgttattcttcaaaatcgaaggggggggggaggcggtggttgtggagaagacaggggctactactngaaagctatgatgattttttggcctctctcccagagaagactgccgatatgcgctgtatgattttgattttgttactggggagaatgtgcangaaaagcaagatttggggggtgggctggtccccatcgacatcccgcatacgtgctaagatgctgtactccacgtcgaaggaccgcatcaagtacgagcttgacgggttccactacgaaatccaggcgaccgacccatcggaggtggacatcgaggttctccgggagcgggctcactgaagctggttctccttttgaagggacctgtggagggccgtgaaccttcagccagatgcaaattcaattgtcaacgatgaagctcccgccgtggtgtttgttaataagttcctgtaagcgtatcatttagtcgctatgcatgatactagctggtgaagcgctatctaagctgtaaacgaagcaagatttgcaaacttgttatattgtggnattgatgatactggattactggctgggggtt

SEQ ID NO: 10096 - DNA, 565 bp, Zea mays
  unsure (1)..(565): unsure at all n locations; Clone ID: LIB3061-075-Q1-K6-A11
tccgcgccactaagcccgtgccagcagttggggggggtggggcgtcngcagcgtcggcagcccgttcctgggccagtgcgtcgagttccttgagcaccagtgcagcccggcggcgacgccctacggctcgccacagtgccacgcgcttcagcagcagtgctgccaccagatcaagcagggggggggggtgcacccntaccaagcgacatacggtgtggtcctgcagtccttcctgcagcagcagccgcagggcgagctcccggcgctgatggcggcccaagtagcgcagcagctgacggcgatgtgcggtctgcagctgcagcagccaggtccctgcccttgcaacgcagctgccggcggtgtctactactgaggaaactatgtactgtagtaataatgtaatggagccgctgactagctacctatagggctatagctagttcactcgtttagcggcgatgagtaacggagtgtcacccatcaccatgggtggcagtgtgagcaatgacctgaatgaaccattgaaatggaaaggaataatatatagggaaaaaagatgttttgg

SEQ ID NO: 10097 - DNA, 584 bp, Zea mays
  unsure (1)..(584): unsure at all n locations; Clone ID: LIB3061-075-Q1-K6-A2
ggccagcagnatggatttcaggatttccagcttcagatggacgtctgcagattataaagaacaatgaccttgaagagctccaagagcttggttctggaacttttggaactgtctatcatgcggtatgacttctggaatgaagcatctaaacttgctgatctgcaccacccaaatgttggcgcgttttatggtgttgttcttgatggacctgggggatccattgccacagttacagaatatatggtcaatggttcacttaggacagctttgctaaagaatgccaaaaccctcgatcgacgcaagagattaattattgccatggatacagcctttggaatggaatacttgcatagcaaaaacattgtgcactttgacttgaaaagtgacaatttgcttgttaatttaagggaccctcagcgtccaatatgcaaggttggtgatcttgggctttcaaaagtgaaatgtcagaccctcatctctggaggtgtccgaggaacacttccatggatggccccagaacttctgaatggtagcagcagcttggtctcagaaaagttgatgtattctcttttgggattgttctc

SEQ ID NO: 10098 - DNA, 611 bp, Zea mays
  unsure (1)..(611): unsure at all n locations; Clone ID: LIB3061-075-Q1-K6-A3
ctagcaacatagnaagcacaatagtgtaccaacaatggcagccaaaatttttgcctccttatgctccttggtctttctgcaagtgctgctacggcgaccattttcccgcaatgctcgcaagctcctatagcttcccttcttcccccgtacctctcaccagcggtgtcttcggtatgtgaaaacccaattcttcaaccctacaggatccaacaggcaatcacagctggcatcttacctttatcacccttgttcctccaacaatcatcagccctattacatcagttacctttggtgcatttattggcacaaaacatcagggcacaacaactacaacaacttgtgctagcaaaccttgctgcctactctcagcaacagcagtttcttccattcaaccaactagctgcattgaactctgcttcttatttgcaacaacaacaactaccattcagccagctacctgctgcctacccccagcaatttcttccattcaaccaactggcagcattgaactctcctgcttatttacagcagcaacaactactaccattcagccagctagctggtgtgagccctgctaccttcttgatacaaccacagttgttgccgttcta

SEQ ID NO: 10099 - DNA, 517 bp, Zea mays
  unsure (1)..(517): unsure at all n locations; Clone ID: LIB3061-075-Q1-K6-A4
cccccnccccccccccnnncccccccncncccccccccccccccccccncccccccccccncnncccccccccccccccccncncncncncncccncncccccccccccccccccccccncccccccccccccccccccccccccnnccccnccccccccnnncccccccccccccccccncccnncccncccccccccccccccccnccccccccccnccccccccccccccccccncccccccccccccccccccccccccnccccccccccccccccccccccccccccccccccccccccccccccccccccccccccccccnccccccccccccnnncccccccccccccccccccccnccccccccccccccccccccccccccccccccccccccccccccccccccccccccccccccgcgcccccgnncccccccccccgcccccccgnccccccccccccccccccccccccccccccccccccccccccccccccgcccccccccg

SEQ ID NO: 10100 - DNA, 586 bp, Zea mays
  unsure (1)..(586): unsure at all n locations; Clone ID: LIB3061-075-Q1-K6-A5
gacacatanaagcacaatatgtgccagcgtggcagccaaaatttttgcctccttatgctccttggtctttctgcaagtgctgctacggcgaccattttcccgcaatgctcgcaagctcctatagcttcccttcttcccccgtacctctcaaccagcggtgtcttcngtatgtggagagaacgccagattcttcaacccctacacggatccaacaggcaatcacagctggcatcttacctttatcacccttgttcctccaacaatcatcagccctattacatcagttacctttggtgcatttattggcacaaaacatcagggcacaacaactacaacaacttgtgctagcaaaccttgctgcctactctcagcaacagcagtttcttccattcaaccaactagctgcattgaactctgcttcttatttgcaacaacaacaactaccattcagccagctacctgctgcctacccccagcaatttcttccattcaaccaactggcagcattgaagtctcctgcttatttacagcagcaacaactactaccattcagccagctagctggtgtgagccctgctaccttctt

SEQ ID NO: 10101 - DNA, 595 bp, Zea mays
  unsure (1)..(595): unsure at all n locations; Clone ID: LIB3061-075-Q1-K6-A6
gcttngacagcactgtgatgctctgatgggggagagacaacaagcagtctggaaccttcaacctgtctggatccattagacggcagatgagtatgactcttgctgtagctgatggacaccttgttaatatggggaaaatgatagaagaaatggaggggaagctgagaaattcactggagggggggtattttgggaagaccagagaaatggtttgcactcttcggccaccaccagaagttcttaatatgagactacctgacagctgagccagtgcatagaagtgtcaacttaacaaagaaaaacgtattcttctccactctaggcgtggtctgttcttgcttcgtagttaatagtctgtgcatctgtatcgacatctgttgaggtatctatgataggagcttattatcttctgatcttttgtgattagctgtaatccgcgaagtgtttgacaggagccagtgtttgcagtggaactcagttaccaacagatgaatctccacaaaacgttgtgttggcgttctgtatcttctgaagaatctgatggtgttgtggctggacttgctatctgtcaaagtactaatgcggtgtttgtttt

SEQ ID NO: 10102 - DNA, 233 bp, Zea mays
  unsure (1)..(233): unsure at all n locations; Clone ID: LIB3061-075-Q1-K6-A8
agcaacatagnaaagcacaatagtgtggcgacaatggcagccaaaatattttgcctccttatgctccttggtctttctgcaagtgctgctacggcgaccattttcccgcaatgctcgcaagctcctatagcttcccttcttcccccgtacctctcaccanncgtgtcttcggggtgggggaagcccaattcttcaaccctacaagatccaacaagcaatcacaggctggcatc

SEQ ID NO: 10103 - DNA, 558 bp, Zea mays
  Clone ID: LIB3061-075-Q1-K6-B1
caatagtgtaccaacaatggcagcgaaggggggggcctccttatgctccttggtctttctgcaagtgctgctacggcgaccattttcccgcaatgctcgcaagctcctatagcttcccttcttcccccgtacctctcaccagcggtgtcttcggtatgtgaaaacccaattcttcagccctacaggatccaacaggcaatcacagctggcatcttacctttatcacccttgttcctccaacaatcatcagccctattacatcagttacctttggtgcatttattggcacaaaacatcagggcacaacaactacaacaacttgtgctagcaaaccttgctgcctactctcagcaacagcagtttcttccattcaaccaactagctgcattgaactctgcttcttatttgcaacaacaacaactaccattcagccagctacctgctgcctacccccagcaatttcttccattcaaccaactggcagcattgaactctcctgcttatttacagcagcaacaactactaccattcagccagctagctggtgtgagccctgct

SEQ ID NO: 10104 - DNA, 258 bp, Zea mays
  unsure (1)..(258): unsure at all n locations; Clone ID: LIB3061-075-Q1-K6-B12
ctcggacanaaaaanaacagctggggttggggggtgcattgcgtccaaccgatggttttatgttagtataaactggctagtcgaaaataattaggtgcagcgtttgaattgatttgggtttacggttgagttatatcccgtgtatgccataacaaagcagtcgccgctctgtgggggggggggagcgctgcctgtcctgtgtctgtttgtacgttgacaatttgattccgttgctcaaggatagaagaatattgatac

SEQ ID NO: 10105 - DNA, 596 bp, Zea mays
  unsure (1)..(596): unsure at all n locations; Clone ID: LIB3061-075-Q1-K6-B2
catcaattatagcttcaatatgtggaaaacccagctcttcaaccatataggcttcaacaagcaatcgcagcaagcaacatacctttatcgcccttgttgtttcaacaatcgccagccctatctttggtgcagtcattggtacaaaccatcagggcacaacagctgcagcaactcgtgctacctctgatcaaccaagtagctctggcaaacctttctccctactctcagcaacaacaatttcttccattcaaccaactgtctacactgaaccctgctgcttatttgcagcaacaactattaccatttagccagctagctactgcctactctcagcaacaacaacttcttccatttaaccaattggccgcactgaaccccgctgcttatttgcagcagcaaatactactaccatttagccagctagctgcagcaaaccgtgcttccttcttgacacagcaacagttgctgcctttctaccagcagtttgcggctaaccccgcaaccctcttacaactacaacaattgttgccctttgtccaacttgctttgacagacccagcggcctcctaccaacaacacatcattnggtggtgccc

SEQ ID NO: 10106 - DNA, 548 bp, Zea mays
  unsure (1)..(548): unsure at all n locations; Clone ID: LIB3061-075-Q1-K6-B3
ncaatcaccagccctatctttggtgcagtcattggtacaaaccatcagggcacaacagctgcagcaactcgtgctacctgtgatcaaccaagtagctctggcaaacctttctccctactctcagcaacaacaatttcttccattcaaccaactgtctacactgaaccctgctgcttatttgcagcaacaactattaccatttagccagctagctactgcctactctcagcaacaacaacttcttccatttaaccaattggccgcactgaaccccgctgcttatttgcagcagcaaatactactgccatttagcgagctagctgcagcaagtcgtgcttccttcttgacacagcaacagttgctgcctttctacaagcagtttgcggctaaccccgcaaccctcttacaactacaacaattgttgccctttgtccaacttgctttgacaaacccagcagcctcctaccaacaacacatcattggtggtgccctcttttagattgattattagttgtaattcaataataaagttttttggatgatgtatg

SEQ ID NO: 10107 - DNA, 563 bp, Zea mays
  Clone ID: LIB3061-075-Q1-K6-B4
ccgggcaatcgcagctggcatcttacctttgtcacccttgttcctccaacaatcatcagccctattacaacagttacctttggtgcatttattggcacaaaacatcagggcacaacaactacaacaacttgtgctagcaaaccttgctgcctactctcagcaacagcagtttcttccattcaaccaactaggttcattgaactctgcttcttatttgcaacaacaacaactaccattcagccagctacctgctgcctacccccagcaatttcttccattcaaccaactagcagcattgaactctcctgcttatttacagcagcaacaactactaccattcagccagctagctggtgtgagccctgctaccttcttgacacaaccacagttgttgccgttctaccagcacgttgcgcctaacgctggcaccctcttacaactgcaacaattgctgccattcaaccaacttgctttgacaaacccagcagtgttctaccaacaacccatcattggtggtgccctcttttagatttcttatgagttatagttcaataataaagttt

SEQ ID NO: 10108 - DNA, 584 bp, Zea mays
  Clone ID: LIB3061-075-Q1-K6-B5
caaggagaccgcgcccggcgacgggcgtgctctcccggccagcaccgtcgcgggctgcgttgcatccgtgcctttgcttctctcttcaccccgcgtctctctctcttggcgacgactgggggaccactgccgccgctcaacgccaggtagtcccttcgccggcgacgagcacccactagttttgtgatcggtgaaaatggctgctgctgaagcaagggctgcttggcaacgtgctgcaaaccgttgtctggttcaggaggacaggaagagagctccaaaactagcttgctgtccatcatcggctgaacaacatggtacaaacaatgggaactgtcgaaattctgtagatcgtcctatctgcagtttaatgcctttgagctgcaatcccatgcattctaatctgccaccagatgtcagatggtgggttcagtcacagccaaattttgggatccagaaggatattgttagcaagcggttatgttcgttgggcagggacattcatgagaagcaagtggaagattcagtgccacaacctaaacatgaggaaacattactctgtcaagcagttgacaccagcactgaaa

SEQ ID NO: 10109 - DNA, 553 bp, Zea mays
  Clone ID: LIB3061-075-Q1-K6-B9
gcaatcgcagcaggcatcttacctttgtcacccttgtgtcctcccaacaatcatcagccctattacagcagttacctttggtgcatttattggcacaaaacatcagggcacaacaactacaacaactcgtgctagcaaaccttgctgcctactctcagcaacagcagttacctttggggcattgggtggcacaaaacatcagggcacaacaactacaacaactcgtgctagcaaaccttgctgcctactctcagcaacaacagtttctgccattcaaccaactagctgcattgaactctgctgcttatttgcagcaacaacaactactaccattcagccagctagctgctgcctacccccggcaatttcttccattcaaccaactggcagcattgaactctcatgcttatgtacaacaacaacaactactaccattcagccagctagctgctgtgagccctgctgccttcttgacacagcaacatttgttgccgttctacctgcacactgcgcctaacgttggcaccctcttacaactgcaacaattgctgcc

SEQ ID NO: 10110 - DNA, 599 bp, Zea mays
  Clone ID: LIB3061-075-Q1-K6-C1
ctccggctagggtgttcacgcctgccgcggcgaagcttctgccctccccggcgtcgcgctctggtcgtcgtcggccgggaagatggctggcggcttcagggtacttcatctggtcaggccctttctggctttcttgccagaggtgcagagcgcggataggaagataccccattcagagaaaaagttatctacactgttatttctctcttcatttttctggtgtgcagccagctcccactctatggcattcattcgacgactggagctgatcctttctactggatgcgtgttatcctcgcatcaaaccgtggcactgtgatggagttgggtattactccaattgtgacctctggtatggtaatgcaacttcttgtcggatcgaagatcattgaagttgacaacagtgtgagagaggatcgtgctctgctgaatggtgcacaaaagttgcttggtatcttgatcgctattggggaagctgtggcatatgtcctgtctggaatgtatggcagtgtaagccaacttggaacagggaatgctattctcattatacttcagcttttctttgctggcatcattgtcatctgtttggatgaacttct

SEQ ID NO: 10111 - DNA, 604 bp, Zea mays
  unsure (1)..(604): unsure at all n locations; Clone ID: LIB3061-075-Q1-K6-C10
caactagcaacatagnaaagcacaatgagtggaccaacaatggcagccaaaaattttgcctccttatgctccttggtctttctgcaagtgctgctacggcgaccattttcccgcaatgctcgcaagctcctatagcttcccttcttcccccgtacctctcaccagcggtgtcttcgggatgggaaaacccaattcttcaaccctacaggatccaacaggcaatcacagctggcatcttacctttatcacccttgttcctccaacaatcatcagccctattacatcagttacctttggtgcatttattggcacaaaacatcagggcacaacaactacaacaacttgtgctagcaaaccttgctgcctactctcagcaacagcagtttcttccattcaaccaactagctgcattgaactctgcttcttatttgcaacaacaacaactaccattcagccagctacctgctgcctacccccagcaatttcttccattcaaccaactggcagcattgaactctcctgcttatttacagcagcaacaactactaccattcagccagctagctggtgtgagccctgctaccttcttgatacaaccacagtt

SEQ ID NO: 10112 - DNA, 586 bp, Zea mays
  Clone ID: LIB3061-075-Q1-K6-C11
gggcaccctcgaaattgatccatacgggcaccaatgctgttctttgagaaggggaggccaattgtgcctcctttactgccacctgctggactggatttggctcttcaaaacatgttaacgtttgcgaacaaagcaatgagaccaaacacagtgaaattcttccgcactcaatctgctagacatttcgaaggtggtgactggaatgaaggtggatcttgccaacgtaaccagcccttgtcgtcagaagaggtgggagaatttttctctttggacaataacagcaccaacgtagaggcacgcttggtaaaccaacacctggtgaaggctcttgaacagcagtctagttttagagttctggacatcactcgcatgagtgaattcagagcggatgctcacccttcaacaactggcggcaaaaagcacgatgattgcatgcattggtgtttgccaggaccaactgacacatggaacgatttgctagcgtccagtcttgaagtagttgagcgctagtctgagaataaaactcaagggctcacctgaggaagttacccctagcttcactttttcccccatgaatccacttgta

SEQ ID NO: 10113 - DNA, 576 bp, Zea mays
  unsure (1)..(576): unsure at all n locations; Clone ID: LIB3061-075-Q1-K6-C2
caccaagcgaagcgcactagcaacgacctaacaacaatggctaccaagnaattagccctccttgcgcttcttgccctttttgtgagcgcaacaaatgcgttcattattccacaatgctcacttgctcctagtgccattattccacagttcctcccaccagttacttcaatgggcttcgaacacctagctgtgcaagccaacatgcaacaacaagcgcttgcggcgagcgtcttacaacaaccaattgcccaattgcaacaacaatccttgccacatctaacaatacaagccatcacaacgcaacagcaacaacagttcctaccagcactgagccacctagccatggtgaaccctgccgcctacttgcaagagcagctgcttgcatccaacccacttgctctggcgaacgtagttgcaaaccagcaacaacaacagctacaacagtttctgccaacgctcagtcaactagccatggtgaaccctgccgcctacgtacaacaacaacaactgctttcatctagcccgctcgctgtgggcaatgcacctacatacctgcaacaacaattgttgcaacag

SEQ ID NO: 10114 - DNA, 608 bp, Zea mays
  Clone ID: LIB3061-075-Q1-K6-C3
ctcaccccacagccggccgccacagcaccgcggttagcagagcagagcggtgagctgcagagcagggcagccgaggtcggtcgtcgtcgtcgtcgtcagccatgagcaaggacaagcaccacaagcacgagcaccacctgcggcgttgctgcgggtgcatggcgtcgtgcctcctggcgctggtcctcatcgtggccttcgtctcgctggtggtgtacctggcgctgcgcccctcgaagccgtccttctacctgcaggacctgcagctgcgcaggcccatctcgctgggcgacccgtcgctgacggcgtcggcgcaggtgacgctggcctcccgcaaccccaacgaccgcgtgggcatcttctacaagcgcctggacgtgttcgtcacctaccgcgacgaggccgtgacggtgcccgtgtctctgccgccgcagtaccagggccaccgcgacttcaccgtctggtcccccgtgctgtcggccgagtccgtgcccgttgccgcctacgtcgccgacgccatgaagcaggacgtcgccgcgggcttcgtcgcgctgcaggtcaaggtggacggccgcgtcaagtggaaggtcggcagctgggtctccggc

SEQ ID NO: 10115 - DNA, 605 bp, Zea mays
  Clone ID: LIB3061-075-Q1-K6-C6
cagcctagcaattagctcatcgactccagattgggagaactcgacaccatgaaggtgctgatcgttgcccttgctctcctggcgctcgctgcgagcgccgcctccagtacaagcggcggctgtggctgccagacaccaccgtttcatctaccgcctccgttctatatgccgcctccgttctatctgccgccgcagcagcagccgcagccatggcaataccccactcaaccaccgcagctaagcccgtgccagcagttcggatcctgcggcgtcggcagcgtcggcagcccgttcctgggccagtgcgtcgagttcctgaggcaccagtgcagcccggcggcgacgccctacggctcgccacagtgccaggcgctgcagcagcagtgctgccaccagatcaggcaggtggagccgctgcaccggtaccaggcgacatacggtgtggtcctgcagtccttcctgcagcagcagccgcagggcgagctcgcggcgctgatggcggcccaggtagcgcagcagctgacggcgatgtgcggtctgcagctgcagcagccaggtccctgcccttgcaacgcagctgccggcggtgtctactactgaggaaa

SEQ ID NO: 10116 - DNA, 584 bp, Zea mays
  unsure (1)..(584): unsure at all n locations; Clone ID: LIB3061-075-Q1-K6-C7
anaaaganagggngagaggatgatggggcggacgagcgtggcggcggcggcggccctgctggtgctggcggcgtgcgcggctctgccggcgaggacggcggcgaacaagatcagcatcaactggaagcccaacgtgaactacaccgactggctgaagcagcacagccccttctacaggggggactggctggtgttctactacacggcggggcaggcggacgtggtgcaggtggacgaggtgggctacaacaagtgcgactccaccaacgccatctacaactacagcaaggggcgcagcttcgccttccagctcaacgagaccaagacctactacttcatctgcagctacggctactgcttcggcgggatgcgcctcgccatcaaggccgagaagctgccgccgccgtcgccgccgccgtccgccagcgaccgctccgccgccgccatcgccgccttcgccaggtcccacgcgcccgtcatctacgccgccatcgccgtgctcgccgcgctcctcaggatggtctagctgggaagaatctacccgccggccccttcgttggttcgaattgggactcctttttttt

SEQ ID NO: 10117 - DNA, 578 bp, Zea mays
  unsure (1)..(578): unsure at all n locations; Clone ID: LIB3061-075-Q1-K6-C8
ccttgttcctccaacatcatcagccctgttacatcagttacctttggtgcatttattgggcaccaaaacatcaggggcacaacaactacaacaacttgtgctagcaaaccttgctgcctactctcagcaacagcagtttcttccattcaaccaactagctgcattgaactctgcttcttatttgcaacaacaacaactaccattcagccagctacctgctgcctacccccagcaatttcttccattcaaccaactggcagcattgaactctcctgcttatttacagcagcaacaactactaccattcagccagctagctggtgtgagccctgctaccttcttgatacaaccacagttgttgccgttctaccagcacgctgcgcctaacgctggcaccctcttacaactgcaacaattgctgccattcaaccaacttgctttgacaaacccagcagcgttctaccaacaacccatcattggtggtgccctcttttagatttcttatgagttatagttcaataataaagttttttgtctgaaaaanaaaaaaaaaaaanaaaaaaanaaaaaannaaaaa

SEQ ID NO: 10118 - DNA, 616 bp, Zea mays
  unsure (1)..(616): unsure at all n locations; Clone ID: LIB3061-075-Q1-K6-C9
ggtcgcccanctccgtcacctacattagctcacggctccagatggnanactcgacacctgnaagtgctgatcgttgcccttgctctcctggcgctcgctgcgagcgccgcctccagtacaagcggcggctgtggctgccagacaccaccgtttcatctaccgcctccgttctatatgccgcctccgttctatctgccgccgcagcagcagccgcagccatggcaataccccactcaaccaccgcagctaagcccgtgccagcagttcggatcctgcggcgtcggcagcgtcggcagcccgttcctgggccagtgcgtcgagttcctgaggcaccagtgcagcccggcggcgacgccctacggctcgccacagtgccaggcgctgcagcagcagtgctgccaccagatcaggcaggtggagccgctgcaccggtaccaggcgacatacggtgtggtcctgcagtccttcctgcagcagcagccgcagggcgagctcgcggcgctgatggcggcccaggtagcgcagcagctgacggcgatgtgcggtctgcagctgcagcagccaggtccctgcccttgcaacgcagctgccggcggtgtctactactgaggaaact

SEQ ID NO: 10119 - DNA, 607 bp, Zea mays
  unsure (1)..(607): unsure at all n locations; Clone ID: LIB3061-075-Q1-K6-D1
gggaagattgggcgccgnggaggacgccgctgcacgccgcgagcgtctccgcgccctccgtgccgccaaggacctcctctccacccccgacggcgccccaaccccttccaccgacggagaacaccaaaatggcaaccatgagatggcagaagagccagaattaccaggtcatcaggatgcacctggtgaggctgctaaagaggatggtagccccactgaggaggccgaagaggttgaagatgatggtgagcttccagccatgaagttcagaaactaccttccccatgatgaacaacttcgaggaggcaagctggctccagtgtctcttcccaagtttgaagacccaattagtgccgaaactgcagagccaaaggaagtggagaacctttttggaaacatagcaccaaagaatccaaattgggatctgaaacgtgatgtgcagaagagaattgataaactggaaaggcgcacgcagaaagcgttggctgagattgcattggaacagcagagggagaaggaagccttggaggaatctcaagattgaccgacctgtataagtgaccagtgactcatgctggttggtccctcgagcagacgtcattatctt

SEQ ID NO: 10120 - DNA, 615 bp, Zea mays
  Clone ID: LIB3061-075-Q1-K6-D10
cagtggtccacgtggccatcactgggtgtgggattctcgcctatttaactatgggaactgggaagttttaagatttcttctctccaatgctagatggtggctcgaggaatataagtttgatggtttccgttttgatggtgtgacctccatgatgtacactcatcacggattacaagtaacgttgacggggaacttcaatgagtattttggctttgccaccgatgtagatgcagtggtttacttgatgctggtaaatgatctaattcatggactttatcctgaggctgtaaccattggtgaagatgttagtggaatgcctacatttgcccttcctgttcacgatggtggggtaggttttgactatcggatgcatatggctgtggctgacaaatggattgaccttctcaagcaaagtgatgaaacttggaagatgggtgatattgtgcacacactgacaaataggaggtggttagagaagtgtgtaacttatgctgaaagtcatgatcaagcattagtcggcgacaagactattgcgttttggttgatggacaaggatatgtatgatttcatggccctcgatagaccttcaactcctaccattgatcgtgggatagc

SEQ ID NO: 10121 - DNA, 551 bp, Zea mays
  unsure (1)..(551): unsure at all n locations; Clone ID: LIB3061-075-Q1-K6-D11
ctgccttttcttctcgtggccgggcctgctctctctctctctccctttctttcccccggcgacggtgacgaccaccgcgcgagcgccgccgnactccctactgcatcaggtgcctcggccttcgtcgtgctctcccccggcaacgagtatagacaggcccccatggggcggggggggggctgtnaccccgnnaaggtcccacccttcgggcatggtgccctcacccgaaacgctcgacgagatggtctccaacggcaccctcagcccggagctcgctatccaggtcctcgtccagttcgacaagtccatgacggatgctctggagaaccaagtgaagagcaaggttactgtcaagggtcacctgcacacctacaggttctgtgacaacgtgtggaccttcatcttgacagacgcaagcttcaagaatgaggaggccacggagcacgtgggcaaggtgaagattgtggcatgtgattccaaattgctcggacaataggcctgtgtaccctcnaggtcaaggaaggaagcttttaagtgcggcgaggcggggt

SEQ ID NO: 10122 - DNA, 533 bp, Zea mays
  unsure (1)..(533): unsure at all n locations; Clone ID: LIB3061-075-Q1-K6-D2
ctctccgcctactcgagtgccgcaggggggagcgcatccgcatgtgacgtcgctgctgggggaggtcagnccgggagagcgccccgacgccggcgccgggggagatcggcgtcgatcctgagctcgacgaattcatggacgcttactgccgggtgctggtgcgctacaagggaggagctgacccggccgttcgacgaggccgcgtcgttcctgagcagcattcaggcgcagctcaacgacctctgcagcggtggaagctcgccggcgggtaccgccacgcactccgatgacatgatgggctcctctgaggatgagcaatgctcaggggacactgatgtgccagacatggggcaagaacatagctctcacttatgtgaccacgagctcaaggagatgcttcttaagaagtacagtggatgcctcagccgtcttcgttcagagttcctgaagaagcggaagaaagggaagctaccgaaggatgctcggacggtgttactagagtggtggaacacgcactaccgctggccttatcc

SEQ ID NO: 10123 - DNA, 601 bp, Zea mays
  Clone ID: LIB3061-075-Q1-K6-D4
catgaggcaaatgtgaggcccagaatatgggaagaacgttgggttctgttgatatacttgttgcaagcataggaacaggcggtaccattagtggcactgggcgttactttgaaaaggatgaacaaagatattaaggttattggggtagaacctgctgaaactagtgtgatttctggtgatagccctggttacattccaagtatattagatgtgcagttgattgatgaggttgtgaaggttagcacagcagaagccgttgattctgcaagggaacttgctctaaaagagggcctgctggttggtatttcctctggtgctgcagcgattgctgctatcaatgttggcaaaagacctgaaaatgctggaaagttgattgcggtcattttccccagctttggagagagatacatctccaccattctgttccgtccgatatatgactctgttcgaagaatgaggaagagatagcgagccttgtactacttcaagcgcgttgccagtccccttctctagacctgacaggcttccatgacatgattgataaacgtgaagcagtgaagaccctgtttgattgcaacttcagggtccgaagttttgaagc

SEQ ID NO: 10124 - DNA, 533 bp, Zea mays
  unsure (1)..(533): unsure at all n locations; Clone ID: LIB3061-075-Q1-K6-D5
gnaaggaagnaggtggaggcgcggggcgcggggcgcggagaggacgcggagcttctggagctgcagcggcagctagaggcggcgcagagcgcgaggtccagcgtgcgcctgtcggagcggaagtggtggagttggtgcggaagctgcaggagcgaggcatcatcgatttcgagcgggtgcacaccgtctccggcaaggagtacatcacatccgaccatttgaagcatgagattaagatggagatcaagaagagaggccgggcatctctagttgacttatcaaataccctgggggtggacctttaccatgttgagaggcagtcacagaagggcgtctccgatgatcccactctaatgctgataaatggcgagatcatgtcacaatcttactgggacaccgtgacggaagagataaatgagaagcttcaggagcgcagtcagattgccttggcagagattgctgcccagttacatattggatccgagcttgtcatcagtatcctcgagccgcggcttggaactattgtgaaagga

SEQ ID NO: 10125 - DNA, 604 bp, Zea mays
  Clone ID: LIB3061-075-Q1-K6-D7
cattcagaaacacaccaagcgagactacctagcaacgacttaacaacaatggctaccaagatattagccctccttgcgcttcttgccctttttgtgagcgcaacaaatgcgttcattattccacaatgctcacttgctcctagtgccattataccacagttcctccgaccagttacttcaatgggcttcgaacacctagctgtgcaagcctacaagctacaacaagcgcttgcggcgagcgtcttacaacaaccaattaaccaattgcaacaacaatccttggcacatctaaccatacaaaccatcgcaacacaacagcaacaacagttcctaccagcactgagccaactagatgtggtgaaccctgtcgcctacttgcaacagcaggtgcttgcatccaacccacttgctctggcaaacgtagctgcataccaacaacaacaacaattgcaacagtttctgccagcgctcagtcaactagccatggtgaaccctgccgcctacctacaacagcaacaactgctttcatctagccctctcgttgtgggtaatgcacctacatacctgcaacaacaattgctgcaacagattgtaccagctctga

SEQ ID NO: 10126 - DNA, 525 bp, Zea mays
  Clone ID: LIB3061-075-Q1-K6-D8
gaacacttctctaactgacatgggggctgagtatgttatatgctttggagcacaaggagccagctttgcttcactcaagagagttggcacatgctctgaggttcttggcatctgtggtgtcacaaagcttcatagcgtttggtgatattcttgagttcacaaggaagggggtgaactctctggtggtattaacaggatatttgagcttgaggagcttctacaggcatcacaaagcaatcctgtcatgccttctgatgccacaaatgccggttccgaagaaataatttccttccgtggcgtgaacattgtgacaccatcgcaaaagctattggctagccaactgtcttgtgatgtatctcaagggaaaagccttcttgtgactggtccaaatggtagcggaaagagttccatctttatggtgcttcgaggcttgtggcccattgcttctggtagtcttagcaagccatctgaaggaatttttaatgttcctcaacgtccatatacttgtcttggaaccttgaggga

SEQ ID NO: 10127 - DNA, 425 bp, Zea mays
  Clone ID: LIB3061-075-Q1-K6-E1
ggcgacgccctactgctcgcctcagtgccagtcgttgcggcagcagtgttgccagcagctcaggcaggtggagccgcagcaccggtaccaggcgatcttcggcttggtcctccagtccatcctgcagcagcagccgcaaagcggccaggtcgcggggctgttggcggcgcagatagcgcagcaactgacggcgatgtgcggcctgcagcagccgactccatgcccctacgctgctgccggcggtgtcccccactgaagaaactatgtgctgtagtatagccgctggctagctagctagttgagtcatttagcggcgatgattgagtaataatgtgtcacgcatcaccatgggtggcagtgtcagtgtgagcaatgacctgaatgaacaattgaaatgaaaagaaaaaaagtactccatctgttcc

SEQ ID NO: 10128 - DNA, 589 bp, Zea mays
  unsure (1)..(589): unsure at all n locations; Clone ID: LIB3061-075-Q1-K6-E10
gngnaccaacaagcaacataggaaagtgggggggcgggagcaacaatagagcaacaatggcgaccaagatactttccctccttatgctccttgctctttctgcatgtgttgctaacgcgacaattttccctcaatgctcacaagctcctatagcttcccttcttcccccataccttgcatgggggggggcttcagtatgtgaaaacccagctcttcaaccctataggctccaacaagcaatcgcagcaagcaacatacctttatcacccttgtttcaacaatcgccagccctatctttggtgcagtcattggtacaaaccatcaaggcacagcagctgcagcaactcgtgctacctgtgatcaaccaagtagctctggcaaacctttctccctactatcagcaacaacaatttcttccattcaaccaactatctacactgaaccctgctgcttatttgcagcaacaactattaccattcagccagctagctactgcctactctcatcaacaacaacttcttccatttaaccaattggccgcactgaacctcgctgcttatttgcagcagcaaatattactaccatttac

SEQ ID NO: 10129 - DNA, 203 bp, Zea mays
  unsure (1)..(203): unsure at all n locations; Clone ID: LIB3061-075-Q1-K6-E11
nanatacatatgnanagtaatcgtgagggggccctcataccggcatgtgttntcctagnaaataatcaatatattgattgacatttactctcgaaaaaaaaaaaaaaaaaaaaaaaaaaaaaaaaaaaaaaaaaaaaaaaaaaaaaaaaaaaaaaaaaaaaaaaaaattaaaaaaaaaaaaggggggggggggtttaaagaac

SEQ ID NO: 10130 - DNA, 600 bp, Zea mays
  Clone ID: LIB3061-075-Q1-K6-E12
cgttgccctcgctctcctggctctcgctgggagcgccacctccacgcatacaagcggcggctgcggctgccagccaccgccgccggttcatctaccgccgccggtgcatctgccacctccggttcacctgccacctccggtgcatctcccaccgccggtccacctgccgccggcgtgcgggggccaccgccggtccatgtgccgccgccggttcatctgccgccgccaccatgccactaccctactcaaccgccccggcctcagcctcatccccagccacacccatgcccgtgccaacagccgcatccaagcccgtgccagctgcagggaacctgcggcgttggcagcaccccgatcctgggccagtgcgtcgagttcctgaggcatcagtgcagcccgacggcgacgccctactgctcgcctcagtgccagtcgttgcggcagcagtgttgccagcagctcaggcaggtggagccgcagcaccggtaccaggcgatcttcggcttggtcctccagtccatcctgcagcagcagccgcaaagcggccaggtcgcggggctgttggcggcgcagatagcgcagcaactgacggcgatgtgc

SEQ ID NO: 10131 - DNA, 589 bp, Zea mays
  unsure (1)..(589): unsure at all n locations; Clone ID: LIB3061-075-Q1-K6-E3
naaacaactagcaacatagnaagcacaatagtgtaccaacaatggcagccaaaaattttgcttccttatgctccttggtctttctgcaagtgttgctaccgcaaccattttcccacaatgctcacaagctcctatagcttcccttcttcccccatacctctcaccagcggtgtcttcaatgtgtgaaaacccaattgttcaaccctacaggatccaacaggcaatcgcaacaggcatcttaccattatcacccttgttcctccaacaaccgtcagccctattacagcagttacctttggtccatttggtggcacaaaacatcagggcacaacaactacaacaacttgtgctagcaaaccttgctgcatactctcagcaacatcagtttcttccattcaaccaactggctgcattgaactctgctgcttatttgcaacaacaattaccattcagccagctagttgctgcctacccccagcaatttcttccattcaaccaactagcagcattgaactctgctgcttatttacagcagcaacaactactaccattcagccagctagctgatgtgagccctgctgccttcttg

SEQ ID NO: 10132 - DNA, 600 bp, Zea mays
  unsure (1)..(600): unsure at all n locations; Clone ID: LIB3061-075-Q1-K6-E6
ccaactagcaacatagnaagcacaatagtgtaccaacaatggcagccaaaaattttgcctccttatgctccttggtctttctgcaagtgctgctacggcgaccattttcccgcaatgctcgcaagctcctatagcttcccttcttcccccgtacctctcaccagcggtgtcttcggtatgtgaaaacccaattcttcaaccctacaggatccaacaggcaatcacagctggcatcttacttttatcacccttgttcctccaacaatcatcagccctattacatcagttacctttggtgcatttattggcacaaaacatcagggcacaacaactacaacaacttgtgctagcaaaccttgctgcctactctcagcaacagcagtttcttccattcaaccaactagctgcattgaactctgcttcttatttgcaacaacaacaactaccattcagccagctacctgctgcctacccccagcaatttcttccattcaaccaactggcagcattgaactctcctgcttatttacagcagcaacaactactaccattcagccagctagctggtgtgagccctgctaccttcttgatacaaccaca

SEQ ID NO: 10133 - DNA, 579 bp, Zea mays
  unsure (1)..(579): unsure at all n locations; Clone ID: LIB3061-075-Q1-K6-E7
anaggatcgtcgacagaacagcatgagggagggcatcgttctcgtcgtgtgcctggctctgtcagctgccagcgcctctgcaatgcagatgccctgcccctgcgcggggctgcagggcttgtacggcgctggcgccggcctgacgacgatgatgggcgccggcgggctgtacccctacgcggagtacctgaggcagccgcagtgcagcccgctggcggcggcgccctactacgccgggtgtgggcagccgagcgccatgttccagccgctccggcaacagtgctgccagcagcagatgaggatgatggacgtgcagtccgtcgcgcagcagctgcagatgatgatgcagcttgagcgtgccgctgccgccagcagcagcctgtacgagccagctctgatgcagcagcagcagcagctgctggcagcccagggtctcaaccccatggccatgatgatggcgcagaacatgccggccatgggtggactctaccagtaccagctgcccagctaccgcaccaacccctgtggcgtctccgctgccattccgccctactactgattcatgatatttgggaaata

SEQ ID NO: 10134 - DNA, 598 bp, Zea mays
  unsure (1)..(598): unsure at all n locations; Clone ID: LIB3061-075-Q1-K6-E9
cgnaatcattccctcttcaagaggcatcatcagattgggcttattattccttattactccaggcaaggatcggagttgctctgaattgactgaaccatggcggcgacaatggcagtgacgacgatggtgaccaggagcaaggagagctggtcgtcattgcaggtcccggcggtggcattcccttggaagccacgaggcggtggcaagaccggcggcctcgagttccctcgccgggcgatgttcgccagcgtcggcctcaacgtgtgcccgggcgtcccggcggggcgcgacccgcgggagcccgatcccaaggtcgtacgggccgccgacaactgcgacatcgcgcgccagcttggcgccgccgttcccgggcagcaggccgcctgggaggcggaggaagaggcagcgaagaggaggaagcagaagggcggcggcagcaagaagcagcagcagctgggcgatctgagcctgaggaaggtcagggtcaagatcgccaacccgcacctgcggcgcctggttagcggcgccatcgccggcgccgtgtccaggacgttcgtggcgccgctggagacgatccggacgcacttgatggtcggca

SEQ ID NO: 10135 - DNA, 581 bp, Zea mays
  unsure (1)..(581): unsure at all n locations; Clone ID: LIB3061-075-Q1-K6-F1
ngaacacaccaagcgaacgcactagcggcggggggacaacaatggctaccaagatattatccctccttgcgcttcttgcgctttttgcgagcgcaacaaatgcgtccattattccacaatgctcacttgctcctagttccattattccacagttcctcccaccagttacttcaatggccttcgaacacccagctgtgcaagcctataggctacaacaagcgattgcggcgagcgtcttacaacaaccaattgcccaattgcaacaacaatccttggcacatctaacaatacaaaccatcgcaacgcaacagcaacaacagttcctaccagcactgagccacctagccatggtgaaccctgtcgcctacttgcaacagcagctgcttgcatccaacccacttgctctagcaaacgtagttgcaaaccagcaacaacaacaactgcaacagtttctgccagcgcttagtcaactagccatggtgaaccctgccgcctacctacaacagcaacaactgctttcatctagcccgctcgctgtggccaatgcacctacatacctgcaacaagaattgttgcaacaa

SEQ ID NO: 10136 - DNA, 580 bp, Zea mays
  unsure (1)..(580): unsure at all n locations; Clone ID: LIB3061-075-Q1-K6-F11
tccgctnagcaacatagnaagcacaatagtgggccagcatggcagctaaaaattttgcctccttatgctccttggtctttctgcaagtgctgctacggcgaccattttcccacaatgctcacaactcctaagcttcccttcttccccctcctctcaccaaggtgtcttcggtaggggagggcccaattcttcaaccctacaggatccaacaggcaatcgcagctggcatcttacctttatcacccttgttcctccaacaatcatcagccctattacagcagttacctttggtgcatttattggcacaaaacatcagggcacaacaactacaacaacttgtgctagcaaaccttgctgcctactctcagcaacagcagtttcttccattcaaccaactagctgcattgaactctgcttcttatttgcaacaacaacaactaccattcagccagctatctgctgcctacccccagcaatttcttccattcaaccaactgacagcattgaactctcctgcttatttacagcagcaacaactactaccattcagccagctagctggtgtgagccctgctacctt

SEQ ID NO: 10137 - DNA, 474 bp, Zea mays
  unsure (1)..(474): unsure at all n locations; Clone ID: LIB3061-075-Q1-K6-F12
caggtggcagacgtgaagatggantgttttagatngtgnggttacaatactccacgctcattctgcggaaggcgttttggctgttcgggtcccttttcctagggaggtctccgacgagaagggggtgaaatcgtcgttcaacatgatgtctcatcatgcgtgggaggtggagaagagggcggtgggccagantttgagaaggtgcatttcttgaagaaggtcagatagcattgcgaattctgtttccgtggtggacgatctttcgttattgagaggagtgatagtttgaagttttgtttcctttatcatgaactgtttgtcttgtatattggtcatatttttttgtgcctaatacattggatgcaattggcatcttgaatttcaaaaaaaaaaaaaaaaaacaaaaaaaacaactaaaaaaaaaaaaaccctctaaaaatactaaaaaaaaaaaacaacaacaaaaaataaaaa

SEQ ID NO: 10138 - DNA, 578 bp, Zea mays
  unsure (1)..(578): unsure at all n locations; Clone ID: LIB3061-075-Q1-K6-F2
tccgggnagaattactttaggttgcttgagtcaaacataaatgagcatagttctgaggaagattccggagcgtgccaaattctgtacatcacaacaatgagatagagtctgattctccacctcacgtctgtgagatagaaagtgtgaaaagcaaccaagaagggtaccaatcttcggatggtcgtgctttccccaagacaagatctgagcgaagcattgaccaatgggtatttgcaaagtcaaaatctgaagaaagcatggatcagtggtctgaaataccttcagatgtggaatccttcagagaaggtaaaaggtacctcagtagcgaggagctgagtgacgttgatagtgccaacgttgttgtcatggacaaatacatggattcactcctctctgaccggaggaaccttccctacgctagctcctcggtgcgccgggattcagtcagacgaaaacctgcttcgtccgccgattacagccgccgacctccgcagccaactccacctgcatcgctgtcaaagaaggaatcgtgggatgtcattgaagattcggagttcgatatacttgacagttagtaa

SEQ ID NO: 10139 - DNA, 454 bp, Zea mays
  unsure (1)..(454): unsure at all n locations; Clone ID: LIB3061-075-Q1-K6-F4
cgccccctcttcccccactcgctcgtgggtgggcgggcggcgngaaaccccacgcccggggtgagatccgcgcgggccctcgcctgcctcgtcaccgtcccgcgacctccgatctccacagggcggccggaggagtcggacgggcagagggagatggcggcggaggagggggccatggcggcgacgaggatgcttgcggaggggcacctgcgggtggccaccggcgggggcgcgccggcggacggcgggatcgccgtcagacacctcccgcaaccctcttacaactacaacaattgttgccctttgtccaacttgctttgacaaacccagcagcctcctaccaacaacacatcattggtggtgccctcttttagattgcttattagttgtaattcaataataaagttttttggatgatgtatgtggccaaccagaaataagaagttacatttcc

SEQ ID NO: 10140 - DNA, 570 bp, Zea mays
  unsure (1)..(570): unsure at all n locations; Clone ID: LIB3061-075-Q1-K6-F5
gtgcagtgacacagtgagctcagtaagccagccaagttcagaattcanaagnagcgagcgagcaggaggaggacaggnagtatggcgcactaccagcagggaggcggcagcaagtggacgagtacggcaacccggtccctgggggccacggtgtccagggccagcagctgggtgaagccgccggcgggtacggcgtcgcaggcaccggcagctacggcggccagcagcaggccgggtatggccccacgggcaccggcacgcatgacgccgggggctacgacggctcggaccatccgggttacggggctaccggaacgggcgtcgacgacgccggtggcccaggtgcgtatggagcagccacgggcacgagagcccacggcacgcacggcggcgtgaccgggatccaggacggcgccgccggcctcaccggtggtggtctgcatggcgcaacaggcatggggacgactaccggtactggcgcgcacggtgccaccggaatgctcgacacgggggtcttgggcggcggagggcacgcggccaccggcatgcccgccggccacggcacgcgtc

SEQ ID NO: 10141 - DNA, 574 bp, Zea mays
  unsure (1)..(574): unsure at all n locations; Clone ID: LIB3061-075-Q1-K6-F8
cagnagtatagcaccctggtatctgtgggggggcacctatttgaaagttccttataaatgaagctttggacatcattgagacagctgggggttcatttcacttggttagatgtgaagttggacaaagcacggatgatatgtcatactcagagcttgaagtaggagcagatgatactggcacattggataaaattattgattccttgacttctttagctaatgaacatggtggagatcacgatgccgggcaagaaattgaattagctctgaagataggaaaagtcaatgagtatgaaactgacgtcacaattgataaaggagggccaaagattttaattcttggagctggaagagtctgtcggccagctgctgagtttctggcatcttacccagacatatgtacctatggtgttgatgaccatgatgcagatcaaattcatgttatcgtggcatctttgtatcaaaaagatgcagaagagacagttgatggtattgaaaatacaactgctacccagcttgatgttgctgatattggaagcctttcagatcttgtttctcaggttgaggttgtaat

SEQ ID NO: 10142 - DNA, 617 bp, Zea mays
  Clone ID: LIB3061-075-Q1-K6-F9
tttgcatctagctctacttttgtgcatgggaggcctaggaaaagcatgttttgcatcatgtgcctaggagaatatgtaatgaaccttctaccatttaccatgcttgtaatacttcattcgcgcttttatgtaagaatgcaaaagtagtagctaggaaattgggatccaaatgcaagggagacaagacctgcatttgggttccaaagactattgtgactaaccttgtaggacccaacaagagttgggtacctaaaacccaagcctaatttgccttgcaggtttatgcatccgggggctcaagctggattatcgacaacggatgcacaaaccacatgacgggggagaagaagattttcacctcctacatcaagaacaaggattcctaggatacaattatctttggatatgggaaccaaggcaaggttaaaggcttgggcaagatagccatcaacaacaagcactccatttcaaacgtgtttttagtagagtcaattggttacaacctcctgtctgtaagtcaattgtgccacatgggctacaattgtttgtttacaaatattgatgtttatgtctttagaaggagtgacggttcattagcatttaagggtgtattagat

SEQ ID NO: 10143 - DNA, 585 bp, Zea mays
  unsure (1)..(585): unsure at all n locations; Clone ID: LIB3061-075-Q1-K6-G1
gnaaaaacccgnatcgacaccatgagggggggggggggtgccctcgctctcctggctctcgctgcgagcgccacctccacgcatacaagcggcggctgcggctgccagccaccgccgccggttcatctaccgccgccggtgcatctgccacctccggttcacctgccacctccggtgcatgtgccaccgccggtccacctgccgccgccggtccacctgccaccgccggtccatgtgccgccgccggttcatctgccgccgccaccatgccactaccctactcaaccgccccggcctcagcctcatccccagccacacccatgcccgtgccaacagccgcatccaagcccgtgccagctgcagggaacctgcggcgttggcagcaccccgatcctgggccagtgcgtcgagtttctgaggcatcagtgcagcccgacggcgacgccctactgctcgcctcagtgccagtcgttgcggcagcagtgttgccagcagctcaggcaggtggagccgcagcaccggtaccaggcgatcttcggcttggtcctccagtccatcctgcagcagcagccgcaaagcggccag

SEQ ID NO: 10144 - DNA, 567 bp, Zea mays
  Clone ID: LIB3061-075-Q1-K6-G10
gccgcaccggcaccgcagccacgctgggggggggctacttcgcggtctgtggcgcgacctcgttgctgttccgtgccgctgtcgttaagggacgcaccgaggaggggagcttcggcctggccttgcctggccggctgcttgtcggcgccgtgctggtgtgcgttcttgtctgtggcagtggggtgggactgctcgtgcagagtgtcttctactacgcctgcaaggccttccacagccagcagattgaccgcactgcattgtatgagcaccttggaggctaccttggggagtacgtgccactcaagagcaatatccagatggagaacctttgagagttggagcataggacaagggtaatcttctcacctctcgttgctacatactagcagttttctatggatctttctcgaaagatgactatggtttacttggagctatatatctggtcttgttgattctaatatcctgtagtagtttagtttagaatctgtacaagtgaaaatgcgcagtatggaaccaatctacgaaatggaacgtagatgcatgaacaaggttgtctttcgtctc

SEQ ID NO: 10145 - DNA, 554 bp, Zea mays
  unsure (1)..(554): unsure at all n locations; Clone ID: LIB3061-075-Q1-K6-G12
tgaaggtcagcagccggctgcacgacaccccctgcgtcgtcgtcacctccaagtacgggtggagcgccaacatgggagaagatcatgcaggcgcagacgctgtcggactcgagcaancaggcgtgcgtgggcggcaagagggtgctggagatcaaccccaggcaccccatcatcaaggagctccgcgacaaggtcgcccaggacaacgagagcgaggagctgaagcagacggcgaggctggtgtaccagacggccctgatggagagcgggttcaacctccccgaccccaaggagttcgcgtccagcatctacaagtcggtgcacaagagcctggacctgagccccnacgcggccgtggaggaggaggacgaggccgnagagcagccggaggtggaagagaaggagccggcggccaaggaggggtcggagccgtccttcnacaaggacgagctgtagtcggcgtgcgttggtctcgtcttcgggatctgttttgaagtctagctgtagctcccgtttagttgagatatcggggagctccactcactgccaggtgc

SEQ ID NO: 10146 - DNA, 614 bp, Zea mays
  unsure (1)..(614): unsure at all n locations; Clone ID: LIB3061-075-Q1-K6-G3
cacacattgaanaaccgctggtgaggggtatgggggaagaagggaagctataggagcttgtgagcattgtggngaaaacccaattgttcaaccctacaggatccaacaggcaatcgcaacaggcatcttaccattatcacccttgttcctccaacaaccgtcagccctattacagcagttacctttggtccatttggtggcacaaaacatcagggcacaacaactacaacaacttgtgctagcaaaccttgctgcatactctcagcaacatcagtttcttccattcaaccaactggctgcattgaactctgctgcttatttgcaacaacaattaccattcagccagctagttgctgcctacccccagcaatttcttccattcaaccaactagcagcattgaactctgctgcttatttacagcagcaacaactactaccattcagccagctagctgatgtgagccctgctgccttcttgacacaacaacagttgttgccgttctacctgcacgctatgcctaacgctggcaccctcttacaactgcaacaattgctgccattcaaccaacttgctttgacaaactcaacagtgttctaccaacaacccatcattg

SEQ ID NO: 10147 - DNA, 586 bp, Zea mays
  unsure (1)..(586): unsure at all n locations; Clone ID: LIB3061-075-Q1-K6-G4
ttcagnaaacacaccaagcgaacgcggtgggggcgaaccttaacaacaatggctaccaaaaattatccctccttgcgcttcttgcgctttttgcgagcgcaacaaatgcgttcattattccacaatgctcacttgctccaagttccattattacacagttcctcccaccagttacttgggggggcttcgaacacccagctgtgcaagcctataggctacaacaagcaattgcggcgagcgtcttacaacaaccaatttcccagttgcaacaacaatccttggcacatctaacaatacaaaccatcgcaacgcaacagcaacaacaattcctaccagcactgagccacctagccatggtgaaccctgccgcctacttgcaacagcagttgcttgcatcaaacccacttgctctggcaaacgtagttgcaaaccagccacaacaacagctgcaacagtttctgccagcgctcagtcaactagccatggtgaaccctgccgcctacctacaacagcaacaactgctttcatctagcccgctcgctgtggccaatgcacctacatacctgcaacaacaattgttgcaaca

SEQ ID NO: 10148 - DNA, 587 bp, Zea mays
  Clone ID: LIB3061-075-Q1-K6-G7
aaaacacaccaagcgaagcgcactagcggcggcctaacaccaatggctaccaagatttagccctccttgcgcttcttgcccttttagtgagcgcaacaaatgcgttcattattccacagtgctcacttgctcctagtgccattattccacagttcctcccaccagttacttcaatgggcgtgggaacatccagccgtgcaagcctacaggctacaactagcgcttgcggcgagcgccttacaacaaccaattgcccaattgcaacaacaatccttggcacatctaaccctacaaaccattgcaacgcaacaacaacaacaacaacagtttctgccatcactgagccacctagccgtggtgaaccctgtcacctacttgcaacagcagctgcttgcatccaacccacttgctctggcgaacgtagctgcataccagcaacaacaacagctgcaacagtttatgccagtgctcagtcaactagccatggtgaaccctgccgtctacctacaactactttcatctagcccgctcgcggtgggcaatgcacctacgtacctacaacaacagttgctgcaacaaattgtacc

SEQ ID NO: 10149 - DNA, 538 bp, Zea mays
  unsure (1)..(538): unsure at all n locations; Clone ID: LIB3061-075-Q1-K6-H2
actagcaacatcttagcaccaaggcagccaanattttgccatccttgccctccttgctctttcagcaagcgttgctaccgcgactattattccacaatgctcacaacaatacctctctccggtgacagccgcgagatttgaatacccaactatacaatcctacaggctacaagaggccatcgcagcaagcatcttacggtcgttagcattgaccgtccaacaaccatatgccctattgcaacaaccatccttaatgaatctatatctccaaagaatcgcagcacaacaactacaacaacagttgcttccaacaatcaatcaagtagttgcagcgaaccttgctgcttacctccagcaacaacaatttcttccattcaatcaactagctggggtgaaccctgctgcttacttgcaggcacaacagctactaccattcaaccaacttgtcaggagccctgctgccttcttactgcagcaacagttgcttccattccatctacaagttgtggcaaacattgctgctttcttgcaacaacaa

SEQ ID NO: 10150 - DNA, 619 bp, Zea mays
  Clone ID: LIB3061-075-Q1-K6-H3
cccagcgtccgtaaccctacaaaccaggggggcggaacaacaacaacaacaacagtttctgccatcactgagccacctagccgtggtgaaccctgtcacctacttgcaacagcagctgcttgcatccaacccacttgctctggcgaacgtagctgcataccagcaacaacaacagctgcggcagtttatgccagtgctcagtcaactagccatggtgaaccctgccgtctacctacaactactttcatctagcccgctcgcggtgggcaatgcacctacgtacctacaacaacagttgctgcaacaaattgtaccagctctgactcagctagctgtggcaaaccctgctgcctacttacaacagttgcttccattcaaccaactggctgtgtcaaactctgctgcgtacctacaacagcgacaacagttacttaatccattggcagtggctaacccattggtcgctaccttcctgcagcagcaacaacaattgctgccatacaaccagttctctttgatgaaccctgccttgcagcaacccatcgttggaggtgccatcttttagattacatatgagatgtactcgacaatggtgccctcataccgacatgtgtttcct

SEQ ID NO: 10151 - DNA, 572 bp, Zea mays
  unsure (1)..(572): unsure at all n locations; Clone ID: LIB3061-075-Q1-K6-H5
gngcccaactagcaacatagnaagcacaggaggggaccaacaatggcagctaaaaattttgcctccttatgctccttggtctttctgcaagtgctgctacggcgaccattttcccacaatgctcacaagctcctatagcttcccttcttcccccgtacctctcaccaacggtgtgtggggggtgtgaaaacccaattcttcaaccctacaggatccaacaggcaatcgcagctggcatcttacctttatcacccttgttcctccaacaatcatcagccctattacagcagttacctttggtgcatttattggcacaaaacatcagggcacaacaactacaacaacttgtgctagcaaaccttgctgcctactctcagcaacagcagtttcttccattcaaccaactagctgcattgaactctgcttcttatttgcaacaacaacaactaccattcagccagctatctgctgcctacccccagcaatttcttccattcaaccaactgacagcattgaactctcctgcttatttacagcagcaacaactactaccattcagccagctagctggt

SEQ ID NO: 10152 - DNA, 604 bp, Zea mays
  unsure (1)..(604): unsure at all n locations; Clone ID: LIB3061-075-Q1-K6-H6
nacgcccttgttgtttcaacaatcgccagccctatctttggtgcagtcattggtacaaaccatcagggcacaacagctgcagcaactcgtgctacctctgatcaaccaagtagctctggcaaacctttctccctactctcagcaacaacaatttcttccattcaaccaactgtctacactgaaccctgctgcttatttgcagcaacaactattaccatttagccagctagctactgcctactctcagcaacaacaacttcttccatttaaccaattggccgcactgaaccccgctgcttatttgcagcagcaaatactactaccatttagccagctagctgcagcaaaccgtgcttccttcttgacacagcaacagttgctgcctttctaccagcagtttgcggctaaccccgcaaccctcttacaactacaacaattgttgccctttgtccaacttgctttgacagacccagcggcctcctaccaacaacacatcattggtggtgccctcttttagattgcttattagttgtaattcaataataaagttttttggatgatgtatgtggccaaccagaaataagaagttacatttccagattct

SEQ ID NO: 10153 - DNA, 583 bp, Zea mays
  unsure (1)..(583): unsure at all n locations; Clone ID: LIB3061-075-Q1-K6-H7
gcaagcaacattanaaagtagnaatgcattgggagcgagtagacaacaatggcgaccaagatattttccctccttatgctccttgctctttctacatgtgttgctaacgcgacaattttccctcaatgctcacaagctcctatagcttcccttcttcccccataccttccatcaattgtgggggggggtgtgaaaacccagctcttcaaccatataggcttcaacaagcaatcgcagcaagcaacatacctttatcgcccttgttgtttcaacaatcaccagccctatctttggtgcagtcattggtacaaaccatcagggcacaacagctgcagcaactcgtgctacctgtgatcaaccaagtagctctggcaaacctttctccctactctcagcaacaacaatttcttccattcaaccaactgtctacactgaaccctgctgcttatttgcagcaacaactattaccatttagccagctagctactgcctactctcagcaacaacaacttcttccatttaaccaattggccgcactgaaccccgctgcttatttgcagcagcaaatactactgccatttag

SEQ ID NO: 10154 - DNA, 576 bp, Zea mays
  Clone ID: LIB3061-075-Q1-K6-H8
tggccatggctttggcgtctaaggggtgggggggcggcatggaatgccaccgccgccgagcagccaattccaaagcgtgacaaagccgctgcaaatgattcaacatacctcaatcctcaagctcatgatagtgttcttggaatcattctgggaggtggtgctgggactagattgtgcgggggggggaagaagcgtgccaagcctgcagtgccattgggtgccaactatagactgattgatattcctgtcagcaattgtctcaacagcaacatatccaagatctatgtgctaacgcaatttaactctgcttccctcaaccgtcacctctcaagagcctacgggagcaacattggagggtacaagaatgaagggtttgttgaagtcttagctgcacagcagagcccagataatccaaactggtttcagggtactgcagatgctgtaaggcagtacttgtggttgtttgaggagcataatgtgatggaatttctaattcttgctggcgatcacctgtaccggatggactatgaaaagttcattcaggcacacagagaaacaaatgctgatattaccgtt

SEQ ID NO: 10155 - DNA, 629 bp, Zea mays
  Clone ID: LIB3061-075-Q1-K6-H9
cttatctgaaatgatactgttgtggtaaactatggacaggggggtgcagggggaaggttcttgaactgaagcctgcctcaagtgtatctgtcctagagacagatgttgaagttgacatcgtgggatcagattcggttttggacaacgaagatgaccaacatgtgcttgtgcctcttgtaattggaaatatagggggggggggggtagtacctgaactttcagttgaaggaaatgtgagtgagaaagtagcttctgggcatgcaaatatcgagattaaaatagatacggacgcgagcggtggtgacactgatatctatgtttcaagacatcctttagtatttccaactcagcaccgacatgagtggtcttctcatgaaatgggatcgaaggttcttatactcaaaccacgggatgctacattggtcagtggtgtttacagtattggagtttatggtttcaaagggacttctaagtaccagctctctgtagctatcaaggatgttagtggccaaaggattggtgaatatgctagtgcctcgggaagtgttgattttgattctgtgctgtgtagaaactgtaagcgccatatagccagccagtctgctcatcttcatgaggcatactgcatg

SEQ ID NO: 10156 - DNA, 598 bp, Zea mays
  unsure (1)..(598): unsure at all n locations; Clone ID: LIB3061-076-Q1-K6-A1
caacaacaacaacaacagcaacaacaacatcaatgtgaaggccaacaacaacatcaccaacaatcacaaggccatgtgcaacaacacgaacagagccatgagcaacaccaaggacagagccatgagcaacaacatcaacaacaattccagggtcatgacaagcagcaacaaccacaacagcctcagcaatatcagcagggccagngaaaaatcacaacagcaacaatgtcattgccaggagcagcaacagactacaaggtgcagctataactactatagcagtagctcaaatctaaaaaattgtcatgaattcctaaggcagcagtgcagccctttggtaatgccttttctccaatcacgtttgatacaaccaagtagctgccaggtattgcagcaacaatgttgtcatgatcttaggcagattgagccacaatacattcaccaagcaatctacaacatggttcaatccataatccaggaggagcaacaacaacaaccatgtgagttatgtggatctcaacaagctactcaaagtgcggtggcaatcttgacagcagcacaatacctaccatcaatgtgcggcttgtaccactcatac

SEQ ID NO: 10157 - DNA, 606 bp, Zea mays
  Clone ID: LIB3061-076-Q1-K6-A10
ctacctcatcctcaactcatgggggggggggggaatcattctgggaggtggtgctgggactagattgtaccccttgacaaagaagcgtgccaagcctgcagtgccattgggtgccaactatagactgattgatattcctgtcagcaattgtctcaacagcaacatatccaaggggggtgggctaacgcaatttaactctgcttccctcaaccgtcacctctcaagagcctacgggagcaacattggagggtacaagaatgaagggtttgttgaagtcttagctgcacagcagagcccagataatccaaactggtttcagggtactgcagatgctgtaaggcagtacttgtggttgtttgaggagcataatgtgatggaatttctaattcttgctggcgatcacctgtaccggatggactatgaaaagttcattcaggcacacagagaaacaaatgctgatattaccgttgctgccctaccgatggatgagaaacgtgcaactgcatttggcctcatgaaaattgatgaagaagggaggatcattgagtttgctgagaaaccgaaaggagagcagttgaaagcaatgatggttgacaccaccatact

SEQ ID NO: 10158 - DNA, 584 bp, Zea mays
  unsure (1)..(584): unsure at all n locations; Clone ID: LIB3061-076-Q1-K6-A11
tctgncatcatttctgtatcgcacagggggggtggcaagacattgataagatttttttaaagctggagagtgaattcgaggaacaatgggccaatgaaggaatacttggatgggggaataaagggacagaaaagagtctgaaatagatctcgattactacagcacanttgaagaagggggtgggggtgggcccanaaaaattaaaacaggctttanctgctcgaggtttgaagagtggcggtactgttcaacagcgtgcagatcgtcttttcttgttgaaggttacaccgttggaacaactagataggaagcattttgccaaagttccacatactaaagatggctcaaacacagctcctaatggtaatgctttcaaggaggatatgaagaaagaaattgcattgatggaagtgaagatgaaacgtctttgtgagctgctagatgaggcctttgtaaggacaaaggaaaatgcggagaagaagcttactttgacatatgaagagatggaagcagaacgggaagaggaggaggtacaagttgacactgagagtgatgacgaagagcaacaaatctacaatcctctc

SEQ ID NO: 10159 - DNA, 625 bp, Zea mays
  unsure (1)..(625): unsure at all n locations; Clone ID: LIB3061-076-Q1-K6-A12
atggcttcgcaagctcctatgaggggggggggggggggcccccaacctaatcaccannnnttttttcttcggtatgttgaaaacccaatctcttcacaccctacagggatccaacagggcaatcacagtttggcatgcttacactttatcatcccttggttctcttcaacaatcatcacctcctattacattgggggggggggggggcgacatttattttcacaaaaacatctatttcactaacaactacagacaagcttgtggctagtcaaacctctgctggcctatctctcagtcatacagcatgtttctttctcattctaaccaactaggctgcatgtgaactctgcgttcttatttgcaacaaacaacaactacgcattctagccaggctaccgtgctgtcctacccctcagcaattgtcttccatttcaaccaacgtggctgcagttgaacttctgctgcttatttacagcatcaacatctactaccaaccagccagctagctggtgtgagccctgctaccttcttgatacaaccacagttggtgtcgttctaccagcacgctgcgcctaacgctggcacccttttacaactgcaacatttgctgcctttcaaccaactt

SEQ ID NO: 10160 - DNA, 589 bp, Zea mays
  Clone ID: LIB3061-076-Q1-K6-A2
tccgcactcatgcatcacaaacatccttctgtcagtaccatcaatcatcattcatcttagtagtataggcaccaaatcaaatctgcaacatcaattatctaactccaaaaaccatgaagctggtgcttgtggttcttgctttcattgctttagtatcaagtgtttcttgtacacagacaggcgggtgcagctgtggtcaacaacaaagccatgagcagcaacatcatccacaacaacatcatccacaaaaacaacaacatcaaccaccaccacaacatcaccagcagcagcaacaccaacaacaacaagttcacatgcaaccacaaaaacatcagcaacaacaagaagttcatgttcaacaacaacaacaacaaccgcagcaccaacaacaacaacaacaacaacagcaccaacaacaacatcaatgtgaaggccaacaacaacatcaccaacaatcacaaggccatgtgcaacaacacgaacagagccatgagcaacaccaaggacagagccatgagcaacaacatcaacaacaattccagggtcatgacaagcagcaacaaccacaacagcctcagcaatatcagca

SEQ ID NO: 10161 - DNA, 600 bp, Zea mays
  unsure (1)..(600): unsure at all n locations; Clone ID: LIB3061-076-Q1-K6-A3
cgnatacaacatccagnaaggaaagcaccctgcacttggtgctgcgcctcagaggaggcatgcagatcttcgtgaagaccctgaccggcaagactatcaccctcgaggtagagtcttcagacaccatcgacaacgtcaaggccaagatccaggacaaggagggcattcccccagaccagcagggggtcatctttgctgggaagcagcttgaggacgggcgcacgcttgccgactacaacatccagaaggagagcaccctccacttggtgctgcgcctcaggggaggcatgcagatcttcgtgaagaccctgaccggcaagactatcacccttgaggtggagtcttcagacaccatcgacaacgtcaaggccaagatccaggacaaggagggcatcccaccggaccagcagcgtttgatcttcgctggcaagcagctggaggatggccgcacccttgcggattacaacatccagaaggagagcaccctccacctggtgctccgtctcaggggtggcatgcagatctttgtgaagacactcactggcaagacaatcacccttgaggtggagtcttcggataccattgacaatgtcaaggcca

SEQ ID NO: 10162 - DNA, 593 bp, Zea mays
  unsure (1)..(593): unsure at all n locations; Clone ID: LIB3061-076-Q1-K6-A4
caactagcaacatagnaaagcacaatagtgtgccaacaatggcagccaaaaattttgcttccttatgctccttggtctttctgcaagtgctgctaccgcaaccattttcccacaatgctcacaagctcctatagcttcctttcttcccccatacctctcaccagcggtgtcttcagtatgtgaaaacccaattcttcaaccctacaggatccaacaggcaatcgcagcaggcatcttacctttatcacccttgttcctccaacaaccgtcagccctattacagcagttacctttggtgcatttgttggcacaaaacatcaaggcacaacaactacaacaacttgtgctaggaaaccttgctgcctactctcagcaacagcagtttcttccattcaaccaactggctgcattgaactctgctgcttatttgcaacaacaactaccattcagtcagctagctgctgcctacccccagcaatttcttccattcaaccaactggcagcattgaactctgctgcttatttacaacagcaacagctaccaccattcagccagctagctgatgtgagccctgttgccttcttgacacaac

SEQ ID NO: 10163 - DNA, 534 bp, Zea mays
  unsure (1)..(534): unsure at all n locations; Clone ID: LIB3061-076-Q1-K6-A5
ccggttggcttctcctccccctccggttggggggggggttcgtgaagttctccggggttcggtttcgtgggtgagcggatcgagaggcggcgtcggaagttgagtaccgctgcttcgtcggcggcctcgcctgggccacggacgaccactccctccacaacgccttcagcacctacggggaggggctcgnatccaagatcatcctcgatcgggagacgcagaggtcccgcggcttcggcttcgtcaccttctccacggaggaggcgatgcggaacgccatcgagggcatgaacggcaaggagctggacggccgcaacatcaccgtcaacgaggcccagtcccgcggcggccgtggaggcggcggcggcggcgggtacggtggtggccgtggaggcggcggctacngcggtggcgggcgccgtgatggcggcggcggctaccgcggtggcggcggctaccgtggtggcggcggcggctaccgtggtggtggcggcggctaccgcggtggcaaccgtggcggnggctacggcaact

SEQ ID NO: 10164 - DNA, 612 bp, Zea mays
  Clone ID: LIB3061-076-Q1-K6-A8
ggtccgatccggtcgcccacctcgaagggatccatagcaacaacgggggcggtggcgaccaagatattttccctccttatgctccttgctctttctgcatgtgttgctaacgcgacaattttccctcaatgctcacaagctcctatagcttcccttcttcccccataccttccatcaatgatagcttcagtgtgggagggcccagctcttcagccctataggctccaacaagcaatcgcagcaagcaacatacctttatcacccttgttgtttcaacaatcgccagccctatctttggtgcagtcattggtacaaaccatcagggcacagcagctgcagcaactcgtgctacctgtgatcaaccaagtagctctggcaaacctttctccctactctcagcaacaacaatttcttccattcaaccaactgtctacactgaaccctgctgcttatttgcagcaacaactattaccattcagccagctagctactgcctactctcagcaacaacaacttcttccatttaaccaattggccgcactgaaccccgctgcttatttgcagcagcaaatactactaccatttagccagctagctgcagcaaaccgtgct

SEQ ID NO: 10165 - DNA, 615 bp, Zea mays
  unsure (1)..(615): unsure at all n locations; Clone ID: LIB3061-076-Q1-K6-A9
agcctccganaaacacaatatgtaccaacaatgggggggggaatttttgcctccttatgctccttggtctttctgcaagtgctgctacggcgaccattttcccgcaatgctcgcaagctcctatagcttcccttcttcccccgtacctctcaccagcggtgtcttcggtatgtgaaaacccagggggggggccctacaggatccaacaggcaatcgcagctggcatcttacctttatcacccttgttcctccaacaatcatcagccctattacaacagttacctttggtgcatttattggcacaaaacatcagggcacaacaactacaacaacttgtgctagcaaaccttgctgcctactctcagcaacagcagtttcttccattcaaccaactaggttcattgaactctgcttcttatttgcaacaacaacaactaccattcagccagctacctgctgcctacccccagcaatttcttccattcaaccaactagcagcattgaactctcctgcttatttacagcagcaacaactactaccattcagccagctagctggtgtgagccctgctaccttcttgacacaaccacagttgttgccgttctaccagcacg

SEQ ID NO: 10166 - DNA, 578 bp, Zea mays
  Clone ID: LIB3061-076-Q1-K6-B1
caataccccactcaaccaccgcagctaagcccgtgccagcagttcggatcctgcggcgtcggcagcgtcggcagcccgttcctgggccagtgcgtcgagttcctgaggcaccagtgcagcccggcggcgacgccctacggctcgccacagtgccaggcgctgcagcagcagtgctgccaccagatcaggcaggtggagccgctgcaccggtaccaggcgacatacggtgtggtcctgcagtccttcctgcagcagcagccgcagggcgagctcgcggcgctgatggcggcccaggtagcgcagcagctgacggcgatgtgcggtctgcagctgcagcagccaggtccctgcccttgcaacgcagctgccggcggtgtctactactgaggaaactatgtactgtagtaataatgtaatggagccgctgactagctacctatagggctatagctagttcactcgtttagcggcgatgagtaacggagtgtcacccatcaccatgggtggcagtgtgagcaatgacctgaatgaaccattgaaatggaaaggaataatatatagggaaaaaggatgtttgg

SEQ ID NO: 10167 - DNA, 612 bp, Zea mays
  unsure (1)..(612): unsure at all n locations; Clone ID: LIB3061-076-Q1-K6-B10
naaaacccagctcttcaaccatataggctggaacaagcaatcgcagcaagcaacatacctttatcgcccttgttgtttcaacaatcaccagccctatctttggtgcagtcattggtacaaaccatcagggcacaacagctgcagcaactcgtgctacctgtgatcaaccaagtagctgtggcgggacctttctccctactctcagcaacaacaatttcttccattcaaccaactgtctacactgaaccctgctgcttatttgcagcaacaactattaccatttagccagctagctactgcctactctcagcaacaacaacttcttccatttaaccaattggccgcactgaaccccgctgcttatttgcagcagcaaatactactgccatttagcgagctagctgcagcaagtcgtgcttccttcttgacacagcaacagttgctgcctttctacaagcagtttgcggctaaccccgcaaccctcttacaactacaacaattgttgccctttgtccaacttgctttgacaaacccagcagcctcctaccaacaacacantcattggtggtgccctcttttagattgattattagttgtaattcaataataaaa

SEQ ID NO: 10168 - DNA, 595 bp, Zea mays
  unsure (1)..(595): unsure at all n locations; Clone ID: LIB3061-076-Q1-K6-B11
gcaacatanaagcacatagtgtaccagcatggcagccaaaaattttgcttccttatgctccttggtctttctgcagtgttgctaccgcaaccattttcccacaatgctcacaagctcctatagcttcccttcttcccccatacctctcaccagcggtgtcttcaatgtgtgagagcgcggttgttcaaccctacaggatccaacaggcaatcgcaacaggcatcttaccattatcacccttgttcctccaacaaccgtcagccctattacagcagttacctttggtccatttggtggcacaaaacatcagggcacaacaactacaacaacttgtgctagcaaaccttgctgcatactctcagcaacatcagtttcttccattcaaccaactggctgcattgaactctgctgcttatttgcaacaacaattaccattcagccagctagttgctgcctacccccagcaatttcttccattcaaccaactagcagcattgaactctgctgcttatttacagcagcaacaactactaccatttcagccagctagctgatgtgagccctgctgccttcttgacacaacaacagttgttgc

SEQ ID NO: 10169 - DNA, 430 bp, Zea mays
  unsure (1)..(430): unsure at all n locations; Clone ID: LIB3061-076-Q1-K6-B12
ccccgcgtccgacccccaaaaaaaaggggggggccgccggcggccaccaccatcactgccatgatcagcatcctcgcgcagagcgcctcctcgggttcgccctgggttccgtctccatcggcggcttcgtcctccaccagcgccgggccatctaccgttcaatcgctnaagccggcgggggggcctacttttaccagcctggtgaaattgccagtcgaagaagctcaactgaactggctcatgtatggaacaaggcagtggacgagacccttgggcgacttgttgtgtaccttagttcgcgtgggtggtgattcaagctccatgttgaacatggtaaccgaggaagactctttttcaagccactgatgtgctcatacttccctgtacccggattgaacatgtttttttttttaaaaaaagagatacttcc

SEQ ID NO: 10170 - DNA, 590 bp, Zea mays
  unsure (1)..(590): unsure at all n locations; Clone ID: LIB3061-076-Q1-K6-B2
tccgggcttcanaacacccaacgaacgcactacacgacctaacacatggctaccaaaaattagccctccttgcgcttcttgccctttttgtgagcgcaacaaatgcgttcattattccacaatgctcacttgctcctagtgccattattccacagttcctcccaccagttacttcaatgggcttcgaacacctagctgtgcaagccaacatgcaacaacaagcgcttgcggcgagcgtcttacaacaaccaattgcccaattgcaacaacaatccttgccacatctaacaatacaagccatcacaacgcaacagcaacaacagttcctaccagcactgagccacctagccatggtgaaccctgccgcctacttgcaagagcagctgcttgcatccaacccacttgctctggcgaacgtagttgcaaaccagcaacaacaacagctacaacagtttctgccaacgctcagtcaactagccatggtgaaccctgccgcctacgtacaacaacaacaactgctttcatctagcccgctcgctgtgggcaatgcacctacatacctgcaacaacaattgttgcaacagattgta

SEQ ID NO: 10171 - DNA, 619 bp, Zea mays
  Clone ID: LIB3061-076-Q1-K6-B3
caatagtgtaccaacaatggcagccaaaatttttgcctccttatgctccttggtctttctgcaagtgctgctacggcgaccattttcccacaatgctcacaagctcctatagcttcccttcttcccccgtacctctcaccagcggtgtcttcggtatgtgaaaacccaattcttcaaccctataggatccaacaggcaatcgcagctggcatcttacctttatcacccttgttcctccaacaatcatcagccctattacagcagttacctttggtgcatttattggcacaaaacatcagggcacaacaactacaacaacttgtgctagcaaaccttgctgcctactctcagcaacaacagtttcttccattcaaccaactagctgcattgaactctgcttcttatttgcaacaacaacaactaccattcagccagctatctgctgcctacccccagcaatttcttccattcaaccaactgacagctttgaactctcctgcttatttacagcagcaacaactactaccattcagccagctagctggtgtgagccctgctaccttcttgacacaaccacaattgttgccgttctaccagcacgctgcgcctaacgctggca

SEQ ID NO: 10172 - DNA, 597 bp, Zea mays
  Clone ID: LIB3061-076-Q1-K6-B4
aatgcgttcattattccacaatgctgcacttgctcctagtgccattattccacagttcctcccaccagttacttcaatgggcttcgaacacctagctgtgcaagccaacatgcaacaacaagcgcttgcggcgagcgtcttacaacaaccaattgcccaattgcaacaacaatccttgccacatctaacaatacaagccatcacaacgcaacagcaacaacagttcctaccagcactgagccacctagccatggtgaaccctgccgcctacttgcaagagcagctgcttgcatccaacccacttgctctggcgaacgtagttgcaaaccagcaacaacaacagctacaacagtttctgccaacgctcagtcaactagccatggtgaaccctgccgcctacgtacaacaacaacaactgctttcatctagcccgctcgctgtgggcaatgcacctacatacctgcaacaacaattgttgcaacagattgtaccagctctgactcaactagctgtggcaaaccctgttgcctacttgcaacagctgcttccattcaaccaactgactctgtcgaactctgctgcgtacctacaacagcg

SEQ ID NO: 10173 - DNA, 515 bp, Zea mays
  unsure (1)..(515): unsure at all n locations; Clone ID: LIB3061-076-Q1-K6-B5
acagnaaaatcttgtggctacagatttagggggcaggggcattgacattgagcgtgtcaacattgtgataaactatgacatgccagactcagctgatacttatttgcacagggttggaagggctggacgttttggcacgaagggacttgcaatcacctttgtttcctctgcttcggggggtgatgttcttaaccaggtgcaagaaaggtttgaggtagacataaaggaactgcctgagcaaattgacacctcgacctacatgccatcataaatgggaaggacaactgagaagagaggaggataggggagtgagcagccgtctggagatggttacctttgaactatccgatctggaggatttgatttgcctcctttgtgtactttaaaaagggcagccaggatgatgatctgtattttaagacaatgctgtctgtttgggtttaggattttgctttgtcgaaaactagcacacttattgtactactgagcagcatatttgttttcatccctgggtt

SEQ ID NO: 10174 - DNA, 352 bp, Zea mays
  Clone ID: LIB3061-076-Q1-K6-B7
caacttcttccatttaaccaattggccgcactgaacctcgctgcttatttgcagcagcaaatattactaccatttagccagctagctgcagcaagccgtgcttccttcttgacacagcaacagttgctgcctttctaccagcagtttgcggctaaccccgcaaccctcttacaactacgacaggtgggtgccctttgtccaacttgctttgacaaacccagcagcctcctaccaacaacacatcattggtggtgccctcttttagattgcttattagttgtaattcaataataaagttttttggatgatgtatgtggccaaccagaaataagaagttacatttccagattct

SEQ ID NO: 10175 - DNA, 580 bp, Zea mays
  Clone ID: LIB3061-076-Q1-K6-B9
atcttctcgtggcgcgtctcgccgcgtgaagacatgagggcgctgggggagagtacggcaagaacgcgcgcctgagggagctggcgaacctcgtgatcgtcgccggtgaccacggcaaggagtccaaggacagggaggagcaggcggagttcaagaagatgtacagcctcatcgacgagtacaagttgagggggggtatccggtggatctcggcgcagatgaaccgcgtccgcaacggggagctgtaccgctacatttgcgataccaagggcgcattcgtgcagcctgcgttctacgaagcgttcggcctgactgtgatcgagtccatgacgtgcggtctgccaacgatcgcgacctgccatggtggccctgctgagatcatcgtggacggggtatctggcctgcacattgacccttaccacagcgacaaggccgcggatatcctggtcaacttctttgacaaatgcaaggcagatccgagctactgggacaagatctcacagggcggcctgcagagaatttatgagaagtacacctggaagctctactccgagaggctgatgaccctgaccggcgtgta

SEQ ID NO: 10176 - DNA, 600 bp, Zea mays
  unsure (1)..(600): unsure at all n locations; Clone ID: LIB3061-076-Q1-K6-C10
caactagcaacatagnaaagcacaatagtgtaccaacaatggcagccaaaaattttgcctccttatgctccttggtatttctgcaagtgctgctacggcgaccattttcccgcaatgctcacaagctcctatagcttcccttcttcccccgtacctctcaccagcggtgtcttcggtgtgtgaaaacccaattcttcaaccctacaggatccaacaggcaatcgcagctggcatcttacctttatcacccttgttcctccaacaatcatcagccctattacagcagttacctttggtgcatttattggcacaaaacatcagggcacaacaactacaacaacttgtgctagcaaaccttgctgcctactctcagcaacagcagtttcttccattcaaccaactagctgcattgaactctgcttcttatttgcaacaacaacaactaccattcagccagctacctgttgcctacccccaacaatttcttccattcaaccaactggcagcattgaactctcctgcttatttacagcagcaacaactactaccattcagccagctagctggtgtgagccctgctaccttcttgacacaaccaca

SEQ ID NO: 10177 - DNA, 612 bp, Zea mays
  unsure (1)..(612): unsure at all n locations; Clone ID: LIB3061-076-Q1-K6-C11
cggtccgnattccgggttccaccgccccagtgcagnatctttcgtcatctcttgtggcggcgaanaacccccagtcgcccaccanacacttgttaaactttgttgaggggtgatggcggtttcttnntcgcaaacctcaacttccgnaggcaggggctttaaaaagcttgatgagtaccttctcactcgcagctacatcactggctaccaagctggcaggatgacttggctgtctacacttcgttttcggctgctccctcgtccaagtatatcaacgtagcaaggtggtttaaccacattgatgcgctcgtgaggctgagcggaattactgcagagggccaaggtgtgaaggttgaatcctcagcagttccttcagccccaactccagatgttgctgaagcacaggccccagttgctgaggaggacgacgacgatgatgttgacctttttggtgaggagaccgaagatgagaagaaggctgctgaagagcgtgctgcagctgccaaggcttctggcaagaagaaagaatctgggaagtcatcagttttacttgatgtgaagccatgggacgatgagactgacatggccaagctcgaggaagctgttaggagt

SEQ ID NO: 10178 - DNA, 595 bp, Zea mays
  unsure (1)..(595): unsure at all n locations; Clone ID: LIB3061-076-Q1-K6-C2
cccggngtcgacccacgccgtccgatagnaaagcacaatagtgtaccaacaatggcagccaaaatttttgcttccttatgctccttggtctttctgcaagtgttgctaccganaccattttcccacaatgctcacaagctcctatagcttcccttcttcccccatacctctcaccagcggtgtcttcaatgtgtgaaaccccaattgttcaaccctacaggatccaacaggcaatcgcaacaggcatcttaccattatcacccttgttcctccaacaaccgtcagccctattacagcagttacctttggtccatttggtggcacaaaacatcagggcacaacaactacaacaacttgtgctagcaaaccttgctgcatactctcagcaacatcagtttcttccattcaaccaactggctgcattgaactctgctgcttatttgcaacaacaattaccattcagccagctagttgctgcctacccccagcaatttcttccattcaaccaactagcagcattgaactctgctgcttatttacagcagcaacaactactaccattcagccagctagctgatgtgagccctgctgcctt

SEQ ID NO: 10179 - DNA, 633 bp, Zea mays
  unsure (1)..(633): unsure at all n locations; Clone ID: LIB3061-076-Q1-K6-C3
cccgggtcgncnccaacgcgtccgnanaaagcacaatattgtaccaataatggcagccaaaatttttgcctcattatgctccttggtctttctgcaagtgctgctacggcgagcattttcccgcaatgctcacaagctcctatagcttcccttcttcccccatacctctcaccagcgatgtcttcagtatgtgaaaatccaattcttctaccctacaggatccaacaggcaatcgcagcaggcatcttacctttatcacccttgttcctccaacaatcatcagccctattacagcagttacctttggtgcatttattggcacaaaacatcagggcacaacaactacaacaactcgtgctagcaaaccttgctgcctactctcagcaacagcagttacctttggtgcatttgttggcacaaaacatcagggcacaacaactacaacaactcgtgctagcaaaccttgctgcctactctcagcaacaacagtttctgccattcaaccaactagctgcattgaactctgctgcttatttgcagcaacaacaactactaccattcagccagctagctgctgcctacccccggcaatttcttccattcaaccaactggcagcattgaactctcatgct

SEQ ID NO: 10180 - DNA, 280 bp, Zea mays
  unsure (1)..(280): unsure at all n locations; Clone ID: LIB3061-076-Q1-K6-C4
canaaaaggcatcggatttcctgggtaactacatcttcctggctgttggaagagttgggtcaagtactgatttgattgcccagcgagttgagtttgtgcaggaggcagataaaagaagccacctgatggatcttcttcatgcacaaagagatacagngaaagcaaactctcacgcttgtctgttgtggaaaccaagaggggncgctgattcattggaaagctggttgtgcatgaatgggtttccagctacttctattcatggagatagaaaccagcagga

SEQ ID NO: 10181 - DNA, 575 bp, Zea mays
  unsure (1)..(575): unsure at all n locations; Clone ID: LIB3061-076-Q1-K6-C5
gcccaactagcaacatagnaagcacaataggggaccaacaatggcagccaaaatttttgcctccttatgctccttggtctttctgcaagtgctgctacggcgaccattttcccgcaatgctcgcaagctcctatagcttcccttcttcccccgtacctctcaccagcggtgtctggggggtgtgaaaacccaattcttcaaccctacaggatccaacaggcaatcacagctggcatcttacctttatcacccttgttcctccaacaatcatcagccctattacatcagttacctttggtgcatttattggcacaaaacatcagggcacaacaactacaacaacttgtgctagcaaaccttgctgcctactctcagcaacagcagtttcttccattcaaccaactagctgcattgaactctgcttcttatttgcaacaacaacaactaccattcagccagctacctgctgcctacccccagcaatttcttccattcaaccaactggcagcattgaactctcctgcttatttacagcagcaacaactactaccattcagccagctagctggtgtgag

SEQ ID NO: 10182 - DNA, 237 bp, Zea mays
  unsure (1)..(237): unsure at all n locations; Clone ID: LIB3061-076-Q1-K6-C7
naaaaaaaaaaaaaaaaaaaaaaaaagagggggggggaaaaaaaaaaaaaaaaaaaaaaaaaaaaaaaaaaaaaaaaaaaaaaaaaaaaaaaaaaaaaaaaaaaaaaaaaagggggacccgctcaaaaaaaaccaaaactaaacgaacccggccagggaaacccaaaacccttccccatagtccccccgggggggggggggggggaacccccttctcaaaacccaggggaacgggga

SEQ ID NO: 10183 - DNA, 578 bp, Zea mays
  unsure (1)..(578): unsure at all n locations; Clone ID: LIB3061-076-Q1-K6-C8
gtcagcctagcattagctcatcggctggcggagggggnactcgacaccatgaagtgctgatcgttgcccttgctctcctggcgctcgctgcgagcgccgcctccagtacaagcggcggctgtggctgccagacaccaccgtttcatctaccgcctccgttctatatgccgcctccgggctatctgccgccgcagcagcagccgcagccatggcaataccccactcaaccaccgcagctaagcccgtgccagcagttcggatcctgcggcgtcggcagcgtcggcagcccgttcctgggccagtgcgtcgagttcctgaggcaccagtgcagcccggcggcgacgccctacggctcgccacagtgccaggcgctgcagcagcagtgctgccaccagatcaggcaggtggagccgctgcaccggtaccaggcgacatacggtgtggtcctgcagtccttcctgcagcagcagccgcagggcgagctcgcggcgctgatggcggcccaggtagcgcagcagctgacggcgatgtgcggcctgcagctgcagcagccaggtccctgcccttgcaacgcagct

SEQ ID NO: 10184 - DNA, 299 bp, Zea mays
  unsure (1)..(299): unsure at all n locations; Clone ID: LIB3061-076-Q1-K6-C9
cgttgcccttgctctcctggcgctcgctgccagcgccccctccannacaacccacggctgtggctgccaaacaccacccattcatctaccacctccnntctatataccaccttggggggggtgcccccncancatcanccccanccatcccaataccccactcaaccaccgcacctaaccccgtgccaccaaatcgcatcctgcngcatccgcagcgncagcagcccgnncctcggccagngcgccnactctcctcagcaccaccgcaacccnncggccacgccctacggctccccaca

SEQ ID NO: 10185 - DNA, 612 bp, Zea mays
  unsure (1)..(612): unsure at all n locations; Clone ID: LIB3061-076-Q1-K6-D1
cccggngcaaatcccccgtacccaccacgtacgttttttaagagcaccacttacgatctccttcgccaaccgcgccgctctctctctctctctcgcacgagccgcgccggcgccgccaccacgcgcgcgggagacagagaccacagccgcagccaccggcgggcggaataggaatggtggcgccggggggaggagcaggaggaggtccgtcgcggtggccggcggcggaggagcttgacactgtacggaagaaggtggtggagattagtggaagggatgaacaagaggttatggttgctgcttgcccctacagaatttgccctttgggggctcatattgatcatcagggtggagtagtcacagctatgaccataaattatggagtactccttggtttcgttccctctaatggttctgaggttttacttcattctggtcagtttgaaggtgctataagattcagagttgatgacttgcaaaagcctattgataaacctgagaacataaactggggaagttatgcaaaaggtgctgttagtgcactgcagaatagtggatatgatctaaggaagggtatcataggatatatttctggtgtgaaaggtcttgata

SEQ ID NO: 10186 - DNA, 589 bp, Zea mays
  unsure (1)..(589): unsure at all n locations; Clone ID: LIB3061-076-Q1-K6-D11
ggggaaactttcacatacttacacgtgcgggacttgataaaggtctcacttagtcttttggcatgggtttgacacaatgcttcggccttgtttagtaattcgtcttgggcttgcatgctccagcataccaccttgtgatagaccccattttgggcaagcagtagtttctcaaatgggggggggggttgtaaatttgaccaacggnaaaagattcaagaattaccgttttgctggattgccatgggatttccccattcagatttccaatgcaaatgatgaggtcatttgtcactgtagctcaagaaaactacccaaatcgtcttggactattgtttgttgtccgccttcgtccagttgttagagttattgcacagacatttcttcaagttttgaaaccatctacaaagcagaagttacgttttgagggagattcatacaagaagacgttggcggagttcttgcaggccgtgccagcgtttctgggcggtaaatgcagctgcccacgatgcgagaagcctcgtaatagttcagtggtgcaggcaggggaagggagcaagaaccagcctcgcttggtcagcgttgataccgg

SEQ ID NO: 10187 - DNA, 611 bp, Zea mays
  unsure (1)..(611): unsure at all n locations; Clone ID: LIB3061-076-Q1-K6-D12
tcctcactccctaatagccgacggtggctgggggaggtcggntgaggaatcctcgatganaagcccatatttatcgagtcacaggcgccagctccagctccagagcccatccctgtaaaattgcctgcaaaacaagccaaggaagtgcctgctccccaggcagatgatgctcccaggggggaggtccttcgaaaggacctgtcaagtcgcacaaggcaaaagctgctcttgatgctgatgatgattatgaggccgagcccctgaaggagaaggcaaagcctacggaggctgatgtggctaagttgaaagagatcaagaggcaggaggagattgagaagaacaagcttgcattggagaggaagaagaagcaggctgagaagcaagcagcaaaagccgcggcccgggcacagaaggaagctgagaagaagctgaagaaagaggagaagaaagccaagaagaaatctggcgcagctgacactgatgagccctcagaatcggacgccaagtctgatgaagccatggaagccccagtggagcaggaagtggccccagcttccaccatggtaaagaaggaacagaaggagagtgcccggcacaggaacgtggtcagc

SEQ ID NO: 10188 - DNA, 605 bp, Zea mays
  unsure (1)..(605): unsure at all n locations; Clone ID: LIB3061-076-Q1-K6-D3
gggttggcttcanaaccacnacgaacgcactacacgacctaacacatggctaccaanaattatccctctttgcgcttcttgccctttttgtgagcgcaacaaatgcgttcattattccacaatgctcacttgctcctagtgccattattccacagttcctccctccattacttcaagggcttcgaacacccagctgtgcaagcctacaggctacaacaagcgcttgcggcgagcgtcttacaacaaccaattgcccaattacaacaacaatccttggcacatctaaccatacaaaccatcgcaacgcaacagcaacaacaatttctaccagcactgagccaactagctgtggtgaaccctgtcgcctacttgcaacagcagttgcttgcatccaacccacttgctctggcaaacatagttgcataccaacaacaacaacaattgcaacagtttctaccagcgctcagtcaactagccatggtgaaccctgccgcctacctacaacagcaacaactgatttcatctagccctctcgctgtggttaatgcacctacatacctgcaacaacagttgctgcaacagattgtaccagctctgactcagct

SEQ ID NO: 10189 - DNA, 155 bp, Zea mays
  unsure (1)..(155): unsure at all n locations; Clone ID: LIB3061-076-Q1-K6-D4
gcagttacctttggtccatttggtnncagaaacatgagggcacaacaactacaacaacttgtgctagcaaaccttgctgcatactctcagcaacatcagtttcttccattcaaccaactggctgcattgaactctgctgncttattnntgcaaca

SEQ ID NO: 10190 - DNA, 577 bp, Zea mays
  unsure (1)..(577): unsure at all n locations; Clone ID: LIB3061-076-Q1-K6-D5
ggaacgcagcacatanaaagtgagtccattagcaacaatagagcaacaatggcgaccaagatattttccctccttatgctccttgctctttctacatgtgttgctaacgcgacaattttccctcaatgctcacaagctcctatagcttcccttcttcccccataccttccatgaatgatagcttcagtatgtgaaaacccagctcttcaaccatataggcttcaacaagcaatcgcagcaagcaacatacctttatcgcccttgttgtttcaacaatcaccagccctatctttggtgcagtcattggtacaaaccatcagggcacaacagctgcagcaactcgtgctacctgtgatcaaccaagtagctctggcaaacctttctccctactctcagcaacaacaatttcttccattcaaccaactgtctacactgaaccctgctgcttatttgcagcaacaactattaccatttagccagctagctactgcctactctcagcaacaacaacttcttccatttaaccaattggccgcactgaaccccgctgcttatttgcagcagcaaatactactga

SEQ ID NO: 10191 - DNA, 600 bp, Zea mays
  unsure (1)..(600): unsure at all n locations; Clone ID: LIB3061-076-Q1-K6-D6
ccggcaacanagnaaagcacaatagtgtaccaacatggcagccaaaatttttgcctccttatgctccttggtatttctgcaagtgctgctacggcgaccattttcccgcaatgctcacaagctcctatagcttcccttcttcccccgtacctctcaccagcggtgtcttcggtatgtgaaaacccaattcttcaaccctacaggatccaacaggcaatcgcagctggcatcttacctttatcacccttgttcctccaacaatcatcagccctattacagcagttacctttggtgcatttattggcacaaaacatcagggcacaacaactacaacaacttgtgctagcaaaccttgctgcctactctcagcaacagcagtttcttccattcaaccaactagctgcattgaactctgcttcttatttgcaacaacaacaactaccattcagccagctacctgttgcctacccccaacaatttcttccattcaaccaacttgctttgacaaacctagcagtgttctaccaacaacccatcattggtggtgccctcttttagatttcttatgagttatagttcaataataaagttttttgtctg

SEQ ID NO: 10192 - DNA, 267 bp, Zea mays
  unsure (1)..(267): unsure at all n locations; Clone ID: LIB3061-076-Q1-K6-D9
gcacggctgcaccccaggctgttaactgccgcgaggaanaagtgtggccacagcaaccagctgagggcaaagaagaagatcaagaactgaagcttgccaaatcggttccttgcatggtttgcgtcaacaagacgaagtttcaaagcttttgtagctgcataggctgctgcaacgtttttcagtggtaactcgtgtgttcctgttcagggtcttcagcatgacataaatcgtttcagaagtctagtaatattattactatntggtgtc

SEQ ID NO: 10193 - DNA, 593 bp, Zea mays
  unsure (1)..(593): unsure at all n locations; Clone ID: LIB3061-076-Q1-K6-E1
gcccaactagcaacatagnaagcacaatagtgtaccaacaatggcagccaaaatattttgcttccttatgctccttggtctttctgcaagtgttgctaccgcaaccattttcccacaatgctcacaagctcctatagcttcccttcttcccccatacctctcaccagcggtgtcttcaatgtgtgaaaacccaattgttcaaccctacaggatccaacaggcaatcgcaacaggcatcttaccattatcacccttgttcctccaacaaccgtcagccctattacagcagttacctttggtccatttggtggcacaaaacatcagggcacaacaactacaacaacttgtgctagcaaaccttgctgcatactctcagcaacatcagtttcttccattcaaccaactggctgcattgaactctgctgcttatttgcaacaacaattaccattcagccagctagttgctgcctacccccagcaatttcttccattcaaccaactagcagcattgaactctgctgcttatttacagcagcaacaactactaccattcagccagctagctgatgtgagccctgctgccttcttgacac

SEQ ID NO: 10194 - DNA, 620 bp, Zea mays
  Clone ID: LIB3061-076-Q1-K6-E10
tattgtttaacatagcccaggcgatttactgcaaggcagcaggggtgagtggtttacagaacatctttgcatcatttgtcatgcagtaatagttcaagggttcctgagcagttgtggctgttgcagatcatcctgattacacattactgattctttcaatgaaccattatgacatcatttttcgctacacattgttaggcaactcttgaggtaggaaggtgcatgacctctcccgcaacgagccatttgtcttgtgtggacaatggtaaaggttttaggggcttactcaaaccactccctttgtttgcattggcactgatacaagaaacatgacactgacattcttgtcatgttcattgcacatactgtctgataaggacaaatatgtaaccgatgtgtccctgcatgtagctactaccataacctggttaatggttatattgctagcttgattatgggttaatgagctggaggactttgcacctgccatgaccttactgtgctcattgctgaccaattccttgtgttacatttcaaaattattactaaaactcacaccggtgagtattttgccacaatattttgtacctcaacattcttactggaagtttgttctgttc

SEQ ID NO: 10195 - DNA, 610 bp, Zea mays
  unsure (1)..(610): unsure at all n locations; Clone ID: LIB3061-076-Q1-K6-E12
gtgaggttctccggggttcggtttcgggggggggcggatcgagatggcggcgtcggatgttgagtaccgctgcttcgtcggcggcctcgcctgggccacggacgaccactccctccacaacgccttcagcacctacggcgaggtcctcgagtccaagatcatcctcnatcgggagagtcagannggccgcggcttcggcttcgtcaccttctccacggaggaggcgatgcggaacgccatcgagggcatgaacggcaaggagctggacggccgcaacatcaccgtcaacgaggcccagtcccgcggcggccgtggaggcggcggcggcggctacggtggtggccgtggaggcggcggctacggcggtggcgggcgccgtgatggcggcggcggctacggcggtggcggcggcggctacggtggcggcggtggctacggtggtggtggtggcggctacggcggtggcaaccgtggcggcggctacggcaactccgacgggaactggaggaactgagcggtggggcccgcgcggccaagttatcctgttcgctaccgtgatgtttaccctagtccagagggtttatcttcgttcgtctcgtttgttgttgcc

SEQ ID NO: 10196 - DNA, 582 bp, Zea mays
  unsure (1)..(582): unsure at all n locations; Clone ID: LIB3061-076-Q1-K6-E2
caactagcaacatagnaaagcacaatagtgtaccaacaatggcagctaaaaattttgcctccttatgctccttggtctttctgcaagtgctgctacggcgaccattttcccacaatgctcacaagctcctatagcttcccttcttcccccgtacctctcaccaacggtgtcttcggtatgtgaaaacccaattcttcaaccctacaggatccaacaggcaatcgcagctggcatcttacctttatcacccttgttcctccaacaatcatcagccctattacagcagttacctttggtgcatttattggcacaaaacatcagggcacaacaactacaacaacttgtgctagcaaaccttgctgcctactctcagcaacagcagtttcttccattcaaccaactagctgcattgaactctgcttcttatttgcaacaacaacaactaccattcagccagctatctgctgcctacccccagcaatttcttccattcaaccaactgacagcattgaactctcctgcttatttacagcagcaacaactactacncattcagccagctagctggtgtgagccctgcta

SEQ ID NO: 10197 - DNA, 616 bp, Zea mays
  unsure (1)..(616): unsure at all n locations; Clone ID: LIB3061-076-Q1-K6-E3
cgcctctacattcttctctctctgctcctccgcctccgcctggaccatccaagacaggnatcgccatgtcggactcggaggagcaccacttcgaatcgaaggccgacgctggggcgtccaagacctacccgcagcaggctggcaccgtccgtaagaacggcttcatcgtcatcaagaaccgtccctgcaaggttgtggaggtttctacctccaagactggtaagcatggccacgccaaatgccactttgtcgccatagacatattcaatgggaaaaagcttgaagatattgttccttcatcacacaactgtgacattccgcatgtgaaccgtactgagtatcagctgattgatatttctgaggatggatttgtgagccttcttacttcagatggcaacactaaggatgatcttagactcccaactgatgagactcttgtggcccagattaaggaagggttcgaaagcgggaaggatcttgttgtgactgtccagtctgcgatgggggaggagcagatctgcgcgttgaaggatgttggccccaagtaacttccttggctttggagacggaaccctactgtatctcaacttaaatcggaaaagaagtgtatcaccaa

SEQ ID NO: 10198 - DNA, 345 bp, Zea mays
  unsure (1)..(345): unsure at all n locations; Clone ID: LIB3061-076-Q1-K6-E4
ccccccccnnccccccccccccgcccggcccccnnccccccnccncccccccccgccccccccccnnccccccccccccccccccccccccccnccccccccccccccccccncccccccccccgcccccccccnccccncncccccccccccccccccccccccccnccnccccccccccccccccccccccncccccccccccccccccccccccccccccnccccggccccccccccccccccccccncccngcccccccccccccccccccccccccccccccccccccccccccccccncccccccccccccccccccccccccccccccccccacacac

SEQ ID NO: 10199 - DNA, 517 bp, Zea mays
  Clone ID: LIB3061-076-Q1-K6-E7
ctggcagccttccgagctcgcttgtgcatgggggccagacacctcggacagcgggtcactggccagcggtgcccgtggccccccacccggtgcggcacgcagcagcacgagaggggccgggagtgtcgaggtcaggcccctacctgctctcaaggagaacgtgaagcgtgtcatgttttactgctgagacgctggtgggctgccttcgccaaggggaatgtcctggagcattcccatgtacccgcactgtttcggtgatacagtactatctaacgccgattttgcgcgttaagacttccagtgatttgggaaatttcttgtacgactgttgtagtgttgtgtattcgtaatgtgatgacgcggcagttcttctaggagcttagtgccgtgtaaagtatttgttgtaagttgtaactaaccagtcaccccctactgttagtcatgatgaaccaaattgtatgtgtgaggcattgactgtccgatggttatgacagctagttccttgagtagttccgtt

SEQ ID NO: 10200 - DNA, 575 bp, Zea mays
  unsure (1)..(575): unsure at all n locations; Clone ID: LIB3061-076-Q1-K6-E8
gtgngaatacagtagcaacaatagagcacggtggcggccaagaattttccatccttatgctccttgctctttctgcatgtgttgctaacgcgaccatttttcctcaatactcacaagctcctatagctgcccttcttcccccataccttccatcaatgaccgcttcagtttgtgaaaacgcagcccttcaaccctacaggctccaacaagcaatcgcaacaagcaacttacctttatcacccctgttctttcaacaatcgccagccctatctttggtgcagtcattggtacaaaccatcagggcacaacagctgcaacaactcgtgctaccagtgatcagccaagtagctctggcaaacctttctccctactctcagcaacaacaatttcttccattcaaccaactgtctacactgaaccctgctgcttatttacaacaacaacaactactaccattcagccagctagctactgcctactctcagcagcaacaatttcttccatttaaccaattggccgcactgaacccctctgcttatttccagcagcaaatactactaccatttggccagcta

SEQ ID NO: 10201 - DNA, 590 bp, Zea mays
  Clone ID: LIB3061-076-Q1-K6-E9
acaatagtgtaccaacatggcagccaaaatttttgcttccttatgctccttggtctttctgcagtgctgctaccgcaaccattttcccacaatgctcacaagctcctatagcttcctttcttcccccatacctctcaccagcggtgtcttcagtatgtggaaaacccaattcttcaaccctacaggatccaacaggcaatcgcagcaggcatcttacctttatcacccttgttcctccaacaaccgtcagccctattacagcagttacctttggtgcatttgttggcacaaaacatcaaggcacaacaactacaacaacttgtgctaggaaaccttgctgcctactctcagcaacagcagtttcttccattcaaccaactggctgcattgaactctgctgcttatttgcaacaacaactaccattcagtcagctagctgctgcctacccccagcaatttcttccattcaaccaactggcagcattgaactctgctgcttatttacaacagcaacagctaccaccattcagccagctagctgatgtgagccctgttgccttcttgaccaacaacagttgttgccgttctac

SEQ ID NO: 10202 - DNA, 620 bp, Zea mays
  unsure (1)..(620): unsure at all n locations; Clone ID: LIB3061-076-Q1-K6-F1
caacaagcaacaagnaagtgggatacagtagcaacaatagagcaacagtggcggccaagatattttccatccttatgctccttgctctttctgcatgtgttgctaacgcgaccatttttcctcaatactcacaagctcctatagctgcccttcttcccccataccttccatcaatgaccgcttcagtttgtgaaaacccagcccttcaaccctacaggctccaacaagcaatcgcaacaagcaacttacctttatcacccctgttctttcaacaatcgccagccctatctttggtgcagtcattggtacaaaccatcagggcacaacagctgcaacaactcgtgctaccagtgatcagccaagtagctctggcaaacctttctccctactctcagcaacaacaatttcttccattcaaccaactgtctacactgaaccctgctgcttatttacaacaacaacaactactaccattcagccagctagctactgcctactctcagcagcaacaatttcttccatttaaccaattggccgcactgaacccctctgcttatttccagcagcaaatactactaccatttggccagctagctacaacaagccccacttcctttttg

SEQ ID NO: 10203 - DNA, 489 bp, Zea mays
  unsure (1)..(489): unsure at all n locations; Clone ID: LIB3061-076-Q1-K6-F10
agcgtccggcaacaagcagattacctgcccagggatcgatcgtcaatggtccggcagttcgcgacaccatgagctccaggagtgcggcggcggcggcggcggcgccaagacgtcgtggcctgaggtggtcgggctgagcgtggaggacgccaagaaggtgatcctcaaggacaagcggggcggcgagggggtggtgctgcccgtcggctccgtggtgaccgcggattatcgccctaaccgtgtccgcatcttcgtcgacatcgtcgcccagacgccccacatcggctgataatatataagctagccgctatttcctttccttgccccagaacttgaaataaatatatatacgatgaaataacgcgggcatgccgaataatggatgtgtgaattctcactaattaagtaatgcataaataancgtnnaanaaaaaaaaaaaaaaanaaaaanaaananaaaaaaaaaaaaanaaaaannaaaaanaaaaa

SEQ ID NO: 10204 - DNA, 587 bp, Zea mays
  Clone ID: LIB3061-076-Q1-K6-F12
cactagcaaaaacatagtgaggggcgcgggcggcatcttagcaccaatgggagccaagattttttccctccttgccctccttgctctttcagcaagcgctgctacctctactattattccacaatgctcacaacaatacctctctccggtgacagccgcgggatttcaacaccgggcttgcagggctacatgctacatgaggccatcgtagcaagcatcttacggtcattagcattaaccctccaacagccatatgccctattgcaacaaccatccttagtgcatctgtatctccaaagaatcgcgacacaacaactacaacaacagttgctaccaacaatcaatcaagtagttgcagcgaaccttgctgcttatctccagcaacaacaatttcttccattcaatcaactagctggggtgaaccctgctgtctacttgcaggcacaacaactactaccatttaaccaacttgtcgggagccctgatgccttcttactgcaacaacagcttctgccattccatctgcaagctgtggaaaacattgcttctttcttgcgacaacaacaattgttgccattttacccaca

SEQ ID NO: 10205 - DNA, 553 bp, Zea mays
  Clone ID: LIB3061-076-Q1-K6-F2
ccattctccaaaccatcttcgtcaccatgccgatcccagccccagacccgatgcagcaacagcaggacccagcacccgccgatcccgacccactggcgccccccgacctcggtgatgccgccgcctcgtccgcaacgcagacgatcccttcccgcaacgcctcctccaagtacgatttcgtcaaggtcaaggtctggctcggggagaacgccgaccactactacgtcctctccaggttcctcctcagcaggatgctcacagtcaccaagattcctaatcatgtcgccatcaagattgcccttgagctcaagaagctgcttgtcgacaacagcctgcttgatgtatcccagagtgatctagaggctaatctgttcaagcttatggaaaaacggggatacggagaggagtatataaatcgctataaaatgatgacaaggttccatcatcaacgggttccactagtaattttggtgtgtggaactgcctgtactggaaaatcaacaatcgctacacaacttgctcagaggctcaatttgcctaatgttttgcagac

SEQ ID NO: 10206 - DNA, 590 bp, Zea mays
  unsure (1)..(590): unsure at all n locations; Clone ID: LIB3061-076-Q1-K6-F3
tagcaacatagnaaagccaatagtgtaccaacaatggcagccaaaatattttgcctccttatgctccttggtctttctgcaagtgctgctacggcgaccattttcccgcaatgctcgcaagctcctatagcttcccttcttcccccgtacctctcaccagcggtgtcttcggtatgtgaaaacccaattcttcaaccctacaggatccaacaggcaatcgcagctggcatcttacctttatcacccttgttcctccaacaatcatcagccctattacaacagttacctttggtgcatttattggcacaaaacatcagggcacaacaactacaacaacttgtgctagcaaaccttgctgcctactctcagcaacagcagtttcttccattcaaccaactaggttcattgaactctgcttcttatttgcaacaacaacaactaccattcagccagctacctgctgcctacccccagcaatttcttccattcaaccaactagcagcattgaactctcctgcttatttacagcagcaacaactactaccattcagnccagctagctggtgtgagccctgctaccttcttgacac

SEQ ID NO: 10207 - DNA, 206 bp, Zea mays
  unsure (1)..(206): unsure at all n locations; Clone ID: LIB3061-076-Q1-K6-F4
ngaattgcaccagnaaatccatcgaggggccgtgcgacaggggaattaatggcgtcgtcgtctagcagcagccaccgccgcctcatcctcgcagccgccgtcctgctctccgtgctcgcggctgccagcgccagcgccgggacctcctgcgtgccggggtggngccatcccgcacaacccggtggccgagctgccgctgngtacgt

SEQ ID NO: 10208 - DNA, 541 bp, Zea mays
  Clone ID: LIB3061-076-Q1-K6-F5
ctcctatagcttcccttcttcccccgtaccttctcaccagcggggtcttcggtatggtgaaaacccaattcttcaaccctacagggttccaacaggcaatcacagctggcatcttaccctttatcacccttgtgtcctccaacaatcatcagccctattacatcagttacctttggtgcatttattggcacaaaacatcagggcacaacaactacaacaacttgtgctagcaaaccttgctgcctactctcagcaacagcagtttcttccattcaaccaactagctgcattgaactctgcttcttatttgcaacaacaacaactaccattcagccagctacctgctgcctacccccagcaatttcttccattcaaccaactggcagcattgaactctcctgcttatttacagcagcaacaactactaccattcagccagctagctggtgtgagccctgctaccttcttgatacaaccacagttgttgccgttctaccagcacgctgcgcctaacgctggcaccctcttacaactgcaacaa

SEQ ID NO: 10209 - DNA, 596 bp, Zea mays
  unsure (1)..(596): unsure at all n locations; Clone ID: LIB3061-076-Q1-K6-F6
ccaactagcaacatagnaaagcacaatagtgtaccaacaatggcagccaaaatattttgcctccttatgctccttggtctttctgcaagtgctgctacggcgaccattttcccgcaatgctcgcaagctcctatagcttcccttcttcccccgtacctctcaccagcggtgtcttcggtatgtgaaaacccaattcttcaaccctacaggatccaacaggcaatcacagctggcatcttacctttatcacccttgttcctccaacaatcatcagccctattacatcagttacctttggtgcatttattggcacaaaacatcagggcacaacaactacaacaacttgtgctagcaaaccttgctgcctactctcagcaacagcagtttcttccattcaaccaactagctgcattgaactctgcttcttatttgcaacaacaacaactaccattcagccagctacctgctgcctacccccagcaatttcttccattcaaccaactggcagcattgaactctcctgcttatttacagcagcaacaactactaccattcagccagctagctggtgtgagccctgctaccttcttgataca

SEQ ID NO: 10210 - DNA, 605 bp, Zea mays
  Clone ID: LIB3061-076-Q1-K6-F7
attgagaccaactagcaacataggaaagcacaatagtgtaccaacaatggcagccaaaatattttgcttccttatgctccttggtctttctgcaagtgctgctaccgcaaccattttcccacaatgctcacaagctcctatagcttcctttcttcccccatacctctcaccagcggtgtcttcagtatgtgaaaacccaattcttcaaccctacaggatccaacaggcaatcgcagcaggcatcttacctttatcacccttgttcctccaacaaccgtcagccctattacagcagttacctttggtgcatttgttggcacaaaacatcaaggcacaacaactacaacaacttgtgctaggaaaccttgctgcctactctcagcaacagcagtttcttccattcaaccaactggctgcattgaactctgctgcttatttgcaacaacaactaccattcagtcagctagctgctgcctacccccagcaatttcttccattcaaccaactggcagcattgaactctgctgcttatttacaacagcaacagctaccaccattcagccagctagctgatgtgagccctgttgccttcttgacaaacaaca

SEQ ID NO: 10211 - DNA, 565 bp, Zea mays
  Clone ID: LIB3061-076-Q1-K6-F8
cgtcggccgcatcatgaacccatcaagggcaggtagtacagatgccggtaggcttgtctgggcaatccaacgcactcataactctttagaagcaacaagggggcaaaaactagatgacaacaacttgtgtggaaacggttctgctaagaaggatgagtcctgtgactgcaactccagctttgagtgcaatatctgtcttgacccagctaaacagcctgtggttacaccctgcggtcacctcttctgttggccatgcttgtaccagtggcttcatgcacattcaccccactctgagtgccctgtatgcaagggtgaggtgctagaactgaatgtcactccgatatatggaagaggcggtgaagaagggaattccaccaaccctgacttcccacctaggccacgagcaaacagaagggagagcctgaggcaacagctgcaaatgacagacacaagaggaattgcaacagtggtgaggcagttgatacaaaaccagggtataattagcgttctcccaagcccaacagggatcgagatgtcggtggttcctgcaggccggcaaagggct

SEQ ID NO: 10212 - DNA, 596 bp, Zea mays
  unsure (1)..(596): unsure at all n locations; Clone ID: LIB3061-076-Q1-K6-G1
gcaacatagnaaagcacaatagtgtaccaacaatggcagccaaaatattttgcctccttatgctccttggtctttctgcaagtgctgctacggcgaccattttcccgcaatgctcgcaagctcctatagcttcccttcttcccccgtacctctcaccagcggtgtcttcggtatgtggaaaacccaattcttcaaccctacaggatccaacaggcaatcacagctggcatcttacctttatcacccttgttcctccaacaatcatcagccctattacatcagttacctttggtgcatttattggcacaaaacatcagggcacaacaactacaacaacttgtgctagcaaaccttgctgcctactctcagcaacagcagtttcttccattcaaccaactagctgcattgaactctgcttcttatttgcaacaacaacaactaccattcagccagctacctgctgcctacccccagcaatttcttccattcaaccaactggcagcattgaactctcctgcttatttacagcagcaacaactactaccattcagccagctagctggtgtgagccctgctaccttcttgatcaaccacag

SEQ ID NO: 10213 - DNA, 519 bp, Zea mays
  unsure (1)..(519): unsure at all n locations; Clone ID: LIB3061-076-Q1-K6-G10
gacagcaatcaacctcaccacggcgtgtggggggcgcccacaccttcatgatcactatctgcaacttcaacaacctccctttaatccccctcgtccattaccatcatctcgcgcctgccactaacaagcaccctccagccgcgttcaatacccctaaccaccaccatcagggggggggggggccttattattcctctcctctcacgactatttacaggcagagcatcccctaccattccaccaggtagcaagccatacccctgccgactagttgacacaacacatttcgtgcgcgtgattactaccttctataccacaaccccagcccatggtattaactgcaaacattgacgaaatacacacaattgatctacgaacacccaataacggtcacacaacacctctttatacatgcgcctctctcttacattgcttataagtgctatatgaacaatgcactcaaactgcctatctnttttttagtaaaaaataaaccaatgttcctgtgtgagtgaaaaa

SEQ ID NO: 10214 - DNA, 343 bp, Zea mays
  unsure (1)..(343): unsure at all n locations; Clone ID: LIB3061-076-Q1-K6-G11
ttactaccatttggccagctagctacaacaaagccccgcttccttcttgaacaacaacaagtgcttccgttctaccagcagtttgtggctaaccccgcaaccctcttacaactgcaacagttgctgccctttntccaaggggggggacaaacccancanccttctaccaacaacacatcattggcggtgccctcttttagattgcttattagttgtaattcaataatgaagttttttggctgatgtatgtggcctcctagaaataagaagttatatttccaaaaaaaaaaaaaaaaaaaaaaaaaaaaaaaaaaaaaaaaaaaagggcggccaatactaaaaa

SEQ ID NO: 10215 - DNA, 587 bp, Zea mays
  Clone ID: LIB3061-076-Q1-K6-G12
ctccgatgtaccaactagcaaaaacatggggggggggactagcaacatcttagcaccaatgggagccaagattttttccctccttgccctccttgctctttcagcaagcgctgctacctctactattattccacaatgctcacaacaatacctctctccggtgacagccgcgggattggggggcgggtatacaatcctacatgctacatgaggccatcgtagcaagcatcttacggtcattagcattaaccctccaacagccatatgccctattgcaacaaccatccttagtgcatctgtatctccaaagaatcgcgacacaacaactacaacaacagttgctaccaacaatcaatcaagtagttgcagcgaaccttgctgcttatctccagcaacaacaatttcttccattcaatcaactagctggggtgaaccctgctgtctacttgcaggcacaacaactactaccatttaaccaacttgtcgggagccctgatgccttcttactgcaacaacagcttctgccattccatctgcaagctgtggaaaacattgcttctttcttgcgacaacaacaattgttgcca

SEQ ID NO: 10216 - DNA, 597 bp, Zea mays
  unsure (1)..(597): unsure at all n locations; Clone ID: LIB3061-076-Q1-K6-G4
tccgntatagcttttctactccanacgcagaggacccgatcgacaccatgagggtgttgctcgttgccctcgctctcctggctctcgctgcgagcgccacctccacgcatacaagcggcggctgcggctgccagccaccgccgccggttcatctaccgccgccggtgcatctgccacctgcggttcacctgccacctccggtgcatctcccaccgccggtccacctgccgccgccggtccacctgccaccgccggtccatgtgccgccgccggttcatctgccgccgccaccatgccactaccctactcaaccgccccggcctcagcctcatccccagccacacccatgcccgtgccaacagccgcatccaagcccgtgccagctgcagggaacctgcggcgttggcagcaccccgatcctgggccagtgcgtcgagtttctgaggcatcagtgcagcccgacggcgacgccctactgctcgcctcagtgccagtcgttgcggcagcagtgttgccagcagctcaggcaggtggagccgcagcaccggtaccaggcgatcttcggcttggtcctccagtccatcctgcagcagcagc

SEQ ID NO: 10217 - DNA, 595 bp, Zea mays
  unsure (1)..(595): unsure at all n locations; Clone ID: LIB3061-076-Q1-K6-G5
caactagcaacatagnaaagcacaatagtgtaccaacaatggcagctaaaaattttgcctccttatgctccttggtctttctgcaagtgctgctacggcgaccattttcccacaatgctcacaagctcctatagcttcccttcttcccccgtacctctcaccaacggtgtcttcggggtgtgaaaacccaattcttcaaccctacaggatccaacaggcaatcgcagctggcatcttacctttatcacccttgttcctccaacaatcatcagccctattacagcagttacctttggtgcatttattggcacaaaacatcagggcacaacaactacaacaacttgtgctagcaaaccttgctgcctactctcagcaacagcagtttcttccattcaaccaactagctgcattgaactctgcttcttatttgcaacaacaacaactaccattcagccagctatctgctgcctacccccagcaatttcttccattcaaccaactgacagcattgaactctcctgcttatttacagcagcaacaactactaccattcagccagctagctggtgtgagccctgctaccttcttgacacaa

SEQ ID NO: 10218 - DNA, 243 bp, Zea mays
  unsure (1)..(243): unsure at all n locations; Clone ID: LIB3061-076-Q1-K6-G6
ngactggtgtgagccctgctaccttcttggaacaaccacagttgttgccgttctaccagcacgctgcgcctaacgctggcaccctcttacaactgcaacaattgctgccattcaaccaacttgctttgacaaacccagcagcgttctaccaacaacccatcattggtggtgccctcttttgggatttcttatgagttatagttcaataataaagttttttgtctgatgtttgtggcttcccag

SEQ ID NO: 10219 - DNA, 599 bp, Zea mays
  unsure (1)..(599): unsure at all n locations; Clone ID: LIB3061-076-Q1-K6-G7
gcngaacgcactagcaacgacctaacagcggtggctaccaagatattagccctccttgcgcttcttgcccttttagtgagcgcaacaaatgcgttcattattccacagtgctcacttgctcctagtgccagtattccacagttcctcccaccagttacttcaatgggcttcgaacatgcaggcgtgcaagcctacaggctacaactagcgcttgcggcgagcgccttacaacaaccaattgcccaattgcaacaacaatccttggcacatctaaccctacaaaccattgcaacgcaacaacaacaacaacagtttctgccatcactgagccacctagccgtggtgaaccctgtcacctacttgcaacagcagctgcttgcatccaacccacttgctctggcgaacgtagctgcataccagcaacaacaacagctgcaacagtttatgccagtgctcagtcaactagccatggtgaaccctgccgtctacctacaactactttcatctagcccgctcgcggtgggcaatgcacctacgtacctacaacaacagttgctgcaacaaattgtaccagctctgactcagctagctgtggcaaa

SEQ ID NO: 10220 - DNA, 576 bp, Zea mays
  unsure (1)..(576): unsure at all n locations; Clone ID: LIB3061-076-Q1-K6-G9
ctacttcggtttgccaccggtctcgccaccactcccggcgcctcngaccatcaacctgtcgcaagagtcgcgggcggtccgatcggtggtgccgtgcgcgatggcggcgccgcctaccgtgcggggctacgggccagcgtcgccgtcgtcgtcggtggcgctgcctcgggcgcgatcgcgggtacctgcgtcgctcgtgcccgtgccgacgcggcgggcgccatcggcgcgcctgcgtgcggcggtcgcggacgtgccccgcggcggcctgcagctccagcggcggggggaggaagtgctgtcggggaccgtgttcggcagagaagaggatgaggtgttggagaaggtcggggaggagaaggtggacgggtggatacgggagtcgatcgcggagatcgtgcggcacatcggcgaggcgccgttcctggtgcacctgttcagcagcggcgacggcgacggcgagcacgtgacggtgcggcgggagaccgcggcgccggagagctggccggacgtgcggcgccggtggggaatgggcgggcagcggaggccggacggggtcatcctggtcgagcaggt

SEQ ID NO: 10221 - DNA, 570 bp, Zea mays
  Clone ID: LIB3061-076-Q1-K6-H2
attctcccacattcttcatgggcttgggaactccagccgtgcaagcctacaggctacaactagcgcttgcggcgagcgccttacaacaaccaattgcccaattgcaacaacaatccttggcacatctaaccctacaaaccattgcaacgcaacaacaacaacaacaacagtttctgccatcactgagccacctagccgtggtgaaccctgtcacctacttgcaacagcagctgcttgcatccaacccacttgctctggcgaacgtagctgcataccagcaacaacaacagctgcaacagtttatgccagtgctcagtcaactagccatggtgaaccctgccgtctacctacaactactttcatctagcccgctcgcggtgggcaatgcacctacgtacctacaacaacagttgctgcaacaaattgtaccagctctgactcagctagctgtggcaaaccctgctgcctacttacaacagttgcttccattcaaccaactggctgtgtcaaactctgctgcgtacctacaacagcgacaacagttacttaatccattggcagtggctaacc

SEQ ID NO: 10222 - DNA, 558 bp, Zea mays
  Clone ID: LIB3061-076-Q1-K6-H3
caaaaaggccgaacagcagggcaatctgccagcaatgtggacgaagccaagagtcgtgttgctgaggagtgaagcatggctggcactcaccagggcgcaaccatttgctttcataaggcaggtgaaaaaaagaacgaagaaacctgcagtgtacgtatctcaactgtacgtggcatgccatgcaaatcctgcctaagttaccccggacaatggcattgcctagtgcagtggtggatcttcagatcacaacctttcttgtgccagctttcggtcatctccactctccagccctcggaaccatggctgagtctgtctattctttgtgtggtgtgtagcattcctcgtgttttcgttgtccaaaatggtgtcaaatccagttttttgttgcgagaatgaaccgtgacgttagtgtgttttgctggcggttaggtgcaaaatactcgaaacctgaattgcccgctcgctatttcgggttgtaagtatatgatgaatctgattttagttgcatggtgtacccatcttatctgaaaataatgaaagatctgtttgtggttgact

SEQ ID NO: 10223 - DNA, 573 bp, Zea mays
  unsure (1)..(573): unsure at all n locations; Clone ID: LIB3061-076-Q1-K6-H5
tgtttggcacagctgctgcttgtggagggggggtttctganaactggtgaaagtagcttctacttgttggctgtttttaatgtattctgagaagcagctgaactaataagctgctgcagaagttgactgtttgtcagaacttctgtttaagtttgtgaaaaactgaaaatgggggggccaaacatgacctacatgtgatcctctattggtgacaaagcttggactacttttgttctgatgatgctcatggtttgatttttcatgaacacaatgaacgttgttacaagaggctacaagatcaccaatttagatggaccattaatccattatatgcacaatggacttgccaatgatctagaggacatgatgtgatgcctcattattctgttgcttgttcttgcacgcttcggttctgtttcatggcacagtattgtcccataccccgtcctctaaatctcctgtagtgctgactgagaacttatgaagctaatggctttcatttctggcacacttggaatacttgtacccaaccagattggcctctggaaacacgtggaatctgtttaggtcatt

SEQ ID NO: 10224 - DNA, 598 bp, Zea mays
  unsure (1)..(598): unsure at all n locations; Clone ID: LIB3061-076-Q1-K6-H6
cttcttcagtaccactcatcatcagtcggggtagtggtataggcaccaaatcaaatctgcaacatcaattatctaactccaaaaaccatnaagctggtgcttgtgggtcttgctttcattgctttagtatcaagtgtttcttgtacacagacaggcggctgcaactgtggtcaacagcgggggctgagcagcaacatcatccacaacaacatcatccacaaaaacaacaacatcaaccaccaccacaacatcaccagcagcagcaacaccaacaacaacaagttcacatgcaaccacaaaaacatcagcaacaacaagaagttcatgttcaacaacaacaacaacaaccgcagcaccaccaccaacaacaacaacaacagcaccaacaacaacatcaatgtgaaggccaacaacaacatcaccaacaatcacaaggccatgtgcaacaacacgaacagagccatgagcaacaccaaggacagagccatgagcaacaacatcaacaacaattccagggtcatgacaagcagcaacaaccacaacagcctcagcaatatcagcagggccaggaaaaatcacaacagccacaatgtcattg

SEQ ID NO: 10225 - DNA, 586 bp, Zea mays
  Clone ID: LIB3061-076-Q1-K6-H7
agcaagcggcagtgcgtagagagggtgcgggggggcggacagcatgaagatggtcatcgttctcgtcgtgtgcctggctctgtcagctgccagcgcctctgcaatgcagatgccctgcccctgcgcggggctgcagggcttgtacggcgctggcgccggcctgacgacgatgatgggggggggggggctgtacccctacgcggagtacctgaggcagccgcagtgcagcccgctggcggcggcgccctactacgccgggtgtgggcagccgagcgccatgttccagccgctccggcaacagtgctgccagcagcagatgaggatgatggacgtgcagtccgtcgcgcagcagctgcagatgatgatgcagcttgagcgtgccgctgccgccagcagcagcctgtacgagccagctctgatgcagcagcagcagcagctgctggcagcccagggtctcaaccccatggccatgatgatggcgcagaacatgccggccatgggtggactctaccagtaccagctgcccagctaccgcaccaacccctgtggcgtctccgctgccattccgccctactactgattcatg

SEQ ID NO: 10226 - DNA, 577 bp, Zea mays
  Clone ID: LIB3061-076-Q1-K6-H8
caacatttctaccagcactgagccaatagggggggtgaaccctgtcgcctacttgcaacagcagttgcttgcatccaacccacttgctctggcaaacatagttgcataccaacaacaacaacaattgcaacagtttctaccagcgctcagtcaactagccatggtgaaccctggcggcggggctacaacagcaacaactgatttcatctagccctctcgctgtggttaatgcacctacatacctgcaacaacagttgctgcaacagattgtaccagctctgactcagctagctgtggcaaaccctgctgcctacttgcaacagctgcttccattcaaccaactgactgtgtcgaactctgctgcgtacctacaacagcgacaacagttacttaatccactagcggtggctaacccattggtcgttgccttcctacagcagcaacaattgctgccatacaaccagttctctttgatgaaccctgccttgttgtggcagcaacccatcgttggaggtgccatcttttagattacatatgagatgtactcgataatggtgccctcatagcggcatgtgtt

SEQ ID NO: 10227 - DNA, 603 bp, Zea mays
  unsure (1)..(603): unsure at all n locations; Clone ID: LIB3061-077-Q1-K6-A1
ccaactagcaacatagnaagcacaatagtgtaccaacaatggcagccaaaatattttgcttccttatgctccttggtctttctgcaagtgctgctaccgcaaccattttcccacaatgctcacaagctcctatagcttcctttcttcccccatacctctcaccagcggtgtcttcagtatgtgaaaacccaattcttcaaccctacaggatccaacaggcaatcgcagcaggcatcttacctttatcacccttgttcctccaacaaccgtcagccctattacagcagttacctttggtgcatttgttggcacaaaacatcaaggcacaacaactacaacaacttgtgctaggaaaccttgctgcctactctcagcaacagcagtttcttccattcaaccaactggctgcattgaactctgctgcttatttgcaacaacaactaccattcagtcagctagctgctgcctacccccagcaatttcttccattcaaccaactggcagcattgaactctgctgcttatttacaacagcaacagctaccaccattcagccagctagctgatgtgagccctgttgccttcttgacacaacaacagttgt

SEQ ID NO: 10228 - DNA, 614 bp, Zea mays
  unsure (1)..(614): unsure at all n locations; Clone ID: LIB3061-077-Q1-K6-A10
gggatattgcctcgatgcccaagaggaggggagctatactttctggtcgaagaatacataccgaatgttgaaagcttggagaaatttattaatgtctctcgactcgattggtcctcgtgtttcaagataattcaggggatagcaaagggcttacattgcttacataagcatcatatggtgggtggggatttgaatccagccaacatcctcgtccgttcagatatgaatcctgtggtcatcaattttggatcatcaatagtgctggatcgtgatgatgataaggtcaccggggatgccgtagcaggcacactgggttatgtcgctccagaaaaacttatggaagcttatgcatcaatgatgtctgatgtgttctcttttggaatcatcatcattgagatcattaccggcaggagagcttcacctttcgttgatttaccggaatggggttcagttgatgagatgattacatcagcgaaagggttatttgatccggcgctagctaacgagtctcagctgatgaagattaataggtgcagagaggtcggactgaagtgcattgagcgggatccgaaacgtcngcctaccatgggaaatgtccttgagatgctaagtag

SEQ ID NO: 10229 - DNA, 601 bp, Zea mays
  unsure (1)..(601): unsure at all n locations; Clone ID: LIB3061-077-Q1-K6-A11
ggcaacatagnaaagcacaatagtgtgaggggcgtgggggctaaaaattttgcctccttatgctccttggtctttctgcaagtgctgctacggcgaccattttcccacaatgctcacaagctcctatagcttcccttcttcccccgtacctctcaccaacggtgtcttcggtatggggggggggggttcttcaaccctacaggatccaacaggcaatcgcagctggcatcttacctttatcacccttgttcctccaacaatcatcagccctattacagcagttacctttggtgcatttattggcacaaaacatcagggcacaacaactacaacaacttgtgctagcaaaccttgctgcctactctcagcaacagcagtttcttccattcaaccaactagctgcattgaactctgcttcttatttgcaacaacaacaactaccattcagccagctatctgctgcctacccccagcaatttcttccattcaaccaactgacagcattgaactctcctgcttatttacagcagcaacaactactaccattcagccagctagctggtgtgagccctgctaccttcttgacacaaccacagttgtt

SEQ ID NO: 10230 - DNA, 225 bp, Zea mays
  unsure (1)..(225): unsure at all n locations; Clone ID: LIB3061-077-Q1-K6-A12
ccccaaaccaacaccacgggggcttcgngttgtgaaaacccaatcttcaaccctaccagatccaccacgccctcacagctggcatctaacctnaatcacccttttttctttcacaancatcanccctattactggtttttgcctggggnncctcnatngncccanaacatcanttcacaacaacaacaacaacaagngctagcggaccgggctgcctactctcag

SEQ ID NO: 10231 - DNA, 520 bp, Zea mays
  unsure (1)..(520): unsure at all n locations; Clone ID: LIB3061-077-Q1-K6-A2
cctgtggcgtctccgctgccattccggcctactactgattcatgatatttgggaaatctcctctatccatctctctctatctatatatgtaataatgcagtaagacgacacacattatcatgtgtggtatgaccaataatatatgcatggtcataataaagttttggttttaatgggtcagggaaaaaaaaaaaaaaaaaaaaaaaaaaaaaaaaaaaaaaaaaaaaacaaaaaaaaaaaaaaaaaaaaaaaaaaaaaaaaaaaaaaaaaaaaaaaaaaaaaaaaaaaaaagggagagccaaataaaaaggaaacaaaacaaaacaaacccaaaaaaaaaaaaaaaaaaaaaagggggggggggccccaaaaaacaaatacattgccccccttttaacaacgnngtgactggtaaaaaccggggcgaaaccaaaataaaccgccgggggttaaaaccccttttggccgggaaaaacattgggaaaaagcccaaaacggtcggccttcacaaacctttttt

SEQ ID NO: 10232 - DNA, 244 bp, Zea mays
  unsure (1)..(244): unsure at all n locations; Clone ID: LIB3061-077-Q1-K6-A3
nacataatagnagtagtagctatttcttgtgtctcctgttgttgttgttgttgtcgtcgtaggactggaaacatacctccgtgtgtcctgtaactgaaggtacaaaatttactggatggagggatctgatagtatgttgcagccccccctttttcgtttcatccttgatgtaattgtggtaccgatgtattttgtacaagaacaaatcaataataatgcaatcgaaagcgagctgttcatacgc

SEQ ID NO: 10233 - DNA, 604 bp, Zea mays
  Clone ID: LIB3061-077-Q1-K6-A4
cagcattcaaaacacaccaagcgaggcgcactagcaacgacctaacaccaatggctaccaagatattagccctccttgcgcttcttgcccttttagtgagcgcaacaaatgcgttcattattccacagtgctcacttgctcctagtgccattattccacagttcctcccaccagttacttcagtgggcttcgaacatccagccgtgcaagcctacaggctacaactagcgcttgcggcgagcgccttacaacaaccaattgcccaattgcaacaacaatccttggcacatctaaccctacaaaccattgcaacgcaacaacaacaacaacaacagtttctgccatcactgagccacctagccgtggtgaaccctgtcacctacttgcaacagcagctgcttgcatccaacccacttgctctggcgaacgtagctgcataccagcaacaacaacagctgcaacagtttatgccagtgctcagtcaactagccatggtgaaccctgccgtctacctacaactactttcatctagcccgctcgcggtgggcaatgcacctacgtacctacaacaacagttgctgcaacaaattgtaccagctctgac

SEQ ID NO: 10234 - DNA, 184 bp, Zea mays
  Clone ID: LIB3061-077-Q1-K6-A6
tactgtagtaataatgtaatggagccggtggctagctacctagctcgctagtttactcatttagcggcgatgagtaacgtagtgtcacccatcaccatgggtggcagtgtgagcaatgacctgaatgaaccattgaaatggaaaggaataatatataaggaaaaaagatgattgggaactggtg

SEQ ID NO: 10235 - DNA, 575 bp, Zea mays
  unsure (1)..(575): unsure at all n locations; Clone ID: LIB3061-077-Q1-K6-A7
cccccgcnccccccccccccccccnnnncccccccccccccggggggggggggccncnccccccccccccccccccccccgcccgcgcccncccgncccccccccccccccccccccgcccccgccccccccccccccccccccgccncccccccccccccccccccccccccccgcccgcgggcggcccccccccccccccccccccccccccccccccccccccccccccccccccccncccccccccccccccccccccccccccccccgggncncccccccccccccccccccccccccccccccccccccccccccccccccccgcccccccccccccccccccccccccccccccccccccccgcccccccccccccccccccccccccccccccccccccccgcccccccccccccccccccccccccccccccccccccccccccccccccccccccccccccccccccccccccccnnccccccccccccccccccccccccccccccccccgccccccccccccccccccccccccccccccccccccccccccccccaaccaag

SEQ ID NO: 10236 - DNA, 350 bp, Zea mays
  Clone ID: LIB3061-077-Q1-K6-A8
ctcaaggagaagcttagccagcgttaggcgggaagagattcgatcatagagcttgcaaacgaggtgaggaaggtgctcaacagaacaaaggagaccaagatcactggtgccaatgcttccctgaaacacatgcccctcttgtgcacctgtccgcgcttccagaaggcaccggtgggggcgggagatagcgagagccttggacgttggacctctactcggaatctacttccagctcttgcatgtttgtggccatcatgtactgattttcccttttcaacagttgtcgtgaggctgtatcttctggagttaaaaaaatgctaaaagccggcactaataatgatattaacttg

SEQ ID NO: 10237 - DNA, 564 bp, Zea mays
  unsure (1)..(564): unsure at all n locations; Clone ID: LIB3061-077-Q1-K6-A9
caacaatagagcaacaatggcgaccaaaatttttccctccttatgctccttgctctttctactgtgttgctaacgcgacaattttccctcaatgctcacaagctcctatagcttcccttcttcccccataccttccatcaggggggggtgcagtatgtngaaaacccagctcttcaaccatataggcttcaacaagcaatcgcagcaagcaacatacctttatcgcccttgttgtttcaacaatcaccagccctatctttggtgcagtcattggtacaaaccatcagggcacaacagctgcagcaactcgtgctacctgtgatcaaccaagtagctctggcaaacctttctccctactctcagcaacaacaatttcttccattcaaccaactgtctacactgaaccctgctgcttatttgcagcaacaactattaccatttagccagctagctactgcctactctcagcaacaacaacttcttccatttaaccaattggccgcactgaaccccgctgcttatttgcagcagcaaatactactgccatttagcgagctagctgca

SEQ ID NO: 10238 - DNA, 352 bp, Zea mays
  unsure (1)..(352): unsure at all n locations; Clone ID: LIB3061-077-Q1-K6-B2
cgtccgcacatgctcacagctcctatagcttcccttcttcccccgtacctctcaccaacggtgtcttcggtatgtgaaaacccaattcttcaaccctacaggatccaaagggaactggtggctgggggctgatgattgttggcggatcggggtgataatggtaagatgcctgctggggggggggggggggtcctgtcgggtcgctggattgggctgtccgctccgccgactccgtggtggtgtggtcggggggtggcgggcngcctctggcggccgggttgcctgggcggccgcgggggtcgggcggggttgtccggtccgggcccgggcggcgtccctgccttgcgttttg

SEQ ID NO: 10239 - DNA, 403 bp, Zea mays
  Clone ID: LIB3061-077-Q1-K6-B3
gtgcagcccgacgcgacgccctactgctcgcctcagtgccagtcgttgcggcagcagtgttgccagcagctcaggcaggtggagccgcagcaccggtaccaggcgatcttcggcttggtcctccagtccatcctgcagcagcagccgcaaagcggccaggtcgcggggctgttggcggcgcagatagcgcagcaactgacggcgatgtgcggcctgcagcagccgactccatgcccctacgctgctgccggcggtgtcccccactgaagaaactatgtgctgtagtatagccgctggctagctagctagttgagtcatttagcggcgatgattgagtaataatgtgtcacgcatcaccatgggtggcagtgtcagtgtgagcaatgacctgaatgaacaattg

SEQ ID NO: 10240 - DNA, 323 bp, Zea mays
  unsure (1)..(323): unsure at all n locations; Clone ID: LIB3061-077-Q1-K6-B8
cccccccccccccccccccccnccccccncccccccccncccccccccccccccccccccccccccccncccncccccccccccncccccccccccccccccncccccccccccccccccnccccccccncccccccncccccccccccccnncccccccccccccccccccccccccccnccccncccccccccccccccccccccccccccccccccccccccccccccccnncccccnccccccccncccccccncccccccccccccccnccccccnnnncccccccnnccccccccnccccccccnccnccccccccc

SEQ ID NO: 10241 - DNA, 586 bp, Zea mays
  unsure (1)..(586): unsure at all n locations; Clone ID: LIB3061-077-Q1-K6-B9
gccaggntcccatgttacggtcaaccctggtgaggttgtttctcttggggcagctgtgcagggcggggttttggcaggagagtgaaagagtcgttcttctggatgttactccattatctcttggtttggagacattgggtggagtgatgacaaagattatccccaggaataccacactgccaacctcaaaatcggaggtattctcaacagctgcagatggacagacgagcgttgagattaatgttctccagggagaaagagagtttgttagggacaacaagtcccttggaagcttccggttggacggaatccctcctgcacctcgtggtgtcccacaaattgaagtgaagtttgatattgatgcaaatggtatcctctcagttgctgccattgataagggcactggaaagaaacaggacatcaccatcactggtgctagtacgctacctaaggatgaggttgagagaatggtagaagaagccgataagtttgccaaggaggacaaagagaagagagatgcaatcgacaccaaaaaccaggcggactcagtggtctaccagactgagaagcaactgaaggagcttgg

SEQ ID NO: 10242 - DNA, 587 bp, Zea mays
  unsure (1)..(587): unsure at all n locations; Clone ID: LIB3061-077-Q1-K6-C1
tccgcaaacggcagtgcgtagaanaggatcgtcgacagaacagcatgaagaggtcatcgttctcgtcgtgtgcctggctctgtcagctgccagcgcctctgcaatgcagatgccctgcccctgcgcggggctgcagggcttgtacggcgctggcgccggcctgacgacgatgatgggcgccggcgggctgtacccctacgcggagtacctgaggcagccgcagtgcagcccgctggcggcggcgccctactacgccgggtgtgggcagccgagcgccatgttccagccgctccggcaacagtgctgccagcagcagatgaggatgatggacgtgcagtccgtcgcgcagcagctgcagatgatgatgcagcttgagcgtgccgctgccgccagcagcagcctgtacgagccagctctgatgcagcagcagcagcagctgctggcagcccagggtctcaaccccatggccatgatgatggcgcagaacatgccggccatgggtggactctaccagtaccagctgcccagctaccgcaccaacccctgtggcgtctccgctgccattccgccctactactgattcatga

SEQ ID NO: 10243 - DNA, 551 bp, Zea mays
  unsure (1)..(551): unsure at all n locations; Clone ID: LIB3061-077-Q1-K6-C10
cctccgggnaccagccctcgtagaaaggcgaangggccgggaagatcttcttcttggcgaggtcgccggnagcgccgacgaccgtgatgctgacggtgctcgctccccgctgcccctgccccggtgccccatctgcggggggggggggccatccancacctctgcatatgcggccaggaagcagtacgtgattctgcgtacagtcggtcatcatgcacgctcgcatattccaacggcaggcgaggcgcgcgacgcgataccattgctgctgccgaacgaggcgccgccgatctgcgggagcccgttggaggacctggccctgagaaggcacggtcttgtagttctagggacgagggtccggagaggcggcgagcagtaatggtggagcggctgcctcgctgtcactgctgcctctcgtggtcgtgggaagaaggcggccgggtggaaggtcaaggccgccatccgatcagtgtggaacggccggagaggtggtagattgattgggatatgggttgtcaggagtggacatcgatgttcttggcgattgcttt

SEQ ID NO: 10244 - DNA, 467 bp, Zea mays
  unsure (1)..(467): unsure at all n locations; Clone ID: LIB3061-077-Q1-K6-C11
ccgggtcgncccagcgtccgcttccgctcgcttaactttccttgggcaccgggccccggccggccgnatggagacggnacttcccctcctcggcgctggcgctgcccgggcgagaaccagccggggaagggaaaggagcggcggtagccggtaggtgtccgctgttcctgacgcgcaagtcggaccgtacccgggggcttcgccggacgtcggcgtcgcgacgccgagcgacgcgtgtgaccgaagcggcccacgcgcgcgcgcacagacaaaaataaaattaacttgtcttctcgcccggatgatctcttcacctccgcgcaagggtatggatgcgggatgcccaatctaaagtacccgctcctacatccacgcacgcacacagacaaaacccttttattattattactagtcggttgcccgtgcgttgcgacgacttacaacaatacccatgtaaactatccatg

SEQ ID NO: 10245 - DNA, 601 bp, Zea mays
  unsure (1)..(601): unsure at all n locations; Clone ID: LIB3061-077-Q1-K6-C12
attgaacacagcacatagaaggggggaccagtagcaacaacanagcaacaatggcgaccaagatttttccctccttatgctccttgctctttctgcatgtgttgctaacgcgacaattttccctcaatgctcacaagctcctatagcttcccttcttcccccataccttggtgggggatagcttcagtatgtgaaaacccagctcttcagccctataggctccaacaagcaatcgcagcaagcaacatacctttatcacccttgttgtttcaacaatcgccagccctatctttggtgcagtcattggtacaaaccatcagggcacagcagctgcagcaactcgtgctacctgtgatcaaccaagtagctctggcaaacctttctccctactctcagcaacaacaatttcttccattcaaccaactgtctacactgaaccctgctgcttatttgcagcaacaactattaccattcagccagctagctactgcctactctcagcaacaacaacttcttccatttaaccaattggccgcactgaaccccgctgcttatttgcagcagcaaatactactaccatttagccagctagctgcagcaa

SEQ ID NO: 10246 - DNA, 591 bp, Zea mays
  unsure (1)..(591): unsure at all n locations; Clone ID: LIB3061-077-Q1-K6-C2
gccgacacgagcggcgggnaactccgacgagcttgccgtggaggttctctgcccggtgttccgcccggcggcgtttggctcatcgtcgtcacagccagcagcaaaggacatcagctccaccgtcgtcgtcaccaaggtcggagtgtggggtggagagggagggtcggcgcaggacatcgcgacgacggagccgccgaggcgtctgcagagcctgaccgtccgcgccggcgttgccgtggactccatcgagttcacctacagtaccgacacaggtggtcagacgcgcaccgctgggcgatggggtggacttggcggcaacgtccggaagctcgatcttggcgacgctgaatacgtcaaggaagtttctggaacgtacggcgcattcgaaggtgcgactacccttacctcgttcaggattgtcaccagcaccgccagagcttgggggccatggggcatcgagagcggcacacgtttctgcatcaccgcgcccatcggcagcagcatcgtgggattctatggacgcgcgacgaccaggctcgtcgctgcgatcggtgtctacctgcgccaactttagtctggtttcagcagcag

SEQ ID NO: 10247 - DNA, 603 bp, Zea mays
  unsure (1)..(603): unsure at all n locations; Clone ID: LIB3061-077-Q1-K6-C3
tagaagtggnaaccagtagcaacaacaggagcacaatggcgaccaagnaattttccctccttatgctccttgctctttctgcatgtgttgctaacgcgacaattttccctcaatgctcacaagctcctatagcttcccttcttcccccataccttccatcaatgatagcttcagtatgtgaaaacccagctcttcagccctataggctccaacaagcaatcgcagcaagcaacatacctttatcacccttgttgtttcaacaatcgccagccctatctttggtgcagtcattggtacaaaccatcagggcacagcagctgcagcaactcgtgctacctgtgatcaaccaagtagctctggcaaacctttctccctactctcagcaacaacaatttcttccattcaaccaactgtctacactgaaccctgctgcttatttgcagcaacaactattaccattcagccagctagctactgcctactctcagcaacaacaacttcttccatttaaccaattggccgcactgaaccccgctgcttatttgcagcagcaaatactactaccatttagccagctagctgcagcaaaccgtgcttccttct

SEQ ID NO: 10248 - DNA, 233 bp, Zea mays
  unsure (1)..(233): unsure at all n locations; Clone ID: LIB3061-077-Q1-K6-C4
gnattatagttcaataataaatctaaaagagtcaccaccaatgatgggttgttggtagaacgctgctgggtttgtcaaagcaagttggttgaatggcagcaattgttgcagttgtaagagggtgccagcgttaggcgcagcgtgctggtagaacggcaccaactgtggttgtatggggggggggggagggctcacaccaccttgctggctgaatggttntagttgttgctgct

SEQ ID NO: 10249 - DNA, 586 bp, Zea mays
  Clone ID: LIB3061-077-Q1-K6-C5
gcgcctcgcacgctcctcccatggcgccgacgtcgaagctgtcgatgggcatcaagcgcgcgtcgcggtcgcacgcgtaccaccgccgtgggctctgggccatcaaggccaagaacggcggcgtcttccccaagccgagaagcccgccgccgccgcggaacccaagttctaccccgccgacgacgtcaagcctcgcgttcccagcacccgcaagcctaatcccaccaagctcaggtcgagcatcacgcctgggacggtgctgatcctcctcgcggggcgcttcatggggaagagagtggtgttcctcaagcagctcaactccggcctgctcctcgtctctggtccattcaagatcaatggagtaccgatccgtcgtgtcaaccagacctatgtcattgctacatcaaccaaggttgacatctctggtgttgatgtcgcgaagtttgatgacaagtactttgccagggagaaaaagcagaaggtgaagaagacggagggtgagctttttgagacagagaaggaggcgtccaagtctctgcctgatttcaaaaaggatgaccagaaggccgtggatgctgctctgatc

SEQ ID NO: 10250 - DNA, 604 bp, Zea mays
  unsure (1)..(604): unsure at all n locations; Clone ID: LIB3061-077-Q1-K6-C7
tccgnaaaaaaaaaaaaaaaaaaaaaaaaaagagggggagaaaaaaaaaaaaaaaaaaaaaaaaaaaaaaaaaaaaaaaaaaaaaaaaaaaaaaaaaaaaaaaaaaaaaaaaaaaaaaaaaaaaaaaaaaaaaaaannaaaaaaaaccaaaaaaaaaaaaaaaaaaaaaaaaaaaaaaggggcccccccgggggggggggggggtaaacccccccgcgggggaagaaaaaaaccttttaaggggggccccaaaaaaaaaaaaggggggccgggttaaaaaaccgggggggggggaaaaacccggggggccccaaaaaaaaagcgtgggaaaaaaaacccctttggccaggggggggaaaaaagaaaaggggcccncccgggggcccctccaaaaaggtgggcccccccaaaggggaaaggggacccccccttaacgggccaaaaaaccccggggnggggggggggcccccccgggggggccgttaacttgggaggggcccaagggccgggggnttgggggtttcccccttcttttttggccccgggggggggggtgtcccccggggaagtcaaaaaggggggggccccctaaggggccacaaaa

SEQ ID NO: 10251 - DNA, 611 bp, Zea mays
  unsure (1)..(611): unsure at all n locations; Clone ID: LIB3061-077-Q1-K6-C8
ttcgtgtgttcttgtgaggagaatccctgntttgggggagagacgagtccaagcacaacccccgccaatcgctcngatgaaaaatctaaaccaaaaccctcagcgttttcatgggttccggagggattttatgttggtaaggtgttgtgcggtgtgatctccaattccctattgctgatgtcttactccatcatgaccttagggaaggatgttttcctctaaattactcgtaataattatgcttggtgtatgtgttgttttagctacttgatgaaatgttttagttgtgtgcgataatatggttgccgttcgagtggaaagtagatgtgttgtatgacctgagttggagttgaagcaagtatgtgtgtctcgtattacgaaactaattagagatatgcatgatgtttgtagatggattatgtgtagagtgttttagtacaagtatttttttaggtatagttgaaccaattattgtatatgaattgtgcgatatcaaggttgttctaatgttcttttaacatcttgctaataaggtgttagagtattctaaatgccaaacataggataattttacaagccaaatagaagttaaattgaaggtattgatgttt

SEQ ID NO: 10252 - DNA, 603 bp, Zea mays
  unsure (1)..(603): unsure at all n locations; Clone ID: LIB3061-077-Q1-K6-D1
gcaacatagnaagcacaatagtgtaccaacaatggcagccaaaaattttgcctccttatgctccttggtctttctgcaagtgctgctacggcgaccattttcccgcaatgctcgcaagctcctatagcttcccttcttcccccgtacctctcaccagcggtgtcttcggtatgtgaaaacccaattcttcaaccctacaggatccaacaggcaatcacagctggcatcttacctttatcacccttgttcctccaacaatcatcagccctattacatcagttacctttggtgcatttattggcacaaaacatcagggcacaacaactacaacaacttgtgctagcaaaccttgctgcctactctcagcaacagcagtttcttccattcaaccaactagctgcattgaactctgcttcttatttgcaacaacaacaactaccattcagccagctacctgctgcctacccccagcaatttcttccattcaaccaactggcagcattgaactctcctgcttatttacagcagcaacaactactaccattcagccagctagctggtgtgagccctgctaccttcttgatacaaccacagttgttgccg

SEQ ID NO: 10253 - DNA, 514 bp, Zea mays
  unsure (1)..(514): unsure at all n locations; Clone ID: LIB3061-077-Q1-K6-D10
ccccccccccccccccccnncccccccgccccccccccccccnnccccncnnccccccccccccccccccnccgcggcgccggcccgggggcccccccccccccccccccccccccnccnccccccccccccncccccncccccccccnccccccccccccccccccccccccccccccccccccncccccccccccccccccccccccccccccccccgnccccccccccccccccccccccccccccccccccccccccccccccccgncccccccccccccccccccnccccccccccgccccccccccccccccccccccccccccgcccccccccccccccccccccccccccccccccccccccccccccccgcccccccccccccnnccgcccccccccccccccccccccccccccccccccccccccccccccccccccccccccccccccccccccccccccccgccccccccccccccccccccccccccccccccccccaac

SEQ ID NO: 10254 - DNA, 419 bp, Zea mays
  Clone ID: LIB3061-077-Q1-K6-D11
gcaacactgctttcatctacccgctgcgtgggccaagcacctactacctgcacaagattgttgcaacagattgtaccagctctaactcagctagctgtggcaaaccctgttgcctacttgcaacagctgcttccattcaaccaactaactatgtcgaactctgttgcgggcgggcgacagcgacaacagttacttaatccattggcagtggctaacccattggtcgctgccttcctacagcagcaacaattgctgccatacaaccggttctctttgatgaatcctgtcttgtcgaggcagcaacccatcgttggaggtgccatcttttagattacatatgagatgtactcgataatggtgccctcataccggcatgtgtttcctagaaataatcaatatattggttgagatttatctcg

SEQ ID NO: 10255 - DNA, 603 bp, Zea mays
  unsure (1)..(603): unsure at all n locations; Clone ID: LIB3061-077-Q1-K6-D12
ttagtagtatagggcaccagaatcaaatctgcaacatcaattatctaactccaaaaaccagnaagctggtgcttgtggttcttgctttcattgctttagtatcaagtgtttcttgtacacagacaggcggctgcagctgtggtcaacaacaaagccatgagcagcagcgtgggggcacaacaacatcatccacaaaaacaacaacatcaaccaccaccacaacatcaccagcagcagcaacaccaacaacaacaagttcacatgcaaccacaaaaacatcagcaacaacaagaagttcatgttcaacaacaacaacaacaaccgcagcaccaccaccaacaacaacaacaacagcaccaacaacaacatcaatgtgaaggccaacaacaacatcaccaacaatcacaaggccatgtgcaacaacacgaacagagccatgagcaacaccaaggacagagccatgagcaacaacatcaacaacaattccagggtcatgacaagcagcaacaaccacaacagcctcagcaatatcagcagggccaggaaaaatcacaacagcaacaatgtcattgccaggagcagcaacagactacaaggtgcagc

SEQ ID NO: 10256 - DNA, 591 bp, Zea mays
  Clone ID: LIB3061-077-Q1-K6-D3
cacatggcagccaaaaattttgcctccttatgctccttggtctttctgcaagtgctgctacggcgaccattttcccgcaatgctcgcaagctcctatagcttcccttcttcccccgtacctctcaccagcggtgtcttcggtatgtgaaaacccaattcttcaaccctacaggatccaacaggcaatcacagctggcatcttacctttatcacccttgttcctccaacaatcatcagccctattacatcagttacctttggtgcatttattggcacaaaacatcagggcacaacaactacaacaacttgtgctagcaaaccttgctgcctactctcagcaacagcagtttcttccattcaaccaactagctgcattgaactctgcttcttatttgcaacaacaacaactaccattcagccagctacctgctgcctacccccagcaatttcttccattcaaccaactggcagcattgaactctcctgcttatttacagcagcaacaactactaccattcagccagctagctggtgtgagccctgctaccttcttgacacaaccacagttgttgccgttctaccagcacgttg

SEQ ID NO: 10257 - DNA, 606 bp, Zea mays
  unsure (1)..(606): unsure at all n locations; Clone ID: LIB3061-077-Q1-K6-D4
ngatggcacaaaactcagggcacaacaactacaacaactcgtgctagcaaaccttgctgcctactctcagcaacagcagttacctttggtgcatttgttggcacaaaacatcagggcacaacaactacaacaactcgtgctagcaaaccttgctgcctactctcagcaacaacagtttctgccattcaaccaactagctgcattgaactctgctgcttatttgcagcaacaacaactactaccattcagccagctagctgctgcctacccccggcaatttcttccattcaaccaactggcagcattgaactctcatgcttatgtacaacaacaacaactactaccattcagccagctagctgctgtgagccctgctgccttcttgacacagcaacatttgttgccgttctacctgcacactgcgcctaacgttggcaccctcttacaactgcaacaattgctgccattcgaccaacttgctttgacaaacccagcagtgttctaccaacaacccatcattggtggtgccctcttttagattgcttatgagttatagttcaataataaagttttttttgctgaaaaaaaaanaaaaaagggcggccg

SEQ ID NO: 10258 - DNA, 608 bp, Zea mays
  Clone ID: LIB3061-077-Q1-K6-D7
gcattcagaaacacaccaagcgaagctacctagcaacgacttaacaacaatggctaccaagatattagccctccttgcgcttcttgccctttttgtgagcgcaacaaatgcgttcattattccacaatgctcacttgctcctagtgccattataccacagttcctccgaccagttacttcaatgggcttcgaacacctagctgtgcaagcctacaggctacaacaagcgcttgcggcgagcgtcttacaacaaccaattaaccaattgcaacaacaatccttggcacatctaaccatacaaaccatcgcaacacaacagcaacaacagttcctaccagcactgagccaactagatgtggtgaaccctgtcgcctacttgcaacagcaggtgcttgcatccaacccacttgctctggcaaacgtagctgcataccaacaacaacaacaattgcaacagtttctgccagcgctcagtcaactagccatggtgaaccctgccgcctacctacaacagcaacaactgctttcatctagccctctcgttgtgggtaatgcacctacatacctgcaacaacaattgctgcaacagattgtaccagctctgactc

SEQ ID NO: 10259 - DNA, 152 bp, Zea mays
  unsure (1)..(152): unsure at all n locations; Clone ID: LIB3061-077-Q1-K6-D8
tgnaaaacactgnctttggnagggataacaagatggaactcaactgatgaggaagaaatatgccacttgtgactagagatgtctcacaccggcactgctgccagcctgatacgactgttaggtggcttaagccctcactgattgttacttat

SEQ ID NO: 10260 - DNA, 609 bp, Zea mays
  unsure (1)..(609): unsure at all n locations; Clone ID: LIB3061-077-Q1-K6-D9
caacatcaccagcagcagcaacaccaacaacaacaagttcacatgcaaccacaaaaacatcagcaacaacaagaagttcatgttcaacaacaacaacaacaaccgcagcaccaccaccaacaacaacaacaacagcaccaacaacaacatcaatgtgaaggccaacaacaacatcaccaacaatcacaaggccatgtgcaacaacacgaacagagccatgagcaacaccaaggacagagccatgagcaacaacatcaacaacaattccagggtcatgacaagcagcaacaaccacaacagcctcagcaatatcagcagggccagngaaaaatcacaacagcaacaatgtcattgccaggagcagcaacagactacaaggtgcagctataactactatagcagtagctcaaatctaaaaaattgtcatgaattcctaaggcagcagtgcagccctttggtaatgccttttctccaatcacgtttgatacaaccaagtagctgccaggtattgcagcaacaatgttgtcatgatcttaggcagattgagccacaatacattcaccaagcaatctacaacatggttcaatccataatccaggaggagcaaca

SEQ ID NO: 10261 - DNA, 585 bp, Zea mays
  unsure (1)..(585): unsure at all n locations; Clone ID: LIB3061-077-Q1-K6-E1
ccacaagcacatagnaaagtggaaggaggggcggcaatagagcaacaatggcggccaagnaattttccatccttatgctccttgctctttctgcatgtgttgctaacgcgaccatttttcctcaatactcacaagctcctatagctgcccttcttcccccataccttccatcaatgaccgcttcagtttgtgaaaacccagcccttcaaccctacaggctccaacaagcaatcgcaacaagcaacttacctttatcacccctgttctttcaacaatcgccagccctatctttggtgcagtcattggtacaaaccatcagggcacaacagctgcaacaactcgtgctaccagtgatcagccaagtagctctggcaaacctttctccctactctcagcaacaacaatttcttccattcaaccaactgtctacactgaaccctgctgcttatttacaacaacaacaactactaccattcagccagctagctactgcctactctcagcagcaacaatttcttccatttaaccaattggccgcactgaacccctctgcttatttccagcagcaaatactactaccatttg

SEQ ID NO: 10262 - DNA, 592 bp, Zea mays
  Clone ID: LIB3061-077-Q1-K6-E10
gccgcttgccggctaccagaaaaagggcggggcggcggcggcggctaggcgtgccgctggccttctccctctcctcctatcctcgcggtccggtgctcgcatacccctccaccgggctgtatcccagatccctccgccttgctcctatcgcctactctcgcagcaagccaagcgccgggggcggctctgcctctgcctctgcctcagcctccgcgtcgaatggcgcgaccgcggaaagaacccgtgagctgcatctgtacaacacgaagtcgcggaagaaggagcagtttcggccgcgcgatccaggcggggaggtcggcatgtacgtctgcggcatcactccctacgacgacagtcacatcggccatgcccgcgcatacgtagcctttgacgtcgtctacaggtacttgcgctatttggactatgaagttcgctatgttcggaacttcaccgacattgatgacaagataatcgcaagagcaaatcagctgggggaagatccttttaacttaagtaaaaggttctctgatgacttcttgttagacatggccaatcttcaatgtttaccaccatctgtggagccccgtgtttc

SEQ ID NO: 10263 - DNA, 592 bp, Zea mays
  unsure (1)..(592): unsure at all n locations; Clone ID: LIB3061-077-Q1-K6-E4
gnaccaaactagcaacatagnaaagcacagtggggtgaccaacaatggcagccaaaatattttgcctccttatgctccttggtctttctgcaagtgctgctacggcgaccattttcccgcaatgctcgcaagctcctatagcttcccttcttcccccgtacctctcaccagcggtgtcttcggtgtgtgaaaacccaattcttcaaccctacaggatccaacaggcaatcacagctggcatcttacctttatcacccttgttcctccaacaatcatcagccctattacatcagttacctttggtgcatttattggcacaaaacatcagggcacaacaactacaacaacttgtgctagcaaaccttgctgcctactctcagcaacagcagtttcttccattcaaccaactagctgcattgaactctgcttcttatttgcaacaacaacaactaccattcagccagctacctgctgcctacccccagcaatttcttccattcaaccaactggcagcattgaactctcctgcttatttacagcagcaacaactactaccattcagccagctagctggtgtgagccctgctacctt

SEQ ID NO: 10264 - DNA, 588 bp, Zea mays
  unsure (1)..(588): unsure at all n locations; Clone ID: LIB3061-077-Q1-K6-E5
ccgatcgacaccatnagggtgttgctcggtgccctcgctctcctggctctcgctgcgagcgccacctccacgcatacaagcggcggctgcggctgccagccaccgccgccggttcatctaccgccgccggtgcatctgccacctccggttcacctgccacctccggtgcatctcccaccggcggtccacctgccgccgccggtccacctgccaccgccggtccatgtgccgccgccggttcatctgccgccgccaccatgccactaccctactcaaccgccccggcctcagcctcatccccagccacacccatgcccgtgccaacagccgcatccaagcccgtgccagctgcagggaacctgcggcgttggcagcaccccgatcctgggccagtgcgtcgagtttctgaggcatcagtgcagcccgacggcgacgccctactgctcgcctcagtgccagtcgttgcggcagcagtgttgccagcagctcaggcaggtggagccgcagcaccggtaccaggcgatcttcggcttggtcctccagtccatcctgcagcagcagccgcaaagcggccaggtcgcggggctg

SEQ ID NO: 10265 - DNA, 595 bp, Zea mays
  unsure (1)..(595): unsure at all n locations; Clone ID: LIB3061-077-Q1-K6-E6
accatccanacagcaaacggcaggcgtgagaggacgtcgacagaacacatgaagaggtcatcgttctcgtcgtgtgcctggctctgtcagctgccagcgcctctgcaatgcagatgccctgcccctgcgcggggctgcagggcttgtacggcgctggcgccggcctgacgacgatgatgggcgccggcgggctgtacccctacgcggagtacctgaggcagccgcagtgcagcccgctggcggcggcgccctactacgccgggtgtgggcagacgagcgccatgtaccagccgctccggcaacagtgctgccagcagcagatgaggatgatggacgtgcagtccgtcgcgcagcagctgcagatgatgatgcagcttgagcgtgccgctgccgccagcagcagcctgtacgagccagctctgatgcagcagcagcagcagctgctggcagcccagggtctcaaccccatggccatgatgatggcgcagaacatgccggccatgggtggactctaccagtaccagtaccagctgcccagctaccgcaccaacccctgtggcgtctccgctgccattccgccctactactgattcat

SEQ ID NO: 10266 - DNA, 590 bp, Zea mays
  unsure (1)..(590): unsure at all n locations; Clone ID: LIB3061-077-Q1-K6-E7
gtggnaatccagtagcaacaacaggagcagcagggcgaccaagnaattttccctccttatgctccttgctctttctgcatgtgttgctaacgcgacaattttccctcaatgctcacaagctcctatagcttcccttcttcccccataccttccatcaatgatagcttcagtatgtgaaaacccagctcttcagccctataggctccaacaagcaatcgcagcaagcaacatacctttatcacccttgttgtttcaacaatcgccagccctatctttggtgcagtcattggtacaaaccatcagggcacagcagctgcagcaactcgtgctacctgtgatcaaccaagtagctctggcaaacctttctccctactctcagcaacaacaatttcttccattcaaccaactgtctacactgaaccctgctgcttatttgcagcaacaactattaccattcagccagctagctactgcctactctcagcaacaacaacttcttccatttaaccaattggccgcactgaaccccgctgcttatttgcagcagcaaatactactaccatttagccagctagctgcagcaaaccgtg

SEQ ID NO: 10267 - DNA, 512 bp, Zea mays
  unsure (1)..(512): unsure at all n locations; Clone ID: LIB3061-077-Q1-K6-E9
gccaaaacancacacaaacacaagacacccagcccnaactgcaagtgctgctaccgcaacacaaaccgccacaatgctcacaaactccacaagcacccctcctacccccatacctctgaccagcggcgcaacaacaatgcgaaggggggggggtccaaccccacaagatccaacaggcccacgcacaacacctctgaccttgaccaccccagcaccttcaacaaccgtcacccctacaacacaagcaacaccaaccgcatcagcctgacacaaaacatcaaggcacaacaacaacaacaactcgacctaggaaacctcgctacctactaccaactacaacaggcacctacatccaaccaaccagctgcacaaaactctgaagcttattgacaacaacaaccaccattcaanccctagctaatgcctaccccccaaaacgcttgcaacaaaccaactggcagcatggaactcagctgcaaagttacaacaatatcaggtaccacgatccacac

SEQ ID NO: 10268 - DNA, 615 bp, Zea mays
  Clone ID: LIB3061-077-Q1-K6-F10
gccaccttcaaggttcttgatgctggatgggacagacagtgttattggtgaaggatgtgttattaaaaactgcaagataaaccattctgtagttggactccgatcttgcatatctgaaggtgctatcatagaggacagtttactaatgggtgcggactactatgagacagaagctgatgggagagagctccttgccgaaaaagtggcattcctattggtattgggaaaaattcatgcatcaggagagcaatcattgacaagaatgctcgaattggagacaatgttaagatactcaatgctgacaatgttcaagaagctgcaagggagacagacgggtacttcatcaaaggtggaattgtcacagtgatcaaggatgctttactccctagtggaacagttatatgaagtgaacgtgcgacatgcagctgtgtgtctcgacattcgacaatgatcagcacctggttacatgcgtgatctgcagatcagtctgttggagatcatcggagcaataaaagtgtcatccaaggcattttttctttctttttgctcttttgtgtccttcaatgttgtagggtagaatgttgtagcagcaaatgttagttacatgttgaatcg

SEQ ID NO: 10269 - DNA, 599 bp, Zea mays
  unsure (1)..(599): unsure at all n locations; Clone ID: LIB3061-077-Q1-K6-F11
ggcagaaagcaganaagcttgggggagtagggctttggtggtagagttgctgcaactacacaatgtattcttacctcagagcttgtcctgaaactcttcattctcaaacacagtcctctaggaaaaatatgctgatgcaaaccgtgtatctgctatcattttgggcggggggggggggtggtcagctctttcctctgacaagcacaagagctacgcctgctgtacctgttggaggatgttacaggcttattgatatccctatgagtaactgcttcaacagtggtataaataagatatttgtgatgagtcagttcaattctacttcgcttaaccgccatattcatcgtacataccttgaaggcgggatcaactttgctgatggatctgtacaggtattagcggctacacaaatgcctgaagagccagctggatggttccagggtacagcagactctatcagaaaatttatctgggtactcgaggattattacagtcacaaatccattgacaacattgtaatcttgagtggcgatcagctttatcggatgaattacatggaacttgtgcagaaacatgtcgaggacgatgctgatatcact

SEQ ID NO: 10270 - DNA, 602 bp, Zea mays
  unsure (1)..(602): unsure at all n locations; Clone ID: LIB3061-077-Q1-K6-F12
accaactagcaacatagnaagcacagtgggggagcaacaatggcagccaaaaattttgcctccttatgctccttggtctttctgcaagtgctgctacggcgaccattttcccgcaatgctcgcaagctcctatagcttcccttcttcccccgtacctctcaccagcggtgtcttcggggggggaaaacccaattcttcaaccctacaggatccaacaggcaatcgcagctggcatcttacctttatcacccttgttcctccaacaatcatcagccctattacaacagttacctttggtgcatttattggcacaaaacatcagggcacaacaactacaacaacttgtgctagcaaaccttgctgcctactctcagcaacagcagtttcttccattcaaccaactaggttcattgaactctgcttcttatttgcaacaacaacaactaccattcagccagctacctgctgcctacccccagcaatttcttccattcaaccaactagcagcattgaactctcctgcttatttacagcagcaacaactactaccattcagccagctagctggtgtgagccctgctaccttcttgacacaaccacag

SEQ ID NO: 10271 - DNA, 511 bp, Zea mays
  Clone ID: LIB3061-077-Q1-K6-F2
agggcacaacaactacaacaacttgtgctagcaaaccttgctgcctactctcagcaacagcagtttcttccattcaaccaactaggttcattgaactctgcttcttatttgcaacaacaacaactaccattcagccagctacctgctgcctacccccagcaatttcttccattcaaccaactagcagcattgaactctcctgcttatttacagcagcaacaactactaccattcagccagctagctggtgtgagccctgctaccttcttgacacaaccacagttgttgccgttctaccagcacgttgcgcctaacgctggcaccctcttacaactgcaacaattgctgccattcaaccaacttgctttgacaaacccagcagtgttctaccaacaacccatcattggtggtgccctcttttagatttcttatgagttatagttcaataataaagttttttatctgatgtttgtggcttcccagaaataagaaagtacatttctagattctt

SEQ ID NO: 10272 - DNA, 588 bp, Zea mays
  unsure (1)..(588): unsure at all n locations; Clone ID: LIB3061-077-Q1-K6-F3
cgnaaaatcgagtagacgcccacggacgggcgacggaggacgtacggaccaagtagaagcaagtagtaggcatggcggaggcagaggcccatggcatcgtcatcgtcggcggtggcatctgcggcctagccaccgctcttgctcttcaccggaaagggattcctagccttgtgttggagaagtccaggagcctgcgagcggacggcgcgggcatcggcgtgcacgccaacggatggcgagctttggagcagcttggcgtcgccgcggagcttagagagactgcacagcttatcaccgtgtaccatgacgtgtggcagcagggagacaaaacgagccgggaaaaggttccagtaaggatggagctccgatgcttaaacagaaaggacctgatcgaggcactggccaaggacatccctgcaggcgcgatccgattcggctgccgcgtcgctgccgtcgctgcggaccccggcggcggtcacggcgccgtcctgacaatggcggacggtactgccatgaaggccaaggtcctgatcgggtgcgagggcacatactccgcggtggccaggtaccttgggctgtctccggtga

SEQ ID NO: 10273 - DNA, 600 bp, Zea mays
  unsure (1)..(600): unsure at all n locations; Clone ID: LIB3061-077-Q1-K6-F4
anaaagccaatagtgtaccaacaatggcagccaaaatttttgcctccttatgctccttggtctttctgcaagtgctgctacggcgaccattttcccacaatgctcacaagctcctatagcttcccttcttcccccgtacctctcaccagcggtgtcttcggtatgtgaaaacccaattcttcaaccctataggatccaacaggcaatcgcagctggcatcttacctttatcacccttgttcctccaacaatcatcagccctattacagcagttacctttggtgcatttattggcacaaaacatcagggcacaacaactacaacaacttgtgctagcaaaccttgctgcctactctcagcaacaacagtttcttccattcaaccaactagctgcattgaactctgcttcttatttgcaacaacaacaactaccattcagccagctatctgctgcctacccccagcaatttcttccattcaaccaactgacagctttgaactctcctgcttatttacagcagcaacaactactaccattcagccagctagctggtgtgagccctgctaccttcttgacacaaccacaattgttgccgttcta

SEQ ID NO: 10274 - DNA, 510 bp, Zea mays
  Clone ID: LIB3061-077-Q1-K6-F5
acaatagtgtaccaacaatggcagctaaaatttttgcctccttatgctccttggtctttctgcaagtgctgctacggcgaccattttcccacaatgctcacaagctcctatagcttcccttcttcccccgtacctctcaccaacggtgtcttcggtatgtgaaaacccaattcttcaaccctacaggatccaacaggcaatcgcagctggcatcttacctttatcacccttgttcctccaacaatcatcagccctattacagcagttacctttggtgcatttattggcacaaaacatcagggcacaacaactacaacaacttgtgctagcaaaccttgctgcctactctcagcaacagcagtttcttccattcaaccaactagctgcattgaactctgcttcttatttgcaacaacaacaactaccattcagccagctatctgctgcctacccccagcaatttcttccattcaaccaactgacagcattgaactcttctgcttatttaca

SEQ ID NO: 10275 - DNA, 507 bp, Zea mays
  unsure (1)..(507): unsure at all n locations; Clone ID: LIB3061-077-Q1-K6-F6
gcaagnactaccttggcgaggcgttccatggcaagaccaccaagcgcgcccgctcgcacggccgcaagatccacgtctccatcaagcaagagacctcgcgcgtcctgggcaacctcgcgtgggcgtacatgcagcagcgcaacttcatggcggcggaggtggtgtaccggaaggcgcagatgatcgacccggacgccaacaaggcgtgcaacctcgcgctctgcctcatcgagcaggcccggctcgccgacgcccagctcgtcctcaccgacgtgctcgctgggaggtaccaggcgcgcgaccagcaggacggcaagatcgtccggaaagtggaggagctgctggcccggatcatggcgcagacgtggcagggcggcggcggcgtcggtcgacgacgccgggacgagagcgacgacgacgacgacgactgggttgagaaccagatgctggctctgctggacgtggcggtgccgtaccggaagaccagcaggaggctgcccgtcttcg

SEQ ID NO: 10276 - DNA, 589 bp, Zea mays
  unsure (1)..(589): unsure at all n locations; Clone ID: LIB3061-077-Q1-K6-F7
ggnatccaacaggcaatcgcagcaggcatgttacctttatcacccttgttcctccaacaaccgtcagccctattacagcagttacctttggtgcatttgttggcacaaaacatcaaggcacaacaactacaacaacttgtgctaggaaaccttgctgcctactctcagcaacagcagtttgtgccattcaaccaactggctgcattgaactctgctgcttatttgcaacaacaactaccattcagtcagctagctgctgcctacccccagcaatttcttccattcaaccaactggcagcattgaactctgctgcttatttacaacagcaacagctaccaccattcagccagctagctgatgtgagccctgttgccttcttgacacaacaacagttgttgccgttctacctgcacgctgcgcctaacgctggcaccctcttacaactgcaacaattgctgccattcaaccaacttgctttgacaaacccaacaacgttctaccaacaacccatcattggcggtgccctcttttagattgcttatgagttatagttcaataatgaagttttttggatgatgtttgtggctt

SEQ ID NO: 10277 - DNA, 599 bp, Zea mays
  unsure (1)..(599): unsure at all n locations; Clone ID: LIB3061-077-Q1-K6-F8
gcattcagnaacacaccaagcgagggtgagtgagcaacgacctaacaacaatggctaccaagatattagccctccttgcgcttcttgccctttttgtgagcgcaacaaatgcgttcattattccacaatgctcacttgctcctagtgccattattccacagttcctcccaccagttacttgagtgggcttcgaacacctagctgtgcaagcctacatgctacaacaagcgcttgcggcgagcgtcttacaacaaccaattgaccaattgcaacaacaatccttggcacatctaaccatacaaaccatcgcaacgcaacagcaacaacagttcctaccagcactgagccaactagctgtggtgaaccctatcgcctacttgcaatagcagatgcttgcatccaacccacttgctctggcaaacgtagctacataccaacaacaacaattgcaacagtttctaccagcgcttagtcaactagccatggtgaaccctgccgcctacctacaacagcaacaactgctttcatctagccctctcgctatggttaatgcacctacatacctgcaacaacagttgttgcaacagattgtaccagct

SEQ ID NO: 10278 - DNA, 595 bp, Zea mays
  unsure (1)..(595): unsure at all n locations; Clone ID: LIB3061-077-Q1-K6-F9
gcaacatagnaaagcacaatagtgtaccaacaatggcagccaaaaattttgcttccttatgctccttggtctttctgcaagtgctgctaccgcaaccattttcccacaatgctcacaagctcctatagcttcctttcttcccccatacctctcaccagcggtgtcttcagtatgtgaaaacccaattcttcaaccctacaggatccaacaggcaatcgcagcaggcatcttacctttatcacccttgttcctccaacaaccgtcagccctattacagcagttacctttggtgcatttgttggcacaaaacatcaaggcacaacaactacaacaacttgtgctaggaaaccttgctgcctactctcagcaacagcagtttcttccattcaaccaactggctgcattgaactctgctgcttatttgcaacaacaactaccattcagtcagctagctgctgcctacccccagcaatttcttccattcaaccaactggcagcattgaactctgctgcttatttacaacagcaacagctaccaccattcagccagctagctgatgtgagccctgttgccttcttgacacaacaacagttg

SEQ ID NO: 10279 - DNA, 594 bp, Zea mays
  Clone ID: LIB3061-077-Q1-K6-G10
attgagaccaactagcaacataaagggagaggggggaccaacaatggcagccaaaatttttgcctccttatgctccttggtctttctgcaagtgctgctacggcgaccattttcccgcaatgctcgcaagctcctatagcttcccttcttcccccgtacctctcaccagcggggggtggggggtgtgaaaacccaattcttcaaccctacaggatccaacaggcaatcacagctggcatcttacctttatcacccttgttcctccaacaatcatcagccctattacatcagttacctttggtgcatttattggcacaaaacatcagggcacaacaactacaacaacttgtgctagcaaaccttgctgcctactctcagcaacagcagtttcttccattcaaccaactagctgcattgaactctgcttcttatttgcaacaacaacaactaccattcagccagctacctgctgcctacccccagcaatttcttccattcaaccaactggcagcattgaactctcctgcttatttacagcagcaacaactactaccattcagccagctagctggtgtgagccctgctaccttcttg

SEQ ID NO: 10280 - DNA, 595 bp, Zea mays
  Clone ID: LIB3061-077-Q1-K6-G12
ccagctgtgcaagcctataggctacaggaggcggttgcggcgagcgtcttagaacaaccaattgcccaattacaacaacaatccttagcacatctaaccatacaaaccatcgcaacgcagcagcaacaagcactgagccacctagccgtggtgaaccctatcgcctacttgcaacagcggggggttgcatccaacccacttgctttggcaaacgtagctgcataccaacaacaacaacagttgcaacagtttctgccagcgctcagtcaactagccatggtgaaccctatcgcctacctacaacagcaacaacttctttcatctagcccgctcgctatgggcaatgcacctacatacctgcaacaacagttgttgcaacaacagttgctgcaacaaattgtaccagctcttactcagctagctgtggcaaaccctgctgcctacttgcaacaactacttccattcaaccaactgactgtgtcgaactctgctgcgtacctacaacagcgacaacagttacttaatccactagcggtggctaacccattggtcgctgccttcctacagcagcaacaattgctgccatacaaccagt

SEQ ID NO: 10281 - DNA, 562 bp, Zea mays
  unsure (1)..(562): unsure at all n locations; Clone ID: LIB3061-077-Q1-K6-G2
tccgcaacaagcaacatanaagtgggatacagtagcaacaatagaacaacaatggcggccaaaatttttccatccttatgctccttgctctttctgcatgtgttgctaacgcgaccatttttcctcaatactcacaagctcctatagctgcccttcttcccccataccttccatcaatgaccgcttcagtttgtgaaaacccagcccttcaaccctacaggctccaacaagcaatcgcaacaagcaacttacctttatcacccctgttctttcaacaatcgccagccctatctttggtgcagtcattggtacaaaccatcagggcacaacagctgcaacaactcgtgctaccagtgatcagccaagtagctctggcaaacctttctccctactctcagcaacaacaatttcttccattcaaccaactgtctacactgaaccctgctgcttatttacaacaacaacaactactaccattcagccagctagctactgcctactctcagcagcaacaatttcttccatttaaccaattggccgcactgaacccctctgcttattt

SEQ ID NO: 10282 - DNA, 586 bp, Zea mays
  unsure (1)..(586): unsure at all n locations; Clone ID: LIB3061-077-Q1-K6-G3
nanacancaagcaacatagnaaagtagaaccattagcaacaatagagcaacaatggcgaccaagatattttccctccttatgctccttgctctttctacatgtgttgctaacgcgacaattttccctcaatgctcacaagctcctatagcttcccttcttcccccataccttccatcaattatagcttcagtatgtgaaaacccagctcttcaaccatataggcttcaacaagcaatcgcagcaagcaacatacctttatcgcccttgttgtttcaacaatcaccagccctatctttggtgcagtcattggtacaaaccatcagggcacaacagctgcagcaactcgtgctacctgtgatcaaccaagtagctctggcaaacctttctccctactctcagcaacaacaatttcttccattcaaccaactgtctacactgaaccctgctgcttatttgcagcaacaactattaccatttagccagctagctactgcctactctcagcaacaacaacttcttccatttaaccaattggccgcactgaaccccgctgcttatttgcagcagcaaatactactgccattt

SEQ ID NO: 10283 - DNA, 601 bp, Zea mays
  Clone ID: LIB3061-077-Q1-K6-G4
cttccgaccaatcaggctcttcttgcctggcggggccctaggtcctgatactgctgagcttgtggctaccaaggcaaagggactacctcgcatcactctctctctcgatagagttgccgcatctgcgctcaaagatgtcattgctgatttctcccttgcgctctatgaatcttacaaggccaggcaggaacatgcatccagagaacaagaacgagtgtcacagctcatggaaaatctagactctgaaagagaaaaaaacgaagtaatgcaaaagcaacttgaagccctttcattcctcgacaaaagaaaggctacaaagccaaagcttgtgactgataagtttccaagtgtgtcgggtgcacctccaagctctgatcaaatgattgttgctgtacagcagcaaacaccagtggctttacctagcaaagttcctcctgctaaaggtacgaagcgcgtggcccctttgcctcggagggcaagagtacgaggagctttgttgcaagatactgaagaaaatgctgatgataatacttagatattgctgatttatcagcattgattaactctttggcatgtaaacttattagtacatttctgctga

SEQ ID NO: 10284 - DNA, 566 bp, Zea mays
  Clone ID: LIB3061-077-Q1-K6-G5
ctttggtgcatgcattggtacaaaccagcagggcgcaacagctgcagcaactcgggctacctctgttcaaccaagtagctctggcaaacctttctccctactctcagcaacaacaatttcttccattcaaccaactgtctacactgaaccctgctgcttatttgcagcaacaactattaccatttagccagctagctactgcctactctcagcaacaacaacttcttccatttaaccaattggccgcactgaaccccgctgcttatttgcagcagcaaatactactaccatttagccagctagctgcagcaaaccgtgcttccttcttgacacagcaacagttgctgcctttctaccagcagtttgcggctaaccccgcaaccctcttacaactacaacaattgttgccctttgtccaacttgctttgacagacccagcggcctcctaccaacaacacatcattggtggtgccctcttttagattgcttattagttgtaattcaataataaagttttttggatgatgtatgtggccaaccagaaataagaagttacatttccagaa

SEQ ID NO: 10285 - DNA, 587 bp, Zea mays
  unsure (1)..(587): unsure at all n locations; Clone ID: LIB3061-077-Q1-K6-G6
caacaagcaacatagnaaagtggatacagtggcaacaatagagcaacaatggcggccaagatattttccatccttatgctccttgctctttctgcatgtgttgctaacgcgaccatttttcctcaatactcacaagctcctatagctgcccttcttcccccataccttccatcaatgaccgcttcagtttgtgaaaacccagcccttcaaccctacaggctccaacaagcaatcgcaacaagcaacttacctttatcacccctgttctttcaacaatcgccagccctatctttggtgcagtcattggtacaaaccatcagggcacaacagctgcaacaactcgtgctaccagtgatcagccaagtagctctggcaaacctttctccctactctcagcaacaacaatttcttccattcaaccaactgtctacactgaaccctgctgcttatttacaacaacaacaactactaccattcagccagctagctactgcctactctcagcagcaacaatttcttccatttaaccaattggccgcactgaacccctctgcttatttccagcagcaaatactactaccatttgg

SEQ ID NO: 10286 - DNA, 598 bp, Zea mays
  Clone ID: LIB3061-077-Q1-K6-G7
ataaatacatgccactcacatggtgctgctccatcttccaagtcaccaacgcaaattgcaccaagaaatccatcgagaggccgtcgacaggggaattaatggcgtcgtcgtctagcagcagccaccgccgcctcatcctcgcagccgccgtcctgctctccgtgctcgcggctgccagcgccagcgccgggacctcctgcgtgccggggtgggccatcccgcacaacccgctcccgagctgccgctggtacgtgaccagccggacctgcggcatcgggccgcgcctcccgtggccggagctgaagaggagatgctgccgggagctggcggacatcccggcgtactgccggtgcacggcgctgagcatcctcatggacggcgcgatcccgccgggcccggacgcgcagctggagggccgcctagaggacctgccgggctgcccgcgggaggtgcagaggggattcgccgccaccctcgtcacggaggccgagtgcaacctggccaccatcagcggcgtcgccgaatgcccctggattctcggcggcggaacgatgccctccaagtaactgcgaagagcatagtgcatgaggaatgagct

SEQ ID NO: 10287 - DNA, 560 bp, Zea mays
  Clone ID: LIB3061-077-Q1-K6-G8
acacaccaagcgaagcgcactaggggcgggcggagcaacaatggctaccaagatattagccctccttgcgcttcttgccctttttgtgagcgcaacaaatgcgttcattattccacaatgctcacttgctcctagtgccattattccacagttcctcccaccagttacttcaatgggggggggagcacctagctgtgcaagccaacatgcaacaacaagcgcttgcggcgagcgtcttacaacaaccaattgcccaattgcaacaacaatccttgccacatctaacaatacaagccatcacaacgcaacagcaacaacagttcctaccagcactgagccacctagccatggtgaaccctgccgcctacttgcaagagcagctgcttgcatccaacccacttgctctggcgaacgtagttgcaaaccagcaacaacaacagctacaacagtttctgccaacgctcagtcaactagccatggtgaaccctgccgcctacgtacaacaacaacaactgctttcatctagcccgctcgctgtgggcaatgcacctacatacctg

SEQ ID NO: 10288 - DNA, 452 bp, Zea mays
  unsure (1)..(452): unsure at all n locations; Clone ID: LIB3061-077-Q1-K6-G9
attgagaccaactagcaacataggaagcagcatagtgtaccaacaatggcagccaaaatattttgcttccttatgctccttggtctttctgcaagtgttgctaccgcaaccattttcccacaatgctcacaagctcctatagcttcccttcttcccccatacctctcaccagcggtgtcttcaatgtgtgaaaccccaattgttcaaccctacaggatccaacaggcaatcgcaacaggcatcttaccattatcacccttgttcctccaacaaccgtcagccctattacagcagttacctttggtccatntggtggcacaaaacatcagggcacaacaactataacaaactgtgctagcaaaccttgctgcatactctcagcaacatcagtttctttcattcaaccaactggctgcattgaactctgctgcttatttgcaacaacattacca

SEQ ID NO: 10289 - DNA, 126 bp, Zea mays
  unsure (1)..(126): unsure at all n locations; Clone ID: LIB3061-077-Q1-K6-H3
gnttgctagcaaccatctacttcatctctggtgtccctggggcctatgtgctttggtatcgcccgctttacaatgcgatgaggactgaaagtgctttgaagtttgggtggtttttcttgttttacc

SEQ ID NO: 10290 - DNA, 551 bp, Zea mays
  unsure (1)..(551): unsure at all n locations; Clone ID: LIB3061-077-Q1-K6-H5
ccggtccgaaatccgggctaaaaaaatcaatatattgattgaaattatctcgnaaaaaaagagagggggaaaaaaaaaaaaaaaaaaaaaaaaaaaaaaaaaaaaaaaaaaaaaaaaaaaaaaaaaaaaaaaaaaaaaagggggggcccgctctaaaagaaccaaacctaacgtccccggccatgcaacgaaaaacctttcttaaagggcaaccaaagggggggaggggccccccttttaaaaacgcggaaacgggaaaaacccgggcgtaaccaaactaaatgccctggaaaaaaacccccctttcccaagtgggggaaaaaccaaaaaggccccacccaatcccctttccaaaaagtggccaaccctaaagggcaaagggaaccccccctgaaccgggccataaagcgcgcggggggggggggtaaccccaaggggacccgtaaaattggcaaggccccaagcccccgctctttgggtttttttccctccctttctcgcaacttcgcccggttttccccgaaaaccttaaaaagggggcctcccttaag

SEQ ID NO: 10291 - DNA, 551 bp, Zea mays
  Clone ID: LIB3061-077-Q1-K6-H8
attgagaacaactagcaacataggagacagataggggaccaacaatggcagccaaaatattttgcctccttatgctccttggtctttctgcaagtgctgctacggcgaccattttcccacaatgctcacaagctcctatagcttcccttcttcccccgtacctctcaccagcgggggggggggggtgtgaaaacccaattcttcaaccctataggatccaacaggcaatcgcagctggcatcttacctttatcacccttgttcctccaacaatcatcagccctattacagcagttacctttggtgcatttattggcacaaaacatcagggcacaacaactacaacaacttgtgctagcaaaccttgctgcctactctcagcaacaacagtttcttccattcaaccaactagctgcattgaactctgcttcttatttgcaacaacaacaactaccattcagccagctatctgctgcctacccccagcaatttcttccattcaaccaactgacagctttgaactctcctgcttatttacagcagcaacaacta

SEQ ID NO: 10292 - DNA, 577 bp, Zea mays
  unsure (1)..(577): unsure at all n locations; Clone ID: LIB3061-077-Q1-K6-H9
agcgtccggttgcaaaccaacatcaacaacaactggggggggggctgccacagcttatgccactagtccatgtgagaaaccccttgcggctaccttcaacactaactacagctttaatatcatgctcttatctagggccatagctgctgcctacgtgcctaaagaactgtaacaacaaattgtaccaggggtggggggggttgttactgaaaaccctgtggcctaccctgaacacttgtttccatacaagctactatctatgcaaaactctgtggcgaaccttcaacagcgactacaacaactaaaaccattacttaaggctaacccattggttaatgcattgctacatgacttactacagctgccatacaagctgctctatatgatgaattctgtcttgaatacgcagtaacccatggatgaacgcaccatcttttatgaccacatattagatgacctataaaatggagtccttataccggcctgtgtaccctagagataatcactataatgattaagatatatcttgagatttatctcgataaaaaaaaaaaaaanaaaaaaannaaaaanaaaa

SEQ ID NO: 10293 - DNA, 662 bp, Zea mays
  unsure (1)..(662): unsure at all n locations; Clone ID: LIB3061-081-Q1-K6-A1
ataagatcccagaattcaatgaattagttcaccagaacagatggcgcgaagcattggatcgactacttgagacaaacaacttccctgaattcactggacgagtttgccctgctccttgtgaggggtcatgtgttcttgggattattgagaatccggtgtctatcaaaagtatagaatgtgcaatcatagacaaaggttttgaagagggatggatgattccacgacctccacttcaaagaacaggaaggaaggtggccattgttggcagtggaccatctggtttggctgctgcagatcaactaaataaaatgggccacttcgtaactgtgttcgaacgtgcagatcgaattggaggtttaatgatgtatggtgtgccaaacatgaagacagacaagattggcgttgtccagcgccgtgttaatttaatggctgaagagggtgtcacatttgtggtgaatgccaatgttggtagtgatcctttgtactcgattgaacgtctacgttctgaaaatgatgcggttattttggcttgtggagcaacaaaaccgagagatctcaccatccctggacgcgagctatctggagttcattttgcaatggaatttctccatgcaaatacgaaaagtntactcgacagcaacctgnaggatggtaaatatatc

SEQ ID NO: 10294 - DNA, 590 bp, Zea mays
  Clone ID: LIB3061-081-Q1-K6-A10
tagcgaactacctagcaacgacttaacaacaatggctaccaagatattagccctccttgcgcttcttgccctttttgtgagcgcaacaaatgcgttcattattccacaatgctcacttgctcctagtgccattataccacagttcctccgaccagttacttcaatgggcttcgaacacctagctgtgcaagcctacaggctacaacaagcgcttgcggcgagcgtcttacaacaaccaattaaccaattgcaacaacaatccttggcacatctaaccatacaaaccatcgcaacacaacagcaacaacagttcctaccagcactgagccaactagatgtggtgaaccctgtcgcctacttgcaacagcaggtgcttgcatccaacccacttgctctggcaaacgtagctgcataccaacaacaacaacaattgcaacagtttctgccagcgctcagtcaactagccatggtgaaccctgccgcctacctacaacagcaacaactgctttcatctagccctctcgttgtgggtaatgcacctacatacctgcaacaacaattgctgcaacagattgtaccagctctgactc

SEQ ID NO: 10295 - DNA, 644 bp, Zea mays
  unsure (1)..(644): unsure at all n locations; Clone ID: LIB3061-081-Q1-K6-A11
gcgttcttacatagnaagcacaatagtgtaccaacaatggcagccaaaaattttgcctccttatgctccttggtatttctgcaagtgctgctacggcgaccattttcccgcaatgctcacaagctcctatagcttcccttcttcccccgtacctctcaccagcggtgtcttcggtatgtgaaaacccaattcttcaaccctacaggatccaacaggcaatcgcagctggcatcttacctttatcacccttgttcctccaacaatcatcagccctattacagcagttacctttggtgcatttattggcacaaaacatcagggcacaacaactacaacaacttgtgctagcaaaccttgctgcctactctcagcaacagcagtttcttccattcaaccaactagctgcattgaactctgcttcttatttgcaacaacaacaactaccattcagccagctacctgttgcctacccccaacaatttcttccattcaaccaactggcagcattgaactctcctgcttatttacagcagcaacaactactacncattcagccagctagctggtgtgagccctgctaccttcttgacacaaccacagttgttgccgttctaccagcacgctgncgcctacgctggcaccct

SEQ ID NO: 10296 - DNA, 494 bp, Zea mays
  Clone ID: LIB3061-081-Q1-K6-A12
gtcgacccagcgtccgttcagcttttctttgctggcatcattgtcatctgtttggatgaacttctccagaaggttatggtttgggatctggtatttctctgttcattgctaccaatatctgtgagaatatcatctggaaggcatttagccccacaaccatcaacagtggtcgtggtgctgaattcgaaggggctgtcattgcactgttccatctgttgattacgagaaccgataaagtccgtgctcttcgtgaggctttctaccgccagaaccttccaaatgtgaccaatttgcttgccactgtcttggtattcctcatagttatctatttccaaggcttccgtgttgtgcttccagtgagatcaaagaatgctcgtggccagcaaggctcatatccaattaagctgttctacacttcaaacatgcccatcattcttcactctgcgctgattaccaacctctattttatatcccagcttctctacaggaagtac

SEQ ID NO: 10297 - DNA, 674 bp, Zea mays
  unsure (1)..(674): unsure at all n locations; Clone ID: LIB3061-081-Q1-K6-A2
gagcattcagaaacacacctagcgaagcgcactagcaacgacctaacaacaatggcttccaagacattatccctccttgcgcttcttgccctttttgtgagtgcaacaaatgcgttcattattccacaatgctcacttgctccgagtgccattattccacagttcctccctccagttacttcaatgggcttcgaacacccagctgtgcaagcctataggctacaacaagcgcttgcggcgagcgtcttagaacaaccaattgcccaattacaacaacaatccttggcacatctaaccatacaaaccatcgcaacgcagcagcaacaagcactgagccacctagccgtggtgaaccctatcgcctacttgcaacaacagctgcttgcatccaacccacttgctttggcaaacgtagctgcataccaacaacaacaacagttgcaacagtttctaccagcgctcagtcaactagccatggtgaaccctatcgcctacctacaacagcaacaacttctttcatctagcccgctcgctatgggcaatgcacctacatacctgcaacaacagttgttgcaacaacagttgctgcaacaaattgtaccagctcttactcagctagctgtggcaaaccctgctgcctacttgcaacaactacttncattcaccaactgact

SEQ ID NO: 10298 - DNA, 193 bp, Zea mays
  unsure (1)..(193): unsure at all n locations; Clone ID: LIB3061-081-Q1-K6-A3
tgctnccctttagccagctagctgctgcataccgtgcttccttcttgccccagctcctgttgttgcctttttgccngcagtttgcggcgtcccccgccgccctctttcttcttcaacannngntgctttttttttcttttgctttgccggtcccggcggtcttcttcctccttcgcgtccttggtggtgccct

SEQ ID NO: 10299 - DNA, 647 bp, Zea mays
  Clone ID: LIB3061-081-Q1-K6-A4
cccgggcaaaaacaaccaagcgaagcgcactagcaacgacctaacaccaatggctaccaagatattagccctccttgcgcttcttgcccttttagtgagcgcaacaaatgcgttcattattccacagtgctcacttgctcctagtgccattattccacagttcctcccaccagttacttcaatgggcttcgaacatccagccgtgcaagcctacaggctacaactagcgcttgcggcgagcgccttacaacaaccaattgcccaattgcaacaacaatccttggcacatctaaccctacaaaccattgcaacgcaacaacaacaacaacaacagtttctgccatcactgagccacctagccgtggtgaaccctgtcacctacttgcaacagcagctgcttgcatccaacccacttgctctggcgaacgtagctgcataccagcaacaacaacagctgcaacagtttatgccagtgctcagtcaactagccatggtgaaccctgccgtctacctacaactactttcatctagcccgctcgcggtgggcaatgcacctacgtacctacaacaacagttgctgcaacaaattgtaccagctctgactcagctagctgtggcaaaccctgctgcctacttacaacagttgc

SEQ ID NO: 10300 - DNA, 634 bp, Zea mays
  unsure (1)..(634): unsure at all n locations; Clone ID: LIB3061-081-Q1-K6-A5
gcggcggctgcggctgccagccaccgccgccggttcatctaccgccgccggtgcatctgccacctccggttcacctgccacctccggtgcatctcccaccgccggtccacctgccgccgccggtccacctgccaccgccggtccatgtgccgccgccggttcatctgccgccgccaccatgccactaccctactcaaccgccccggcctcagcctcatccccagccacacccatgcccgtgccaacagccgcatccaagcccgtgccagctgcagggaacctgcggcgttggcagcaccccgatcctgggccagtgcgtcgagttcctgaggcatcagtgcagcccgacggcgacgccctactgctcgcctcagtgccagtcgttgcggcagcagtgttgccagcagctcaggcaggtggagccgcagcaccggtaccaggcgatcttcggcttggtcctccagtccatcctgcagcagcagccgcaaagcggccaggtcgcggggctgttggcggcgcagatagcgcagcaactgacggcgatgtgcggcctgcagcagccgactccatgcccctacgctgctgccggcggtgtccnccactgaagaaacatgtgctgtagtatagccgctgg

SEQ ID NO: 10301 - DNA, 634 bp, Zea mays
  unsure (1)..(634): unsure at all n locations; Clone ID: LIB3061-081-Q1-K6-A6
gtttcaacaatcgccagccctatctttggtgcagtcattggtacaaaccatcaaggcacagcagctgcagcaactcgtgctacctgtgatcaaccaagtagctctggcaaacctttctccctactatcagcaacaacaatttcttccattcaaccaactatctacactgaaccctgctgcttatttgcagcaacaactattaccattcagccagctagctactgcctactctcatcaacaacaacttcttccatttaaccaattggccgcactgaacctcgctgcttatttgcagcagcaaatattactaccatttagccagctagctgcagcaagccgtgcttccttcttgacacagcaacagttgctgcctttctaccagcagtttgcggctaaccccgcaaccctcttacaactacaacaattgttgccctttgtccaacttgctttgacaaacccagcagcctcctaccaacaacacatcanttggtggtgccctcttttagattgcttattagttgtaattcaataataaagttttttggatgatgtatgtggccaaccagaaataagaagttacatttccagattctaatgtgatattggtctccaggggtgtcgatattactttgct

SEQ ID NO: 10302 - DNA, 63 bp, Zea mays
  Clone ID: LIB3061-081-Q1-K6-A7
aaaaaaaaaaaaaaaaaaaaaaaaaaaaaaaaaaaaaaaaaaaaaaaaaaaaaaaaaaaaaaa

SEQ ID NO: 10303 - DNA, 671 bp, Zea mays
  unsure (1)..(671): unsure at all n locations; Clone ID: LIB3061-081-Q1-K6-A9
ccggtcccggcaattcccggnngtcgacccaacgccgttcgtccaactagtcaacatagnaaagcacaatagtgtaccaacaatggcagccaaaatattttgcttccttatgctccttggtctttctgcaagtgttgctaccgcaaccattttcccacaatgctcacaagctcctatagcttcccttcttcccccatacctctcaccagcggtgtcttcaatgtgtgaaaccccaattgttcaaccctacaggatccaacaggcaatcgcaacaggcatcttaccattatcacccttgttcctccaacaaccgtcagccctattacagcagttacctttggtccatttggtggcacaaaacatcagggcacaacaactacaacaacttgtgctagcaaaccttgctgcatactctcagcaacatcagtttcttccattcaaccaactggctgcattgaactctgctgcttatttgcaacaacaattaccattcagccagctagttgctgcctacccccagcaatttcttccattcaaccaactagcagcattgaactctgctgcttatttacagcagcaacaactactaccattcagccagcttagctgatgtgagccctgctgccttcttgcacaacaacagttgtntgccgttctacctgcacgctatg

SEQ ID NO: 10304 - DNA, 668 bp, Zea mays
  Clone ID: LIB3061-081-Q1-K6-B10
cttggaaatgctaattgccgtaaaccttggatgagatctcttggcagaacagataggcttggatcactatctgaagctcgtgctgtattaaatgcagcaagacagcaagcaatgaaggttgcaccaaacatgccacagcaccaggcctgccttgatgtaatggaagaaggcatattatatggaggtcaagctggtgttttgaaggaagccagggttttcaaggaactggtggtagcaccaacatcaaaggctcttgtccatgttttctttgcacaacgttccacgacaaaggtgccaggtgtaactgatgttcaactgaaaccaaggccaattagaaaagttgctgttattggtggtggtctgatgggctctggaattgctacatcacttcttgttagcaatatttctgttgtgctcaaggaagtgaaccctcagtttctgcaaaggggagagaaaatgatagcaggtaatcttgagggcctgataaaaaaaggttcactaacaaaggataggatgcacaaggccatgtcgcttttcaagggcgctttggattattcagatttaaggatgttgatatggttattgaggctgttattgagaagattcctttgaagcaatcgatattttctgacattgaaaaaatctgtccgaaacattgcatacttgcg

SEQ ID NO: 10305 - DNA, 644 bp, Zea mays
  unsure (1)..(644): unsure at all n locations; Clone ID: LIB3061-081-Q1-K6-B11
tctttactagcaacatagnaaagcacaatagtgtaccaacaatggcagccaaaatattttgcttccttatgctccttggtctttctgcaagtgctgctaccgcaaccattttcccacaatgctcacaagctcctatagcttcctttcttcccccatacctctcaccagcggtgtcttcagtatgtgaaaacccaattcttcaaccctacaggatccaacaggcaatcgcagcaggcatcttacctttatcacccttgttcctccaacaaccgtcagccctattacagcagttacctttggtgcatttgttggcacaaaacatcaaggcacaacaactacaacaacttgtgctaggaaaccttgctgcctactctcagcaacagcagtttcttccattcaaccaactggctgcattgaactctgctgcttatttgcaacaacaactaccattcagtcagctagctgctgcctacccccagcaatttcttccattcaaccaactggcagcattgaactctgctgcttatttacaacagcaacagctaccaccattcagccagctagctgatgtgagccctgttgccttcttgcacaacaacagttgttgccgttctacctgcacgctgcgcctaacgctggcaccc

SEQ ID NO: 10306 - DNA, 198 bp, Zea mays
  Clone ID: LIB3061-081-Q1-K6-B12
accacctgtggtggcttctctcccggctcccctactgcccctttacttcgtcctcatatccgtcgatttcccgtccctgcgccttcgtgttatgatctctgctcctctgcgggtgcggctggcggcgctagcagctgtccttggggggtcgctcctgctcggggcgttctcggtcgagtgcaatcccaatcccaagcc

SEQ ID NO: 10307 - DNA, 645 bp, Zea mays
  unsure (1)..(645): unsure at all n locations; Clone ID: LIB3061-081-Q1-K6-B2
cttatcgccctcgttatttacatcgctgccaccctcctctccgccgtcgccgccgccgccggggatggggggagcgcaattccccggcgacaacgacgtcgcggaagtagacgcggcccgcgacggagaggtggaccgccgtgacgtgggcaagatgaagcacgggtgcgagcattaccggcggaggtgcaagatcgtggcaccgtgctgcaaccaggtgttcccctgccgccactgccacaacgaggctacggcttccggagatcggcatacaatatgtcgtcaggatgttgaaaaagtagtttgcctactctgtgaaacaaaacagccggtgtcacaagtgtgcataagctgtggagtcaatatgggagagtacttttgtgatatatgcaaattttatgatgatgatacagacaaagggcagtaccattgcatcgattgtggcatatgcagggttggtggcaaggaaaacttcttccactgtgtgaagtgtgggtcctgctattctgttatactccgtgataaccatcagtgtgtggagaactantgaggcagaattgcccatctgttatgagtatctatttgactcattacaaggaacaagagttctgaactgtggacacacaatgcacttgacatgttttg

SEQ ID NO: 10308 - DNA, 650 bp, Zea mays
  Clone ID: LIB3061-081-Q1-K6-B3
caacaatccttggcacatctaaccctacaaaccattgcaacgcaacaacaacaacaacaacagtttctgccatcactgagccacctagccgtggtgaaccctgtcacctacttgcaacagcagctgcttgcatccaacccacttgctctggcgaacgtagctgcataccagcaacaacaacagctgcaacagtttatgccagtgctcagtcaactagccatggtgaaccctgccgtctacctacaactactttcatctagcccgctcgcggtgggcaatgcacctacgtacctacaacaacagttgctgcaacaaattgtaccagctctgactcagctagctgtggcaaaccctgctgcctacttacaacagttgcttccattcaaccaactggctgtgtcaaactctgctgcgtacctacaacagcgacaacagttacttaatccattggcagtggctaacccattggtcgctaccttcctgcagcagcaacaacaattgctgccatacaaccagttctctttgatgaaccctgccttgcagcaacccatcgttggaggtgccatcttttagattacatatgagatgtactcgacaatggtgccctcatcccgacatgtgtttcctagaaataataaatattgattgag

SEQ ID NO: 10309 - DNA, 657 bp, Zea mays
  Clone ID: LIB3061-081-Q1-K6-B4
gcggcagtgcgtagagaggatcgtcgaacagaacagcatgaagatggtcatcgttctcgtcgtgtgcctggctctgtcagctgccagcgcctctgcaatgcagatgccctgcccctgcgcggggctgcagggcttgtacggcgctggcgccggcctgacgacgatgatgggcgccggcgggctgtacccctacgcggagtacctgaggcagccgcagtgcagcccgctggcggcggcgccctactacgccgggtgtgggcagacgagcgccatgtaccagccgctccggcaacagtgctgccagcagcagatgaggatgatggacgtgcagtccgtcgcgcagcagctgcagatgatgatgcagcttgagcgtgccgctgccgccagcagcagcctgtacgagccagctctgatgcagcagcagcagcagctgctggcagcccagggtctcaaccccatggccatgatgatggcgcagaacatgccggccatgggtggactctaccagtaccagtaccagctgcccagctaccgcaccaacccctgtggcgtctccgctgccattccgccctactactgattcatgatatttgggaaatctcctctatccatccctctctatctatatatgtaataatgcagtaagacgacacacat

SEQ ID NO: 10310 - DNA, 627 bp, Zea mays
  unsure (1)..(627): unsure at all n locations; Clone ID: LIB3061-081-Q1-K6-B5
ttcgatggaaaccttgtgtgatgtgctagctgacccccattttcctttctatgcgatcttattgtattttagtatctcaagcaatagataatgcagttgtaactggggggcagtagtatcacaagtgcggagtaagctgtggtgatacaacaccttgtgcagaatcccttgctctttcaaactcatcgccaagaaagcaacatgttaaagcacaagtgacttacatacatcacatcttctcccccttgttccactattctgcattaaccttgttgtatgtcagaaatgctccttgtggaattcgaattttgttgtagacttgccattgaattcataacagagcttgcttagttcctgtgccagaactggagccccgcagtagaacactcctatcttagcatatggatgtttggtggctatcttagataagacctttttaaaatttggccttgcaaaatgtgtccgcactttagttccagaaactatatcaacaccattcttggcatggttgagagcttgtagcatcgtaatgagtgctgaccgagcatccccttnctcgtaaacacttgtgagataattgtgcatctcaatgatattcctctgatctaagtcagcgatttcattcat

SEQ ID NO: 10311 - DNA, 654 bp, Zea mays
  unsure (1)..(654): unsure at all n locations; Clone ID: LIB3061-081-Q1-K6-B6
cccaaattcatcaagctcaacacgatctcaattcgattccagttcatccatccaacgcctcccgcctgtacgtatagaagaaagaaggaagaaccgtcaccgtacgtcctcgccagtacaaataatggccctgctcaaagccgcgcgcgtcgccgatgtgcccaccctggacgtggtggtggcccccggcctggtggcggttgccaaggcgaggagcgccgcggctgtgggcggccggttctcggtgatcggccaccgcggcaaggggatgaacgcgctggcgtcggaggacccgcgtctgcgggatgtgcgcgagaacacggtccgctccttcaacgacgccgggcgcttccccgtcgactacgtcgagttcgacgtccaggtcaccaaggacgggtgcccaatcatcttccatgacaacttcatcttcacacaagacgatggtaagatttcacaaaagcgtgtggccgatattcagctggaagacttcctgcagtatgggctccagaacgagcaggggaaggttggcaagcccctgcttcgcagattgaaggatggcaggatggtgaactgggacgtgcaatcagaggacgctctntgacactcgaaaagcgttcgacaggtcaatccaagttgggcttaacgtcgagctga

SEQ ID NO: 10312 - DNA, 642 bp, Zea mays
  Clone ID: LIB3061-081-Q1-K6-B7
tcgtaaacacaccaagcgaagcgcactagcaacgacctaacaccaatggctaccaagatattagccctccttgcgcttcttgcccttttagtgagcgcaacaaatgcgttcattattccacagtgctcacttgctcctagtgccattattccacagttcctcccaccagttacttcaatgggcttcgaacatccagccgtgcaagcctacaggctacaactagcgcttgcggcgagcgccttacaacaaccaattgcccaattgcaacaacaatccttggcacatctaaccctacaaaccattgcaacgcaacaacaacaacaacaacagtttctgccatcactgagccacctagccgtggtgaaccctgtcacctacttgcaacagcagctgcttgcatccaacccacttgctctggcgaacgtagctgcataccagcaacaacaacagctgcaacagtttatgccagtgctcagtcaactagccatggtgaaccctgccgtctacctacaactactttcatctagcccgctcgcggtgggcaatgcacctacgtacctacaacaacagttgctgcaacaaattgtaccagctctgactcagctagctgtggcaaaccctgctgcctacttacaacagttg

SEQ ID NO: 10313 - DNA, 295 bp, Zea mays
  Clone ID: LIB3061-081-Q1-K6-B8
aagagtgagtattataactcgactacatagaagcacaaacctcatgggttaaggttgaacttgcacaacatttcgccagtccacaccttgtgaactaaccttggggccggtgcagctttctggtccatgagcggctaaatagttggggttttctgatgcattggaggtggatgaatgaatacagtaatgtggcgttgcttgctttacttgaaaacagcacttcaagactggcactcggcctgtagtaatgggtgtttgtcgccggtttgttgtttggcctggcccatttgtccgc

SEQ ID NO: 10314 - DNA, 625 bp, Zea mays
  Clone ID: LIB3061-081-Q1-K6-C1
attcgaaaaagttacgctggagatgctttgctgcaagtttgaacttagaagatggccctgcaccctctgactcgacgtcatcttcatcagagcagactactgatgctgatggaactactaatggtgatgtatctgaaaatctgctttctcgaaagccgagctctgatgagttaaaggctcttttggctgattcggaacgaagtaagcttttgagaagactcagtgaagcaaatcaatataaccgattcctcaagagacagttgcaaataaaggatgatgcagtcgtaaaattcaaaggtgaacttgcggttttggaactagaactgcaggctctggttggcctagctgaagaggttgctaattttgatgttccgttagggtctaggaagataaacggaaaatatattcaatctcatcttctctccagattagaagctgtccatgatatgattatggaacaggtaaacagtgttgacgctttaaagacccaagaaattcctgtctactggattggcatggctgagaatgtgcagatcatgggttcattcgacggatggtcacagggcgaggcgatgtccatggagtattcaggtgactacggaagattctctgcaactctgaagct

SEQ ID NO: 10315 - DNA, 455 bp, Zea mays
  Clone ID: LIB3061-081-Q1-K6-C10
gcgggccttcggcgcgccgcgcgtggtggtcgtggacgtggacgagcaccgcctggccgtggccaggtcgctgggcgcggacgcggcggtgcgggtgtcgccccgcgcggaggacctggcggacgaggtggagcgcatccgcgcggccatgggctcggacatcgacgtcagcctggactgcgccgggttcagcaagaccatgtcgacggcgctggaggcgacgcggcccggcgggaaggtgtgcctggtcgggatgggccacaacgagatgacgctgcccctgacggcggcggcggcgcgggaggtggacgtggtgggcgtgttccggtacaaggacacctggccactgtgcatcgacttcctgcgcagcggcaaggtggacgtcaagcctctcatcacccaccgcttcggcttctcgcagcgggacgtggaggaggcattcgaggtcagcgccc

SEQ ID NO: 10316 - DNA, 644 bp, Zea mays
  Clone ID: LIB3061-081-Q1-K6-C12
caactagcaacataggaaagcacaatagtgtaccaacaatggcagccaaaatttttgcctccttatgctccttggtctttctgcaagtgctgctacggcgaccattttcccgcaatgctcgcaagctcctatagcttcccttcttcccccgtacctctcaccagcggtgtcttcggtgtgtgaaaacccaattcttcaaccctacaggatccaacaggcaatcgcagctggcatgttacctttatcacccttgttcctacaacaatcatcagccctattacaacagatacctttggtgcatttattggcacaaaacatcacggcacaacaactacaacaacttgtgctagcaaaccttgctgcctactctcagcaacagcagtgttcttccattcaaccaactaggttcattgaactctgcttattatttgcaacaacaacaactaccattcagccagctacctgctgcctacccccagcaatttctttcattcaaccaactagcagcattgaactctcctgcttatttacagcagcaacaactactaccattcagccagctagctggtgtgagccctgctaccttcttgacacaaccacagttgttgccgttctaccagcacgttgcgcctaacgctggcacc

SEQ ID NO: 10317 - DNA, 665 bp, Zea mays
  Clone ID: LIB3061-081-Q1-K6-C2
cagaccattagctttatctactccagagcgcagaagaacccgatcgacaccatgagggtgttgctcgttgccctcgctctcctggctctcgctgcgagcgccacctccacgcatacaagcggcggctgcggctgccagccaccgccgccggttcatctaccgccgccggtgcatctgccacctccggttcacctgccacctccggtgcatctcccaccgccggtccacctgccgccgccggtccacctgccaccgccggtccatgtgccgccgccggttcatctgccgccgccaccatgccactaccctactcaaccgccccggcctcagcctcatccccagccacacccatgcccgtgccaacagccgcatccaagcccgtgccagctgcagggaacctgcggcgttggcagcaccccgatcctgggccagtgcgtcgagttcctgaggcatcagtgcagcccgacggcgacgccctactgctcgcctcagtgccagtcgttgcggcagcagtgttgccagcagctcaggcaggtggagccgcagcaccggtaccaggcgatcttcggcttggtcctccagtccatcctgcagcagcagccgcaaagcggccaggtcgcggggctgttggcggcgcagatagcgcagcaactgacggcgatgtg

SEQ ID NO: 10318 - DNA, 339 bp, Zea mays
  Clone ID: LIB3061-081-Q1-K6-C3
gcgttctattggccgcacttgaccccgctgcttatttgcagcagcaaatactactaccatttagccagctagctgcagcaaaccgtgcttccttcttgacacagcaacagttgctgcctttctaccagcagtttgcggctaaccccgcaaccctcttacaactacaacaattgttgccctttgtccaacttgctttgacagacccagcggcctcctaccaacaacacatcattggtggtgccctcttttagattgcttattagttgtaattcaataataaagttttttggatgatgtatgtggccaaccagaaataagaagttacatttccagattctt

SEQ ID NO: 10319 - DNA, 600 bp, Zea mays
  unsure (1)..(600): unsure at all n locations; Clone ID: LIB3061-081-Q1-K6-C4
anaccaacagcaacatagaaagtggaatacagtagcaaaaatagagcaacaatggcggccaagatattttccatccttatgctccttgctctttctgcatgtgttgctaacgcgaccatttttcctcaatactcacaagctcctatagctgcccttcttcccccataccttccatcaatgaccgctttagtatgtgaaaacccagcccttcaaccctacaggatccagcaagcaatcgcaacaagcaacttacctttatcacacctgttctttcaacaatcgccagccctatctttggtgcagtcattggtacaaaccatcagggcagaacagttgcagcaactcgtgctaccagtgatcagccaagtagctctggcaaacctttccccctactctcagcaacaacaatttcttccattcaaccaactgtctatactgaaccctgctgcttatttgcagcaacaacaactactaccattcagccagctagctactgcctactctcagcagcaacaatttcttccatttaaccaattggccgcactgaacccctctgcttatttccagcagcaaatactactaccatttggccagctagct

SEQ ID NO: 10320 - DNA, 647 bp, Zea mays
  unsure (1)..(647): unsure at all n locations; Clone ID: LIB3061-081-Q1-K6-C5
gtgcttcccgccgtcgtgngaaggtcacgcggctggttcccgccgcttccggacgggttccgagggaggaggatcagctgccgcgatgttcctcaggatctctcgtctcggggcgcggcttctgcgcgagtctggagcggagacgagagctggaaatttgctaagcagtccaggcattttgtatcaagctcatcttaaccagcattcgaccagagtgcggaatgtccttttctcaactgcaacaagtggtgatcaggatgaaagcagtcaggcaaaggataaaatctcggtaacatttgttaacaaggatggctcagaaaagacaatacgtgttccagttggaatgtccatgttagaagctgctcatgaaaatgacatagagcttgaaggagcatgtgagggttcacttgcgtgttctacttgtcatgtaatagtaatggatgtaaactactataacaaattagaagatccagcagatgaagaaaatgatatgcttgaccttgcatttgggctcacagagacatctcgcctcggctgccaagtgatcgcgaagcctgaactcgatggtattcggctggcattacctgtagccacaagaaacttcgcggtagatggctatgtaccgaaacccactgaagacgttatgt

SEQ ID NO: 10321 - DNA, 546 bp, Zea mays
  unsure (1)..(546): unsure at all n locations; Clone ID: LIB3061-081-Q1-K6-C6
gctctactctcacttttcttcttgtctccaagtttgtaaaccctgagccgccaagcttggaagctccagccgtgctncgtgtagggnctgcaggccatccngagctccggcttccggcatccaccagacgtccttagaatacggtgcagcgagcagcaagtcgccgagcagccgttccaccgccgagcagccgagccggcggcgggcgccgagtcttctatgtttgcttctccggtgaaaggtgtttgctaggggaccatggaggagcacggagcggatgacctcctgtgcgaggcgatgggatctgcggctcatgtcggggtggtagaggatcgcgtggtagcaccgggggccttcggcctccaccttctcctcaagcgcgcgctcgccggctgcggcttcgttgccttcctcgccctctcgcagcccttctccctttacgatcgcgccctgcgcacgatgggctggaccctttccctgctctggggattgagaggcttcctttctttgtgatggctgggatttccatgtggggcntgggaaggc

SEQ ID NO: 10322 - DNA, 647 bp, Zea mays
  unsure (1)..(647): unsure at all n locations; Clone ID: LIB3061-081-Q1-K6-C8
aactagtcaacatagnaaagcacaatagtgtaccaacaatggcagccaaaatattttgcctccttatgctccttggtctttctgcaagtgctgctacggcgaccattttcccacaatgctcacaagctcctatagcttcccttcttcccccgtacctctcaccagcggtgtcttcggtatgtgaaaacccaattcttcaaccctataggatccaacaggcaatcgcagctggcatcttacctttatcacccttgttcctccaacaatcatcagccctattacagcagttacctttggtgcatttattggcacaaaacatcagggcacaacaactacaacaacttgtgctagcaaaccttgctgcctactctcagcaacaacagtttcttccattcaaccaactagctgcattgaactctgcttcttatttgcaacaacaacaactaccattcagccagctatctgctgcctacccccagcaatttcttccattcaaccaactgacagctttgaactctcctgcttatttacagcagcaacaactactaccattcagccagctagctggtgtgagccctgctaccttcttgacacaaccacaattgttgccgttctaccagcacgctgcgcctaacgctggcaccctc

SEQ ID NO: 10323 - DNA, 634 bp, Zea mays
  unsure (1)..(634): unsure at all n locations; Clone ID: LIB3061-081-Q1-K6-C9
ccgaacagcgtgcccgctgcccgtccgtcccccgtggccatggccgcgacgtggtcttcgtcttgctgcgccgcgaccgcgtcgagcagcgctctgcttcgtcatgcccgcgtcaagagcgcgccttgggtagccggtgccagccggagtagctacaggcagcggcggcggcggcgggagctgtccatccgcgccacggccgcggcgccgccgccgcccgtggtctacgcggacgccggcgccgacaacgtggcctcgctgaagatcaagctcctgagcgcggtgtccgggctgaaccgtggcctggcagcgagccaggaggacctggaccgcgcggacgcggcggcgcgggagctggaggcggcggcggggtgccccgtcgacctcagcagggacctcgataagctgcagggccggtggcggctgctgtacagcagcgcgttctcttcgcggacgctcggcggcagccgccctggcccgcccaccggccgcctnctccccatcacgctcggccaggtgttccagcggatcgacgtggtgagccgcgacttcgacaacatcgtggagctggagctcggcgcgccgtggcctctgccgncgctcgaggccacggcgacgctggcgcacaagttcg

SEQ ID NO: 10324 - DNA, 585 bp, Zea mays
  unsure (1)..(585): unsure at all n locations; Clone ID: LIB3061-081-Q1-K6-D11
cgatgattgagatcccaggcagctctagtggctgacgagatcgcggagcaggctgaattcttctcctttggaacgaacgacctcacgcagatgacctttggctacagcagggatgatgtggggaagttcatccccatttatctggctcagggcatcctccagcatgaccccttcgaggttctcgaccagagaggagtgggcgagctggttaagcttgctacagagaggggccgcaaagctaggcctaacttgaaggtgggcatttgtggagaacatggtggagagccttcatcggttgctttcttcgccaagactgggctggattacgtttcttgctcccctttcagggtcccgatcgctaggctagctgcagctcaggtgcttgtctgagggtgcctctgctcgttggcagccggatcgcctgctgttggtgcatctggtgattaataatactactatgacagagccatgctctgtgaagagtattagtagcagcgctcataaaagctacagttccgtctcttttctcagctatgtaaaacttccaaactgttcatgcttaaactgagggtttnctttggtgtg

SEQ ID NO: 10325 - DNA, 411 bp, Zea mays
  Clone ID: LIB3061-081-Q1-K6-D12
gggacctgacacttgcgcatcagaagtgctttagaggacagaattctgtgccccatctgcatgtataaatcgaaggaccttgcatttgggtgtggacatcagacttgctatgaatgcgggagagatttggagcgctgccctctgtgccagcagcacataaccacgagaatcaggctctactgatttgaagccaatgggattgaaaaatgttcagaaccagctttgatgctactgtgcttcatcattttgtaggtgtgttcgtcttgctgcataggcatatactaagaactagtaccagttttagtgtttggtaacattgtctcagtagtttcgctacactagttatgccaaaaggaaacgcaccagataataatgtacataattttcctccttttatctcttttgttaggt

SEQ ID NO: 10326 - DNA, 658 bp, Zea mays
  unsure (1)..(658): unsure at all n locations; Clone ID: LIB3061-081-Q1-K6-D7
attgagaccaactagcaacatagnaaagcacaatagtgtaccaacaatggcagctaaaatattttgcctccttatgctccttggtctttctgcaagtgctgctacggcgaccattttcccacaatgctcacaagctcctatagcttcccttcttcccccgtacctctcaccaacggtgtcttcggtatgtgaaaacccaattcttcaaccctacaggatccaacaggcaatcgcagctggcatcttacctttatcacccttgttcctccaacaatcatcagccctattacagcagttacctttggtgcatttattggcacaaaacatcagggcacaacaactacaacaacttgtgctagcaaaccttgctgcctactctcagcaacagcagtttcttccattcaaccaactagctgcattgaactctgcttcttatttgcaacaacaacaactaccattcagccagctatctgctgcctacccccagcaatttcttccattcaaccaactgacagcattgaactctcctgcttatttacagcagcaacaactactaccattcagccagctagctggtgtgagccctgctaccttcttgacacaaccacagttgttgccgttctaccagcacgctgcgcctaacgctggcaccctctta

SEQ ID NO: 10327 - DNA, 633 bp, Zea mays
  Clone ID: LIB3061-081-Q1-K6-D8
agcctagcgggcgggccatggcgtcaacggtgctggaggcgacgcgggcggcccatgaggatctggagaggctggagcggctcgcggtgagcgagctgcaacgggagcccgctaacccgcgtgaccgcctctttcagtcccaccgcgtccgccacatgctcgacctcgtcgtctccacctccggcaagctcgtggaaatttacgaggacaaggacaatgctaggaaggatgagatcaacactcatcttactgcacccacgcaaagtggactgtttagcaagtactatgaaaggctcaaagagatccgtgaatatcatcggcggaacccatctgcccgctttgttagtacaactgatgactatgaagagcttctaaaggaggaaccagttattgaattcactggcgaggattgtttgattcctcttgtgggatcttggtggtgtcgatggaaacttttggccgttaccttgacttgcatgagctttataatgagttcataaattccaagttcggaacactgatggaatattcagcttatgttggctgtttctcccagacggacaagatctcacatagtcataaagctaccagaaaatacagagaatacttggaacatattttggaatatctgac

SEQ ID NO: 10328 - DNA, 533 bp, Zea mays
  Clone ID: LIB3061-081-Q1-K6-D9
ttacaacaacaatccttggcacatctaacaatacaaaccatcgcaacgcaacagcaacaacagttcctaccatcactgagccacctagccatggtgaaccctgccgcctacttgcaacaacaactgcttgcatccaacgcacttgctctggcaaacgtagttgcaaaccagatacaacaatagctgcaactatttctgccagcgctcagacaactagccatggtgaaccctgccgcctacctacaacagcaacaactgctttcatgtagcccgcttgctgaggccaatgcacctacatacctacaacaatcaattgttgcaacataatgtaccagctctgactcatctagtatgtggaaaaccctgctgcctacttgcaacagctgattccattcaaccaactgactgtgtcgaactctgctgtgtacctacaacagcgacaacagttacttaatccacttgcagtggctaacctattggtcgctgccttcctacatgttacacccggatttaaaaaggcaaaccgaatgcta

SEQ ID NO: 10329 - DNA, 636 bp, Zea mays
  unsure (1)..(636): unsure at all n locations; Clone ID: LIB3061-081-Q1-K6-E1
gnacagcaaagcggcagtgcgtagagaggatcgtcgaacagaacagcatgaagatggtcatcgttctcgtcgtgtgcctggctctgtcagctgccagcgcctctgcaatgcagatgccctgcccctgcgcggggctgcagggcttgtacggcgctggcgccggcctgacgacgatgatgggcgccggcgggctgtacccctacgcggagtacctgaggcagccgcagtgcagcccgctggcggcggcgccctactacgccgggtgtgggcagccgagcgccatgttccagccgctccggcaacagtgctgccagcagcagatgaggatgatggacgtgcagtccgtcgcgcagcagctgcagatgatgatgcagcttgagcgtgccgctgccgccagcagcagcctgtacgagccagctctgatgcagcagcagcagcagctgctggcagcccagggtctcaaccccatggccatgatgatggcgcagaacatgccggccatgggtggactctaccagtaccagctgcccagctaccgcaccaacccctgtggcgtctccgctgccattccgccctactactgattcatgatatttgggaaatctcctctatccatctctctctatctatatatgt

SEQ ID NO: 10330 - DNA, 556 bp, Zea mays
  unsure (1)..(556): unsure at all n locations; Clone ID: LIB3061-081-Q1-K6-E10
agcagcagcccnnccccggggagcagcaccacaggggcagaacgancaancaaccagcaagcaaagcgcgcacggcacaggngggcagcnagcaagggcgacgccgccgaacccnccnccnccgagcacccccagagcngcggcggcgcccnnanggccagcagagnncaccagaggcaccgnccgggccnngnacgnccgccggaccggcccaagcagcagggaganganncagccggggagaccnnacgangagcngggcagaagacncaccagngacnacccggngnacganggccgnggcnccgacaccgcccnngncgcncgcacgcaggggancaccgnccncgncggnaacgcgcaccagcngnncaccancgngnncgagaccgggaggggcaagggcnccacgccccncancaacggganggngacggaagggnccgacgagggggcggncnacggcgggaccggagcgnnngcganggccaccggcgncancagaaggaagaaccnnnnngccggnggcggngacagnggcgggaaccccgacgag

SEQ ID NO: 10331 - DNA, 648 bp, Zea mays
  unsure (1)..(648): unsure at all n locations; Clone ID: LIB3061-081-Q1-K6-E11
gcaacatagnaaagcacaatagtgtaccaacaatggcagccaaaaattttgcctccttatgctccttggtctttctgcaagtgctgctacggcgaccattttcccgcaatgctcgcaagctcctatagcttcccttcttcccccgtacctctcaccagcggtgtcttcggtatgtgaaaacccaattcttcaaccctacaggatccaacaggcaatcgcagctggcatcttacctttatcacccttgttcctccaacaatcatcagccctattacaacagttacctttggtgcatttattggcacaaaacatcagggcacaacaactacaacaacttgtgctagcaaaccttgctgcctactctcagcaacagcagtttcttccattcaaccaactaggttcattgaactctgcttcttatttgcaacaacaacaactaccattcagccagctacctgctgcctacccccagcaatttcttccattcaaccaactagcagcattgaactctcctgcttatttacagcagcaacaactactaccattcagnccagctagctggtgtgagccctgctaccttcttgaacaaccacagttgttgccgttcaccagcacgttgcgcctaacgctggcaccctcttacactgc

SEQ ID NO: 10332 - DNA, 599 bp, Zea mays
  unsure (1)..(599): unsure at all n locations; Clone ID: LIB3061-081-Q1-K6-E12
ccgcccnncctcctttttagggnagaaaaaagcaacgaaacgccgagagaggcgtgcgagcgggagcaaggagatggagcgggcggcgccggtgaggagctcccacacctccacggccgacctactcgcgtggccgcagccccagggccccgccccagcaacgccgtcgccgccgcgccggcccggtcagccgtcggaggctatcaggaaggtggtgttcgggggtcaggtcaccgaggaggaggccgacagcctcaccaagaggaagccgtgctccgcgcccaagtggaaggagatgactgggagcggcattttcgctgccgggagcaatggagacgctggggaggcagctgctgccgcgaagcccgcccgaacctcctcgcgccaggcgagcagtactgtaagccacatctcgttcgctgaggatggaaccgatcctcccaaaaagcccacatcagtagctgaggtggcaaagcagcgtgagcttagtggcactcttcaaagcgaggcggatagtaagacgaagaagcagatctcaaatgcaaagtccaaggaactcagcggccacgacatctttgctgatactctggattccaggt

SEQ ID NO: 10333 - DNA, 643 bp, Zea mays
  unsure (1)..(643): unsure at all n locations; Clone ID: LIB3061-081-Q1-K6-E2
accaagtccttctcagggtatcacccactaagggagttgttcggttcggtgtctctgggaagctcagaccgagatacattggaccgttcactatcttggcccgagtgggcagcctggcttatcgcttgctactgccggattccatggcaggggtacacccggtttttcatgtctctatgttgaggaagttcttgcgggatccggaccatcagattgagatggaaccaattgcggtgcagcaggatctgactctggagtgtcgttcggtgcgtatattggaattctcggagcgtgtgttgaggaagagatcaattaagtatgtcaaggtcttatggactaatcagtctgagcgcgaggctacatgggaacttgaggagctgatgcggcagaagtacccggaacttttcgttgtgggtggtggacttccggatcgttcttagggattttgcccaaacttccggtgaaggcacctaatttctgcttggggaatagagggatgtagcagcacggtcacttcacctttaattaaaggaacccccacttaataatgttgttaatcagagttggtcaagtccagtgaattactntgttcttggttgagcgtttgttttgggtggctgagttccttatcccatttgtttac

SEQ ID NO: 10334 - DNA, 355 bp, Zea mays
  Clone ID: LIB3061-081-Q1-K6-E3
aaaaaaaaaaaaaaaaaaaaaaaaaaaaaaaaaaaaaaaaaaaaaaaaaaaaaaaaaaaaaaaaaaaaaaaaaaaaaaaagggatgccaactttataggaaccaaaattgcgatcacccaaacaataaaacactaggggggcttcttttctgggggcgctacctggttattacctcgggcgtgtgcccaacttcgtcgctttttgggaaatccccgtatttccccttctttgtccccttgtagcccaccccctttttggcagttcccgtggtttcccaaagttccgggccgttcgcccttccccctttttgcccgccttttttggggattggggggcgccctctcgcgccttttc

SEQ ID NO: 10335 - DNA, 289 bp, Zea mays
  Clone ID: LIB3061-081-Q1-K6-E4
ccagcactgagccacctagccatggtgaaccctgccgcctacttgcaagagcagctgcttgcatccaacccacttgctctggcgaacgtagttgcaaaccagcaacaacaacagctacaacagtttctgccaacgctcagtcaactagccatggtgaaccctgcctcctaccaacaacacatcattggtggtgccctcttttagattgcttattagttgtaattcaataataaagttttttggatgatgtatgtggccaaccagaaataagaagttacatttccagatt

SEQ ID NO: 10336 - DNA, 646 bp, Zea mays
  unsure (1)..(646): unsure at all n locations; Clone ID: LIB3061-081-Q1-K6-E5
cggggatacggnanaggagtatataaatcgctataaaatgatgacaaggttccatcatcaacgggttccactagtaattttggtgtgtggaactgcctgtnactggaaaatcaacaatcgctacacaacttgctcagaggctcaatttgcctaatgttttgcagacggacatggtgtatgagctgctgcggacatcaacagatgcgccacttacttcagttcctgtgtgggctcgcgattttaattcacctgaagagcttatcactgaattctgcagagaatgcagagttgtacgcaagggtttggctggcgatttgaagaaggccatgaaagatgggaaaccaattattatagagggaatacatttggatccaagcatttatcttatggatgaggaaaagagtgatggtaattccaggacggagaagacagtaacagattctgaaaatccaggcatctctgtagaaaggaaggttgaacatcaattcaaaaatggactagcagagaacagaatggattctactgaggacaacaaaaacttcgtcaaaagcaaaaaaagcacanctggagaaaggtagaacccagtgaagtctatcttatgctcagaaaccacgaaaccaagtccatgattctgcacgttctcaag

SEQ ID NO: 10337 - DNA, 595 bp, Zea mays
  Clone ID: LIB3061-081-Q1-K6-E6
ccatggtgttaacaggagagctcgtgacggcttggacttcctgctcccagcatctgtacgtgtacgcggtgctggtgttggaggcgatggccacgttcgtcggccaggtctccgtgctctccctcatcgcgcttttcggtgcagcaaccacagccatggtgacgacggcgaggaaggcggtgacgctgctgctgtcgtacctgatattcaccaagcccctgacggagcagcacgcgacgggactcctcctcataaccatgggcatcgtcatcaagctcctgccggagaacaaggagggacgcccgcgccggtcgcccaagaatgacgacgacgacaagccccgggagagcagagaagcgggggaggaaacagcatgactgctatagacccgacacccgaccccagcaaagcagaactgacgccagctcgatcagcaacagcaaccctagaagaaattctcagtcctccaaaacagcaatcccaggaggacgatgggatatacatgcaggatagagcactacatacagtaataataatctttttcctcgctcctcccctcgcttttctcatgtgctgtggttaatgtttaagtgtg

SEQ ID NO: 10338 - DNA, 624 bp, Zea mays
  Clone ID: LIB3061-081-Q1-K6-E7
gttgccctcgctctcctggctctcgctgcgagcgccacctccacgcatacaagcggcggctgcggctgccagccaccgccgccggttcatctaccgccgccggtgcatctgccacctccggttcacctgccacctccggtgcatctcccaccgccggtccacctgccgccgccggtccacctgccaccgccggtccatgtgccgccgccggttcatctgccgccgccaccatgccactaccctactcaaccgccccggcctcagcctcatccccagccacacccatgcccgtgccaacagccgcatccaagcccgtgccagctgcagggaacctgcggcgttggcagcaccccgatcctgggccagtgcgtcgagtttctgaggcatcagtgcagcccgacggcgacgccctactgctcgcctcagtgccagtcgttgcggcagcagtgttgccagcagctcaggcaggtggagccgcagcaccggtaccaggcgatcttcggcttggtcctccagtccatcctgcagcagcagccgcaaagcggccaggtcgcgggggctgttggcggcgcagatagcgcagcaactgacggcgatgtgcggcctgcagcagccgactccatg

SEQ ID NO: 10339 - DNA, 573 bp, Zea mays
  unsure (1)..(573): unsure at all n locations; Clone ID: LIB3061-081-Q1-K6-E8
atccagtgagcgacaatagnagcaacaatggacgaccaagatacttgtccctccttatgctccttgctctttctgcatgtgttgctaacgcgacaattttccctcaatgctcacaagctcctatagcttcccttcttcccccataccttccatcaatgatagctggagggtgtgaaaacccagctcttcaaccctataggctccaacaagcaatcgcagcaagcaacatacctttatcacccttgtttcaacaatcgccagccctatctttggtgcagtcattggtacaaaccatcaaggcacagcagctgcagcaactcgtgcttcctgtgatcaaccaagtngctctggctaacctttctcccttctgtcagcagcgacaatttcttccattcatcctactgtctacactggaccctgctgctnttttgcngcagcatctgttaccattcagccagctggctactgcctactctcatctgctttctcttctttgctttcaccatttggccgttctgaacctcgctgcttgtttgcggcngcgtggttttcttccatttagccagcttgctg

SEQ ID NO: 10340 - DNA, 611 bp, Zea mays
  unsure (1)..(611): unsure at all n locations; Clone ID: LIB3061-081-Q1-K6-E9
agctttatctactccanagcgcagaagaacccgatcgacaccatgagggtgttgctcgttgccctcgctctcctggctctcgctgcgagcgccacctccacgcatacaagcggcggctgcggctgccagccaccgccgccggttcatctaccgccgccggtgcatctgccacctccggttcacctgccacctccggtgcatctcccaccgccggtccacctgccgccgccggtccacctgccaccgccggtccatgtgccgccgccggttcatctgccgccgccaccatgccactaccctactcaaccgccccggcctcagcctcatccccagccacacccatgcccgtgccaacagccgcatccaagcccgtgccagctgcagggaacctgcggcgttggcagcaccccgatcctgggccagtgcgtcgagtttctgaggcatcagtgcagcccgacggcgacgccctactgctcgcctcagtgccagtcgttgcggcagcagtgttgccagcagctcaggcaggtggagccgcagcaccggtaccaggcgatcttcggcttggtcctccagtccatcctgcagcagcagccgcaaagcggccaggtcgc

SEQ ID NO: 10341 - DNA, 638 bp, Zea mays
  unsure (1)..(638): unsure at all n locations; Clone ID: LIB3061-081-Q1-K6-F1
gggcgcgagacgggaccagtgagtcagtgaccaccacgcgctcgtggctaccggcttcgctcccagatcccgccgcgcgcgcgagccccgaggactgaccatggaggagcccacggagtccaggccagctggcgcggaggatctcgcgaacggcgcgaaagacccggaggggcctccgccggaggttgaggaggaggaagtggaggagccgccacgatcggcgacggcgaagcaggaggaggcgaaggaggtactagggtcggaggggtctcgcccgttcaccatgcgggagctgctcggcgaactcagggaggacggcgagacggcggtcggcggcagcaccgcgagatctgcgttcggcgacgggaacggggtcggatccgctgatgccgagggctcgtcctacagccaagatagcgcacagttttcatcacaccatgatgtagcgatggacttgataaatagtgtaactggagttgacgaggaaggacgttctcgccaaaggattctttcttttgctgctaaaagatacgtaaatgcaattgaaagtaatcctgacgaccctgatgcatattataanttgggctctagtnctccagnagagcgcagacaatgtggatcccaaattcgagtcctct

SEQ ID NO: 10342 - DNA, 639 bp, Zea mays
  Clone ID: LIB3061-081-Q1-K6-F10
ctttcgcgcaagtcatctgctccaagtgcaagggcaagggctcgaagtctggtgcctcaatgaggtgccctggttgccagggctcaggcatgaaagtcactattcgtcagctgggcccttccatgatacagcagatgcagcagccttgcaatgagtgcaaggggactggagagagcatcaatgagaaggaccgctgtccagggtgcaagggtgagaaggtcattcaagagaagaaggttcttgaggttcatgttgagaaggggatgcaacacaaccagaagatcaccttccctggtgaagctgatgaagcgcctgatactgtcactggagacattgtattcgtcctccagcagaaggatcactccaaattcaaaagaaagggtgaagatctcttctatgagcacaccttgtctctgaccgaagcactatgtgggttccaatttgttcttacacatctggacaacaggcagcttctcatcaaatcagaccctggtgaagttgttaaacctgaccaattcaaggcgattaatgatgaggggatgccaatttaccagaggcctttcatgaaggggaagctgtacatccatttcacggtggagttccctgactcgttggcaccagagcagtgcaaggctctcg

SEQ ID NO: 10343 - DNA, 661 bp, Zea mays
  Clone ID: LIB3061-081-Q1-K6-F11
ttcatcattcatcttagtagtataggcaccaaatcaaatctgcaacatcaattatctaactccaaaaaccatgaagctggtgcttgtggttcttgctttcattgctttagtatcaagtgtttcttgtacacagacaggcggctgcagctgtggtcaacaacaaagccatgagcagcaacatcatccacaacaacatcatccacaaaaacaacaacatcaaccaccaccacaacatcaccagcagcagcaacaccaacaacaacaagttcacatgcaaccacaaaaacatcagcaacaacaagaagttcatgttcaacaacaacaacaacaaccgcagcaccaccaccaacaacaacaacaacagcaccaacaacaacatcaatgtgaaggccaacaacaacatcaccaacaatcacaaggccatgtgcaacaacacgaacagagccatgagcaacaccaaggacagagccatgagcaacaacatcaacaacaattccagggtcatgacaagcagcaacaaccacaacagcctcagcaatatcagcagggccaggaaaaatacaacagcaacaatgtcattgccaggagcagcaacagactacaaggtgcagctataactactatagcagtagctcaaatctaaaaaatgtcatgaattcct

SEQ ID NO: 10344 - DNA, 454 bp, Zea mays
  unsure (1)..(454): unsure at all n locations; Clone ID: LIB3061-081-Q1-K6-F12
ggcaatttccacctgactcgcaggcccacacctaaatgcgccagccactgttgagcccctgttgtgtgaggccaacctcccgttcgaccctgtcctgtcttccctccaccttatgacacattgtcggcgttcactagtgcaaagaacttgttgttctgtgagggcaatcttttccaagtttggaggaacgcaagttgcacttttactttgcagttgccttcaagaggtcatgttcatgttgcgtaaaatgagatatttgtgctagagtattatcctcaacagcagccttgctgggatgtggtgaacaacctgtgaggatactcacttttctttggaaggaaccatgccaagtgcatgtatgcacagggtgttccaatattgatgggcaactgtgtatactggataggtgggcgccgtngggatctaagcattgactttgtcatggaatctggga

SEQ ID NO: 10345 - DNA, 624 bp, Zea mays
  Clone ID: LIB3061-081-Q1-K6-F3
ccttccatcaatgatagcttcagtatgtgaaaaacccagctcttcaaccctataggctccaacaagcaatcgcagcaagcaacatacctttatcacccttgtttcaacaatcgccagccctatctttggtgcagtcattggtacaaaccatcaaggcacagcagctgcagcaactcgtgctacctgtgatcaaccaagtagctctggcaaacctttctccctactatcagcaacaacaatttcttccattcaaccaactatctacactgaaccctgctgcttatttgcagcaacaactattaccattcagccagctagctactgcctactctcatcaacaacaacttcttccatttaaccaattggccgcactgaacctcgctgcttatttgcagcagcaaatattactaccatttagccagctagctgcagcaagccgtgcttccttcttgacacagcaacagttgctgcctttctaccagcagtttgcggctaaccccgcaaccctcttacaactacaacaattgttgccctttgtccaacttgctttgacaaacccagcagcctcctaccaacaaacatcattggtggtgccctcttttagattgcttattagttgtaatt

SEQ ID NO: 10346 - DNA, 634 bp, Zea mays
  Clone ID: LIB3061-081-Q1-K6-F4
caacatagaaagtggaatccagtagcaacaatagagcaacaatggcgaccaagatactttccctccttatgctccttgctctttctgcatgtgttgctaacgcgacaattttccctcaatgctcacaagctcctatagcttcccttcttcccccataccttccatcaatgatagcttcagtatgtgaaaacccagctcttcaaccctataggctccaacaagcaatcgcagcaagcaacatacctttatcacccttgtttcaacaatcgccagccctatctttggtgcagtcattggtacaaaccatcaaggcacagcagctgcagcaactcgtgctacctgtgatcaaccaagtagctctggcaaacctttctccctactatcagcaacaacaatttcttccattcaaccaactatctacactgaaccctgctgcttatttgcagcaacaactattaccattcagccagctagctactgcctactctcatcaacaacaacttcttccatttaaccaattggccgcactgaacctcgctgcttatttgcagcagcaaatattactaccatttagccagctagctgcagcaagccgtgcttccttcttgaccagcaacagttgctgcctttctcc

SEQ ID NO: 10347 - DNA, 621 bp, Zea mays
  unsure (1)..(621): unsure at all n locations; Clone ID: LIB3061-081-Q1-K6-F5
gcaacatagnaaagcacaatagtgtaccaacaatggcagccaaaatattttgcctccttatgctccttggtatttctgcaagtgctgctacggcgaccattttcccgcaatgctcacaagctcctatagcttcccttcttcccccgtacctctcaccagcggtgtcttcggtatgtgaaaacccaattcttcaaccctacaggatccaacaggcaatcgcagctggcatcttacctttatcacccttgttcctccaacaatcatcagccctattacagcagttacctttggtgcatttattggcacaaaacatcagggcacaacaactacaacaacttgtgctagcaaaccttgctgcctactctcagcaacagcagtttcttccattcaaccaactagctgcattgaactctgcttcttatttgcaacaacaacaactaccattcagccagctacctgttgcctacccccaacaatttcttccattcaaccaactggcagcattgaactctcctgcttatttacagcagcaacaactactaccattcagccagctagctggtgtgagccctgctaccttcttgacacaaccacagttgttgccgttctaccagcacgctg

SEQ ID NO: 10348 - DNA, 293 bp, Zea mays
  unsure (1)..(293): unsure at all n locations; Clone ID: LIB3061-081-Q1-K6-F6
cgtcgtgactcacagaaggcgnacccggttgacggtggtttaaacagacacaatgaagctaatcgttcacaacttcagtacaaaactacacaggcaagacactgcctgatacagtgcgatagccgctgccatcctctcttcgcttcgcgggtggcaacccaatgccttgaggttttgctcaaccaaatgtcgccaccaggaactccttgtaaacgctcatgaacttggccacgaaagctgtagagtggaatgggggaataagttaagtatatatggcttctgtattaataatc

SEQ ID NO: 10349 - DNA, 644 bp, Zea mays
  unsure (1)..(644): unsure at all n locations; Clone ID: LIB3061-081-Q1-K6-F7
ctaccccacacataagcggcggcggcggagcaaacgcaggcgaaggcgagggtgtgagggaaggagcaccagccatggtgcacgtcaacttctaccgcaactatggtaagacgttcaagaaaccaaggcgtccttatgagaaggagcgtcttgatgctgaactgaagctggttggtgagtatgggctgaggtgcaagcgtgagctttggagggtccagtatgcactgagcaggatccgtaatgctgcaaggcacttgctcacccttgacgagaagaacccccgtcgtatctttgagggtgaggcacttcttcgccgcatgaaccgctatgggctgcttgctgagggtcagaacaagcttgattatgttcttgccctcaccgctgagaacttcctcgcaaggcggcttcaaacacttgtcttcaaggctggcatggccaagtccattcaccatgctcgtgtcttgatcaagcagcgtcacatcagggttggcaggcaaattgtcaacgtcccatcattcatggtgaggngtggagtctgagaagcacattgacttttcactgtcaagcccattcggtggaggccccgcagaaagggtgaagagaaagatcagaagaagcaagcggtggcgtggatgctggtgata

SEQ ID NO: 10350 - DNA, 643 bp, Zea mays
  Clone ID: LIB3061-081-Q1-K6-F9
ttacaacaacaatccttggcacatctaacaatacaaaccatcgcaacgcaacagcaacaacagttcctaccagcactgagccacctagccatggtgaaccctgccgcctacttgcaacaacaactgcttgcatccaacgcacttgctctggcaaacgtagttgcaaaccagcaacaacaatagctgcaactatttctgccagcgctcagtcaactagccatggtgaaccctgccgcctacctacaacagcaacaactgctttcatctagcccgcttgctgtggccaatgcacctacatacctacaacaacaattgttgcaacatattgtaccagctctgactcagctagttgtggcaaaccctgctgcctacttgcaacagctgcttccattcaaccaactgactgtgtcgaactctgctgcgtacctacaacagcgacaacagttacttaatccacttgcagtggctaacccattggtcgctgccttcctacatgtcacacccggttttaaaaaggcaaaccgaatgcgaaccatgtacgtgccaggatcagttattcacgtacacagcagttacataatatggacatcatcacacagtgctcaaaatagtattaataagggaaatagtagattacatcata

SEQ ID NO: 10351 - DNA, 618 bp, Zea mays
  Clone ID: LIB3061-081-Q1-K6-G1
tgagaccaactagcaacatagcaaagcacaatagtgtaccaacaatggcagccaaaatattttgcctccttatgctccttggtctttctgcaagtgctgctacggcgaccattttcccgcaatgctcgcaagctcctatagcttcccttcttcccccgtacctctcaccagcggtgtcttcggtatgtgaaaacccaattcttcaaccctacaggatccaacaggcaatcgcagctggcatcttacctttatcacccttgttcctccaacaatcatcagccctattacaacagttacctttggtgcatttattggcacaaaacatcagggcacaacaactacaacaacttgtgctagcaaaccttgctgcctactctcagcaacagcagtttctttcattcaaccaactaggttcattgaactctgcttcttatttgctacaacaacaactaccattcatccagctacctgctgtctacccccagcaatatcttccattcaaccaactagcatcattgaactctactgctgatttacagtagcaacaactactaccattcatccagctagcttgtgtgagccctgtacctttttgaacaacacagatttgccgtctac

SEQ ID NO: 10352 - DNA, 631 bp, Zea mays
  unsure (1)..(631): unsure at all n locations; Clone ID: LIB3061-081-Q1-K6-G12
cccacgcgtcncgaagcaaccatagaagtggaatccagtagcaacaacagagcaacaatggcgaccaagatattttccctccttatgctccttgctctttctgcatgtgttgctaacgcgacaattttccctcaatgctcacaagctcctatagcttcccttcttcccccataccttccatcaatgatagcttcagtatgtgaaaacccagctcttcagccctataggctccaacaagcaatcgcagcaagcaacatacctttatcacccttgttgtttcaacaatcgccagccctatctttggtgcagtcattggtacaaaccatcagggcacagcagctgcagcaactcgtgctacctgtgatcaaccaagtagctctggcaaacctttctccctactctcagcaacaacaatttcttccattcaaccaactgtctacactgaaccctgctgcttatttgcagcaacaactattaccattcagccagctagctactgcctactctcagcaacaacaacttcttccatttaaccaattggccgcactgaaccccgctgcttatttgcagcagcaaatactactaccatttagccagctagctgcagcaaaccgtgcttccttcttgacac

SEQ ID NO: 10353 - DNA, 654 bp, Zea mays
  Clone ID: LIB3061-081-Q1-K6-G3
ccttctatcagtaccatcaatcatcattcatcttagtagtataggcaccaaatcaaatctgcaacatcaattatctaactccaaaaaccatgaagctggtgcttgtggttcttgctttcattgctttagtatcaagtgtttcttgtacacagacaggcggctgcagctgtggtcaacaacaaagccatgagcagcaacatcatccacaacaacatcatccacaaaaacaacaacatcaaccaccaccacaacatcaccagcagcagcaacaccaacaacaacaagttcacatgcaaccacaaaaacatcagcaacaacaagaagttcatgttcaacaacaacaacaacaaccgcagcaccaccaccaacaacaacaacaacagcaccaacaacaacatcaatgtgaaggccaacaacaacatcaccaacaatcacaaggccatgtgcaacaacacgaacagagccatgagcaacaccaaggacagagccatgagcaacaacatcaacaacaattccagggtcatgacaagcagcaacaaccacaacagcctcagcaatatcagcagggccaggaaaaacacaacagcaacaatgtcattgccaggagcagcaacagactacaaggtgcagctattactactatagcagtagctc

SEQ ID NO: 10354 - DNA, 635 bp, Zea mays
  Clone ID: LIB3061-081-Q1-K6-G5
gtgaagaatggcatccgcacctttgcttgcagtgagacagttaaatttggccatgtcacatttttctggaacggtaaccgttcgggatactttgatgcaactaaggaggagtatgtagaagtacctagtgacagtggtattacattcaatgttgcacccaatatgaaggcgcttgaaattgctgagaaagccagggatgctctcctaagtggaaagtttgaccaggtacgtgtcaacctgccaaatggtgacatggttggtcacactggtgatattgaggccaccgtagttgcttgcaaggcagctgatgaagctgttaagattattttggatgctgtcgagcaagttggtggtatttaccttgttaccgccgatcatggcaatgctgaggatatggtgaaaaggaacaagtctggcaagccgttgctcgacaagaatgaccgtatccagattcttacctcgcatacccttcagccggtcccggttgccattggaggccctggccttcaccctggagtgaaattccggaacgacatccaaacccctgggctcgccaacgtagccgcaaccgtgatgaacctccacggatttgaggctcctgctgactacgagcaaaccctcattgaagtggctga

SEQ ID NO: 10355 - DNA, 588 bp, Zea mays
  unsure (1)..(588): unsure at all n locations; Clone ID: LIB3061-081-Q1-K6-G6
caacagcacatanaagtggaatccagtagcaacaatagagcaacaatggcgaccaagatattttccctccttatgctccttgctctttctacatgtgttgctaacgcgacaattttccctcaatgctcacaagctcctatagcttcccttcttcccccataccttccatcaattatagcttcaatatgtgaaaacccagctcttcaaccatataggcttcaacaagcaatcgcagcaagcaacatacctttatcgcccttgttgtttcaacaatcgccagccctatctttggtgcagtcattggtacaaaccatcagggcacaacagctgcagcaactcgtgctacctctgatcaaccaagtagctctggcaaacctttctccctactctcagcaacaacaatttcttccattcaaccaactgtctacactgaaccctgctgcttatttgcagcaacaactattaccatttagccagctagctactgcctactctcagcaacaacaacttcttccatttaaccaattggccgcactgaaccccgctgcttatttgcagcagcaaatactactaccatttagccagcta

SEQ ID NO: 10356 - DNA, 631 bp, Zea mays
  unsure (1)..(631): unsure at all n locations; Clone ID: LIB3061-081-Q1-K6-G7
ggnaaaacaaagcccggttcctccagttcgtcactggcacttcaaagtaccgttggaaggttttagtgcacttcaagggatctctgggccacaaaggtttcagatacataaggcctacggcagcacgaaccatctgccttcagctcatacttgctttaaccaactagacttgcctgagtacacatccaaagagcagctccaggagcggttactattggcaatccacgaagcaaatgaaggtttcggatttggctaatcagttatactcgtttgtccgtgccctgagaactgcaataggcgagcagcacgtgtgtggctgatcacattatgaactccacgtgtgtgatgagagatggccggagagaacatgtccaggatagacgaatgcccgtgggagaggtactactgttaagagagagagcgactattttgtgtttataatctttgtctgtttgtagtttttgccttacattggtcgttgctccgaagtttttccccttcttttcgttcatagactggtgtaagttgtaaccgaacattatgtcaaatgcaggtcatcttacgctggaatgttatacctcccctaatctgttaaaacaactgtaaattccgaagactatttattctaata

SEQ ID NO: 10357 - DNA, 504 bp, Zea mays
  unsure (1)..(504): unsure at all n locations; Clone ID: LIB3061-081-Q1-K6-G9
caacaacaactacaacaacttgtgctaggaaaccttgctgcctactctcagcaacagcagtttcttccattcaaccaactggctgcattgaactctgctgcttatttgcaacaacaactaccattcagtcagctagctgctgcctacccccagcaatttcttccattcaaccaactggcagcattgaactctgctgcttatttacaacagcaacagctaccaccattcagccagctagctgatgtgagccctgttgccttcttgacacaacaacagttgttgccgttctacctgcacgctgcgcctaacgctggcaccctcttacaactgcaacaattgctgccattcaaccaacttgctttgacaaacccaacagcgttctaccaacaacccatcattnggtggtgccctcttttagattgcttatgagttatacttcaataatgaagttttttggatgatgtttgtggcttcccagaataagaaanacatttctagattctt

SEQ ID NO: 10358 - DNA, 486 bp, Zea mays
  Clone ID: LIB3061-081-Q1-K6-H10
taaaaaaaaaaaaaaaaaaaaaaaaaaaaaaaaaaaaaaaaaaaaaaaaaaaaaaaaaaaaaaaaaaaaaaagggaaaaaagaaaaaaaaaaaaaaaaaagggcgtccagctttaatggaaccaacgtttcttttcgcgtggtgtgccccttaattcgggttccttggcccggccgctttacatccgttgagagtggcgcgagccctgccaccttccccccttgggtagccccctggcgtttccccctttcgccggctggcctaatatccccttggccccggccgttccccttttcaaagggcccggcatgctggatggtcccagcggcgcgcccttttttttggcattgggccgccccttttggtggttctttcccgctgaccgttcattttcctgccccctgttgccggttcctttggctttgccttcttccctggtcctcacgtttgccccctttcctttttaacccttaactccggttttcc

SEQ ID NO: 10359 - DNA, 300 bp, Zea mays
  Clone ID: LIB3061-081-Q1-K6-H3
cggcggcagcgcccagagaggatcgctgcacagaacagcaagcaacaggccataatcctagacgagagcctgactctgtcagctgacagcgcctccgcaatgaagatgccctgccccatgcgcggagccgcagggctggtacagagctggcgccaacctgactacgatcatggagctccagcagctgcacccccacgcgcacacccgaggcaatcgaaacgcagaccgctggcagtaacaccctaatacgcctggtgtaggcagaccagcgccatacacacaacccctacagatacaggg

SEQ ID NO: 10360 - DNA, 642 bp, Zea mays
  Clone ID: LIB3061-081-Q1-K6-H4
gaaacacacctagcgaagcgcactagcaacgacctaacaacaatggctaccaagatattatccctctttgcgcttcttgccctttttgtgagcgcaacaaatgcgttcattattccacaatgctcacttgctcctagtgccattattccacagttcctccctccagttacttcaatgggcttcgaacacccagctgtgcaagcctacaggctacaacaagcgcttgcggcgagcgtcttacaacaaccaattgcccaattacaacaacaatccttggcacatctaaccatacaaaccatcgcaacgcaacagcaacaacaatttctaccagcactgagccaactagctgtggtgaaccctgtcgcctacttgcaacagcagttgcttgcatccaacccacttgctctggcaaacatagttgcataccaacaacaacaacaattgcaacagtttctaccagcgctcagtcaactagccatggtgaaccctgccgcctacctacaacagcaacaactgatttcatctagccctctcgctgtggttaatgcacctacatacctgcaacaacagttgctgcaacagattgtaccagctctgactcagctagctgtggcaaaccctgctgcctacttgcaacagctg

SEQ ID NO: 10361 - DNA, 631 bp, Zea mays
  Clone ID: LIB3061-081-Q1-K6-H6
accggtaccccattcccgggctagcaacatagtaagcacaatagtgtaccaacaatggcagccaaaaattttgcctccttatgctccttggtatttctgcaagtgctgctacggcgaccattttcccgcaatgctcacaagctcctatagcttcccttcttcccccgtacctctcaccagcggtgtcttcggtgtgtgaaaacccaattcttcaaccctacacgatccaacaggcaatcgcagctggcatcttacctttatcacccttgttcctccaacaatcatcagccctattacagcagttacctttggtgcatttattggcacaaaacatcagggcacaacaactacaacaacttgtgctagcaaaccttgctgcctactctcagcaacagcagtttctttcattcaaccaactagctgcattgaactctgcttcttatttgcaacaacaacaactaccattcagccagctacctgttgcctacccccaacaatttctttcattcaaccaactggcagcattgaactctcctgcttatttacagcagcaacaactactaccattcaaccagctagctggtgtgagccctgctaccttcttgacacaaccacagttgttgccgttcta

SEQ ID NO: 10362 - DNA, 631 bp, Zea mays
  Clone ID: LIB3061-081-Q1-K6-H8
gaacccgatcgacaccatgagggtgttgctcgttgccctcgctctcctggctctcgctgcgagcgccacctccacgcatacaagcggcggctgcggctgccagccaccgccgccggttcatctaccgccgccggtgcatctgccacctccggttcacctgccacctccggtgcatctcccaccgccagtccacctgccgccgccggtccacctgccaccgccggtccatgtgccgccgccggttcatctgccgccgccaccatgccactaccctactcaaccgccccggcctcagcctcatccccagccacacccatgcccgtgccaacagccgcatccaagcccgtgccagctgcagggaacctgcggcgttggcagcaccccgatcctgggccagtgcgtcgagttcctgaggcatcagtgcagcccgacggcgacgccctactgctcgcctcagtgccagtcgttgcggcagcagtgttgccagcagctcaggcaggtggagccgcagcaccggtaccaggcgatcttcggcttggtcctccagtccatcctgcagcagcagccgcaaagcggccaggtcgcggggctgttggcggcgcagatagcgcagcaactgacggcgatgtgc

SEQ ID NO: 10363 - DNA, 634 bp, Zea mays
  unsure (1)..(634): unsure at all n locations; Clone ID: LIB3061-081-Q1-K6-H9
gnacccaactagcaacatagnaaagcacaatagtgtaccaacaatggcagccaaaatattttgcttccttatgctccttggtctttctgcaagtgctgctaccgcaaccattttcccacaatgctcacaagctcctatagcttcctttcttcccccatacctctcaccagcggtgtcttcagtatgtgaaaacccaattcttcaaccctacaggatccaacaggcaatcgcagcaggcatcttacctttatcacccttgttcctccaacaaccgtcagccctattacagcagttacctttggtgcatttgttggcacaaaacatcaaggcacaacaactacaacaacttgtgctaggaaaccttgctgcctactctcagcaacagcagtttcttccattcaaccaactggctgcattgaactctgctgcttatttgcaacaacaactaccattcagtcagctagctgctgcctacccccagcaatttcttccattcaaccaactggcagcattgaactctgctgcttatttacaacagcaacagctaccaccattcagccagctagctgatgtgagccctgttgccttcttgcacaacaacagttgttgccgttctacctgcnacgctgcgcct

SEQ ID NO: 10364 - DNA, 634 bp, Zea mays
  unsure (1)..(634): unsure at all n locations; Clone ID: LIB3061-085-Q1-K6-A12
gcaacatangaaagcacaatagtgtaccaacaatggcagccaaaaattttgcctccttatgctccttggtctttctgcaagtgctgctacggcgaccattttcccgcaatgctcgcaagctcctatagcttcccttcttcccccgtacctctcaccagcggtgtcttcggtatgtgaaaacccaattcttcaaccctacaggatccaacaggcaatcgcagctggcatcttacctttatcacccttgttcctccaacaatcatcagccctattacaacagttacctttggtgcatttattggcacaaaacatcagggcacaacaactacaacaacttgtgctagcaaaccttgctgcctactctcagcaacagcagtttcttccattcaaccaactaggttcattgaactctgcttcttatttgcaacaacaacaactaccattcagccagctacctgctgcctacccccagcaatttcttccattcaaccaactagcagcattgaactctcctgcttatttacagcagcaacaactactaccattcagccagctagctggtgtgagccctgctaccttcttgacacaaccacagttgttgccgttctaccagcacgttgcgcctaacgctggc

SEQ ID NO: 10365 - DNA, 643 bp, Zea mays
  unsure (1)..(643): unsure at all n locations; Clone ID: LIB3061-085-Q1-K6-A2
ccaactagcaacatagnaaagcacaatagtgtaccaacaatggcagccaaaatattttgcctccttatgctccttggtctttctgcaagtgctgctacggcgaccattttcccgcaatgctcgcaagctcctatagcttcccttcttcccccgtacctctcaccagcggtgtcttcggtatgtgaaaacccaattcttcaaccctacaggatccaacaggcaatcgcagctggcatcttacctttatcacccttgttcctccaacaatcatcagccctattacaacagttacctttggtgcatttattggcacaaaacatcagggcacaacaactacaacaacttgtgctagcaaaccttgctgcctactctcagcaacagcagtttcttccattcaaccaactaggttcattgaactctgcttcttatttgcaacaacaacaactaccattcagccagctacctgctgcctacccccagcaatttcttccattcaaccaactagcagcattgaactctcctgcttatttacagcagcaacaactactaccattcagccagctagctggtgtgagccctgctaccttcttgacacaaccacagttgttgccgttctaccagcacgttgcgcctaactgctgca

SEQ ID NO: 10366 - DNA, 625 bp, Zea mays
  Clone ID: LIB3061-085-Q1-K6-A3
acaatgtggttgagcgatattcttcacatccaggctcacaaagtcaatctgaaaacacatgcactgatgcacacttgtgtttgtgtagaggcgcgattggccagcttatatagcatccgaaagacaagtcactcacacgcacattcgcattggctaacagaagctatttggaatgcagtgcactcgactaacaacgtaggtaacccccgtctccttgttttgccgattgcatcgccatcatatgtcagcagcaaggaagttgccagacaaggaaaccttctcgccaggcttgaatggtggaagacctctgtagggacaggttccacagcggaaggcatcacccaacccacaactgccacaagctgactgagggttattgatctgctccgcagtgagctccagcttcccaaccttctcctcggcctcagccctgccacaagtacagttcttgcatgctttctttgctgcccccacctcacagtccccaacaactggaagttgtggtttcttcaggtcctcctcagtcaagagactgtcttcatcaatcagatcagagtcgtcgtcaatttgaatcttgggaagggctttcgttgttttcttaaggggaaaagagcacccatgctcc

SEQ ID NO: 10367 - DNA, 236 bp, Zea mays
  Clone ID: LIB3061-085-Q1-K6-A4
ggaaactatgtactgtagtaataatgtaatggagccgctgactagctacctatagggctatagctagttcactcgtttagcggcgatgagtaacggagtgtcacccatcaccatgggtggcagtgtgagcaatgacctgaatgaaccattgaaatggaaaggaataatatatagggaaaaggatgtttggaaaaaaaaaaaaaaacaaaaaaaaaaaaaaaaaaaaaacccacact

SEQ ID NO: 10368 - DNA, 642 bp, Zea mays
  Clone ID: LIB3061-085-Q1-K6-A6
caggaggcggcgattcgcggcggtgagggcgtccgcggagacgatggcgacggagaagctgggcatcaaggtggagcgcaacccgcccgagtcccgcctctccgagctcggcgtccgccagtggcccaagtaagtgagcgagcgtgcgagccgccctccctccctcccagccggcgtctcgatctcgaatctccccgccgccctccgcccgctccgtgcccgtgctgactgcggcctgctgatgaatgaatggaccgatcaggtgggggtgcgagaagagcaagttcccgtggacctactccgccaaggagacgtgctacctgctgcaggggaaggtgaaggtgtaccccgaaggccacggggaggagttcgtggagatcggcgcgggagaccttgtcgtcttccccaagggcatgagctgcacctgggacgtcgccgaggccgtcgacaagcactacaacttcgagtagccgccgccgccgactagccctgcggcgctcgatgtagacttgctgtgctcttgtactctgaaccaccgtgtaataaagctccggattagggtactacaatactgtactatctgtttcagatcccgttcggttagctgtgattaagacctgaaactattccagctgatcagtt

SEQ ID NO: 10369 - DNA, 628 bp, Zea mays
  Clone ID: LIB3061-085-Q1-K6-A7
ggcaaatggcgattgcatttttggtgctaaaccgcacgacgcactcggcccattccatgctccaccttgcgtacgcgagccgaacgctcgtgggtcctgcagcctccgtctccacctagggttctggcgatggcgcacggcggctacccacgccgcggcgccgccgtacgcaggcccaagtcctcggcctctgccgcagttgccgaccgcaagcggaagcggaccgccgccgccgccaagaccacctcccttaagaaccagatccgctccaccgagcgcttcctccgcaaggaccttccggatgagattagggttgctcaagagaagaaactggaagaactgaagaggcaacaagagcttcagaatcaacttgctgtccagcggacattacagtttagagatagaaagataaaattctttgagagacggaagattgagaggatgataaggcgactcgagaagaacaacgttcaaatggtgatggtgtcaacaataatctgtcaaaattgcgagaagatcttgaatatgttagattcttccctaagaatgagaaatatgtctcgctgttcactggagggaacagtcaagatattgttcaagagaggataaatggcgcaaacagatcaag

SEQ ID NO: 10370 - DNA, 620 bp, Zea mays
  Clone ID: LIB3061-085-Q1-K6-A8
attttcagcattcaaaaacacaccaagcgaagcgcactagcaacgacctaacaccaatggctaccaagatattagccctccttgcgcttcttgcccttttagtgagcgcaacaaatgcgttcattattccacagtgctcacttgctcctagtgccattattccacagttcctcccaccagttacttcaatgggcttcgaacatccagccgtgcaagcctacaggctacaactagcgcttgcggcgagcgccttacaacaaccaattgcccaattgcaacaacaatccttggcacatctaaccctacaaaccattgcaacgcaacaacaacaacaacaacagtttctgccatcactgagccacctagccgtggtgaaccctgtcacctacttgcaacagcagctgcttgcatccaacccacttgctctggcgaacgtagctgcataccagcaacaacaacagctgcaacagtttatgccagtgctcagtcaactagccatggtgaaccctgccgtctacctacaactactttcatctagcccgctcgcggtgggcaatgcacctacgtacctacaacaacagttgctgcaacaaattgtaccagctctgactcagctagct

SEQ ID NO: 10371 - DNA, 574 bp, Zea mays
  unsure (1)..(574): unsure at all n locations; Clone ID: LIB3061-085-Q1-K6-A9
caactagcaacatagnaaagcacaatagtgtaccaacaatggcagccaaaaattttgcttccttatgctccttggtctttctgcaagtgttgctaccgcaaccattttcccacaatgctcacaagctcctatagcttcccttcttcccccatacctctcaccagcggtgtcttcaatgtgtgaaaccccaattgttcaaccctacaggatccaacaggcaatcgcaacaggcatcttaccattatcacccttgttcctccaacaaccgtcagccctattacagcagttacctttggtccatttggtggcacaaaacatcagggcacaacaactacaacaacttgtgctagcaaaccttgctgcatactctcagcaacatcagtttcttccattcaaccaactggctgcattgaactctgctgcttatttgcaacaacaattaccattcagccagctagttgctgcctacccccagcaatntcttccattcaaccaactagcagcattgaactctgctgcttattacagcagcaacactactacattcagccagctagctgatgtgagccctgct

SEQ ID NO: 10372 - DNA, 648 bp, Zea mays
  unsure (1)..(648): unsure at all n locations; Clone ID: LIB3061-085-Q1-K6-B10
gnanaacaacaagcaacatagaaagtggaatccagtagcaacaacagagcaacaatggcgaccaagatattttccctccttatgctccttgctctttctgcatgtgttgctaacgcgacaattttccctcaatgctcacaagctcctatagcttcccttcttcccccataccttccatcaatgatagcttcagtatgtgaaaacccagctcttcagccctataggctccaacaagcaatcgcagcaagcaacatacctttatcacccttgttgtttcaacaatcgccagccctatctttggtgcagtcattggtacaaaccatcagggcacagcagctgcagcaactcgtgctacctgtgatcaaccaagtagctctggcaaacctttctccctactctcagcaacaacaatttcttccattcaaccaactgtctacactgaaccctgctgcttatttgcagcaacaactattaccattcagccagctagctactgcctactctcagcaacaacaacttcttccatttaaccaattggccgcactgaaccccgctgcttatttgcagcagcaaatactactaccatttagccagctagctgcagcaaaccgtgcttncttcttgacacagcaacagttgctgcctttc

SEQ ID NO: 10373 - DNA, 336 bp, Zea mays
  Clone ID: LIB3061-085-Q1-K6-B12
gatgaagcagctttccaaacttcttgacgaagacccagcagtcatggaacgcagaactaaccttgcaaagaggctcgagctgtaccggagtgcccaatccgaaattgatgccgttgcatggtccaaatagtcctgatggccaagatatctgttcttaccccttgtctggcgattctctctcctattctggggcatatatagctgatttttcgtgttgtaggtcaggtcattttatatatcaccggagctgtacggtgtcatgttccttgtgcttgaggatctagggggggcacttgtatctcgaacaagttcttacatcgcgctttcgttccatct

SEQ ID NO: 10374 - DNA, 627 bp, Zea mays
  Clone ID: LIB3061-085-Q1-K6-B2
ccggcgcctccaccctccgcctggtgtccttcgccgtcgacgagcgcacaccagtacgtattgctcgtgatttgtgtaactacggagcaagctgcatacagcacaagatagaagatgggtatccttgagaggatcaaggagattgaggccgagatggctcggactcagaaaaataaagcaacagaatatcatcttggacaactgaaggcaaaactagcaaagttgaggacacaactattagagcctccaaagggttccagcggaggtggagatggttttgaagtcacaaagtttgggcatggtcgtgttgcacttattggatttcccagtgttggaaagtcaactcttttaacgatgttgactgggacacattctgaagctgcatcatatgagttcacaacgcttacttgcattcctggaattgttcattacaatgataccaaaatccagcttcttgatcttcctggtatcattgaaggagcttctgaaggcaaggggcgtggtaggcaggttattgctgttgcaaagtcatcagatcttgcgctgatggttctggatgcctcaaagagtgaaggacatcgtcaaatattaactagagaactggaagctgttgacttcgtctaacaa

SEQ ID NO: 10375 - DNA, 633 bp, Zea mays
  Clone ID: LIB3061-085-Q1-K6-B3
cacctccccggatcccgccgcgatggaggaagacgacgagttcggcgacctctacacggacatcctcatccccactcatacccccgcatccacctccgcgctatccaaccctgttctagtcgaaaccctacaccgcccgcctccacaccctaatcctacccccgtggcggcagcagcagaggaggtcgacgatgactggctcctaggagggagcgaacccatacccggggtcgacccgaccggcgattgggccgacgaggacgacgatggaggggagcccgcacctcccgcgaagcggtccacctctgcggatgatatcgatccgctcatggggggtggtgcgggggattccgggccggtcatccctgggctctcgtcatcatcggcagctggtgcggccgggagcgacgaatgggacagcgatagcgaggacgacatccagatcgtgctcaacgagaccgatggccgcccggggcttgtggaggatgaaggagacgacgaagacggtgaggacctcgtcatcgtcgccgacggaccagcgatggaggagcaggattggggagaggacccagcagcggcaggtgcagaaggagagcgaatgacggaggtgagcctggtaagaacgtggcagca

SEQ ID NO: 10376 - DNA, 619 bp, Zea mays
  unsure (1)..(619): unsure at all n locations; Clone ID: LIB3061-085-Q1-K6-B4
cctatggttcagcaaggacagcaaccacagcgtcctgctggtagacgtgctggtggaatgcagcagcccatgccaatgggtggtcagcaacaggtgttccctagaggtggtcgtggctatcgctatcctactggacgtggaatgcctgatcctggcatgcacagtgttggtgctgtgatgccaccttcatatgagatgggagggatgccaatgagagaagctgccccccaacctgttccaattggggcgctagccactgcacttgctaacgccccaccagatcagcagagacttatgcttggtgagaacctgtatcctcttgttgaacagctggaacgtgagcaggctgccaaggtcactggcatgcttttggagatggatcagacggaggttcttcacctgctggagtcgccagatgctctgaaagccaaggttgctgaagccatggaggtcctccgctctgcccagcatctccagcagagcaatgtttctactgagcagcagctggctaatctatcattgaatgatggcgtcgtctccagctgaacgttaatgtttctgatgtttcngaagtgctgccagtttttgcttgatactaccctatctagagtgtaatgac

SEQ ID NO: 10377 - DNA, 646 bp, Zea mays
  unsure (1)..(646): unsure at all n locations; Clone ID: LIB3061-085-Q1-K6-B5
gngaaccaacnntagcaacatagaaagcacaatagtgtaccaacaatggcagccaaaatattttgcttccttatgctccttggtctttctgcaagtgttgctaccganaccattttcccacaatgctcacaagctcctatagcttcccttcttcccccatacctctcaccagcggtgtcttcaatgtgtgaaaccccaattgttcaaccctacaggatccaacaggcaatcgcaacaggcatcttaccattatcacccttgttcctccaacaaccgtcagccctattacagcagttacctttggtccatttggtggcacaaaacatcagggcacaacaactacaacaacttgtgctagcaaaccttgctgcatactctcagcaacatcagtttcttccattcaaccaactggctgcattgaactctgctgcttatttgcaacaacaattaccattcagccagctagttgctgcctacccccagcaatttcttccattcaaccaactagcagcattgaactctgctgcttatttacagcagcaacaactactaccattcagccagctagctgatgtgagccctgctgccttcttgaacaacaacagttgttgccgttctacctgcacgctatgcctaacgctggcac

SEQ ID NO: 10378 - DNA, 350 bp, Zea mays
  Clone ID: LIB3061-085-Q1-K6-B6
aattgtaccagctctgactcagctagctgtggcaaaccctgctgcctacttacaacagttgcttccattcaaccaactggctgtgtcaaactctgctgcgtacctacaacagcgacaacagttacttaatccattggcagtggctaacccattggtcgctaccttcctgcagcagcaacaacaattgctgccatacaaccagttctctttgatgaaccctgccttgcagcaacccatcgttggaggtgccatcttttagattacatatgagatgtactcgacaatggtgccctcataccgacatgtgtttcctagaaataatcaatatattgattgagatttatctcgat

SEQ ID NO: 10379 - DNA, 629 bp, Zea mays
  unsure (1)..(629): unsure at all n locations; Clone ID: LIB3061-085-Q1-K6-B7
cgcaaattgcaccaagtaaatccatcgagaggccgtcgacaggggaattaatggcgtcgtcgtctagcagcagccaccgccgcctcatcctcgcagccgccgtcctgctctccgtgctcgcggctgccagcgccagcgccgggacctcctgcgtgccggggtgggccatcccgcacaacccgctcccgagctgccgctggtacgtgaccagccggacctgcggcatcgggccgcgcctcccgtggccggagctgaagaggagatgctgccgggagctggcggacatcccggcgtactgccggtgcacggcgctgagcatcctcatggacggcgcgatcccgccgggcccggacgcgcagctggagggccgcctagaggacctgccgggctgcccgcgggaggtgcagaggggattcgccgccaccctcgtcacggaggccgagtgcaacctggccaccatcagcggcgtcgccgaatgcccctggattctcggcggcggaacgatgccctccaagtaactgcgaagagcatagtgcatgaggaatgagcttgtagctagctcatatgtctgaataataagcacagcaagaagatgaatgcatntctcggatcgttcatcccgaacaata

SEQ ID NO: 10380 - DNA, 627 bp, Zea mays
  unsure (1)..(627): unsure at all n locations; Clone ID: LIB3061-085-Q1-K6-B8
tgcaaagcaagggatcgtgtattgcaaattcagctttgagaatctacagcatccttggggcgtactgagccggtattgcatcgtattgttacatgtttgtccatcgcagcttcaatggagggagaaaatgaccaaaacaaccaactagaggaaccgtacattcaaccttttattcttcggctactcatcatatggcttgttgattgttcaaatgctgtcaactgccttttggaatcagcggtgcatctgaacttcataatagagcttgcttcgaataaacgttacgccgcttgtgtccgtggattggctgctgttgttctaggtgcttgcatcctgtacaatgctagccgtgagaagggtcgtgatgcctttgccgtggcagatgctataagtcaaaagattggcctcacaacatacttcttgaggtttgatgaactgaggaaaagcttggcacatccgttgtcagagcagcatcaccgcaaggagctttcccgatcaagtgcgaatagcatgtcagatttccaagagattgaagaggatgaaacaaataanggcgatcaacaccctgtgctttcagaaatatttgattcacagtttgttaatttacttactaagcttgatgctgat

SEQ ID NO: 10381 - DNA, 650 bp, Zea mays
  Clone ID: LIB3061-085-Q1-K6-B9
attcaaccaactgactggaagtagttgctgaacgaaggtgctgctcatgggccaactgaatctaataactcggcatctatgctatccgttgagacaattgagaaatgatggaagatccagctgtgcagaagatggtgtatccctacttgcctgaagagatgcggaacccaaattcatttaagtggatgctgcagaatccaatgtaccgccaacaactacaggatatgctaaataacatgggcgcaactcctgatcaatgggataaccgcatgcttgatcaccttaagaacttcgaccttagcagtccagaagtgcggcagcagtttgcgcaagttggcatgactcctgaggaagtagtatcgaaaataatggcaaacccagatgtagctgttgcattccagaatccaaaaatacagacagccatcatggactgctcgcagaaccctcttaacattgtaaaataccaaaatgacaaggaggtcatggatgttttcatgaagatatcacaaatcttcccccaaattaacggctagctgatcttcgtcgtgagatagcacttgtgtattttgtcggcccgtcatctccagtctggagggctgctgcggtagcatctatcaagaaaaaggtcgcgacgctccgatataccctcc

SEQ ID NO: 10382 - DNA, 298 bp, Zea mays
  Clone ID: LIB3061-085-Q1-K6-C10
ccggtcgacccagcgtttttttacaaccttttttttcagtcgcgggctgggggggtctaactaaaaaacgttcctacaccagcgtactctgcctccttaatccattggcagtggcctaacccattggtcgctcccttcctgcagcagcatcaacaattggtgccttttatctcagttctctttgatgaaccttgctttggtgttacccgtcgttgggggtgccatcttttagattccatatgagatgtactagacaatggtgccctcataccgacgtgtgtttcctagaaatgatcaa

SEQ ID NO: 10383 - DNA, 624 bp, Zea mays
  Clone ID: LIB3061-085-Q1-K6-C11
ccgtccgtgtgaaaacccaattcttcaaccctacaggatccaacaggcaatcacagctggcatcttacctttatcacccttgttcctccaacaatcatcagccctattacatcagttacctttggtgcatttattggcacaaaacatcagggcacaacaactacaacaacttgtgctagcaaaccttgctgcctactctcagcaacagcagtttcttccattcaaccaactagctgcattgaactctgcttcttatttgcaacaacaacaactaccattcagccagctacctgctgcctacccccagcaatttcttccattcaaccaactggcagcattgaactctcctgcttatttacagcagcaacaactactaccattcagccagctagctggtgtgagccctgctaccttcttgatacaaccacagttgttgccgttctaccagcacgctgcgcctaacgctggcaccctcttacaactgcaacaattgctgccattcaaccaacttgctttgacaaacccagcagcgttctaccaacaacccatcattggtggtgccctcttttagatttcttatgagttatagttcaataataaagttttttgtctgatgtttgtggc

SEQ ID NO: 10384 - DNA, 652 bp, Zea mays
  Clone ID: LIB3061-085-Q1-K6-C12
gcacagacgagacgacagagatgaaggacggaacgtcgtcggggggaggggcgttcgctgcgggcagcgatccaaggcagccgtcgacggcgaagccatacgcgccgccgaagctgtcgccccaggacctacccatcgactatgcaggcttcctcgccgtcgccttcggcgtcctcggcgtcatgctccgctacaaggtgtgctcgtggatcgcaatcatcttctgcgctcagtcgttggcaaacatgaagaactttgagaacgatctgaagcagctttctatggccttcatgtttgctgttatgggtctggtgacgaactattttggccccgctcgtccaggcagtacaaagcgctaaactgcggaagaacatgtgctacattcttcataggactttttggtgcttccgatagctttgccatcggtgctgacattatgtatgtccaatttgagcaaacgtcataggtatgggcatcaaattaatggaccggtacatgtatgatgctcaataatttatttgtgcaatactagtaaacgcatagactgtttgaacgagtacttggtttctccggatatgttgatcaatgttttctggacttgatgcttcggtcttatcagtttaccccaaaatgccggtagatggactgacgt

SEQ ID NO: 10385 - DNA, 661 bp, Zea mays
  Clone ID: LIB3061-085-Q1-K6-C2
gccaaggaggctattctatcacacttgagcctgacccagagattgatgcaccctggtttaccaggggcacgttggataggtttgttcgatttgtcagtacaccagaggtcctggagcgggtcacaaccatagagtctgagatattgcagattgaggatggcattgccgtccagggcagcgacagtcttgggttgagatctgtagtaaggcaagttacaatcctgatgcagatagggcacttgttccatacaaggctggtacacaaccaattccaccattgcagaatcatgatgctacacaggaggagaattcaaaggatcaattgctcagagtgctagagactcgcaaaacagtcttacgtaaagaacaagctatggcctttgcacgtgctgtagcagcaggatttgacatcgacaacttggtgtatctgatcacttttgcagagtgttttggtgcttctcgcttgatgtggtgactgagtgtctaaaggatgaacctgaggagccaaccttgggcgccgtggagaaaccttaccaggccccctttgctagggtgacatcgctggcgaatgcatcagacagcagtccattacctgaatcacttgcgcatgcaaatagcattaaagctcgagtgcctgagcctgtgtacacagtttcagttg

SEQ ID NO: 10386 - DNA, 630 bp, Zea mays
  Clone ID: LIB3061-085-Q1-K6-C3
ttctgatttgcataaacgttgtttgtgctttaggtatttcagtaatgccagtcatccaattttatcttttactaagttcaacattgagatggaccataaaacatacctctgtcccaaaatataggtactcctaggtttgagtcaaactgttttagttttgaccaggtttattacgaaaaatatctacacaagtacattgtaaaaagttattttataattggtatagcgatactaatttagtgttctacatgttgataatttttactatgatttagtcaaccctaacttcgttttaaccaaagaattttgggatggacaaaatggttctttcaataacccattgttttgttttatatgttgatcagctcatcacaatggctttgatagtgactttgctttttaaggtgcagtcaatacacatggcatctagcaaatcatagaagaagctatttgcagaagaagttatttgcacaggaaacaccatgctattgccacccctctccgtggcacctgatggattcgttctttggggaaacattttgttggctaggaaacccacttattccgcgtgggtcaccagcatctcttcgaatttgaatcaagtaaaatgtcaaagagaaaacttgttct

SEQ ID NO: 10387 - DNA, 626 bp, Zea mays
  Clone ID: LIB3061-085-Q1-K6-C4
cacttcacaaacgaaaacccgcagcaaacgctagcagcggcggcgccggcagttggtagccgcgaccgagacacggcgggtgacctgccccgccgcagtcggggtgtatgtattaccaccgccagaattccaggagacgaggatcgaggaggcaccgatccgtagcggcgatatcgtagagccgctggtctcacgccgcaccgagacaatggcagaccagttagggtcttacactattagatcccatggaatgatattggcaaggttgcacatgtatgactggataatacttctcctccttgctgtcatagacgggctgttgaatataattgaaccatttcaccgttttgttgggaaagacatgatgactgacttgagatatcctatgaagggcaatacagtgccattttgggctgttccactgattggaattatactgccttgggccatctttgttgggatttacttcaaaaagaagaatttttatgatttgcaccatggcatactggggattctatactcagtgctgataactgcagtgattactgatgcaattaaggatggtgttggacggcctcgtccagattttttctggcgctgtttccctaatggaaatgatgtttatg

SEQ ID NO: 10388 - DNA, 660 bp, Zea mays
  Clone ID: LIB3061-085-Q1-K6-C5
gtcgacccagcgtccgaatttttgagcattcagaaaccaccaagcgaagcgcactagcaacaacctaacaacaatggctaccaagatattatccctccttgcgcttcttgcgctttttgcgagcgcaacaaatgcgtccattattccacaatgctcacttgctcctagttccattattccacagttcctcccaccagttacttcaatggccttcgaacacccagctgtgcaagcctataggctacaacaagcgattgcggcgagcgtcttacaacaaccaattgcccaattgcaacaacaatccttggcacatctaacaatacaaaccatcgcaacgcaacagcaacaacagttcctaccagcactgagccacctagccatggtgaaccctgtcgcctacttgcaacagcagctgcttgcatccaacccacttgctctagcaaacgtagttgcaaaccagcaacaacaacaactgcaacagtttctgccagcgcttagtcaactagccatggtgaaccctgccgcctacctacaacagcaacaactgctttcatctagcccgctcgctgtggccaatgcacctacatacctgcaacaagaattgttgcaacagattgtaccagctctaactcagctagctgtggcaaaccctgttgccta

SEQ ID NO: 10389 - DNA, 480 bp, Zea mays
  Clone ID: LIB3061-085-Q1-K6-C6
gcacaagttgttgtagttgttgtgctagcaaaccttgctgcctactctcagcaacagcagtttcttccattcaaccaactagctgcattgaactctgcttcttatttgcaacaacaacaactaccattcagccagctacctgttgcctacccccaacaatttcttccattcaaccaactggcagcattgaactctcctgcttatttacagcagcaacaactactaccattcagccagctagctggtgtgagccctgctaccttcttgacacaaccacagttgttgccgttctaccagcacgctgcgcctaacgctggcaccctcttacaactgcaacaattgctgccattcaaccaacttgctttgacaaacctagcagtgttctaccaacaacccatcattggtggtgccctcttttagatttcttatgagttatagttcaataataaagttttttgtctgatgtctgtggcttcccag

SEQ ID NO: 10390 - DNA, 591 bp, Zea mays
  Clone ID: LIB3061-085-Q1-K6-C7
caatcgccagccctatctttggtgcagtcattggtacaaaccatcaaggcacagcagctgcagcaactcgtgctacctgtgatcaaccaagtagctctggcaaacctttctccctactatcagcaacaacaatttcttccattcaaccaactatctacactgaaccctgctgcttatttgcagcaacaactattaccattcagccagctagctactgcctactctcatcaacaacaacttcttccatttaaccaattggccgcactgaacctcgctgcttatttgcagcagcaaatattactaccatttagccagctagctgcagcaagccgtgcttccttcttgacacagcaacagttgctgcctttctaccagcagtttgcggctaaccccgcaaccctcttacaactacaacaattgttgccctttgtccaacttgctttgacaaacccagcagcctcctaccaacaacacatcatatggtggtgccctcttttagattgcttattagttgtaattaataataaagttttttggatgatgtatgtggccaaccagaaataagaagttacatttccagattctaatgtg

SEQ ID NO: 10391 - DNA, 639 bp, Zea mays
  Clone ID: LIB3061-085-Q1-K6-C8
tcggcgaccattttcccgcaatgctcgcaagctcctatagcttcccttcttcccccgtacctctcaccagcggtgtcttcggtatgtgaaaacccaattcttcaaccctacaggatccaacaggcaatcacagctggcatcttacctttatcacccttgttcctccaacaatcatcagccctattacatcagttacctttggtgcatttattggcacaaaacatcagggcacaacaactacaacaacttgtgctagcaaaccttgctgcctactctcagcaacagcagtttcttccattcaaccaactagctgcattgaactctgcttcttatttgcaacaacaacaactaccattcagccagctacctgctgcctacccccagcaatttcttccattcaaccaactggcagcattgaactctcctgcttatttacagcagcaacaactactaccattcagccagctagctggtgtgagccctgctaccttcttgatacaaccacagttgttgccgttctaccagcacgctgcgcctaacgctggcaccctcttacaactgcaacaattgctgccattcaaccaacttgctttgacaaaccagcagcgttctaccaacaaccatcattggtggtgccct

SEQ ID NO: 10392 - DNA, 644 bp, Zea mays
  unsure (1)..(644): unsure at all n locations; Clone ID: LIB3061-085-Q1-K6-C9
tgttcttctagctgatgaggtatatcaagagaacatctatgttgacaacaagaaatttaactctttcaagaagattgcaagatccatgggatacggcgaggatgatctccctctagtatcatttcagtctgtctccaaaggatactatggagagtgtggtaaaagaggaggttacatggagattactggcttcagtgctccggtaagagagcagatctacaaggtagcttcagtgaacctgtgctccaatatcactggtcaaatccttgcgagcctcgtcatgaatccaccaaaggttggggacgaatcatatgcttcctacaaggcagagaaagatggaatccttcagtctttagctcgccgtgcaaaggcactggaagatgcattcaacacgcttgagggattttcatgtaacaaggctgaaggagcaatgtaccttttccctcagatccatctgccacataaggcaattgaggctgctaaagctgccaagaaagcacctgatgcattctatgcgctccgtctccttgaatcaactggattgttgtggttcctggatctggatttggccaagttcctggaacatggcacgtcagatgcacgatcctgcncgcagaagataaaatcnnccgcgtgatcaccca

SEQ ID NO: 10393 - DNA, 584 bp, Zea mays
  unsure (1)..(584): unsure at all n locations; Clone ID: LIB3061-085-Q1-K6-D11
gcaagtttgtccattcgcattggtctganaactgtagctactagcgcgagtgccactgtgccgcagctgcctgctcgccattactgcaagctgtgttcaatcaaagcttaattaggctccctctacatctgatccagctaagtagctagccagcactacagaagggcgtggcaagaatcaggagagagatagcaggggggctagctagctgagctcgtgcgacgaagaatggccggaattggcaggaacatggtggcgccgctcctggtgctcaacctcatcatgtacatcatcgtcatcggcttcgcgagctggaacctgaaccacttcatcaacgggcagaccaactaccccggcgtggccggcaacggcgcgacgttctacttcctggtgttcgccatcctggccggcgtggtgggcgcggcgtccaagctggcgggcgtgcaccacgtgcgcgcctggcgccacgacagcctggccaccaacgccgcgtcgtcgctcatcgcctgngccatcacggcgctcgccttcgggctggcctgcaaggagatccacatcggcggacaccgcggctggcgcctgca

SEQ ID NO: 10394 - DNA, 656 bp, Zea mays
  Clone ID: LIB3061-085-Q1-K6-D12
cagcctagcaattagctcatcgactccagattggagaactcgacaccatgaaggtgctgatcgttgcccttgctctcctggcgctcgctgcgagcgccgcctccagtacaagcggcggctgtggctgccagacaccaccgtttcatctaccgcctccgttctatatgccgcctccgttctatctgccgccgcagcagcagccgcagccatggcaataccccactcaaccaccgcagctaagcccgtgccagcagttcggatcctgcggcgtcggcagcgtcggcagcccgttcctgggccagtgcgtcgagttcctgaggcaccagtgcagcccggcggcgacgccctacggctcgccacagtgccaggcgctgcagcagcagtgctgccaccagatcaggcaggtggagccgctgcaccggtaccaggcgacatacggtgtggtcctgcagtccttcctgcagcagcagccgcagggcgagctcgcggcgctgatggcggcccaggtagcgcagcagctgacggcgatgtgcggtctgcagctgcagcagccaggtccctgcccttgaacgcagctgccggcggtgtctactactgaggaaactatgtactgtagtaataatgtaatggagccgctgactagctacctatagggc

SEQ ID NO: 10395 - DNA, 654 bp, Zea mays
  unsure (1)..(654): unsure at all n locations; Clone ID: LIB3061-085-Q1-K6-D2
gcaacatagaaagggaatacagtagcaaaaatagagcaacaatggcggccaagatattttccatccttatgctccttgctctttctgcatgtgttgctaacgcgaccatttttcctcaatactcacaagctcctatagctgcccttcttcccccataccttccatcaatgaccgctttagtatgtgaaaacccagcccttcaaccctacaggatccagcaagcaatcgcaacaagcaacttacctttatcacacctgttctttcaacaatcgccagccctatctttggtgcagtcattggtacaaaccatcagggcagaacagttgcagcaactcgtgctaccagtgatcagccaagtagctctggcaaacctttccccctactctcagcaacaacaatttcttccattcaaccaactgtctatactgaaccctgctgcttatttgcagcaacaacaactactaccattcagccagctagctactgcctactctcagcagcaacaatttcttccatttaaccaattggccgcactgaacccctctgcttatttccagcagcaaatactactaccatttggccagctagctacaacagccccgcttncttcttgacacacaacaagtgcttccgttctaccagcagtttgtggct

SEQ ID NO: 10396 - DNA, 613 bp, Zea mays
  unsure (1)..(613): unsure at all n locations; Clone ID: LIB3061-085-Q1-K6-D3
ccccaattgttcaaccctacagnatccaacaggcaatcgcaacaggcatcttaccattatcacccttgttcctccaacaaccgtcagccctattacagcagttacctttggtccatttggtggcacaaaacatcagggcacaacaactacaacaacttgtgctagcaaaccttgctgcatactctcagcaacatcagtttcttccattcaaccaactggctgcattgaactctgctgcttatttgcaacaacaattaccattcagccagctagttgctgcctacccccagcaatttcttccattcaaccaactagcagcattgaactctgctgcttatttacagcagcaacaactactaccattcagccagctagctgatgtgagccctgctgccttcttgacacaacaacagttgttgccgttctacctgcacgctatgcctaacgctggcaccctcttacaactgcaacaattgctgccattcaaccaacttgctttgacaaacccaacagtgttctaccaacaacccatcattnggtggtgccctcttttagattgcttatgagttatagttcaaataatgaagtttttggatgatgtttgtggcgtccc

SEQ ID NO: 10397 - DNA, 613 bp, Zea mays
  unsure (1)..(613): unsure at all n locations; Clone ID: LIB3061-085-Q1-K6-D4
gctggttcgctcgctcgctcgcgccgcgccgccgcgtgggggtgccgatgagctgcgcggggcaggccggcgggtggctgctcgactacgcgctggtggaggaggagatccagggctccgagttcatctacatggtcgacgacccggccgtctccagcgtgatactggggtttgatgctcccaggaaagaggacggcgtccaggacaaccccggcgccaagaagagatcccggccggagtccagcgcgccacccggcaccaaggcttgccgtgagaagctccggcgagacaggctcaacgaaaggttcaacgagctctgtgccatcttggaacccggcaagccacccaaggccgacaaagtcgctatcctaagcgacgctgcccgtctcctgaaccagctgcagggcgaggcccagaagcttaagcaatcgaacgaatcgctccaggagtccatcaagagtcttaaggctgagaagtccgagctgcgagacgagaagacgaggctcaaggctgagaagnagaggttggagcagatgctcaagggcgtcgtcagccacgccgcggtggctgctccgggcccttcgtcccgaccctgctgcggtcgctccatctt

SEQ ID NO: 10398 - DNA, 588 bp, Zea mays
  Clone ID: LIB3061-085-Q1-K6-D5
gatagtgtgagcattcagaaaccaccaggcgaggcgcactagcaacagcctaacaacagtggctaccaagatattatgcctccttgcgcttcttgcgcgctgtgcgagcgcaacagatgcgtgcattgttccacattgctcacttgctcctagttccattattccacagctcctgcggggggggcttcactggcctttgaacacccagcggtgcaagcctatcggctacaccaagcgattgcggcgagcgtcttacaacaaccaattgcccaattgcgacatcaatgcttggcgcatctaacattacaaaccatcgcatcgcaccaggaacgacagttcctaccagcagtgagccacctagccatggtgaaccctgtcgcctacttgcaacagcagctgcttgcatgcaacccacttgctctggcggacgtagttgcaatccagcgacagcaacaactgcgacagttgctgccagcgcttagtcgactagccatggtgaaccctgccggctacctgcgacagcggcaactgctttcatctagcccgctcgctgtgggcaatgcacctacatacctgcagcaggaattg

SEQ ID NO: 10399 - DNA, 483 bp, Zea mays
  Clone ID: LIB3061-085-Q1-K6-D6
taaaaaaaaaaaaaaaaaaaaaaaaaaaaaaaaaaaaaaaaaaaaaaaaaaaaaaaaaaaaaaaaaaaaaaaaaaaaaaaaaaaaaaaaaaaaaaaaaaaaaaaaaatttaaaaaaaaaaaaaaaggggggggccgtttttaagggttcaaattttgcttcccgttttttggaacttttttttttttttttgggggcccttaattttatttctttggccgggttttaacacctagtgggggggaaaccccttggtttcccccattttattgctttggaagaacttccccttttgcccgttggggtttatcccaaagggccccccccgttccccctttcccaactttggccccctctggtggggagtgggacccccctttttcggggctttttaatcgggggggtgggggtgtttccccccatcggtgccttttacttttttcgggccctagacccccgtttttttgtttttttcccttttttt

SEQ ID NO: 10400 - DNA, 114 bp, Zea mays
  Clone ID: LIB3061-085-Q1-K6-D8
taccaacaacccatcattggtggtgccctcttttagatttcttatgagttatagttcaataataaagttttttgtctgatgtttgtggcttcccagaataagaaagtcatttct

SEQ ID NO: 10401 - DNA, 299 bp, Zea mays
  Clone ID: LIB3061-085-Q1-K6-D9
agcaacatagtaagtggaatccagtagcaacaatagagcaacaatggcgaccaagtaattatccctccttatgctccttgctctttctacatgtgttgctaacgcgacaattttccctcaatgctcacaagctcctatagcttcccttcttcccccataccttccatcaattatagcttcaatatgtgaaaacccagctctacaaccatataggcttcaacaagcaatcgcagcaagcaacatacctgcatcgccctcggtggttcaacaatcgttagccctatctttggtgtagttat

SEQ ID NO: 10402 - DNA, 629 bp, Zea mays
  unsure (1)..(629): unsure at all n locations; Clone ID: LIB3061-085-Q1-K6-E1
attattgagaccaactagcaacatagnaaagcacaatagtgtaccaacaatggcagccaaaatattttgcctccttatgctccttggtctttctgcaagtgctgctacggcgaccattttcccgcaatgctcgcaagctcctatagcttcccttcttcccccgtacctctcaccagcggtgtcttcggtatgtgaaaacccaattcttcaaccctacaggatccaacaggcaatcacagctggcatcttacctttatcacccttgttcctccaacaatcatcagccctattacatcagttacctttggtgcatttattggcacaaaacatcagggcacaacaactacaacaacttgtgctagcaaaccttgctgcctactctcagcaacagcagtttcttccattcaaccaactagctgcattgaactctgcttcttatttgcaacaacaacaactaccattcagccagctacctgctgcctacccccagcaatttcttccattcaaccaactggcagcattgaactctcctgcttatttacagcagcaacaactactaccattcagccagctagctggtgtgagccctgctaccttcttgatacaaccacagttgttgccgttctacc

SEQ ID NO: 10403 - DNA, 494 bp, Zea mays
  unsure (1)..(494): unsure at all n locations; Clone ID: LIB3061-085-Q1-K6-E10
cttacaacagttgcttccattcaaccaactggctgtgtcaaactctgctgcgtacctacaacagcgacaacagttacttaatccattggcagtggctaacccattggtcgctaccttcctgcagcagcaacaacaattgctgccatacaaccagttctctttgatgaaccctgccttgcagcaacccatcgttggaggtgccatcttttagattacatatgagatgtactcgacaatggtgccctcataccgacatgtgtttcctagaaataatcaatatattgattgagatttatctcgatnaaaaaaaaaaaaaaaaaaaaaaaaaaaaaaaaaaaaaaaaaaaaaaaaaaaaaaaaaaaaaaaaaaaaaaaaaaaaaaaaaaaaaaaaaaaaaaaannnnnaaaaaaaaaaaaaaaaaaaaaaaaaaaaaaaaaaaaaaaaaaaaaaaanaaaaaaannaaaaaaaaaaaaaaaaaaaaaaaaaagggggg

SEQ ID NO: 10404 - DNA, 666 bp, Zea mays
  Clone ID: LIB3061-085-Q1-K6-E11
ctctcactcccgatccctcctccaccaccgcttcctccgcgtcacccctctcgtcgtcgcctcacgaggcgaccagcggcggaccctccgcggcgcaaccatggggctcttcactgtgacgaagaaggccaccacgcccttcgacggccagaagcccggcacctccggcctccgcaagaaggttactgtattccagcagccccattatctgcagaactttgtccaatcaacattcaatgcccttcctgtggatcaagtaagaggtgcaacaattgttgtctctggtgatggccgctatttctcaaaagatgctgttcagatcataacaaaaatggctgctgccaatggagtaagacgtgtttgggttggacaaaacagtctcatgtctactcctgctgtatctgctgtcatccgtgaaagagttggtgcagatggatcaaaggctactggtgccttcatcttgacagcgagccataacccaggtggtcctaaggaggacttcgggatcaaatacaacatgggaaatggtgggcctgctcctgaatctgttaccgacaagattttctctaatacaacgacaatctctgaatacctcatctctgaagacctaccagatgttgatatttctgttgtcggtgtcaccagcttcagtggacctgaaggcca

SEQ ID NO: 10405 - DNA, 261 bp, Zea mays
  unsure (1)..(261): unsure at all n locations; Clone ID: LIB3061-085-Q1-K6-E12
agccgctgcaccggtaccaggcgacatacggtgtggtcctgcagtccttcctgcagcagcagccgcaggcgagctcgcggcgctgatggcggcccaggtagcgcagcagctgacggcgatgtgcggcctgcagctgcagcagccaggtccctgcccttgcaacgcagctgccggcggtgtctactactgaggnnaaactatgtactgtagtaataatgtaatggagccgctgactagctacctagctcgctagtttactca

SEQ ID NO: 10406 - DNA, 99 bp, Zea mays
  Clone ID: LIB3061-085-Q1-K6-E4
tcttaaaaaaaaaaaaaaaaaaaaaaaaccaaaaaaaaaagggcggacagatctaaaagatccaaaactaacaaacaacatgcatgcaaaaaaaataga

SEQ ID NO: 10407 - DNA, 567 bp, Zea mays
  unsure (1)..(567): unsure at all n locations; Clone ID: LIB3061-085-Q1-K6-E5
ggtgggttggcttctcctccccctccggttcgggttcgggttcgtgaggttctccggggttcggtttcgtgggtgggcggatcgagatggcggcgtcggatgttgagtaccgctgcttcgtcggcggcctcgcctgggccacggacgaccactccctccacaacgccttcagcacctacggcgaggtcctcgagtccaagatcatcctcgatcgggagacgcagaggtcccgcggcttcggcttcgtcaccttctccacggaggaggcgatgcggaacgccatcgagggcatgaacggcaaggagctggacggccgcaacatcaccgtcaacgaggcccagtcccgcggcggccgtggaggcggcggcggcggctacggtggtggccgtggaggcggcggctacggcggtggcgggcgccgtgatggcggcggcggctacggcggtggcggcggcggctacggtggcggcggtggtacccgtggtggtggtgcggctaccgcggtggcaaccgtggcggcggctacggcaactccgacnggaactggaggaactgnagcggtggggc

SEQ ID NO: 10408 - DNA, 612 bp, Zea mays
  Clone ID: LIB3061-085-Q1-K6-E6
tcttaggcgacgagccgcccaagacccgatccccactccgctggttgccggagctctagccggattcgcctcaaccttgtgcacctaccccatggagctgatcaagaccagggtcaccatcgagaaggacgtatacgacaacgtcgcgcacgcgttcgtgaagatcctacgcgacgagggcccgtcggagctgtaccgtgggctgacacccagcctgatcggcgtggtgccgtacgcggcctgtaacttctacgcctacgagacgctgaagcggctctaccgtcgcgcgaccgggcggcgtcccggcgcggacgtgggccccgtggcgacgctgctcatcgggtcggcggcgggcgccatcgccagctcggccacgttcccgctggaggtggcccgcaagcagatgcaggtgggcgctgtgggcgggaggcaggtgtaccagaacgtcctccacgctatctactgcatcctcaagaaggagggcgccggcggcctgtaccgaggtctcggccctagctgcatcaagctcatgcccgccgccggcatcgccttcatgtgctacgaggcgtgcaagaagatcctcgtcgacaggaggaggatgaggaggaggag

SEQ ID NO: 10409 - DNA, 524 bp, Zea mays
  Clone ID: LIB3061-085-Q1-K6-E8
gcatttattggcacaaaaatcagggcacaacaactacaacaacttgtgctagcaaaccttgctgcctactctcagcaacagcagtttcttccattcaaccaactagctgcattgaactctgcttcttatttgcaacaacaacaactaccattcagccagctatctgctgcctacccccagcaatttcttccattcaaccaactgacagcattgaactctcctgcttatttacagcagcaacaactactaccattcagccagctagctggtgtgagccctgctaccttcttgacacaaccacagttgttgccgttctaccagcacgctgcgcctaacgctggcaccctcttacaactgcaacaattgctgccattcaaccaacttgctttgacaaacccagcagcattctaccaacaacccatcattggtggtgccctcttttagatttcttatgagttatagttcaataataaagttttttgtctgatgtttgtggcttcccagaaataagaaagtacatttct

SEQ ID NO: 10410 - DNA, 647 bp, Zea mays
  unsure (1)..(647): unsure at all n locations; Clone ID: LIB3061-085-Q1-K6-E9
tcttgttcccacacatgggagcatctttctaagctgaacgaaggtgnctgctcatgggcccaactggaatctaataacnttggcatctatgctatccgtctgagacaattgtagaaaatgatggtaagcatccagctgtgcacgaagatggtgtctccctacttgcctgtagagatgcggcacccaaattcatgggggtggatgctgcagaatccaatgtcccgcctacaactacaggatatgctaaataacatgggcgcaactcctgatcaatgggataaccgcatgcttgatcaccttaagaacttcgaccttagcagtccagaagtgcggcagcagtttgcgcaagttggcatgactcctgaggaagtagtctcgaaaataatggcaaacccagatgtagctgttgcattccagaatccaaaaatacagacagccatcatggactgctcgcagaaccctcttaacattgttaaataccaaaatgacaaggaggtcatggatgttttcatgaagatatcacaaatcttcccccaaattaactgctagctgatcttcgtcgtgggatagcacttctgatttttgtcggcccgtcatctccagtctggaaggctgctgcggtagcatctatcaagaaaaggtcgtga

SEQ ID NO: 10411 - DNA, 632 bp, Zea mays
  Clone ID: LIB3061-085-Q1-K6-F1
caacaagcaacatagaaagtggaatacagtagcaacaatagagcaacaatggcggccaagatattttccatccttatgctccttgctctttctgcatgtgttgctaacgcgaccatttttcctcaatactcacaagctcctatagctgcccttcttcccccataccttccatcaatgaccgcttcagtttgtgaaaacccagcccttcaaccctacaggctccaacaagcaatcgcaacaagcaacttacctttatcacccctgttctttcaacaatcgccagccctatctttggtgcagtcattggtacaaaccatcagggcacaacagctgcaacaactcgtgctaccagtgatcagccaagtagctctggcaaacctttctccctactctcagcaacaacaatttcttccattcaaccaactgtctacactgaaccctgctgcttatttacaacaacaacaactactaccattcagccagctagctactgcctactctcagcagcaacaatttcttccatttaaccaattggccgcactgaacccctctgcttatttccagcagcaaatactactaccattttggccagctagctacaacaagccccactttcttttttgaaacaacaa

SEQ ID NO: 10412 - DNA, 643 bp, Zea mays
  Clone ID: LIB3061-085-Q1-K6-F10
gtcagcctagcaattagctcatcgactccagattggagaactcgacaccatgaaggtgctgatcgttgcccttgctctcctggcgctcgctgcgagcgccgcctccagtacaagcggcggctgtggctgccagacaccaccgtttcatctaccgcctccgttctatatgccgcctccgttctatctgccgccgcagcagcagccgcagccatggcaataccccactcaaccaccgcagctaagcccgtgccagcagttcggatcctgcggcgtcggcagcgtcggcagcccgttcctgggccagtgcgtcgagttcctgaggcaccagtgcagcccggcggcgacgccctacggctcgccacagtgccaggcgctgcagcagcagtgctgccaccagatcaggcaggtggagccgctgcaccggtaccaggcgacatacggtgtggtcctgcagtccttcctgcagcagcagccgcagggcgagctcgcggcgctgatggcggcccaggtagcgcagcagctgacggcgatgtgcggtctgcagctgcagcagccaggtccctgcccttgcaacgcagctgccggcggtgtctactactgaggaaactatgtactgtagtaataatgtaatggagccgctgac

SEQ ID NO: 10413 - DNA, 648 bp, Zea mays
  Clone ID: LIB3061-085-Q1-K6-F11
ggggattatggaatgcttaacaagttttccaagaaagttggaaaagagtcatctgttcaagcaagttggtgtccggaaaccaatggatccccaaaaggatttgctgctacgtctcttgttcgacaaactccagtcgatgccacaagttcactgatgtggcatgccccatgagcccagttattcgaaaaagttacgctggagatgctttgctgcaagtttgaacttagaagatggccctgcaccctctgactcgacgtcatcttcatcagagcagactactgatgctgatggaactactaatggtgatgtatctgaaaatctgctttctcgaaagccgagctctgatgagttaaaggctcttttggctgattcggaacgaagtaagcttttgagaagactcagtgaagcaaatcaatataaccgattcctcaagagacagttgcaaataaaggatgatgcagtcgtaaaattcaaaggtgaacttgcggttttggaactagaactgcaggctctggttggcctagctgaagaggttgctaattttgatgttccgttagggtctaggaagataaacggaaaatatattcaatctcatcttctctccagattagaagctgtccatgatatgattatggaacaggtaaacag

SEQ ID NO: 10414 - DNA, 608 bp, Zea mays
  Clone ID: LIB3061-085-Q1-K6-F12
caacaacaacatcaccaacaatcacaaggccatgtgcaacaacacgaacagagccatgagcaacaccaaggacagagccatgagcaacaacatcaacaacaattccagggtcatgacaagcagcaacaaccacaacagcctcagcaatatcagcagggcccaggaaaaatcacaacagcaacaatgtcattgccaggagcagcaacagactacaaggtgcagctataactactatagcagtagctcaaatctaaaaaattgtcatgaattcctaaggcagcagtgcagccctttggtaatgccttttctccaatcacgtttgatacaaccaagtagctgccaggtattgcagcaacaatgttgtcatgatcttaggcagattgagccacaatacattcaccaagcaatctacaacatggttcaatccataatccaggaggagcaacaacaacaaccatgtgagttatgtggatctcaacaagctactcaaagtgcggtggcaatcttgacagcagcacaatacctaccatcaatgtgcggcttgtaccactcatactaccaaaataatccatgcagcagcaatgacattagtgggtgtttgcaattga

SEQ ID NO: 10415 - DNA, 608 bp, Zea mays
  unsure (1)..(608): unsure at all n locations; Clone ID: LIB3061-085-Q1-K6-F3
tagacacaacaggcaagaggggcgagggttgttcagtgctttgacatgtgtgcaactattcaagcacaatggttagatgatatccccattcattttagattattacattgtggtgttcgacttcttcagtcaagcagcaatcatgcaacatgccttactgtagttttttatcactgcacatgttgctggataaatttatagactggaggattatagaggactaacaagtgctattgggagattctcgagcaccattgaactaagagattccaaatagttctttggagtctattgttgatgttggcggggataatctagcagagatttgtcagattttttgtgcaacacggaggctacatgaggcagcaacgatcccattcttctcgcatgccactttacacaagctaaggatagcttctggtctcactcatggttgtggcagggaaagccgagtagtagggtttgtcatgtagctggagttatctcagaccgcatattagatgcagtgatgatgtttacatttaccgtgcaagcaagatgacttatattatgccttaagacaatagtattgttttcactctaatgaatacttgtnaaaaagttgtctc

SEQ ID NO: 10416 - DNA, 653 bp, Zea mays
  unsure (1)..(653): unsure at all n locations; Clone ID: LIB3061-085-Q1-K6-F5
gcgagagtggtggtggtgtgtgcgcgagcgcaacaggnagagggagagcgtatttcttcttcctcaccctcctcgaggaagagagagggcagctccggagccgcacgggcgcgagcgaggcaggcagtggctcctcccccctcctttcgatatcagctcatcgattcgtcctatcacacacatatcattaccgctcctcttcctctcctatgcttgtcctctaactcattggcagaagagaaaaaaaaagtccttgttgagttgttgtatcgggttctggtggtgactgttactggggtttccttgtccggttcttgattcgcgcaaggacagatttgccgtcctctcgggttccgccgtgcggtgctgaatcctccttccctgttcccttcccttaagtttggatcggggataggtgatggaagtggacagaaagaagaatttgcagattggatccaaggggaaggaggttcagagcaagaatccgaggcgggaggagccgctggcatcgtgggaggtggacatggatgagccagacgctcctganagcggtacatgattgttgatggcaacatggctgctccagaaggagccccttgcagcccatggattccaagaattcaagggctgtgcggtaagccacnatcgtgagc

SEQ ID NO: 10417 - DNA, 591 bp, Zea mays
  unsure (1)..(591): unsure at all n locations; Clone ID: LIB3061-085-Q1-K6-F6
attgagaccaactagcaacatagnaaagcacaatagtgtaccaacaatggcagccaaaatttttgcctccttatgctccttggtctttctgcaagtgctgctacggcgaccattttcccgcaatgctcgcaagctcctatagcttcccttcttcccccgtacctctcaccagcggtgtcttcggtatgtgaaaacccaattcttcaaccctacaggatccaacaggcaatcacagctggcatcttacctttatcacccttgttcctccaacaatcatcagccctattacatcagttacctttggtgcatttattggcacaaaacatcagggcacaacaactacaacaacttgtgctagcaaaccttgctgcctactctcagcaacagcagtttcttccattcaaccaactagctgcattgaactctgcttcttatttgcaacaacaacaactaccattcagccagctacctgctgcctacccccagcaatttcttccattcaaccaactggcagcattgaactctcctgcttatttacagcagcaacaactactaccattcagccagctagcntggtgtgagccctgctac

SEQ ID NO: 10418 - DNA, 632 bp, Zea mays
  unsure (1)..(632): unsure at all n locations; Clone ID: LIB3061-085-Q1-K6-F7
cttgcttcaggnagcacgtggcggtggaagcttccctaggggtggcggaggcggtggtggtgcttggttgatgtcgatggcgcaggtctgctgtgactcggccgtagcggcgacggcgataccggtggttggtgcggaggcggaggccagggccagggcgcgcgccgagaggcggagccgggccggagagtctggggcgtggaagcacgcggtggccgctggcacggccgatgctacgaggaagcggagtctcggggcaggggagctgctggtggcgcggaagcacggggcggcgtcggtggccggccgcaggagggagatggaggatgccgtgtccgtgcgcgacgcgttctgcgcggagggcacggccgacggcgggaggcgcgacttctacggagtgttcgacggccacggctgctcgcacgtggccgaggcgtgccgggaccggatgcacgagctggtcgccgaggagctcgccgccaccgccgccgacagctcagtctccgcggcggcggcctggaccgtggcgatggaacgcagcttcgcgcggatggacgcncgagntgacgtcngccggcgggcgcgccgncgccgccagaagcagcacctgccgctgcgacgcgcacaggtgc

SEQ ID NO: 10419 - DNA, 628 bp, Zea mays
  unsure (1)..(628): unsure at all n locations; Clone ID: LIB3061-085-Q1-K6-F8
ctggnacactggnagnaagcaaatgatatcatcgaagcatcaagccatgagccgctggatcagtttactgtttccccgatgctctcgcaggagcagctctttagtatagtagattttgctccaaactggacatatgtgggttcaaagactaagattttagttgctggtaacatcctgaatgacagtcaaatcaccgagagatgcaagtggtcatgtatgtttggagaagttgaagttccagcaaagattttagcagatggtactctcatctgttattcgccccagcataaactcggtcgagttcctttttacattacctgctccaacaggttggcctgcagtgaagtgcgggagtttgaatttcgaccaactgtttcccaatacatggatgctcctagtccacatggtgaaacaaacaaagtttatttccagatacgccttgacaagttgttgtcccttgaaccagatgagtaccaggcaactgtatctaaccccagcctggagatgattgacttaagtaagaagataagttcactgatggcgagtaatgatgagtggtcncaacttgctaaagtggctgttgataatgagccttctactgctgataccatgatcagtttgttgaaaa

SEQ ID NO: 10420 - DNA, 641 bp, Zea mays
  Clone ID: LIB3061-085-Q1-K6-F9
attgagaccaacaagcaacatagaaagtggaatccagtagcaacaatagagcaacaatggcgaccaagatattttccctccttatgctccttgctctttctacatgtgttgctaacgcgacaattttccctcaatgctcacaagctcctatagcttcccttcttcccccataccttccatcaattatagcttcaatatgtgaaaacccagctcttcaaccatataggcttcaacaagcaatcgcagcaagcaacatacctttatcgcccttgttgtttcaacaatcgccagccctatctttggtgcagtcattggtacaaaccatcagggcacaacagctgcagcaactcgtgctacctctgatcaaccaagtagctctggcaaacctttctccctactctcagcaacaacaatttcttccattcaaccaactgtctacactgaaccctgctgcttatttgcagcaacaactattaccatttagccagctagctactgcctactctcagcaacaacaacttcttccatttaaccaattggccgcactgaaccccgctgcttatttgcagcagcaaatactactaccatttagccagctagctgcagcaaaccgtgcttccttcttgcacagcacagttgct

SEQ ID NO: 10421 - DNA, 363 bp, Zea mays
  unsure (1)..(363): unsure at all n locations; Clone ID: LIB3061-085-Q1-K6-G1
cctggcaagcccgtgccatttgtagggnaacctgcggcgttggcagcaccccgatccttgggccgtgcgtcgagttcctgnggcatcagtgcagccccgcggcgacgccctactgctcgcctcagtgccagtcgttgcggcngctgtgttgccagcagctcaggctggtggagccgctgcaccggttccaggcgatcttcggcttggtcctcncgtccatcctgcagcagcagccgcanagcggcccggtcgcggggctgttggcggcgctgcttgcgctgcatctgacggctatgtgcggtctgctgctgcctgctccatgccccttcgctgctgccggcggtgttcccccctggtgaaact

SEQ ID NO: 10422 - DNA, 355 bp, Zea mays
  Clone ID: LIB3061-085-Q1-K6-G12
ccaccaggggctgggggggggtgcgaacatccagccgtgcaagcctacaggctacaactagcgcttgcggcgagcgccttacaacaaccaattgcccaattgcaacaacaatccttggcacatctaaccctacaaaccattgcaacgcatcaacaacaacaacaggttctgccatcactgagcgccctagccgtggtgaaccctgtcacctacttgcaacagaagctgcttgcatccaacccacttgctctggcgaacgtagctgcgtaccagcaacaacaacagctgcaacagtttatgccagtgctcagtcaactaggcctggtgaaccctgcgcgtttcctacaactacttt

SEQ ID NO: 10423 - DNA, 644 bp, Zea mays
  unsure (1)..(644): unsure at all n locations; Clone ID: LIB3061-085-Q1-K6-G3
gnaacaagaggagcagagcagagcagagcacgtatggcgtcgatatccaagttttcaacccgcgcgcgggttgtctggatctgtctcctgatcgccttcttcagccttcgactctttcagatccccttcccccgctcacaaagctcgtgcggcgcagtggcgggcagccaaccgggagcgccagcgcctgcgcctccaccgacgggattctcttgcttgaaccaggcagcgcacggccttcaccatcctcggcctcgccgcgcttgcacttgcgcttgctcttactctagctggccacgtacacgtccgcctcgttggcggacacagagccgcccctgctccgctgctgcctccgccggctgctggcctgatgccgcgcgtaggccgtggccgccgcgtcgtggtgcatctgctcgtagcggcagtcctcgctgcagaacggggtgtcgcccctgtacatgaagatgtcgctgttgcgggccagcggcttggagcagagcgcgcaggcgtccagcgcttgccgctgccgccgccgcccggtctcgcccagcggcttcgccgcgtcgaagaagaagaggcgcagccacggacgtcgcctgcctcgtctgctctctggcctattatgggcctgatgctgcctctag

SEQ ID NO: 10424 - DNA, 610 bp, Zea mays
  Clone ID: LIB3061-085-Q1-K6-G4
ggtcttcagaaccttagctttatctactccagagcgcagaagaacccgatcgacaccatgagggtgttgctcgttgccctcgctctcctggctctcgctgcgagcgccacctccacgcatacaagcggcggctgcggctgccagccaccgccgccggttcatctaccgccgccggtgcatctgccacctccggttcacctgccacctccggtgcatctcccaccgccggtccacctgccgccgccggtccacctgccaccgccggtccatgtgccgccgccggttcatctgccgccgccaccatgccactaccctactcaaccgccccggcctcagcctcatccccagccacacccatgcccgtgccaacagccgcatccaagcccgtgccagctgcagggaacctgcggcgttggcagcaccccgatcctgggccagtgcgtcgagttcctgaggcatcagtgcagcccgacggcgacgccctactgctcgcctcagtgccagtcgttgcggcagcagtgttgccagcagctcaggcaggtggagccgcagcaccggtaccaggcgatcttcggcttggtcctccagtccatcctgcagcagcagccgc

SEQ ID NO: 10425 - DNA, 589 bp, Zea mays
  unsure (1)..(589): unsure at all n locations; Clone ID: LIB3061-085-Q1-K6-G5
tggtggtggtgtgcccgcgtgcgcgtccgggtgggggtgagcgtctttcttcttcctcaccctcctcgtggatgagagcgggctgctccggagccgctcgggcgcgagcgaggctggctgtggctcctcccccctcctttcgctttcagctcatcgnttcttcctgtggcgcgcggtgtcattaccgctcctcttcctctcctatgcttgtcctctaactcattggcagaagagaaaaaaaaagtccttgttgagttgttgtatcgggttctggtggtgactgttactggggtttccttgcccggttcttgcttcgcgcatggacagatttgccgtcctctcgggttccgccgtgcggtgctgaatcctccttccctgttcccttcccttcggtttggctcggggctcgggctggccgtggtccgcaagaagattttgccgcttggatccctggggaaggaggttcagagctcgaatccgtggcgggaggagccgctggcgtcgtcggcggtggtcttggttgagccagactctcctgagagcggtgacatgattgttgatggccacaatggctgcctcatagggagcc

SEQ ID NO: 10426 - DNA, 620 bp, Zea mays
  Clone ID: LIB3061-085-Q1-K6-G6
cttcttcgtcgacaagcaggggagttaggtctcacatgcatgcttcatcacgtactgacacttttgatgatctctagctacttctctcgctgaactgatcctcctccttctgtatattaattaatctgtgcatgtggctagattgttgactgcataacgaaacacatcgtcgtcggatcggagatgatgagttccgtcgtcgtggatgctgctgctaccagcagcagcgagaagaagacgtcgtggccggaggtggtgggcatgtccatcaaggaggcgacggagactattctcaaggacatgcccaacgcgtacatccaggtgctgcctgttgggtcgcccgtgacgctggaccttcgccccgaccgcgtccgtatcttcgttgacaccgtcgccatgactccgacagttgggtgatacataccaaatataataaacaaaccctactttttattttatgtttccagttaataataaaccaggccttagcttcttggttgtccttccttggttggtgttagcttctaagctactagtacaccattaaaaaaaggaggacctcatgtatggctaccgtgaaaaatgtgatcttgatggaataatatatcataaataagcaa

SEQ ID NO: 10427 - DNA, 638 bp, Zea mays
  unsure (1)..(638): unsure at all n locations; Clone ID: LIB3061-085-Q1-K6-G7
agaccagcaagcaacattagaagtagaatccattagcaacaatagagcaacaatggcgaccaagatattttccctccttatgctccttgctctttctacatgtgttgctaacgcgacaattttccctcaatgctcacaagctcctatagcttcccttcttcccccataccttccatcaattatagcttcagtatgtgaaaacccagctcttcaaccatataggcttcaacaagcaatcgcagcaagcaacatacctttatcgcccttgttgtttcaacaatcaccagccctatctttggtgcagtcattggtacaaaccatcagggcacaacagctgcagcaactcgtgctacctgtgatcaaccaagtagctctggcaaacctttctccctactctcagcaacaacaatttcttccattcaaccaactgtctacactgaaccctgctgcttatttgcagcaacaactattaccatttagccagctagctactgcctactctcagcaacaacaacttcttccatttaaccaattggccgcactgaaccncgctgcttatttgcagcagcaaatactactgccatttagcgagctagctgcagcaagtcgtgcttccttcttgaacagcaacagttgct

SEQ ID NO: 10428 - DNA, 605 bp, Zea mays
  Clone ID: LIB3061-085-Q1-K6-G9
agtgaagtacactagcaacatcttagcaccaatggcagccaagatttttgccatccttgccctccttgctctttcagcaagcgttgctaccgcgactattattccacaatgctcacaacaatacctctctccggtgacagccgcgagatttgaatacccaactatacaatcctacaggctacaagaggccatcgcagcaagcatcttacggtcgttagcattgaccgtccaacaaccatatgccctattgcaacaaccatccttaatgaatctatatctccaaagaatcgcagcacaacaactacaacaacagttgcttccaacaatcaatcaagtagttgcagcgaaccttgctgcttacctccagcaacaacaatttcttccattcaatcaactagctggggtgaaccctgctgcttacttgcaggcacaacagctactaccattcaaccaacttgtcaggagccctgctgccttcttactgcagcaacagttgcttccattccatctacaagttgtggcaaacattgctgctttcttgcacaacaacaacattgctgccattttacccacaggttgtgggaaacattaacgccttcttgcac

SEQ ID NO: 10429 - DNA, 674 bp, Zea mays
  unsure (1)..(674): unsure at all n locations; Clone ID: LIB3061-085-Q1-K6-H10
gcccaactagcaacatagnaaagcacaatagtgtaccaacaatggcagccaaaatattttgcctccttatgctccttggtctttctgcaagtgctgctacggcgaccattttcccgcaatgctcgcaagctcctatagcttcccttcttcccccgtacctctcaccagcggtgtcttcggtatgtgaaaacccaattcttcaaccctacaggatccaacaggcaatcacagctggcatcttacctttatcacccttgttcctccaacaatcatcagccctattacatcagttacctttggtgcatttattggcacaaaacatcagggcacaacaactacaacaacttgtgctagcaaaccttgctgcctactctcagcaacagcagtttcttccattcaaccaactagctgcattgaactctgcttcttatttgcaacaacaacaactaccattcagccagctacctgctgcctacccccagcaatttcttccattcaaccaactggcagcattgaactctcctgcttatttacagcagcaacaactactaccattcagccagctagctggtgtgagccctgctaccttcttgatacaaccacagttgttgccgttctaccagcacgctgcgccntacgcntgcaccctcttacaactgcaacaattgctgcca

SEQ ID NO: 10430 - DNA, 651 bp, Zea mays
  unsure (1)..(651): unsure at all n locations; Clone ID: LIB3061-085-Q1-K6-H12
tagcaacatagnaaagcacaatagtgtaccaacaatggcagccaaaatttttgcctccttatgctccttggtctttctgcaagtgctgctacggcgaccattttcccgcaatgctcgcaagctcctatagcttcccttcttcccccgtacctctcaccagcggtgtcttcggtatgtgaaaacccaattcttcaaccctacaggatccaacaggcaatcacagctggcatcttacctttatcacccttgttcctccaacaatcatcagccctattacatcagttacctttggtgcatttattggcacaaaacatcagggcacaacaactacaacaacttgtgctagcaaaccttgctgcctactctcagcaacagcagtttcttccattcaaccaactagctgcattgaactctgcttcttatttgcaacaacaacaactaccattcagccagctacctgctgcctacccccagcaatttcttccattcaaccaactggcagcattgaactctcctgcttatttacagcagcaacaactactaccattcagccagctagctggtgtgagccctgctaccttcttgatacaaccacagttgttgccgttctaccagcacgctgcgcctaaacgctgcaccctcttacaactg

SEQ ID NO: 10431 - DNA, 708 bp, Zea mays
  unsure (1)..(708): unsure at all n locations; Clone ID: LIB3061-085-Q1-K6-H3
accggatccagcccttcccggggtgagttttatttggaaggaggagccatggttttggctgatggtggagtagtttgtatcgatgaatttgacaagatgagacctgaagacagagttgcaattcatgaggccatggagcagcagacaatatctattgccaaagctggcattacaacagtactcaattcaaggacttcagttcttgcagctgccaatccaattgcaggacgctatgatgatcttaagaccgcacaagataatattgatctgcagacgaccattctttctagatttgatctaatctttatcgtcaaggatatcagaatgtatgatcaagataagagaatagcaagccacattatcaaggtgcatgccagtggtgctgcagcttcatccacaaacacagaggggagtgaaggagagaattggctgaaaaggtacattgagtactgccgcgccacatgcaaaccacggctttcagaaaaagcagctgagatgctgcagaacaaatatatcgagattagacagaaaatgaggcagcaagctcacgagacagggagggccgcagctatacccatcacggtgaggcagctagaagccatcatccgtttgagtgaatctcttgcaaagatgagattgacaagtgtggctacaccggagcatgtcgaagaggcattcagactgttcaatgtctncaccgttgatgct

SEQ ID NO: 10432 - DNA, 647 bp, Zea mays
  unsure (1)..(647): unsure at all n locations; Clone ID: LIB3061-085-Q1-K6-H4
gcaacatagaaagtggaatacagtagcaacaatagagcaacaatggcggccaagatattttccatccttatgctccttgctctttctgcatgtgttgctaacgcgaccatttttcctcaatactcacaagctcctatagctgcccttcttcccccataccttccatcaatgaccgcttcagtttgtgaaaacccagcccttcaaccctacaggctccaacaagcaatcgcaacaagcaacttacctttatcacccctgttctttcaacaatcgccagccctatctttggtgcagtcattggtacaaaccatcagggcacaacagctgcaacaactcgtgctaccagtgatcagccaagtagctctggcaaacctttctccctactctcagcaacaacaatttcttccattcaaccaactgtctacactgaaccctgctgcttatttacaacaacaacaactactaccattcagccagctagctactgcctactctcagcagcaacaatttcttccatttaaccaattggccgcactgaacccctctgcttatttccagcagcaaatactactaccatttggccagctagctacaacaagccccacttnctttttgaaacacaacaattgcttccgttctccagcagt

SEQ ID NO: 10433 - DNA, 559 bp, Zea mays
  unsure (1)..(559): unsure at all n locations; Clone ID: LIB3061-085-Q1-K6-H6
tgcttaaatccagnanaacanatttacgagaagttaacgtcaggaatgtatttaggtgaaattgtaaggagggtgctccttaaaatatcattgcagtccgccatttttggtgatattgaccacactaagcttcaaacccatttccttctgcggactccacatatttcagcaatgcaccatgacgaaacatctgatctgaagattgtggccgaaaattttgaacaaaacctagagattacaggcacatccttggaggctcgtaagctggtcgttgaaatctgtgacattgtggcgacaagagcagcccggctggctgctgcggggcttgcagggatcctcatgaagatcgggagagatcacagcgtcgaggaccaacggtcagtcatcgccatcgacggaggactgttcgagcactacaccaaattccgccggtgcttggagaccacactgggtgagctgctaggagacgaggcgtccaacgcggtggccatcaagcatgccgatgacggttcaggaataagtgctgccctgattgcagcttcacagtctcagtacaaaa

SEQ ID NO: 10434 - DNA, 611 bp, Zea mays
  Clone ID: LIB3061-085-Q1-K6-H7
ccggtcgccccttcccggtcgccccgcgtccgtagcaacatagaaagtggaatccagtagcaacaacagagcaacaatggcgaccaagatttttccctccttatgctccttgctctttctgcatgtgttgctaacgcgacaattttccctcaatgctcacaagctcctatagcttcccttcttcccccataccttccatcaatgatagcttcagtatgtgaaaacccagctcttcagccctataggctccaacaagcaatcgcagcaagcaacatacctttatcacccttgttgtttcaacaatcgccagccctatctttggtgcagtcattggtacaaaccatcagggcacagcagctgcagcaactcgtgctacctgtgatcaaccaagtagctctggcaaacctttctccctactctcagcaacaacaatttcttccattcaaccaactgtctacactgaaccctgctgcttatttgcagcaacaactattaccattcagccagctagctactgcctactctcagcaacaacaacttcttccatttaaccaattggccgcactgaaccccgctgcttatttgcagcagcaaatactactaccatttag

SEQ ID NO: 10435 - DNA, 483 bp, Zea mays
  Clone ID: LIB3061-086-Q1-N6-A10
aaacccaagtaatcaccattgtatctttcacaagttggacagtcggtctcaatcaacaaaattattaacaggggcgctgcgaattgaaacctaaagtcaattaatcctcatcttttcctatgaaattgatcatgcagagagtgaaaaaaaatataggtcaagatcaaaatggcgccggaaagatgactccagaccatgtttattccaatccaactgaatcgaaaataaattcctagagcccaaaaacactcggcacttcagtgcttgagcaccaaggataggccaactttcgtgctcttctcaatcgccttggtgtcaacgtcaccagagatggtgacgaaggacttgggacaccattcatgctggacaagggcactggccatgccgtagttgttgaaacgcgtcttgatagtcgtgtggggatccaacgagtgctgggacccgaatattagcgtgctctcatttctcgacatgctgtgagac

SEQ ID NO: 10436 - DNA, 117 bp, Zea mays
  unsure (1)..(117): unsure at all n locations; Clone ID: LIB3061-086-Q1-N6-A11
gttgggttttttttttttttttttttttttttttttttttcggcnnnnnnnnctttttttttggnctttttttttttttcttttttnnggggggccccccctttggtgttttttttt

SEQ ID NO: 10437 - DNA, 493 bp, Zea mays
  unsure (1)..(493): unsure at all n locations; Clone ID: LIB3061-086-Q1-N6-A2
ggggaagaaccctcatttctatacttttgaactgcccgagcgcgaagcaggatcatttcgctctgtgcngcccgaaagcggcttattgagtcgtttcagtttctggtttcactttcagaaatctctctccattcaaacagggagcatacaacttgtgacatgttcggttaggttcgcttattttccttgtgacaacatcctacagccaagcaaggccaacatcaaagctttatttctctcaagttttgctcattatgcattggactgtntatatcctctaaccggaagacatgactacagctccaactctatcgcgagggatgagacgcagctccgaaccatgtttcagaaacacgttgcctgcactttgctgggggttgatgccaattccatcgttggtgatgatggcgctggtctggggcggggccttgaactccttcgcggcgttcttgagctccgctggtttgggcgccgcctcgggcacgctgtacac

SEQ ID NO: 10438 - DNA, 590 bp, Zea mays
  unsure (1)..(590): unsure at all n locations; Clone ID: LIB3061-086-Q1-N6-A3
acgtaatgtaatggatcaatagaaactctgcagagcatattttgttacaaacttttgagttgcttctattttcaaacagggagatggattatagtctgttaactgcctcaactaggttacaaggccaaaactgcaaccatgatgaatgggtttctacgtaaagcgatgttgaatgtataaatcaaacttcaaacatgcagccgatcacagcttgtagactggggtgatccctagcagattgaagcactgtcgcatgacaacagcagtcgcttggcaaagcaacagtcggctcgtctcctccggtgacccgaccacctgacagttggtatagaattttgtgaacatttcagatagattgtacaagtattcacacacaacatttggaagcagattcgtgcatgcctcttcaaccacctcagcaaatcggataagatacagccccaacacacgctcatctggatggtcaagagaaatggctccagtcatcttcagatcttnccacatccttgntggatttccgaataatggaacatatacgagcatgtgcatactgaaggtcacagcagtntttccctatcgctcagcatttg

SEQ ID NO: 10439 - DNA, 519 bp, Zea mays
  Clone ID: LIB3061-086-Q1-N6-A4
agaaatgtactttcttatttctgggacgccacaaacatcatccaaaaaacttcattattgaactataactcataagcaatctaaaagaggcaccaccaatgatgggttgttggtagaacactgttgggtttgtcaaagcaagttggttgaatggcagcaattgttgcagttgtaagagggtgccagcgttaggcatagcgtgcaggtagaacggcaacaactgttgttgtgtcaagaaggcagcagggctcacatcagctagctggctgaatggtagtagttgttgctgctgtaaataagcagcagagttcaatgctgctagttggttgaatggaagaaattgctgggggtaggcagcaactagctggctgaatggtaattgttgttgcaaataagcagcagagttcaatgcagccagttggttgaatggaagaaactgatgttgctgagagtatgcagcaaggtttgctagcacaagttgttgtagttgttgtgccctgatgttttgtgccaccaaat

SEQ ID NO: 10440 - DNA, 591 bp, Zea mays
  Clone ID: LIB3061-086-Q1-N6-A9
atcgagataaatctcaaccaatatattgattatttctaggaaacacatgccggtatgagggcaccattatcgagtacatctcatatgtaatctaaaagatggcacctccaacgatgggttgctgcctcgacaagacaggattcatcaaagagaaccggttgtatggcagcaattgttgctgctgtaggaaggcagcgaccaatgggttagccactgccaatggattaagtaactgttgtcgctgttgtaggtacgcaacagagttcgacatagttagttggttgaatggaagcagctgttgcaagtaggcaacagggtttgccacagctagctgagttagagctggtacaatctgttgcaacaattcttgttgcaggtatgtaggtgcattggccacagcgagcgggctagatgaaagcagttgttgctgttgtaggtaggcggcagggttcaccatggctagttgactaagcgctggcagaaactgttgcagttgttgttgttgctggtttgcaactacgtttgctagagcaagtgggttggatgcaagcagctgctgttgcaagtaggcgacagggttcaccatggcta

SEQ ID NO: 10441 - DNA, 600 bp, Zea mays
  Clone ID: LIB3061-086-Q1-N6-B10
ggccatagcttttgacaatacaagttgaatagcaaaattagcaatacaccggcaacaagcaacgagcctacctgtgtccatgttccagagctcaaataatgggaacatgctacatactgcattgctacaaacagtacactttgtgctggttaaattaagaaaccatggacatgttgagcatcaggctattaacatcctaaactctaggcttagtaactttgctttagctacaattcacagccaatgggcgcacccgaatacacacagaactatgtcaactaatgagtttaacttgatacaggcgagatctagcacggaagagtcttgaagcattagaatcagcaaggacctagtttttggcgacggtcagggtgagaaattctaagctcatgtcacaacaaaataatccccacccatacggtaaacttgtattattcattgtggcatcaacattattttgattgttcaaatggtgcacgcacaaatagctgcccatggagggtgacaactgcggaggtttggtgagggtcaatgcgggaaggcaaactaatgaccttcctgaatggagtgacaccccatgtgttatccaattgctcaagc

SEQ ID NO: 10442 - DNA, 190 bp, Zea mays
  unsure (1)..(190): unsure at all n locations; Clone ID: LIB3061-086-Q1-N6-B2
tcgcagcacgcgnctgaagctaggactcaagacggccgcccttttttttttttttttttttttttttttttttttttttttttttttttttttttttgtttttttttggtttggtggttttgggtggggttttggggtttttggtgggggggggggggttttttttttttgggggggggggggtgggggg

SEQ ID NO: 10443 - DNA, 392 bp, Zea mays
  unsure (1)..(392): unsure at all n locations; Clone ID: LIB3061-086-Q1-N6-B3
ttttggtttttttttttttttttttttttttttttttttttttttttttttttttttttttttttttttccggtnaaacctttttttttggccttttccctctaggaatttttattgggggcccccccaatggtgggttgttggtggggggggggggggtttgtcaaagcaggtgggttggttggccccctttgttgcctttgtaagggggggcccgctttgggcccaccctgctggtggaacggcaacaactggggttgtgtcaagaaggtggcggggctccccccccctggctggctgaatgggggtggttggtgctgctgttcctttgccggggggttcattgcttcttgggggttggttgtggaaaattcctgggggtgtggccccgg

SEQ ID NO: 10444 - DNA, 556 bp, Zea mays
  Clone ID: LIB3061-086-Q1-N6-B4
ggcaatcaagttcattaattaaacaacatctataattaacatttataattataggttcacgataatattgtaccaaactcgaatctgcttcttacaaccatcagtcatcagcacaaccaagcagattactaacaccaaacgagacatataccacacatgcaatgatacggtgcatgtactagctagtacatccatacacacacatagcttaccaactactggttattacggaatatacaaaccatgcatgcatcatatttcacaaaatgcaatgcagatatagatattacatgcatatttaatttatgcgaattcatgtctttgccctccaccctccacgttttcagtacttccacacgccatccatctctatggtggtggtggtcgcaggccctgggccggccacggacatcatcgacgagatctcagcgccattagcctggtcgtccttctgcgacaccatcgaggacggcctactctccggcgcagaaacatcgaagccgccagcgcaagcagtccccgtgcccatctggtggtagaagctcatggggctggg

SEQ ID NO: 10445 - DNA, 518 bp, Zea mays
  unsure (1)..(518): unsure at all n locations; Clone ID: LIB3061-086-Q1-N6-B6
gaaattattgagataaatctcaatcaatatattgattatttctaggaaacacatgccggaatgagggcaccattatcgagtacatctcatatgtaatctaaaagatggcacctccaacgatgggttgctgcctcgacaagacagggtttatcaaagagaactggttgtntggcagcaattgttgctgctgtnggaaggcagcgaccaatgggttagccactgctagtggattaagtaactgttgtcgctgttgtaggtacgcagcagagttcgacatagtcagttggttgaatggaagcagctgttgcaagtaggcagcagggtttgccacaactagctgagtcagagctggtccaatctgttgcaacaattgttgttgcaggtttgtaggtgcattggccacagcgagcgggctagatgaaagcagttgttgctgttgttggtnggcggcngggttcaccntggcttgttgactgagcgctggcagaaactgttgcacctgtcgttgtggctggttt

SEQ ID NO: 10446 - DNA, 469 bp, Zea mays
  unsure (1)..(469): unsure at all n locations; Clone ID: LIB3061-086-Q1-N6-B8
aagaatctagaaatgttctttcttatttctgggaagccacaaacatcagacaaaaaacttttttttttgaactattactcataagaaatctaaaagagggcaccaccaatgatgggttgttggtagaatgcttttgggtttgtcaaagcacgttggttgaatggcagcaattgttgctgttgtaagagggtgccagcgttaggcgcagcgtgctggttgaacggcaacaactgtggttgtgtcaagaaggtagcagggctcacaccagctagctggctgaatggtagtagttgttgctgctgttaataagccggcgagttcaatgctgtcagttggttgnctggaagaaattgctgggggttggcagctgatagctggctgaatggtngnnngcgttgttgcntcttcgaggccgcgnccancgccgctcgtcggttgaatggaagaaacttgctgttgctgcgcgtgg

SEQ ID NO: 10447 - DNA, 310 bp, Zea mays
  Clone ID: LIB3061-086-Q1-N6-B9
aactcaacaagagtttacttctttatttgcatgcaactttaggtttgttttcaacacagaaacaacgcttcgggagaaaaacttattcctcagtccagctgtgttttaatggaatcccaaattgtacacccagcctcgttgaataggaacaagtctgtcctttgtaaatactagttcgccaagatataatcggtgtccaaattgtctaattcaactactagatagggttgcgccaattgcaagatgcatgttcccctgatgcttctttgaaacgttcttgcatccagaagttggtgggcacgagcttttt

SEQ ID NO: 10448 - DNA, 339 bp, Zea mays
  Clone ID: LIB3061-086-Q1-N6-C2
gggttggaatttttgccctttgcaggcctaccagttgcgaattcaatgcttccagtgctcgataaaatcggttcagcctgtcgccaacacaatgccctcatgctggccgtctaaaactgccaactcccagtcccagacgctcaagctgttccaggagcggtgactttggggtaatcggggtccgactgaccctccctctccgtccaggacccatctttgactggcacattacgctttccgatcctgtacagccccagagcgtgtttgcaggccgtcaccccggatccgcaggtcacgactatgggtcggtccagggagattcctgcgtgctgaaacttc

SEQ ID NO: 10449 - DNA, 467 bp, Zea mays
  unsure (1)..(467): unsure at all n locations; Clone ID: LIB3061-086-Q1-N6-C3
cagacaaaaaactttattatntgaactataactcataagaaatctaaaagagggcaccaccaatgatgggttgttggtagaacactgctaggtttgtcaaagcaagttggttgaatggcagcaattgttgcagttgtaagagggtgccagcgttaggcgcagcgtgctggtagaacggcaacaactgtggttgtgtcaagaaggtagcagggctcacaccagctagctggctgaatggtagtagttgttgctgctgtaaataagcaggagagttcaatgctgccagttggttgaatggaagaaattgttgggggtaggcaacaggtagctggctgaatggtagttgttgttgttgcaaataagaagcagagttcaatgcagctagttggttgaatggaagaaactgctgttgctgagagtnggcagcaaggtttgctagcacaagttgttgttgttgttgtgccctg

SEQ ID NO: 10450 - DNA, 576 bp, Zea mays
  Clone ID: LIB3061-086-Q1-N6-C4
ttttttttttttttttttttttttttattttcttttttttttttttttttttttttttttttatttttttttttttttttttttttttttttattttttttttttttttttttttttttttttttttttttttttttttttttttttttttttttttttttttttttttttttttttttttttttttttttttttttttttttttttttttttaaaaaaaaaaagggggaaaaggattttttttttggggggggggccccctctcttcataaaaaatttttttttggggtccccccaaaaaggggtaaaaaaggggggcccccaaaatttttttttgggggggggggggcctctttttttataaaggggggggaaaaaggggaaaaattttttgtttttgaagggggggggggggggggccccaaactggtggtgaaaaggagaaaacccttgtttgttgaaaaagaaaaaagggggtaggcctcccttgtgtggtaatgggggtttttttttgtgtctcaaaaaaaacgggtgggtgccggcggcccttgtgtaaagaaagagaattgttttttt

SEQ ID NO: 10451 - DNA, 365 bp, Zea mays
  Clone ID: LIB3061-086-Q1-N6-C5
ggggcaaaaccccctgggaaacattttcttttcttgtggggttcccgataaaaaaaacaaactgtaaaacaagggccccttttgctccaacaaacttattgcctggccggggggaaaacccttaacggggggaaaaccccaaacagggggcaaaatttagcttttcatttttaattgggggaaaaccacagggatcccaaacttaatccaccccccccattttgtttttgccggggttttcccccaggggggggatttaaacttgggccccagaaaacttgtcctcatttatgctcaaacccggctttaacatgcgatggatcccggggccaaaggggggggggccatccaagcttaaccccggg

SEQ ID NO: 10452 - DNA, 569 bp, Zea mays
  Clone ID: LIB3061-086-Q1-N6-C6
gggcgctgcctcgatgcctcctccacgtcccgctgcgagaagccgaagcggtgggtgatgagaggcttgacgtccaccttgccgctgcgcaggaagtcgatgcacagtggccaggtgtccttgtaccggaacacgcccaccacgtccacctcccgcgccgccgccgccgtcaggggcagcgtcatctcgttgtggcccatcccgaccaggcacaccttcccgccgggccgcgtcgcctccagcgccgtcgacatggtcttgctgaacccggcgcagtccaggctgacgtcgatgtccgagcccatggccgcgcggatgcgctccacctcgtccgccaggtcctccgcgcggggcgacacccgcaccgccgcgtccgcgcccagcgacctggccacggccaggcggtgctcgtccacgtccacgaccaccacgcgcggcgcgccgaaggcccgcgccgccagcagcgacaccaggccgatggggccggcgcccaccacgagcacgcccgtctcgggccccacccccgcgcggcggcacgcgtgcacgcccacgctcagcggctcgcacat

SEQ ID NO: 10453 - DNA, 166 bp, Zea mays
  Clone ID: LIB3061-086-Q1-N6-C7
aaaacaaaacagctcaaattcttttttttttggaccctttttccaaaacgagaagggatggcgtctcctctttgatcacccatccctcacaaatggggccacatcaaagttccttccaaaaacccaaaagggaaaagacacgagaaaaaagatgttcggggggaat

SEQ ID NO: 10454 - DNA, 362 bp, Zea mays
  Clone ID: LIB3061-086-Q1-N6-C8
cttcacatagaaacatggtcccaaaggacatgattgctcctggggaactgtcactaactcataacggccacccgggaatataagcgcagctgttttacttatgttgaaatcaggcaccggaaatagggtggttacgcaacaacatttttcacgcacagaaggcttgatccacttttcgcttggggggaaaatgttttttattgttaccccagtagacacttttgggatcatggttcataaccggttttctggaagaaattggtaaaccatacaattggacacaaaatacgatccaggggtatcaactgtcaaggctctggtttctattgagataccaaactaacattaatttgaatgcgctc

SEQ ID NO: 10455 - DNA, 513 bp, Zea mays
  Clone ID: LIB3061-086-Q1-N6-D11
atcgggataaatctcaatcaatattttggttttttctaggaaacacacctcggtttgagggccccttttttgagtacatctcatatgtaattttaaattttgggcctccaacgatgggttgctgcctccacaagacaggattcatcaaaaagaactggttgtttggcagcaattgttgcttctgttggaagggggggaccaatgggttagccacttccaatggattaagtaactgttgtcgctgttgtaggtacccagcagagttcgacagagtcagttggttgaatggaagcagctgttgcaagttggcaacagggtttgccacagcttgttgagtcagagctggtacaatctgttgcaacaattgttgttgcaggtatgttggtgcattgcccacaacgagcgggctatatgaaaacagttgttgttgttgtccgttggcggcagggttcaccatggcttgttgactgagcgttggcagaaactgttgtagctgttggtgttgctggtttg

SEQ ID NO: 10456 - DNA, 530 bp, Zea mays
  Clone ID: LIB3061-086-Q1-N6-D12
agctcaagaaaaagttgctaatttgtattagtcaactttatagcaggctataatagccaagtcatttgtcggcttgtcgcacatagcaaggatatagaatgctcgcccatggaccacggtgcaaaacaaactcctgggaatagccatgagatcggtcaaaagggagcatcttatcaagagcagatacaaatgggacgattcatcaccataaacaaaatctcactatggttctacactagcaaaacagcattgatacacccatcattctccgggttgtttgtaacttgagcatatttcccccaaacaacttttccagcgggagttaccagaccaagctcactgacatttacctcaatgattgttccccttgtcataacaccaagagaagtgtacatcggaccatttgggtttttcttcacagaaattatgtcaaggttgaaagtgcacttcagttctgggtgagtcacatgagctttggtgaaacgcagaccagttggtcgaatgaaccgctcatactttggtggtttcct

SEQ ID NO: 10457 - DNA, 476 bp, Zea mays
  Clone ID: LIB3061-086-Q1-N6-D4
gggccaaagtttaattaaattaaattggaccacagacaacacccaggttctttcaatgtttttccttccattctttttcaaaagttccatgcacgaatgggcaaattaatttaaacatttggtttcagttacagaaggcagtacgtgctttaagttttcgagagaccaatagcttgtcagcccattgcatatttttgagtccagcttctagcaggcgattcgtccttcacgcgatcagtcttgtacaagtgagcaatttctgggaccaacggatcgtcagggtttgggtccctcagaagggaacaaattgggaggaggaccttagaaactgtcagtgcaggggtccattgctccttcaaaatatcaagacaaattctccctttgttgttgatattcggatggtaaaccttcgttttgaatgcaaccttccgtggtttgaatgggtggtccggtggaaagtggattgtgaccaaaaa

SEQ ID NO: 10458 - DNA, 581 bp, Zea mays
  unsure (1)..(581): unsure at all n locations; Clone ID: LIB3061-086-Q1-N6-D6
atcgagataaatctcaatcaatatatgtcgattatttttagggaaacacatgcgcgctatgaggggcaccatctatcgagtaccatctcatattgtatatctaaaagatggcanccaccaacgactggtgttgctgccacgacaaggcagggttcatcaaagagaactggttgtatggcagcaattgttgctgctgtaggaaggcagcgaccaatgggttagccaccgctagtggattaagtaactgttgtcgctgttgtaggtacgcagcagagttcgacacagtcagttggttgaatggaagtagttgttgcaagtaggcagcagggtttgccacagctagctgagtaagagctggtacaatttgttgcagcaactgttgttgcaacaactgttgttgcaggtatgtaggtgcattgcccatagcgagcgggctagatgaaagaagttgttgctgttgtaggtaggcgatagggttcaccatggctagttgactgagcgctggtagaaactgttgcaactgttgttgttgttggtatgcagctacgtttgccaaagcaagtggtttggatgcaagcagc

SEQ ID NO: 10459 - DNA, 457 bp, Zea mays
  unsure (1)..(457): unsure at all n locations; Clone ID: LIB3061-086-Q1-N6-E1
aaatctcaatcaatatattgattatttctaggaaacacacgtcggtttgagggcaccattatcgagtccatctcatntgtaatctaaaagatggcacctccaacgatgggttgctgcctcgacaagactggtttcatcaaagagaactggttgtntggcagcaattgttgctgctgtnggaaggcggcgaccaatgggttagccactaccaatggattaagtaactgttgtcgctgttgtnggtacgcagcagagttcgacagagtcagttggttgaatggaagcagctgttgcaagtnggcaacagggtttgccccagctngttgagtcagagctggtccaatctgttgcnactnttgttgttgcnggtttgtnggtgccttgcccacagcgagcgggcttgttgaaagccgttgttgttgttgtccgttggcggcggggttcccttggcttgttg

SEQ ID NO: 10460 - DNA, 527 bp, Zea mays
  unsure (1)..(527): unsure at all n locations; Clone ID: LIB3061-086-Q1-N6-E2
ttttttttttttggtccaaccccaaaatcttcatttttgtctggccaaatctactaacatttgcacacttttttttgcttgcgggtcgntttaactgttatcccatgtcatgttatgcaggantttttgacaaactgcaaccggttctcctgtctgtntgtgtcccaactaagctgcttttacgtctggccaaatctgctcgntcgacaatcactgcattgaacttggaagtcanttcttctggcttggttgcaagcngcctcaagccttcgccttcttttccgtgctttaccctttattcgccctttgttttgctttttggggcctttttttttgtggtttcttcttcttttctttttttttttttttgtttttgttgtgttttttttttgtttttttggcgtncttgttttctttttcttctcctgtgttctttgttttttttcgtcctccgttcttgtgcttgtttttttttgttctctgttttttctttgtttttttcttttctttttttttttttttttatt

SEQ ID NO: 10461 - DNA, 417 bp, Zea mays
  unsure (1)..(417): unsure at all n locations; Clone ID: LIB3061-086-Q1-N6-E3
ctagaaatgtcctttcttatttctgggaagccacaaacatcagacaaaaaactttattattgaactttaactcataagaaatctaaaagagggcaccaccaatgatgggttgttggtagaatgctgctgggtttgtcaaagcaagttggttgaatggcagcaattgttgcagttgtaagagggtgccagcgttaggcgcagcgtgctggtagaacggcaacaactgtggttgtgtcaagaaggtagcagggctcacaccagctagctggctgaatggtagtagttgttgctgctgtaaataagcaggagagttcaatgctgtcagttggttgaatggaagaaattgctgggggtaggcagcanatagctggctgaatggtagttgttgttgttgcaaataagaagcagagttcaatg

SEQ ID NO: 10462 - DNA, 501 bp, Zea mays
  Clone ID: LIB3061-086-Q1-N6-E4
agaaatgtactttcttatttctgggaagccacaaatatcagcaaaaaaactttattattgaactataactcataagcaatctaaaagagggcaccaccaatgatgggttgttggtagaacactgctgggtttgtcaaagcaagttggtcgaatggcagcaattgttgcagttgtaagagggtgccaacgttaggcgcagtgtgcaggtagaacggcaacaaatgttgctgtgtcaagaaggcagcagggctcacagcagctagctggctgaatggtagtagttgttgttgttgtacataagcatgagagttcaatgctgccagttggttgaatggaagaaattgccgggggtaggcagcagctagctggctgaatggtagtagttgttgttgctgcaaataagcagcagagttcaatgcagctagttggttgaatggcagaaactgttgttgctgagagtaggcagcaaggtttgctagcacaacaactacaacaactcgt

SEQ ID NO: 10463 - DNA, 568 bp, Zea mays
  unsure (1)..(568): unsure at all n locations; Clone ID: LIB3061-086-Q1-N6-E5
atcgagataaatctcaatcaatatattgattatttctaggaaacacatgtcggtatgagggcaccattgtcgagtacatctcatatgtaatctaaaagatggcacctccaacgatgggttgctgcaaggcagggttcatcaaagagaactggttgtatggcagcaattgttgttgctgctgcaggaaggtagcgaccaatgggttagccactgccaatggattaagtaactgttgtcgctgttgtaggtacgcagcagagtttgacacagccagttggttgaatggaagcaactgttgtaagtaggcagcagggtttgccacagctagctgagtcagagctggtacaatttgttgcagcaactgttgttgtaggtacgtaggtgcattgcccaccgcgagcgggctagatgaaagtagttgtaggtagacggcagggttcaccatggctagttgactgagcactggcataaactgttgcagctgttgttgttgctggtatgcagctacgttcgccagagcaagnntggttggatgcaagcagctgctgttgcaagtaggtgacagggt

SEQ ID NO: 10464 - DNA, 69 bp, Zea mays
  Clone ID: LIB3061-086-Q1-N6-E6
tttttttttttttttttttttttttttttttttttttttggtttttttttttttttttttttttttttt

SEQ ID NO: 10465 - DNA, 293 bp, Zea mays
  unsure (1)..(293): unsure at all n locations; Clone ID: LIB3061-086-Q1-N6-E7
ccctggagcagcctcctgttcttgccgttgagaaaagcntaatnctcgatgcttaaaagattttnttcttgataattnntattaaaaattcncccaaagaaggtgtttttttttgttgggggccgcaagcaggggctgatggggcattgtgcttttgacaggtccaacttggcgcccgcgctcgcgactgcncattgtgctgttnngaggtgcnggctcacccactgctgcctatggtanngtgttgctctgnaatnncggcagttcaaactncattggtgntggaaaaattg

SEQ ID NO: 10466 - DNA, 551 bp, Zea mays
  Clone ID: LIB3061-086-Q1-N6-E8
agaaagtactttcttatttctgggacgccacaaacatcatccaaaaaacttcattattgaactataactcataagcaatctaaaagagggcaccaccaatgatgggttgttggtagaacactgttgggtttgtcaaagcaagttggttgaatggcagcaattgttgcagttgtaagagggtgccagcgttaggcatagcgtgcaggtagaacggcaacaactgttgttgtgtcaagaaggcagcagggctcacatcagctagctggctgaatggtagtagttgttgctgctgtaaataagcagcagagttcaatgctgctagttggttgaatggaagaaattgctgggggtaggcagcaactagctggctgaatggtaattgttgttgcaaataagcagcagagttcaatgcagccagttggttgaatggaagaaactgatgttgctgagagtatgcagcaaggtttgctagcacaagttgttgtagttgttgtgccctgatgttttgtgccaccaaatggaccaaaggtaactgctgtaatagggctgac

SEQ ID NO: 10467 - DNA, 598 bp, Zea mays
  unsure (1)..(598): unsure at all n locations; Clone ID: LIB3061-086-Q1-N6-E9
aaaaccaaaactttattatgaccatgcatatattattggtcataccacacatgataatgtgtgtcgtcttactgcattattacatatatagatagagagagatggatagaggagatttcccaaatatcatgaatcagtagtagggcggaatggcagcggagacgccacaggggttggtgcggtagctgggcagctggtactggtagagtccacccatggccggcatgttctgcgccatcatcatggccatggggttgagaccctgggctgccagcagctgctgctgctgctgcatcagagctggctcgtacaggctgctgctggcggcagcggcacgctcaagctgcatcatcatctgcagctgctgcgcgacggactgcacgtccatcatcctcatctgctgctggcagcactgttgccggagcggctggaacatggcgctcggctgcccacacccggcgtagtagggcgccgccgccagcgggctgcactgcggctgcctcaggtactccgcgtaggggtacagcccgncngcgcccatcatcgtcgtcaggcccgcgccagcgccgtacaaagcctgcagccccgcgcaggggca

SEQ ID NO: 10468 - DNA, 332 bp, Zea mays
  unsure (1)..(332): unsure at all n locations; Clone ID: LIB3061-086-Q1-N6-F1
gtgggggggttttttttttttttttttttttgtttttggtgntgggngnntntttttttttntttttttttttttngntntttggttttttttttttttttttttgttttttttttttttttttgtgngggggggggggtggggggggggggggggggggggggggntgtttcggggtnggggggggcggggggggggtcgcgggtgtggtgcggcgtgggggggggggcggcgctggcggggggggggcgggggggggggttgtgggggtgggtggtggggggggtgcttcgggggttgggggggcggggggcgggggcgcgccggggggg

SEQ ID NO: 10469 - DNA, 354 bp, Zea mays
  Clone ID: LIB3061-086-Q1-N6-F10
gggggaaggggctttttttttttggggggggcgcaaaaaaagaaaaaaaaaatttttgggcccttacaaactaaaaaaaaaaaaaaaaggggggccccccggggggggggggggagagaaaaacatttggttttaaaaaaagagggggagtgtagggaaaaagtggggtccattaaaagggggggcccacctgggcccattccctttgtaaaaaaaaaaaaaagagtttttgtttgaaaaggggaccaacgacaaaaaccgagctgggctttgggagggaattatttggggtcctaaaaaaaagaggaaatataaatgtccccgtggtgataagggaaaaaaaatggggggggg

SEQ ID NO: 10470 - DNA, 473 bp, Zea mays
  Clone ID: LIB3061-086-Q1-N6-F11
atatataaaatttaccttaccaacaggggtgttttccggtttgaattgttcaaaattattttttaaaggaaaatttaaataaattggtacaggggtgggtacctgacattcaactttttccacttcgattacactggcctggtaggtttaacttttaacgggaaccagcttcatttttttttcaggtggtttttttaacctgcacgtttttttggttttggtgcaacaaaacttcagagacttaatatccggggtcctaaactgcagccttagggggtctcgggtccttcagctttttttttagtggggggcgctgggaatgcttcctcaaactgtgttgaagttgagacaagtcccaacgagaaagggcccaagggtccaaactccaaactttctgccgcatgtaacaaatctgctgtggggggtgaggaaggctcgcagataccatttccttggccgttttgagcaagtgc

SEQ ID NO: 10471 - DNA, 504 bp, Zea mays
  unsure (1)..(504): unsure at all n locations; Clone ID: LIB3061-086-Q1-N6-F12
atcgagataaatgtcaatcaatatattgattatttctaggaaacacatgccggtatgagggcaccattatcgattacatctcatatgtaatctaaaagatggcacctccaacgatgggttgctgccacgacaaggcagggttcatcaaagagaactggctgtatggtagcaattgttgctgctgtaggaaggcagtgaccaatgggttaggcactgctagtggattaagtaactgttgtcgctgttgtaggtacgcagcagagttcgacacagtcagttggttgaatggaagcagctgttgcaagtaggcagcagggtttgccacagctagctgagtcagagctggtacaatctgttgcagcaattgttgttgcaggtatgtaggtgcattacccacaacgagagggctagatgaaagcagttgttgctgttgttggtaggcggcagggttcaccatggctagttgactgagcgctggcngaaactgttgcaattgttgttgtt

SEQ ID NO: 10472 - DNA, 445 bp, Zea mays
  unsure (1)..(445): unsure at all n locations; Clone ID: LIB3061-086-Q1-N6-F3
ggaaatgtaactttttatttctggttggccacattcattatccaaaaaactttttttttgaatttcaactaataagcaatctaaaagagggcaccaccaatgatgtgttgttggtaggaggctgctgggtttgtcaaagcaagttggacaaagggcaacaattgttgtagttgtaaaagggttgcggggttagccccaaactgctggttgaaaggcagcaactgttgctgtgtcaaaaaggaagcacggcttgctgcaactagctggctaaatggtagtaatatttgctgctgcaaataagcagcgaggttcagtgcggccaattggttaaatggaaaaagttgttgtttattagagtaggcagnaactagctggcttaatggtaatagttgttgctgcaaataagcagcagggttcagtgttaattgttggttgaatggaaaaa

SEQ ID NO: 10473 - DNA, 507 bp, Zea mays
  Clone ID: LIB3061-086-Q1-N6-F8
aatctagaaagtactttcttatttctgggaagccacaaacatcagacaaaaaacttattattgaactataactcataagaaatctaaaagagggcaccaccaatgatgggttgttggtagaacgctgctgggtttgtcaaagcaagttggttgaatggcagcaattgttgcagttgtaagagggtgccagcgttaggcgcagcgtgctggtagaacggcaacaactgtggttgtatcaagaaggtagcagggctcacaccagctagctggctgaatggtagtagttgttgctgctgtaaataagcaggagagttcaatgctgccagttggttgaatggaagaaattgctgggggtaggcagcaggtagctggctgaatggtagttgttgttgttgcaaataagaagcagagttcaatgcagctagttggttgaatggaagaaactgctgttgctgagagtaggcagcaaggtttgctagcacaagttgttgtagttgttgtgccctg

SEQ ID NO: 10474 - DNA, 566 bp, Zea mays
  Clone ID: LIB3061-086-Q1-N6-G11
ctccttccattatatatcaaaagttcgatgcacgaatggacaaattaatttagacatctggtttcagttacagaaggcagtacgtgctttaggtctacgagagaccaatagcttgtcagcccattgcatatttctgagtccagctcctagcagtcgattcgtacttcacgcgatcagtcttgtacaagtgagcaatctctgggaccaacggatcgtcagggtttgggtccgtcagaagggaacaaattgagaggaggaccttagaaactgtcagtgcagggctccattgctccttcaagatatcaagacagatgctcccgttgctgttgatattcggatggtaaaccttcgtcttgaatgcaaccttcggtggtttgaatgggtagtccggtggaaagtgaatagtgaccaaaaatacgccaccagcgtatgggctatctgatggccccataatcgtcgcctgccagtagaacatatcttcggcaacagggcctgcgctgcaagaggtgggaggatccttctgcaggtccttgagctccttgaggatccgcttcgacgccatggat

SEQ ID NO: 10475 - DNA, 300 bp, Zea mays
  unsure (1)..(300): unsure at all n locations; Clone ID: LIB3061-086-Q1-N6-G12
agaccagcaagatttcctgttccatcaaaatcagtttnggcaaacgacattacgacgagtgcagaccaccactcgtcagaatctagagagattgaaaaaaaagggttcttttctgcttttggtgctcccgcggcggatcatttgagtggctctcgngcnaacaccacccttcatttattgcgaccgtgcaaaccttgtgtctattggcagcggcgagctagtttagctccacacgaaaacatcctcatcctcttcctttctttgttgggctccactggtgccctgaactttgctccggcg

SEQ ID NO: 10476 - DNA, 574 bp, Zea mays
  unsure (1)..(574): unsure at all n locations; Clone ID: LIB3061-086-Q1-N6-G4
agaaagtactttcttatttctgggaagccacaaacatcagataaaaaactttattattgaactataactcataagaaatctaaaagagggcaccaccaatgatgggttgttggtagaacactgctgggtttgtcaaagcaagttggttgaatggcagcaattgttgcagttgtaagagggtgccagcgttaggcgcaacgtgctggtagaacggcaacaactgtggttgtgtcaagaaggtagcagggctcacaccagctagctggctgaatggtagtagttgttgctgctgtaaataagcaggagagttcaatgctgctagttggttgaatggaagaaattgctgggggtaggcagcaggtagctggctgaatggtagttgttgttgttgcaaataagaagcagagttcaatgaacctagttggttgaatggaagaaactgctgttgctgagagtaggcagcaaggtttgctagcacaagttgttgtagttgttgtgccctgatgttttgtgccaataaatgcaccanaagtaactgttgtaatanggctgatgattgttggaggaacaaggt

SEQ ID NO: 10477 - DNA, 211 bp, Zea mays
  Clone ID: LIB3061-086-Q1-N6-G7
ctagaaagtactttcttatttctgggaagccacaaacatcagacaaaaaactttattattgaactataactcataagaaatctaaaagagggcaccaccaatgatgggttgttggtagaatgctgttgggtttgtcaaagcaagttggttgaatggcagcaattgttgcagttgtaagagggtgccagcgttaggcgcagcgtgctggtag

SEQ ID NO: 10478 - DNA, 303 bp, Zea mays
  unsure (1)..(303): unsure at all n locations; Clone ID: LIB3061-086-Q1-N6-H10
tcgcagcacgcgtcgnaactggaacccaaaaccccgcctggtggttttttttttttttttttttttttttttttatttttttttgtgtttttttttgtttttggggggtttttttttttttttttttttggggggggggggggggggggggnnngggggggngtttttttgggggggggggggggggggnggtnntgggggggtcgggggggggggggggggggggtgtggggggggtggggggggggggggggtgggggggggggggggggggttgggtgtggtgggggggggggggggggg

SEQ ID NO: 10479 - DNA, 421 bp, Zea mays
  unsure (1)..(421): unsure at all n locations; Clone ID: LIB3061-086-Q1-N6-H2
ggggggggggggnngggggggnnnnnnnnnnnnnnnngngggggggggggtgggggggggggnnggggnnnnnnntgggggggnggggggggggggggggggnnnggggggggggggggggggnggggggggnggnggggggnggnggtggggngggggggnnggggggggngggnggggggggggggggtggggggggggggnngggggggggggggggggggggggggggggggggggggggggnggggggggggggggggggggggggggggggggggggggggggggggggggggggggggggggggggggggggggggggggngggggggggggggggggggggggggtggtgngggtggggggggggnggggtgggggggggggggggggggtgggggggggtgggggggggggg

SEQ ID NO: 10480 - DNA, 409 bp, Zea mays
  Clone ID: LIB3061-086-Q1-N6-H8
gattgaaacttctacatattatacaagttctacaaaaaaaaacatggttgatcagtgatcaccatacataatgccatctagctgtgtgcctgtgccacaagacagcagcatcaagttgtccacgtaccgtacatcaaaagattaaactatatacagtgcagtcttttgttttcctaacatattgcaagtcttgaacttctgagaatacatataaaatttgctactcattccacaacagtagtagcttatgaattgtaattatctggtaaaaaaggccaaacaaacggcaataaaaatgaacatatcactaccccttttctacacaaagcgagcaaaccagtcgatgccatttcatcttccaagtccgccaggtagctgccagaagattcagtatgcccagcattcattc

SEQ ID NO: 10481 - DNA, 386 bp, Zea mays
  Clone ID: LIB3061-087-Q1-N6-A10
atattgagataaatctcaatcaatatattgattatttctaggaaacacatgccggaatgagggcaccattatcgagtacatctcatatgtaatctaaaaggatggcacctccaacgatgggttgctgcctcgacaagacagggtttatcaaagagaactggttgtatggcagcaattgttgctgctgtgggaaggcagccaccaatgggttagccactgctagtggattaagtaactggtgtcgctgttgtgggcacgcagcagagttccacatactcagttggttgaatggaagcatctgttgcaagttggcagcagggtttgccacatcttgctgtgtcagatctggtacaatctgttgcaacaattgtttttgcgggtgtgtg

SEQ ID NO: 10482 - DNA, 503 bp, Zea mays
  Clone ID: LIB3061-087-Q1-N6-B10
atcgagataaatctcaatcaatatattgattatttctaggaaacacacgtcggtatgagggcaccattatcgagtacatctcatatgtaatctaaaagatggcacctccaacgatgggttgctgcctcgacaagacaggattcatcaaagagaactggttgtatggcagcaattgttgctgctgtaggaaggcggcgaccaatgggttagccactaccaatggattaagtaactgttgtcgctgttgtaggtacgcagcagagttcgacagagtcagttggttgaatggaagcagctgttgcaagtaggcaacagggtttgccacagctagttgagtcagagctggtacaatctgttgcaacaattgttgttgcaggtatgtaggtgcattgcccacagcgagcgggctagatgaaagcagttgttgttgttgtacgtaggcggcagggttcacaatgcttggttacctaaccgtggccaaaacctgtggaacctgtggtggt

SEQ ID NO: 10483 - DNA, 547 bp, Zea mays
  unsure (1)..(547): unsure at all n locations; Clone ID: LIB3061-087-Q1-N6-B2
agaaatgtactttcttatttctgggaagccacaaacatcatccaaaaaacttcattattgaagtataactcataagcaatctaaaagagggcaccaccaatgatgggttgttggtagaacgctgttgggtttgtcaaagcaagttggttgaatggcagcaattgttgcagttgtaagagggtgccagcgttaggcgcagcgtgcaggtagaacggcaacaactgttgttgtgtcaagaaggcaacagggctcacatcagctagctggctgaatggtggtagctgttgctgttgtaaataagcagcagagttcaatgctgccagttggttgaatggaagaaattgctgggggtnagcagcagctagctgactgaatggtngttgttgttgcaaataagcagcagagttcaatgcagccagttggttgaatggaagaaactgctgttgctgtgagtnggcagcaaggtttcctagcacaagttgttgttgtttgtgtgccttgatgttttgtgcctacaaatgctccaaaggtactgcttgtatagggc

SEQ ID NO: 10484 - DNA, 458 bp, Zea mays
  Clone ID: LIB3061-087-Q1-N6-B5
ccaggcacaaaacttggtcatggacccttcactcatacgaactctaaaaggagggccccccccctggggggggggggggggaccccggctgggggtgaaaaaacgcgcgggttggggggcggccacggtggcggttgggaaaggggcccgggcttgggccgcctgggctgtgtggaaccgcaacacctgggggtgtgtgaacaggggacaagggctcaccccagctatcggggtgaacggtgggaaatggtgctgcggtcacaaagccggaaagcatacggcccccaagcgtttgaaggaaaaaaatgggtgggggttggcaccacgaacccgccttaatggcgttgggctcactgcccactaaaaagccgagttaaccggccctgcctggtggattgagaaaacctcctacgcgcggggagaggcagcatggttttttgggccatcttgcggttcct

SEQ ID NO: 10485 - DNA, 266 bp, Zea mays
  unsure (1)..(266): unsure at all n locations; Clone ID: LIB3061-087-Q1-N6-B6
ctggtccggttcctgtgggcgtccccgttttcccttttttgtgttctttttgcgctgggcgttcttttgggggggggggggccctgtggggccctgttcccccctcccccctcccccttgttggcgggccggtggctttgggtgtggcgccgggggggccttgtgggggcgctcgcgcccgtttgtggccgggcgctccccccccccttgccgggggggggccctggcgcccccccctcggtngtgcctccgcccccccccggcgg

SEQ ID NO: 10486 - DNA, 456 bp, Zea mays
  Clone ID: LIB3061-087-Q1-N6-B7
ttgccgggggcaccgattggttttaaattttggggggaagtcacactcccacgaaacagttccaaactcttagttcaatttcctagccccttaaattaaaagggtccaaccaaatgttggaaacaggtgggtgggtcatccccgaacaggaaactttttaaaaagcagggattcaaaacttggcttttaggagaatttcaggctttctcgggctgaaaatttcacttttaaactctacccatcctgttcaggttcaccatgcgtgcaccacccttaccacctttgcctgttggaatagactggttgcgaccccttgcatcctgaaaccttgaaacgccaccctagcccccgcggtaaccctgattgcccctgtccctttggtgtccaccaccactttggccagatattgcacctctgccggagttttcaaacctgttgccaccaccctgccgcccc

SEQ ID NO: 10487 - DNA, 550 bp, Zea mays
  Clone ID: LIB3061-087-Q1-N6-B9
ctagaaatgtactttcttatttctgggaagccacaaatatcagcaaaaaaaatttattattgaactataactcataagcaatctaaaagagggcaccaccaatgatgggttgttggtagaacactgctgggtttgtcaaagcaagttggtcgaatggcagcaattgttgcagttgtaagagggtgccaacgttaggcgcagtgtgcaggtagaacggcaacaaatgttgctgtgtcaagaaggcagcagggctcacagcagctagctggctgaatggtagtagttgttgttgttgtacataagcatgagagttcaatgctgccagttggttgaatggaagaaattgccgggggtaggcagcagctagctggctgaatggtagtagttgttgttgctgcaaataagcagcagagttcaatgcagctagttggttgaatggcagaaactgttgttgctgagagtaggcagcaaggtttgctagcacgagttgttgtagttgttgtgccctgatgttttgtgccaacaaatgcaccaaaggtaactgctgttg

SEQ ID NO: 10488 - DNA, 482 bp, Zea mays
  Clone ID: LIB3061-087-Q1-N6-C10
atcgggataaatctcaatcaatattttggttatttctaggaaacacatgtcggtttgggggcccccttgtcgagtccatttcatttgtaatctaaaagatggcccccccaaccatgggttgctgcaaggcagggttcatcaaaaagaactggttgtttggcaacaattgttgttgctgcttcaggaaggtagccaccaatgggttagccactgccaatggattaaataactgttgtcgctgttgtaggtacccaccaaagtttgacacaaccagttggttgaatggaaacaactgttgtaagtaggcaacagggtttgccacaactagcttagtcaaagctggtacaatttgttgcaacaactgttgttgtaggtacctaggggcattgcccaccccgagcgggctaaattaaaatagttgtaggtagaccgcagggttcaccatggcttgttgactgagcactggcataaactgttgcaac

SEQ ID NO: 10489 - DNA, 260 bp, Zea mays
  unsure (1)..(260): unsure at all n locations; Clone ID: LIB3061-087-Q1-N6-C11
gggggggggtttaaaaaaattttttttttttttntcggggtnaatntnnttcnattttttggttatttttggggaacacacgtcggtgtgggggggccatttttgggttctttttttttgtnntctaaaaaatttttttttgggctgttnggggggtgcctcgnccngacangnttttttttnnagaactggttgtgtggcccgccttgttgctgctgtnggaagggggcgccccatgggttggccncttcccctgggtt

SEQ ID NO: 10490 - DNA, 295 bp, Zea mays
  unsure (1)..(295): unsure at all n locations; Clone ID: LIB3061-087-Q1-N6-C2
ctagaaatgtctttcttntttctgggccgcnccatacatcatccaaaaaacttcattattgaactttaactcataagcaatctaaaagtagggcaccaccaatgatgggttgttggttgaacactgttgggtttgtcaaagcatgttggttgaatggcagcaattgttgcagttgtcagagggtgccagcgttcggcatttcgtgcttgtcgaacggctacaactgttgttgtgtcttgaaggccgctgggcttacattagcttgcttgcttattggtagttgtttttgctgttg

SEQ ID NO: 10491 - DNA, 327 bp, Zea mays
  Clone ID: LIB3061-087-Q1-N6-C3
ggcaacaagaacatcaaataacaaacaaaacgttgtgtacgtatttcttattttacatccagacaagccagctcacttcctcaattaaaaaaaattaagagaataataactgtgatcagttcgacgataatcaatgggtcgctggtgacagccgacaacatcctagtaaaatgtagagctgttcattggtgaagtatgtataatgtgtaagcttatactgagtactataaggtgagaattcattttatcgctcggcatacaagctaggtcttggtagcactacctatcgacttcagcttctgcacttgcagagttgttgcatgaaca

SEQ ID NO: 10492 - DNA, 547 bp, Zea mays
  unsure (1)..(547): unsure at all n locations; Clone ID: LIB3061-087-Q1-N6-C7
aagaccagaaataccatgcagcaaaaccattactttgatctgacacaatactcacatagttttgcatacacacatatgctcctgcaactactatttattaacacacaaacatcaacggccgaaaaacctcacatcaaagcacagccatctcacgattattgtcatccttcacagcattcagattaggccttcctgcacacgcctccctcgcacacatacccagcaggggcttcctcactcatcttttcctcacccaacgcgcacttggggtgcaggtcaaagtcacactcgtcgcacctgtaggaccagctgctgcccatctcgtcacaaccatcacagcggtacgtaccacggcgcagcaggacaagttcgtgctcgtcatgcagctcatgcttcagcttctgaggccaccccttcgccatctcatccagcttcttctgtagctcctcaagtctctcctcggtgaatgggaaagcatncagcaccgtggatcatcagctgggaactttgcgtccctgctgactgtctgcccagtaggtccgatggc

SEQ ID NO: 10493 - DNA, 551 bp, Zea mays
  Clone ID: LIB3061-087-Q1-N6-C8
aggaaaagtaattatcgaacacccttggagaccaatatcacattagaatctggaaatgtaacttcttatttctggttggccacatacatcatccaaaaaactttattattgaattacaactaataatcaatctaaaagagggcaccaccaatgatgtgttgttggtaggaggctgctgggtttgtcaaagcaagttggacaaagggcaacaattgttgtagttgtaagagggttgcggggttagccgcaaactgcttgtagaaaggcagcaactgttgctgtgtcaagaaggaagcacgacttgctgcagctagctcgctaaatggcagtagtatttgctgctgcaaataagcagcggggttcagtgcggccaattggttaaatggaagaagttgttgttgctgagagtaggcagtagctagctggctaaatggtaatagttgttgctgcaaataagcagcagggttcagtgtagacagttggttgaatggaagaaattgttgttgctgagagtagggagaaaggtttgccagagctacttggttgatcac

SEQ ID NO: 10494 - DNA, 572 bp, Zea mays
  Clone ID: LIB3061-087-Q1-N6-D10
ttttttttttttttttttttttattttttttttttttttttttttttttttttttttttttttttttttttttttttttttttttttttttaattttttttttttttttttttttttttttttttttttttttttttttttgggggggggggggccgggggggaaccttttttttcccgggggaagggaaaaaaaaatcaaaaaggggggccccccaggggggggggggggaaaaagggggggggggtccccaaaaaaaggggggtaaaaggggaaaaatgggggggggggaaaaaggggaaaatttttccccaaccccgggggggaaaaggggaaaaacggtggcgtggcaaaaaagggttaaattttccccaaacccggggggaaaaaggggaaaaatgggggggggggggggaaaaaaacaaaaatgtcgcccaaacctttggagggaaaggaaaaaacctggggggggtaaaaaagaggaccggggcccccaaaaagggggggaaaggggagaaattgtggcccccccaaaaacccccgggggcccccccccctttgtgttttgaggg

SEQ ID NO: 10495 - DNA, 491 bp, Zea mays
  Clone ID: LIB3061-087-Q1-N6-D11
gagataaatctcaatcaatatattgattatttctaggaaacacatgccgctatgagggcaccattatcgagtacatctcatatgtaatctaaaaaaggcacctccaacgatgggttgctgccacaacaaggcagggttcatcaaaaagaactggttgtatggcagcaattgttgctgctgtaggaaggcagcgaccaatgggttagccaccgctagtggattaagtaactgttgtcgctgttgtaggtacgcagcagagttcgacacagtcagttggttgaatggaagcagctgttgcaagtaggcagcagggtttgccacagctagctgagtcagagctggtacaatctgttgcagcaactgttgttgcaggtatgtaggtgcattaaccacagcgagagggctagatgaaatcagttgttgctgttgtaggtaggcggcagggttcaccatggctagttgactgagcgctggtagaaactgttgcaatt

SEQ ID NO: 10496 - DNA, 483 bp, Zea mays
  unsure (1)..(483): unsure at all n locations; Clone ID: LIB3061-087-Q1-N6-D2
aatctagaaatgtactttcttatttctgggaagccacaaacatcagacaaaaaactttattattgaactataactcataagaaatctaaaagagggcaccaccaatgatgggttgttggtagaatgctgttgggtttgtcaaagcaagttggttgaatggcagcaattgttgcagttgtaagagggtgccagcgttaggcgcagcgtgctggtagaacggcaacaattgtggttgtgtcaagaaggtngcagggctcacaccagctagctggctgaatggtagtagttgttgctgctgtnaataagcaggagagttcaaagctgtcagttggttgaatggaagaaattgctgggggtcggcagcagattgctggctgaatggtagttgttgttgttgcnaattagaagcagagttcaatgcagcttgttggttgaattggaagaaactgttgttgctgcgagtttgcagcaaggtttgcttgc

SEQ ID NO: 10497 - DNA, 542 bp, Zea mays
  Clone ID: LIB3061-087-Q1-N6-D3
agaaagtactttcttatttctgggacgccacaaacatcatccaaaaaacttcattattgaactataactcataagcaatctaaaagagggcaccaccaatgatgggttgttggtagaacactgttgagtttgtcaaagcaagttggttgaatggcagcaattgttgcagttgtaagagggtgccagcgttaggcatagcgtgcaggtagaacggcaacaactgttgttgtgtcaagaaggcagcagggctcacatcagctagctggctgaatggtagtagttgttgctgctgtaaataagcagcagagttcaatgctgctagttggttgaatggaagaaattgctgggggtaggcagcaactagctggctgaatggtaattgttgttgcaaataagcagcagagttcaatgcagccagttggttgaatggaagaaactgatgttgctgagagtatgcagcaaggtttgctagcacaagttgttgtagttgttgtgccctgatgttttgtgccaccaaatggaccaaaggtaactgctgtaat

SEQ ID NO: 10498 - DNA, 254 bp, Zea mays
  Clone ID: LIB3061-087-Q1-N6-D7
cagacaaaaaactttattattgaactataactcataagaaatctaaaagagggcaccaccaatgatgggttgttggtagaatgctgttgggtttgtcaaagcaagttggttgaatggcagcaattgttgcagttgtaagagggtgccagcgttaggcgcagcgtgctggtagaacggcaacaattgtggttgtgtcaagaaggtagcagggctcacaccaactagcttgctgaatggtagtagtttgttgctgc

SEQ ID NO: 10499 - DNA, 492 bp, Zea mays
  Clone ID: LIB3061-087-Q1-N6-D8
aaaaatgtctttcttatttttgggaagccacaaacattatccaaaaaacttcatttttgaagtttaactcataagccatctaaaagagggcccccccaatgatgggttgttggtagaaccctgttgggtttgtcaaaacaagttggttgaatggcagcaattgttgcagttgtaagagggtgcccgcgttaggcccagcgtgcaggtagaacggcaacaactgttgttgtgtcaaaaaggcaacagggctcacatcaactagctggctgaatgggggtagctgttgctgttgtaaataaacagcaaagttcaatgctgccaattggttgaatggaaaaaattgctgggggtaggcagcaactagctgactgaatggtagttgttgttgcaaataagcagcaaagttcaatgcagccagttggttgaatggaaaaaactgctgttgctgaaagtaggcagcaaggtttcctaacacaagttgttgtaattgtt

SEQ ID NO: 10500 - DNA, 530 bp, Zea mays
  Clone ID: LIB3061-087-Q1-N6-E10
aagttcaaacatcaaacttcataaggattcaagccatactgctgcaaaagagttttgggtacaacacagaggacacaacaggtccattaaaccaacgaagccacaaccacgattcatgacacacaaaccacagatgtttattagacgacgacctccatttagaggtacaccagagggcaccagacgacgcagatacccaggtacagcagcagcttaaatgaaccatggcttactgaccaccacggaggcggagcaccaggtggagagtgctctccttctggatgttgtagtctgctagggtgcggccatcctccagctgcttgccagcgaaaatcaaacgctgctggtctggggggatgccctctttgtcctggatctttgccttcacgttgtcgatggtgtcggagctctcaacctccagggttatggtcttgccagtcaaggtcttcacaaagatctgcataccacctcgcaagcggagcaccaggtggagggtgctctccttctggatgttgtagtcggcgagggta

SEQ ID NO: 10501 - DNA, 229 bp, Zea mays
  Clone ID: LIB3061-087-Q1-N6-E4
gaacttaaaattagatctctaatcttttattactgagaagttgcacatatcagtatgagaaatttattattacagtataaagcataaaaaatctagaagatggtaccaccaatggtgggctgatgcaataaggtggtaggattcgtcaaagcgagttggctaaatggcagcaattgctgttgttgtaagaaggcgacaatgtttgccacatcctgtgggtagaatggca

SEQ ID NO: 10502 - DNA, 240 bp, Zea mays
  unsure (1)..(240): unsure at all n locations; Clone ID: LIB3061-087-Q1-N6-E6
gggccccccccgggggggccccttttttnttgtttgggggggggggcccctttttttttggggggggggcccccccctttccaaaaaatttttttttttgtttccccccctggtccttcaatggggggggccccccccattttttttttttgggggggggggctttttttttctacgaagggggggtcgcggggcccccttttttgtttttttgggggggggggggggggctccccccgg

SEQ ID NO: 10503 - DNA, 408 bp, Zea mays
  Clone ID: LIB3061-087-Q1-N6-E7
cccaaaagaggacggctaggaaaaaacaaaacccaaaacccaaaaaggggggggcccaaaggggcaacccccggtatgggggaaaaagggggggggcaacccaaaccttaaagggaaaaacccccaaaggggaggggggggggggggaattttggggggggggggggggccacaccccccacagggggggggggggggggcccccgaaaaaaagcccccccccctggggggggcgggggggaacccaaaaaaccaaaaggggggggggggggccccccccggggaaaggggaaaaacccgggggaaaaaggggggggaaaaaattggggggaaaaaaggccaaaaaaagaaaaaaatggggggggaaaaaccggaggaaatctggggggataaaaccgggggggggaa

SEQ ID NO: 10504 - DNA, 527 bp, Zea mays
  unsure (1)..(527): unsure at all n locations; Clone ID: LIB3061-087-Q1-N6-E8
gcagcaccaagaagcaccatttttttccttaggatttaacttagaataaagcctgacgggggtaacagcacccatcgatccgcagtccatgctggttgatgcatgggtctgctggagccgaggatgaacacagcactaacaactgacacagagcgaccttcaatcaaaaacacagatgggcaacaacaaacacgagacgaacgaagataaacactctggactagggtaaacaacacggtagcgaacaggataacttggccgcgcgggccccaccgctcagttcctccagttcccgtcggagttgccgtagccgccgccacggttgccaccgccgtagccgccgccaccaccaccgtagccgccgccgccaccaccgtagccgccgccaccgccgtagccgccgccgccatcacggcgcccgccaccgccgtagccgccgcctccacggccaccaccgtacccgccgccgccgccgcctccacggccgccgngggactgggcctcgttgacggtgatgttgcggccgt

SEQ ID NO: 10505 - DNA, 551 bp, Zea mays
  Clone ID: LIB3061-087-Q1-N6-F10
aatctaaaaagtactttcttatttctgggaagccacaaacatcatccaaaaaacttcattattgaagtataactcataagcaatctaaaaaaggcaccaccaatgatgggttgttggtagaacgctgttgggtttgtcaaagcaagttggttgaatggcagcaattgttgcagttgtaagagggtgccagcgttaggcgcagcgtgcaggtagaacggcaacaactgttgttgtgtcaagaaggcaacagggctcacatcagctagctggctgaatggtggtagctgttgctgttgtaaataagcagcagagttcaatgctgccagttggttgaatggaagaaattgctgggggtaggcagcagctagctgactgaatggtagttgttgttgcaaataagcagcagagttcaatgcagccagttggttgaatggaagaaactgctgttgctgagagtaggcagcaaggtttcctagcacaagttgttgtagttgttgtgccttgatgttttgtgccaacaaatgcaccaaaggtaactgctgtaatagggc

SEQ ID NO: 10506 - DNA, 543 bp, Zea mays
  Clone ID: LIB3061-087-Q1-N6-F11
aaatctcaatcaatatattgattatttctaggaaacacatgtcggtatgagggcaccattgtcgagtacatctcatatgtaatctaaaagatggcacctccaacgatgggttgctgcaaggcagggttcatcaaagagaactggttgtatggcagcaattgttgttgctgctgcaggaaggtagcgaccaatgggttagccactgccaatggattaagtaactgttgtcgctgttgtaggtacgcagcagagtttgacacagccagttggttgaatggaagcaactgttgtaagtaggcagcagggtttgccacagctagctgagtcagagctggtacaatttgttgcagcaactgttgttgtaggtacgtaggtgcattgcccaccgcgagcgggctagatgaaagtagttgtaggtagacggcagggttcaccatggctagttgactgagcactggcataaactgttgcagctgttgttgttgctggtatgcagctacgttcgccagagcaagtgggttggatgcaagcagctgctgttgc

SEQ ID NO: 10507 - DNA, 535 bp, Zea mays
  Clone ID: LIB3061-087-Q1-N6-F3
ggaacagatggagtactttttttcttttcatttcaattgttcattcaggtcattgctcacactgacactgccacccatggtgatgcgtgacacattattactcaatcatcgccgctaaatgactcaactagctagctagccagcggctatactacagcacatagtttcttcagtgggggacaccgccggcagcagcgtaggggcatggagtcggctgctgcaggccgcacatcgccgtcagttgctgcgctatctgcgccgccaacagccccgcgacctggccgctttgcggctgctgctgcaggatggactggaggaccaagccgaagatcgcctggtaccggtgctgcggctccacctgcctgagctgctggcaacactgctgccgcaacgactggcactgaggcgagcagtagggcgtcgccgtcgggctgcactgatgcctcaggaactcgacgcactggcccaggatcggggtgctgccaacgccgcaagttccctgcagctggcacgggcttggatgcggctgttggca

SEQ ID NO: 10508 - DNA, 311 bp, Zea mays
  Clone ID: LIB3061-087-Q1-N6-F4
ggggccccccaatttgggttttgggggggggggggcccccttgggcccccctaaaacttgggggggggggtgctcgccccaggttttggtgggggggcgccccccctgctggggttttttggttggggccccccgttttgggttccttggagggggccggcgcttttgtttttttgggggggggaagggggggggtttgtgcccgtcggtgggggggggggggggtttggtttaaggtaggggggggggggggggctgtgttcatctcctgggcggaggggggtttttttttttttcttgtgagagggggg

SEQ ID NO: 10509 - DNA, 553 bp, Zea mays
  Clone ID: LIB3061-087-Q1-N6-F5
agaatctggaaatgtaacttcttatttctggttggccacatacatcatccaaaaaactttattattgaattacaactaataatcaatctaaaagagggcaccaccaatgatgtgttgttggtaggaggctgctgggtttgtcaaagcaagttggacaaagggcaacaattgttgtagttgtaagagggttgcggggttagccgcaaactgcttgtagaaaggcagcaactgttgctgtgtcaagaaggaagcacgacttgctgcagctagctcgctaaatggcagtagtatttgctgctgcaaataagcagcggggttcagtgcggccaattggttaaatggaagaagttgttgttgctgagagtaggcagtagctagctggctaaatggtaatagttgttgctgcaaataagcagcagggttcagtgtagacagttggttgaatggaagaaattgttgttgctgagagtagggagaaaggtttgccagagctacttggttgatcacaggtagcacgagttgctgcagctgttgtgccctgatggtttgtacc

SEQ ID NO: 10510 - DNA, 358 bp, Zea mays
  unsure (1)..(358): unsure at all n locations; Clone ID: LIB3061-087-Q1-N6-F6
aaaatatagatctctaatcttttattactgagaagttgcccatatcagtttgagaactttattattacagtntaaagctttaaaaaactagaagatggcaccaccaatggtgggctgctgcaataagggggtaggattcgtcaaagcaagttggttaaatggcagcaattgttgttgttgtnagaaggcgacattgtttgccacatcctgtgggtngaatggtagcaactgttgctgttgcaagaaggcgttaatgtttcccacaacctgtgggtnaaatggcagcaattgttgttgttgttgcnagaaagcagccntgtttgccacaacttgtngatggaatggaagcaactgttgc

SEQ ID NO: 10511 - DNA, 484 bp, Zea mays
  Clone ID: LIB3061-087-Q1-N6-F7
ccttatatattattcctttccatttcaatggttcattcaggtcattgctcacactgccacccatggtgatgggtgacactacgttactcatcgccgctaaatgagtaaactagcgagctaggtagctagtcagcggctccattacattattactacagtacatagtttcctcagtagtagacaccgccggcagctgcgttgcaagggcagggacctggctgctgcaactgcaggccgcacatcgccgtcagctgctgcgctacctgggccgccatcaacgccgcgagctcgccctgcggctgctgctgcaggaaggactgcaggaccacaccgtatgtcgcctggtaccggtgcagcggctccacctgcctgatctggtggcagcactgctgctgcaacgcctggcactgtggcgagccgtaaggcgtcgcccccgggctgcactggtgcctcaggaactcgacgcactggcccaagaacgggc

SEQ ID NO: 10512 - DNA, 547 bp, Zea mays
  Clone ID: LIB3061-087-Q1-N6-F8
agaaatgtactttcttatttctgggaagccacaaacatcatccaaaaaacttcattattgaagtataactcataagcaatctaaaagagggcaccaccaatgatgggttgttggtagaacgctgttgggtttgtcaaagcaagttggttgaatggcagcaattgttgcagttgtaagagggtgccagcgttaggcgcagcgtgcaggtagaacggcaacaactgttgttgtgtcaagaaggcaacagggctcacatcagctagctggctgaatggtggtagctgttgctgttgtaaataagcagcagagttcaatgctgccagttggttgaatggaagaaattgctgggggtaggcagcagctagctgactgaatggtagttgttgttgcaaataagcagcagagttcaatgcagccagttggttgaatggaagaaactgctgttgctgagagtaggcagcaaggtttcctagcacaagttgttgtagttgttgtgccttgatgttttgtgccaacaaatgcaccaaaggtaactgctgtaataggg

SEQ ID NO: 10513 - DNA, 555 bp, Zea mays
  Clone ID: LIB3061-087-Q1-N6-G10
agccatataggagccacacaattaccatgacaaactgttccaaacatttaattgcaacttacaacctgatacattgttcccaaagcgaaggagcaagtagacgcagtaatttatacttgagaaactactcggcaacatgctcgttgatcctcactttttactctctggatggcataggccaactgaaaactgacatccacacggcatgttttagttgcggcagcaaccgtccgcttcttgtggtagcaatatgtccagtgagagatgaatcatgtggtccgtgcggagtgcctataatcactggattcaagtttgtttcattaaccctttctgtcagcattgaagacctcgtattaattcatcgccatcagactgccgacagatcaatcatcctctaccccatctttggcccaaaagatggcggcactcccaaacttaacagcagccattgtcatgcttgaaagactaccattctcaaaagaaatttaacactaagtgctgcaggtatgggctaagctcaatagatcaggtcgtgccacttaatccaatagtctg

SEQ ID NO: 10514 - DNA, 189 bp, Zea mays
  unsure (1)..(189): unsure at all n locations; Clone ID: LIB3061-087-Q1-N6-G12
gggtatgccccctcttttttcttgggggcccccttcctccgcccaaaaacctttttttttgttttccacctctnagccctcctaaaaatttcccccccgggggggggttttttgttggaggcctcttggtttttccaagcccgtttggccccgggccccccccgtttcccttttttgggggtttccggg

SEQ ID NO: 10515 - DNA, 567 bp, Zea mays; identical to SEQ ID NO: 7944
  Clone ID: LIB3061-087-Q1-N6-G3

SEQ ID NO: 10516 - DNA, 551 bp, Zea mays
  Clone ID: LIB3061-087-Q1-N6-G4
acaatagtgtaccaacaatggcagctaaaatattttgcctccttatgctccttggtctttctgcaagtgctgcttcggcgacccttttcccacaatgctcacaagctcctattgcttcccttcttcccccgtgcctgtcaccaacggtgtcttcggtttgtgaaaacccaattcttcaaccctacaggatccaacaggcaatcgcagctggcatcttacctttatcacccttgttcctccaacaatcatcagccctattacagcagttacctttggtgcatttattggcccaaaacatcagggcacatcaactacaacaacttgtgctagcaaaccttgctgcctactctcagcaacagcagtttcttccattcaaccaactagctgcattgaactctgcttcttatttgcaacaacaacaactaccattcagccagctatctgctgcctacccccagcaatttcttccattcaaccaactgacagcattgaactctcctgcttatttacagcagcgacaactactaccattcagccagctagctggtgtg

SEQ ID NO: 10517 - DNA, 355 bp, Zea mays
  unsure (1)..(355): unsure at all n locations; Clone ID: LIB3061-087-Q1-N6-G6
ggttgggggggggggggggcccctccggtgggggggggttttggggggaccccggggggggggggggggcccctgtgtgggggcccgtgggggggggggcgaaggggggggccccccgggggggggggggggcccgggcggggggggggtttccaaaaaagaggggggggggggggctttggggggggggggggggggggcgcccccccgggggggcccccgggggggggggtttgcccccggggggggggggggggggcccccnnctgtgcccccctcggcggggggggggggggggggcctttgggcgtgggggcgcggggggggccccccctgggcgggggggtgggggggc

SEQ ID NO: 10518 - DNA, 556 bp, Zea mays
  Clone ID: LIB3061-087-Q1-N6-G7
gaacttaaaatatagatctctaatcttttattactgagaagttgcacatatcagtatgagaactttattattacagtataaagcataaaaaaatctagaagatggcaccaccaatggtgggctgctgcaataagggggtgggattcgtcaaagcaagttggttaaatggcagcaattgttgttgttgtaagaaggcgacattgtttgccacatcctgtgggtagaatggtagcaactgttgctgttgcaagaaggcgttaatgtttcccacaaccattgggtaaaatggcagcaattgttgttgttgttgcaagaaagcagcaatgtttgccacaacttgtagatggaatggaagcaactgttgctgcagtaagaaggcagcagggctcctgacaagttggttgaatggtagtagctgttgtgcctgcaagtaagcagcagggttcaccccagctagttgattgaatggaagaaattgttgttgctggaggtaagcagcaaggttcgctgcaactacttgattgattgttggaagcaactgttgttgtagttgttg

SEQ ID NO: 10519 - DNA, 550 bp, Zea mays
  Clone ID: LIB3061-087-Q1-N6-G9
ccaaacatcctttttccctatatattattcctttccatttcaatggttcattcaggtcattgctcacactgccacccatggtgatgggtgacactccgttactcatcgccgctaaacgagtgaactagctatagccctataggtagctagtcagcggctccattacattattactacagtacatagtttcctcagtagtagacaccgccggcagctgcgttgcaagggcagggacctggctgctgcagctgcagaccgcacatcgccgtcagctgctgcgctacctgggccgccatcagcgccgcgagctcgccctgcggctgctgctgcaggaaggactgcaggaccacaccgtatgtcgcctggtaccggtgcagcggctccacctgcctgatctggtggcagcactgctgctgcagcgcctggcactgtggcgagccgtagggcgtcgccgccgggctgcactggtgcctcaggaactcgacgcactggcccaggaacgggctgccgacgctgccgacgccgcaggatccgaactgctggcacgggc

SEQ ID NO: 10520 - DNA, 102 bp, Zea mays
  unsure (1)..(102): unsure at all n locations; Clone ID: LIB3061-087-Q1-N6-H11
gggggggggggggggggggggggggggccncncncgggggggggggggggacatcatgggggggggcccccccttgggggggggggccccgggggggggggg

SEQ ID NO: 10521 - DNA, 195 bp, Zea mays
  Clone ID: LIB3061-089-Q1-N6-A1
ggttgggggttgtttttaaatggtgctgtttttccctgctccttctgtttgtcttctaaatgttttcaggtgttgttctgtttgttggtttcctcggtgtttcttattgctcatttgttcaagcttgccttgcgtttcattggcttggtggggttgttttctctttggtccttcttctgggctcgcctttccttc

SEQ ID NO: 10522 - DNA, 406 bp, Zea mays
  Clone ID: LIB3061-089-Q1-N6-A10
aaaaacatatcctttcgatcttttattaagcacctaatcttctacatttacaagctcggcagccagcagagagccttatacctgtgctatgatacatcttactaccagggcaaggtcaggaactttacagagaagcgaacaagtcgattctgggaacagctaccggggggagggcggagcaagagcaaaatatttcctctgtgaagatgatgcttcctctctaagccaaaggcatcttcaaccacaccatctaaaggtgcggacatgctgggacatatctggagaaccatgtgagcatgtacatctgaagccgtgatcatctcgattggaccactctataatgaagaatcaaatcttccggcttcttccatatatatgttcgcactgtagccaaactcatatctgg

SEQ ID NO: 10523 - DNA, 518 bp, Zea mays
  unsure (1)..(518): unsure at all n locations; Clone ID: LIB3061-089-Q1-N6-A11
tttggggggtttagaatctagaaatgtactttcttatttctgggaagccacaaacatcagacaaaaaactttattattgaactataactcataagaaatctaaaagagggcaccaccaatgatgggttgttggtagaatgctgttgggggggtgaaagcaagttggttgaatggcagcaattgttgcagttgtaagagggtgccagcgttaggcgcagcgtgctggtngaacggcaacaattgtggttgtgtcaagaaggtagcngggctcacaccagctngctggctgaatggtagtngttgttgctgctgtnaataagcaggagagttcaaagctgtcagttggttgaatggtagaaattgctgggggtgggcngctgctcgctggctgaatggtngttgttgttgttgcccctccgaagccgcgttcaatgcctcttgttggtttgtatggctgaaactgttgttgcttgtgtgttcggccgctcggtttgctcgccctcgttgctgttgttgtt

SEQ ID NO: 10524 - DNA, 341 bp, Zea mays
  unsure (1)..(341): unsure at all n locations; Clone ID: LIB3061-089-Q1-N6-A3
ggggtggggttgtttttttttttttttttttttttttttttttttcttttttttttttggtttttttttttttttttttctctttttttttttttgccgcccccgcctccttttttggcccctcccccctctggntttccaacgggggcccccgcgagggggggtggttgggggaacccccccgggttttccaaacccgggtgggtggctggccccaattggggccgttgggggaggggccccccctttgggcccccgggccggtggcccccgcaaaaccgggggtggtttcgggggggggggggggctccccccctctggggggtggcgggggggtgttg

SEQ ID NO: 10525 - DNA, 308 bp, Zea mays
  unsure (1)..(308): unsure at all n locations; Clone ID: LIB3061-089-Q1-N6-A8
gggggtgtgtggggtttttttttttttttttttttttttttttttttttttttttttttttttttttttggggggggggtttttttttttgtggggggggggttgggggttggtttggggggggggggtctttttttttttttttttttggggggggggggggggttttgttggggggggggggggcggccgctcccgtgcgggggggggccgcccggggggggcgggcggnggggggggggccggggggggggggggggggggtggggggggcgcgggggggggggggggggcggggggggcggggg

SEQ ID NO: 10526 - DNA, 524 bp, Zea mays
  Clone ID: LIB3061-089-Q1-N6-A9
agaaatgtactttcttatttctgggaagccacaaacatcagataaaaaactttattattgaactataactcataagaaatctaaaagagggcaccaccaatgatgggttgttggtagaacactgctgggtttgtcaaagcaagttggttgaatggcagcaattgttgcagttgtaagagggtgccagcgttaggcgcaacgtgctggtagaacggcaacaactgtggttgtgtcaagaaggtagcagggctcacaccagctagctggctgaatggtagtagttgttgctgctgtaaataagcaggagagttcaatgctgctagttggttgaatggaagaaattgctgggggtaggcagcaggtagctggctgaatggtagttgttgttgttgcaaataagaagcagagttcaatgaacctagttggttgaatggaagaaactgctgttgctgagagttggcagcaaggtttgctagcacaagttgttgtagttgttgtgccctgatgttttgtgccaataaatg

SEQ ID NO: 10527 - DNA, 500 bp, Zea mays
  Clone ID: LIB3061-089-Q1-N6-B11
gattcattaaaaccaaaactttattatgaccatgcatatattattggtcataccacacatgataatgtgtgtcgtcttactgcattattacatatatagatagagagagatggatagaggagatttcccaaatgtcatgaatcagtagtagggcggaatggcagcggagacgccacaggggttggtgcggtagctgggcagctggtactggtagagtccacccatggccggcatgttctgcgccatcatcatggccatggggttgagaccctgggctgccagcagctgctgctgctgctgcatcagagctggctcgtacaggctgctgctggcggcagcggcacgctcaagctgcatcatcatctgcagctgctgcgcgacggactgcacgtccatcatcctcatctgctgctggcagcactgttgccggagcggctggaacatggcgctcggctgcccacacccggcgttgttgggcgccgccgccagcgggctgcact

SEQ ID NO: 10528 - DNA, 388 bp, Zea mays
  Clone ID: LIB3061-089-Q1-N6-B12
gtgtgggggggggtttttttttatttttttttttttttttttttttttttttttcggaaattttttggggtttttttccccccctttttttttttttttttgggaacccatgcccgttttgggggccccttttcgggtcccttttttttgggggggggggggtggcccctcccacggtgggttttttccttaacaaaacagggtttttcaaagagaaccggttgtttgggggtaattttttttttttttgggggggggcgccccttgggttggcccccccccctgggtttggttactgttgtcccttttgtggggccccccccccgcccccccttttttttttgttgagtggggcctgctttttcccgtgggccaccgggtttgcccc

SEQ ID NO: 10529 - DNA, 531 bp, Zea mays
  unsure (1)..(531): unsure at all n locations; Clone ID: LIB3061-089-Q1-N6-B3
cagaaattatcgagataaatctcaatcaatatattgattatttttaggaaacacatgccgctntgagggcaccattatcgagtacatctcatatgtaatctaaaagatggcaccaccaacgatgggttgctgccacgacaaggcagggttcatcaaagagaactggttgtatggcagcaattgttgctgctgtaggaaggcagcgaccaatgggttagccaccgctagtggattaagtaactgttgtcgctgttgtaggtacgcagcagagttcgacacagtcagttggttgaatggaagtagttgttgcaagtaggcagcagggtttgccacagctagctgagtaagagctggtacaatttgttgcagcaactgttgttgcaacaactgttgttgcaggtttgtnggtgcattgcccatagcgagcgggctagatgaaagaagttgttgctgttgtaggtaggcgatagggttcaccatggcttgttgactgagcgctggtngaaactgttgcaactgttgttgntgttg

SEQ ID NO: 10530 - DNA, 545 bp, Zea mays
  unsure (1)..(545): unsure at all n locations; Clone ID: LIB3061-089-Q1-N6-B4
gattgcaatgataatcaggacccaaacgatgggttaaacgaaagaatgttgacagcagatctgttatcacaatgaaagaagacaagcggtcgcttctcaatattcgacgtcagagcagccgaaatctccaaatcttgcagtgtccctcctgttagatcctgaagagtatagcccttttcacccactcacagcataactttaactcccccccccccccaccaatgctatcacctacgtactatctatgcgccgctcctgcctttcttcgacttgttcttgttttcttgtgtcttctttttcttctcttcaggtgttgtccacacgtaattggaaggaatggcgaatgggtcctggatgtcctccacgcggctgcttgggcccggtgccgtcgacaagttctggaggttgggcgccttgntccactgaatccaggaacttgaagaaggctgcactgctgggctcttgctgttgtcnggacttgagggtggtgtggtgaactcatctagcggctgtagctcttcaaattttgtgaatgtcacaagcac

SEQ ID NO: 10531 - DNA, 515 bp, Zea mays
  unsure (1)..(515): unsure at all n locations; Clone ID: LIB3061-089-Q1-N6-B5
gaccttgaattattagttatcattgcccaaatgttcaaaagaacaacacaacctggcggtgcaaacggaaagattcacctgagaataaaacaaactaccttggattggactagagaaaagttgggtaccggaactgctgcgaccaaaccgaatttcatggcaaacttcttgtggttacagtctagcatctcgctgaggctgcagctcgagttcatctgcttaagcaccttgtggcggtactccaggctcctcttgaggccatggcgaaagaactgggggtaacctaccacctcgcccatgtcccgccccatctcttcgaccaggaacttgatccttggctccaggcaatgtttgatgctcttggtgagaacaggagggtnaccagcttccagtgccgtgacctgatccctgctgnatccgcggctctgttggaacgccagattgggccgcnggatcttatccacgtctcgcgacagtttatcggggaaggtcatgaccaccctctggagatctgg

SEQ ID NO: 10532 - DNA, 226 bp, Zea mays
  unsure (1)..(226): unsure at all n locations; Clone ID: LIB3061-089-Q1-N6-B6
cagaaatatattgagataaatctcaatcaatatattgattatttctaggaaacacatgccggaatgagggcaccattatcgagtacatctcatatgtaatctaaaagatggcacctccaacgatgggttgctgcctggacaagacagggtttatcaaagagaactggttgtntggcagcaattgttgctgctgtaggaaggcagcgaccaatgggttagccactgc

SEQ ID NO: 10533 - DNA, 520 bp, Zea mays
  Clone ID: LIB3061-089-Q1-N6-B7
agaatctaaaaatgtactttcttatttctgggaagccacaaacatcagacaaaaaactttattattgaactataactcataagaaatctaaaagagggcaccaccaatgatgggttgttggtagaatgctgttgggtttgtcaaagcaagttggttgaatggcagcaattgttgcagttgtaagagggtgccagcgttaggcgcagcgtgctggtagaacggcaacaattgtggttgtgtcaagaaggtagcagggctcacaccagctagctggctgaatggtagtagttgttgctgctgtaaataagcaggagagttcaaagctgtcagttggttgaatggaagaaattgctgggggtaggcagcagatagctggctgaatggtagttgttgttgttgcaaattagaagcagagttcaatgcagctagttggttgaatggaagaaactgttgttgctgagagtaggcagcaaggtttgctagcacaagttgttgtagttgttgtgccctgatgttttgt

SEQ ID NO: 10534 - DNA, 382 bp, Zea mays
  Clone ID: LIB3061-089-Q1-N6-B8
ccaaccaattttttgtttttttttgggaaacacatcccggtttgggggcccccttttcgtttccctctcattttttttctaaaagaaggggccccccaacaatgggttgctgcccccccaaggcggggttcatcaaaaaaaactggctgtttggtggcaattgttgcttctttgggaaggcggggcccaatgggttaggccctgctagtggtttaagtaactgttgtcgctgttgtgggtcccccgccgggttccccccattcagttggttgattggaagctgctgttgcaagtgggccgcggggtttgccactgcttgctggttcagagctggtccaatctgttccaccatttgttgttgccggtttgttggtgctttccc

SEQ ID NO: 10535 - DNA, 532 bp, Zea mays
  Clone ID: LIB3061-089-Q1-N6-B9
ggaaatgtaacttcttatttctggttggccacatacatcatccaaaaaactttattattgaattacaactaataagcaatctaaaagagggcaccaccaatgatgtgttgttggtaggaggccgctgggtctgtcaaagcaagttggacaaagggcaacaattgttgtagttgtaagagggttgcggggttagccgcaaactgctggtagaaaggcagcaactgttgctgtgtcaagaaggaagcacggtttgctgcagctagctggctaaatggtagtagtatttgctgctgcaaataagcagcggggttcagtgcggccaattggttaaatggaagaagttgttgttgctgagagtaggcagtagctagctggctaaatggtaatagttgttgctgcaaataagcagcagggttcagtgtagacagttggttgaatggaagaaattgttgttgctgagagtagggagaaaggtttgccagagctacttggttgatcagaggtagcacgagttgctgcagctgttgtgccc

SEQ ID NO: 10536 - DNA, 375 bp, Zea mays
  Clone ID: LIB3061-089-Q1-N6-C10
cccgggggctttttttgggggggggggggggggggcaaaattttgttttttttgataaaaattttgtttggaaaaaaggttaaaaaaacccccccgggggggccttccccttgggaggggggggggggttccccccccccccccaggggggggaaattggttaactgttgggggaaaaatttccccccaaaaaaatttttacccggcccaaaaaaaatggggggggggtttaaaaggaccgccccccccccctggggggggggggggggccccctgcggccctttttcggggttttccggccctccccaaaatgggggggagggggggcccacccttgtccccccccccctttttggggttcttgggcccccgaa

SEQ ID NO: 10537 - DNA, 486 bp, Zea mays
  unsure (1)..(486): unsure at all n locations; Clone ID: LIB3061-089-Q1-N6-C11
ctagaaatgtactttcttatttctgggaagccacaaacatcagacaaaaaactttattattgaactataactcataagaaatctaaaagagggcaccaccaatgatgggttgttggtagaacgctgctgggtttgtgaagggaagttggttgaatggcagcaattgttgcagttgtaagagggtgccagcgttaggcgcagcgtgctggtagaacggcaacaactgtggttgtatcaagaaggtagcagggctcacaccagctagctggctgaatggtagtagttgttgctgctgtaaataagcaggagagttcaatgctgccagttggttgaatggaagaaattgctgggggtnggcagcaggtagctggctgaatggtagttgttgttgttgcaaataagaagcagagttcaatgcagcttgttggttgaatggaagaaactgctgttgctgagagttggccgcaaggtttgcttgcacaagtt

SEQ ID NO: 10538 - DNA, 390 bp, Zea mays
  unsure (1)..(390): unsure at all n locations; Clone ID: LIB3061-089-Q1-N6-C12
atcgagataaatctcaatcaatatattgattatttctaggaaacacatgtcggtntgagggcaccattgtcgagtacatctcatntgtnatctaaaagaggctcctccaacgatgggttgctgcaaggcgggggggggtcaaagagaactggttgtctggcagcaattgttgttgctgctgcaggaaggttgcgaccaatgggtttgcccctgcccatggattaagtnactgttgtcgctgttgtnggtccgccgccgngtttggcccagcccgttggttgaatggaagcaactgttgtcagtgggccgctgggtttgcctccgcttgctgtgtccgggctggttccctttgttgctgctcctgttgttgttggttcgttggtgccttgc

SEQ ID NO: 10539 - DNA, 405 bp, Zea mays
  Clone ID: LIB3061-089-Q1-N6-C4
agaatctagaaatgtactttcttatttctgggacgccacaaacatcatccaaaaaacttcattattgaactataactcataagcaatctaaaagagggcaccaccaatgatgggttgttggtagaacactgttgggtttgtcaaagcaagttggttgaatggcagcaattgttgcagttgtaagagggtgccagcgttaggcatagcgtgcaggtagaacggcaacaactgttgttgtgtcaagaaggcagcagggctcacatcagctagctggctgaatggtagtagttgttgctgctgtaaataagcagcagagttcaatgctgctagttggttgaatggaagaaattgctgggggtaggcagcaactagctggctgaatggtaattgttgttgcaaataagc

SEQ ID NO: 10540 - DNA, 553 bp, Zea mays
  Clone ID: LIB3061-089-Q1-N6-C5
agaaatgtactttcttatttctgggaagccacaaacatcatccaaaaaacttcattattgaactataactcataagcaatctaaaagagggcaccgccaatgatgggttgttggtagaacgttgttgggtttgtcaaagcaagttggttgaatggcagcaattgttgcagttgtaagagggtgccagcgttaggcgcagcgtgcaggtagaacggcaacaactgttgttgtgtcaagaaggcaacagggctcacatcagctagctggctgaatggtggtagctgttgctgttgtaaataagcagcagagttcaatgctgccagttggttgaatggaagaaattgctgggggtaggcagcagctagctgactgaatggtagttgttgttgcaaataagcagcagagttcaatgcagccagttggttgaatggaagaaactgctgttgctgagagtaggcagcaaggtttcctagcacaagttgttgtagttgttgtgccttgatgttttgtgccaacaaatgcaccaaaggtaactgctgtaatagggctgaca

SEQ ID NO: 10541 - DNA, 359 bp, Zea mays
  Clone ID: LIB3061-089-Q1-N6-C6
gggccccaaaaagggttttttcccttttaaaacccaaaaattttttttttaaaaattttttaaaaaaaaaaaaaaaattttgggccctttttttttaaacccccttttgggattaaaaccgttggggaaaaaaatttttttttttcaaaaccccccaaatttatttgctccccggggttttttttggggggttggggggccccccccccccccttttggggggttttttccccttttcaaaaatccccccccccttttgaatttttttggaaacccccaaaaaaaaaaaggggggggtgtggccccccccccgttttttggttcacccccttttaaaattctttgggaaaattttttgg

SEQ ID NO: 10542 - DNA, 464 bp, Zea mays
  Clone ID: LIB3061-089-Q1-N6-C7
aaaaccaaaactttattatgatgcatatattattggtcataccacacatgataatgtgtgtcgtcttactgcatttttacatattttgattggggggggtgggtagaggagatttcccaaatttcatgaatcagtagtagggcggaatggcagcggagaccccacaagggttggtgcggatgctgggcagctggtactggtactggtagagtccacccatggccggcatgttctgcgccatcatcatggccatggggttgagaccctgggctgccagcagctgctgctgctgctgcatcagagctggctcgtacaagctgctgctggcggcagcggcacgctcaagctgcatcatcatctgcagctgctgcgcgacggactgcacgtccatcatcctcatctgctgctggcagcactgttgccggagcggctggtacatggcgctcgtctgcccacacccggcg

SEQ ID NO: 10543 - DNA, 548 bp, Zea mays
  Clone ID: LIB3061-089-Q1-N6-C8
atcccgcagctcatggagatggtggaggacgtgcagatcgttctgctgggcacgggcaagaagaagttcgagcgcatgctcatgagcgccgaggagaagttcccaggcaaggtgcgcgccgtggtcaagttcaacgcggcgctggcgcaccacatcatggccggcgccgacgtgctcgccgtcaccagccgcttcgagccctgcggcctcatccagctgcaggggatgcgatacggaacgccctgcgcctgcgcgtccaccggtggactcgtcgacaccatcatcgaaggcaagaccgggttccacatgggccgcctcagcgtcgactgtaacgtcgtggagccggcggacgtcaagaaggtggccaccacattgcagcgcgccatcaaggtggtcggcacgccggcgtacgaggagatggtgaggaactgcatgatccaggatctctcctggaagggccctgccaagaactgggagaacgtgctgctcagcctcggggtcgccggcggcgagccaggggtcgaaggcgaggagatcgcgccgctcgc

SEQ ID NO: 10544 - DNA, 505 bp, Zea mays
  Clone ID: LIB3061-089-Q1-N6-C9
aacggaacacacttgggcacatatgatttaaaatttagatctataatacttatttactgagagggcgcacatatcagcatgagaactttattattacagtttaaatcataaaaaatctagaagatggcaccaccaatggtgggcgattgcaataagggggtaggattcgtcaaagcatgttggctaaatggcagcaattgttgttgttgtaagaaggcaacaatgtttgccacattatgtgggtagaatggcagcaattgttgctgttgcaagaaggcattaatgtttcccacaacctgtgggtaaaatggcaacaattgttgttgtcgcaagaaagaagcaatgttttccacagcttgcaaatggaatggcaaaagctgttgttgcagtaagaaggcatcagggctcccgacaagttggttaaatggtagtagttgttgtgcctgcaagtagacagcagggttcaccccacctagttgattgaatggaagaaattgttgttgct

SEQ ID NO: 10545 - DNA, 550 bp, Zea mays
  Clone ID: LIB3061-089-Q1-N6-D10
gaaactgaaaggcattgttattccagatgtcaatatacgcatcacttcaaaagtacacgggatatatcagtcgcagtatatagagagagatctagcaaagtcgcaaccaaaaacaactgtatcttcggctccaactaacaacatcgaaagcgaacaagactctcctctggtccttcacgtctcaagcagaccttgcactctttcttctcacctgcaaaattggtctccacgtcataaatgaatggcctggccgcgagtgcaccgacctcgcccactcagttgctggcattcgctgggaggtagtactggtagtatcccagcaccgcgaggagggcaaccagcacggcagccaccatggcagctgggccagcccatgaccagtaggactgcgccttcttcctcttcaggatcgccttgggtggtggggccttgctgaccacgttcctgtgccgggcactctccttctgttccttctttaccatggtggaagctggggccacttcctgctccactggggcttccatggcttcatcagacttggcgtccgatt

SEQ ID NO: 10546 - DNA, 570 bp, Zea mays
  Clone ID: LIB3061-089-Q1-N6-D12
gggtgtgtggggttttaacaggaaatcactgtcaccactcaccacggcctggtgcagtggtgagctggttgattcaattcaagagtcacacgcgaacagaaacgaactcacaacaagtatccatggttaagtatcgcctccggctcgggtgggggcggacatactactagttcacaaatcgcccacaaacgacaaagccagaactgattacgacaacatttacagccatacgtgctggcccttattgacggcgacgactgatctgatctcatttaggcagacgcagtcgcaggcgcaggcgcggcatgcttctcgatcagggccaggagctcgtccttcctggcacccacgatggtcgcgaccgtcttgccgttcttgacgaagtggaaggtcggcatcgcctcgacctcttaggccgcggtgacttccttcacttcgtccacgtccaccttcaggaagacgacctgagtgaacttcttggcgtgttcgacgaacagtggggcgatggcgcggcctggaccgcaccaggcggcagtgaagtcgatgaccaccagcttgccggcttcctgg

SEQ ID NO: 10547 - DNA, 519 bp, Zea mays
  Clone ID: LIB3061-089-Q1-N6-D2
agaaatgtactttcttatttctgggaagccacaaacatcagacaaaaaactttattattgaactataactcataagaaatctaaaagagggcaccaccaatgatgggttgttggtagaacgctgctgggtttgtcaaagcaagttggttgaatggcagcaattgttgcagttgtaagagggtgccagcgttaggcgcagcgtgctggtagaacggcaacaactgtggttgtatcaagaaggtagcagggctcacaccagctagctggctgaatggtagtagttgttgctgctgtaaataagcaggagagttcaatgctgccagttggttgaatggaagaaattgctgggggtaggcagcaggttgctggctgaatggtagttgttgttgttgcaaataataagcagagttcaatgcagctagttggttgaatggaagaaactgctgttgcttagagtatgcatcaaggtttgctagctcaagttgttgtatgtgttgtgccctgatgttttttgcccat

SEQ ID NO: 10548 - DNA, 394 bp, Zea mays
  Clone ID: LIB3061-089-Q1-N6-D5
gggggcgccaactggagcaaccaccaactaaaactgtttttcattcctccctcccaaaaaggattaacgatgttgggggaaacttttattcaagtttttttttttttaactttgaaatttaactttttttttacaagctttattttaactgtggttggattttttttttccatttcggctccctgagttggtttcactttgccctcaaatttccttattttaattgtccaggcccttccttacttcccttaaacaacctaattttgtgcttgagccaaatttctttaaacttatgcttttttgttgttaaaaaaatctttttgtttgtcgtggttaccaaaagcttcaaaacattttttttgtccaccactgttaatccatccattttttttaa

SEQ ID NO: 10549 - DNA, 553 bp, Zea mays
  Clone ID: LIB3061-089-Q1-N6-D6
aagaatctagaaatgtactttcttatttctgggaagccacaaacatcagacaaaaaactttattattgaactataactcataagaaatctaaaagagggcaccaccaatgatgggttgttggtagaacgctgctgggggggggaaagcaagttggttgaatggcagcaattgttgcagttgtaagagggtgccagcgttaggcgcagcgtgctggtagaacggcaacaactgtggttgtatcaagaaggtagcagggctcacaccagctagctggctgaatggtagtagttgttgctgctgtaaataagcaggagagttcaatgctgccagttggttgaatggaagaaattgctgggggtaggcagcaggtagctggctgaatggtagttgttgttgttgcaaataagaagcagagttcaatgcagctagttggttgaatggaagaaactgctgttgctgagagtaggcagcaaggtttgctagcacaagttgttgtagttgttgtgccctgatgttttgtgccaataaatgcaccaaaggtaactgatgtaa

SEQ ID NO: 10550 - DNA, 522 bp, Zea mays
  Clone ID: LIB3061-089-Q1-N6-D8
aggcacgaaaatccttcaaatatctttcaaaatccaagccaaggcaacaaaatgtgctactactcggtaggaagtgattactatgctgatggcccacaactttcttaaaccttgaacccacggctgttcctgctgccacgagccttctcgaacttccttcccttggagcgcacatatggcttggtgtggctgtgcggcactccaggagccttgccgaagtgcctcaccgcctcacgggcattcttggggcccctcaagaggactgtgttctcgccaagtggagcacggagagcaagctggtcaaatgtgaggcactccccaccagcattgacaatcctggcccttgccgtctcggtgaacctcagggcagtaaccttcattgctggaacctcttggatcctcttgtcatctgtgactgtgccaacaatcacagcaatgttcttctcctttccttccatgaacttgacaaggcggcgcatggagattggtgggcgattggttttgctcatgaagagcctcttg

SEQ ID NO: 10551 - DNA, 439 bp, Zea mays
  unsure (1)..(439): unsure at all n locations; Clone ID: LIB3061-089-Q1-N6-E1
cgcaaatgatncttttttattacacatacagcacttccatacagtaactacaaggactgccttcatcttgtcaataatgtgaatcacgacaaatccaaaatcacaacatgtaaacaaaatgatagattccacgcgttaggtgcccccctcacttagcattcttagacaggttattcttttctccatctcctcagtttccttccctagaggtaaactaaaacacgttcagtaaggtcggtatcgccaatccgaccttgatctgctgcttccgctgctggggccatcgccgtaattttcatcttgaccaccgctgaacctgccaaaagatctcattgaaccataagctccgttaaggtccgtgggatcaatgttaccactcccagttgnattattctcaagtggttgcacccgtgtctattgaacctcatggcccataatt

SEQ ID NO: 10552 - DNA, 484 bp, Zea mays
  unsure (1)..(484): unsure at all n locations; Clone ID: LIB3061-089-Q1-N6-E10
ggttggtgtttttttttttttttttttgtgtggtgggggtttttttttattttttttttttatttntnttttnntttgnnnntttgttngggggggcctnntttnggttggttgtttttttttttttctccttttgtttnnnnttnggggggggggggggcgcncntttttctcactgntccccccctccgtgcccccctgnggtnnncccgnggcggccccccccccccctgggggggggggcccctttcgcccccccccccctttttttttttttggcggggggggcccccccccttttttttgcccccccccccctttttttnccgcgggggggggtgtttttgggggggggggggggccccccccccccccggggggggggggggggcgggnnaaacccccccccccttttgggggggggggccccccccccccccccccgggggggggccccccccccccgcggggggggccccccccc

SEQ ID NO: 10553 - DNA, 147 bp, Zea mays
  Clone ID: LIB3061-089-Q1-N6-E12
tttgttgttttttttagaaatgtactttcttatttctgggaagccacaaacattagacaaaaaactttattattgaactataactcataagaaatctaaaagagggcaccaccaatgatgggttgttggtagaacgctgcttggttt

SEQ ID NO: 10554 - DNA, 528 bp, Zea mays
  Clone ID: LIB3061-089-Q1-N6-E3
gaacatacaaggtacacttatttacatgccatccaaagtttttttgtttttcagtttttgtttaattgcaatttctgcaataaacattgttttgatgagctggactggcttcttccaactcagactagggatcagggttgccaagtttagcttcatcaccggagtcgtcttcctcctcgctaagctcttcatcactggacttgtcttccggagtgataccagcgtcctctggtttggcatacttctcacaatattctttcactttctgttcataaacaggacgatcacgcatcatcagtgctgcagcctccccatttaatggatcagaaggatttggatatagtaacagctgtggaaggaatacttcaaaaacatttactagatcaaacattgggctccatgtttggtttttgacatctaaacatacagagccagacatctcatcgacatttgggtgataaatcttgttgatgaagccgatggacggggatttgtaaggatatgcatcaggcagttctaccctaacct

SEQ ID NO: 10555 - DNA, 506 bp, Zea mays
  Clone ID: LIB3061-089-Q1-N6-E5
aatctagaaatgtactttcttatttctgggaagccacaaacatcagataaaaaactttattattgaactataactcataagaaatctaaaagagggcaccaccaatgatgggttgttgggagaacactgctgggtttgtcaaagcaagttggttgaatggcagcaattgttgcagttgtaagagggtgccagcgttaggcgcaacgtgctggtagaacggcaacaactgtggttgtgtcaagaaggtagcagggctcacaccagctagctggctgaatggtagtagttgttgctgctgtaaataagcaggagagttcaatgctgctagttggttgaatggaagaaattgctgggggtaggcagcaggtagctggctgaatggtagttgttgttgttgcaaataagaagcagagttcaatgaacctagttggttgaatggaagaaactgctgttgctgagagtaggcagcaaggtttgctagcacaagttgttgtagttgttgtgcc

SEQ ID NO: 10556 - DNA, 532 bp, Zea mays
  Clone ID: LIB3061-089-Q1-N6-E6
gcagcttctcttctctgctgtctcagaatcatacagaatgggggtacaagaggagaaaaaaatctcaacaccaaagaatgagaggggctacacggctagagggaacacatttttgaagatctacaggcacagacgctgggggggagaagttaaaagaagccaacatgcttactacaaaaagtagtctggtgtcttgcgcgtcatgtccggctcaatttgccgcggagctgggtcgaattggaggaagttctgatccatgttctcgccaatttcgaggatggcagccatgtttccgcatcggtagcagtagttaggcgcgctgaacactgtcacaacgttcttatcctgacaccaattgaagccttccattacaagttgatgtgcccttgaaataagacttagcccatttgtatggttgaattgttgtgcaatatcttggccaaatgtgtatccagcaccccttggtgaaattccccacccgcatcggtcatctgggtcagaccacaaaaaatcacacataggtccttcatgt

SEQ ID NO: 10557 - DNA, 355 bp, Zea mays
  Clone ID: LIB3061-089-Q1-N6-E7
aaaaatggcccttcttttttctggggccccccaaaccttatccagaaaacttcatttttgaacctttacccataagccatctaaaaaagggccccccccatgatgggttgttggtagaacccttttgggtttgtcaaaccaagttggttgaatggccccaattgttgcaattttaaaagggtgccccccttaggcatttcctgccggttaaaccgcaaccaccttttttttgtcaaaaaggcaacagggctcacatcaactaactggcttaatggtagtagttgttgctgctttaaataaaccccaaaattcaatgcttcttgttggttgaatggaaaaaattgctgggggtagg

SEQ ID NO: 10558 - DNA, 509 bp, Zea mays
  unsure (1)..(509): unsure at all n locations; Clone ID: LIB3061-089-Q1-N6-E9
atgataaacattgtatctttttttataaatttactcaaacgagttgactgaacagtattctagaactacatcatttatgaaacaggggtcctgtnttgctaaggatcccattaaaagtcatattcaataaaaggttgcggatgaaacatcgcgaactacaaattctatggcacaacagaagcaggcaggcatgaagctcctcagttcattccaaccgcacggtatgataacgccccaggaggccaggagccaatgcgaaagttgagctaaattacaccttgcttgccccgctccgttcaataatctccacttgtcaagccttggacgccttacagtttggttcgaaaacatattttaccagcgactccttgatcgacaaaagctccgggaactctctcttcagtttggtctggtcaagctcattgttgctcctcggtgcgactatgacctttgcctgctcctccaggttgaagtttttccaggagaagcctggatcgatgtagtctctg

SEQ ID NO: 10559 - DNA, 367 bp, Zea mays
  unsure (1)..(367): unsure at all n locations; Clone ID: LIB3061-089-Q1-N6-F10
ggggggggggggnnnnnnnnnnnnnnnnnntntnnnnnnnnnnnnctttttttttttccccttttttttttttttctctctctttctctctcctttttttctttttttttcttttttttttttttttttttcttttttttttcctttttttttttttttttttcttttttttttttttttttctttttttttcctttctttttttttttttttttctttctttttttcttttttcttccttttttttttttcttttctccttttttttttttttctttttcttttctttttttctttttttttttttttttttccctctttttttttttttttttttttttccccctctttcttctttttttttttt

SEQ ID NO: 10560 - DNA, 532 bp, Zea mays
  Clone ID: LIB3061-089-Q1-N6-F11
cacataagaatctagaaatgtactttcttatttctgggaagccacaaacatcagacaaaaaactttattattgaactataactcataagaaatctaaaagagggcaccaccaatgatgggttgttggtagaacgctgctgggtttgtcaaagcaagttggttgaatggcagcaattgttgcagttgtaagagggtgccagcgttaggcgcagcgtgctggtagaacggcaacaactgtggttgtatcaagaaggtagcagggctcacaccagctagctggctgaatggtagtagttgttgctgctgtaaataagcaggagagttcaatgctgccagttggttgaatggaagaaattgctgggggtaggcagcaggtagctggctgaatggtagttgttgttgttgcaaataagaagcagagttcaatgcagctagttggttgaatggaagaaactgctgttgctgagagtaggcagcaaggtttgctagcacaagttgttgtagttgttgtgccctgatgttttgtgccaat

SEQ ID NO: 10561 - DNA, 307 bp, Zea mays
  unsure (1)..(307): unsure at all n locations; Clone ID: LIB3061-089-Q1-N6-F12
gggggggggggggttaaaaaaaatttagaaagtctttctttttctggggagcccaaacttattcaaaaaattctttttgaagtttactctaagcatctaaaaagggccccccccaaattggtttttggttgaacgggggggggggtgtcaaaacaaggtggttgaatggcagccattgaagcaattgtaaaagggtgcccgcgttaggggcaccgtgccggttgaacggcaacaactgttgttgtgttcagaaggcgacagggcctcacatcanctagctggcttaatggggggggctggtgctgtt

SEQ ID NO: 10562 - DNA, 299 bp, Zea mays
  unsure (1)..(299): unsure at all n locations; Clone ID: LIB3061-089-Q1-N6-F3
cggggggggggggtttttttttcccccctttttggttttttaaaggggggcccccccatattttttttttgggggggggggggtggtttttttcaaatcgggggggccggggggcccaattttttttttttttgggggggggggggggggtgccccccctttttgggggggggggccccttttttttttttaaaagggggagcccgcgttttttcgctttggggggtnttggggggtttttttgtttggtgtccttctccccgggggggtttggggggccctttttttttcgggaaaaa

SEQ ID NO: 10563 - DNA, 456 bp, Zea mays
  Clone ID: LIB3061-089-Q1-N6-F4
gggaggaacagaggtttgttatttgccaacagattacacacatgattggcattccacacgcaaccgatcggtttgacgattattctcctatttattagcaccagctttttttttttagccatgtctggagtctggacttgcaagcaaccgagatcggtgattcagagatagattcatcggtttgcatgagcatgacttgttggcagccactttttttcaccaccattcaccaacgcatgttcaaagttctgcattattattgcattgcctccgcctggtgatgattgatcagtgcagcgccgtcaggacagttgacccttccaccaccttgaaagtggcaccgcagatttctttttcgtcggcggggacagcggtgaccttgtgcttggggttttcgtagcacttgagcccttcgagggcgttggagttgaagcagccttgcgggaacggcgcgag

SEQ ID NO: 10564 - DNA, 385 bp, Zea mays
  unsure (1)..(385): unsure at all n locations; Clone ID: LIB3061-089-Q1-N6-F6
agaaagtactttcttatttctgggaagccacaaacatcagacaaaaaactttattattgaactataactcataagaaatctaaaagagggcaccaccaatgatgggttgttggtagaatgctgctgggtttgtcggagggagggggttgaatggcagcaattgttgccgttgctagagggtgccagcgttaggcgcagcgtgctggttgaacggcaacaactgtggttgtgtcaagaaggtagcngggctcacaccagctngctggctgaatggtagtngttgttgctgctgtnaataagccggagagttcaatgctgtccgttggttgaatggaagaaattgctgggggttggccgcagattgctggctgaatgggtgttgttg

SEQ ID NO: 10565 - DNA, 392 bp, Zea mays
  unsure (1)..(392): unsure at all n locations; Clone ID: LIB3061-089-Q1-N6-F7
gtatctggaaatgttattttttatttttggttggcctcattcattttccaaaaaactttttgtttgaattacatctttttttcaatctaaaagagggcccccccattggggtgtggggggttggaggctgctgggtttgtcaaagcaggttggccaaagggcaacatttgttgtggttgcaagagggttgcggggttagccgcaaactgcttgtngaaaggcatcatctgttgctgtgtcaagaaggaagcgcgccttgctgcagcttgcttgctaaatggccgtngtttttgctgctgctaatccgccgcggggtttattgcggccaattggttttttggaagaagttgttgttgctgtgtgttggcctttgctcgctggctaaatggtaa

SEQ ID NO: 10566 - DNA, 526 bp, Zea mays
  Clone ID: LIB3061-089-Q1-N6-F8
gaacttaaaattagatctctaatcttttattactgagaagttgcacatatcagtatgagaactttattattacagtataaagcataaaaaaatctagaagatggcaccaccaatggtgggctgctgcaataagggggggggattcgtcaaagcaagttggttaaatggcagcaattgttgttgttgtaagaaggcgacattgtttgccacatcctgtgggtagaatggtagcaactgttgctgttgcaagaaggcgttaatgtttcccacaacctgtgggtaaaatggcagcaattgttgttgttgttgcaagaaagcagcaatgtttgccacaacttgtagatggaatggaagcaactgttgctgcagtaagaaggcagcagggctcctgacaagttggttgaatggtagtagctgttgtgcctgcaagtaagcagcagggttcaccccagctagttgattgaatggaagaaattgttgttgctggaggtaagcagcaaggttcgctgcaactacttgattgatt

SEQ ID NO: 10567 - DNA, 513 bp, Zea mays
  Clone ID: LIB3061-089-Q1-N6-F9
agaatctggaaatgtaacttcttatttctggttggccacatacatcatccaaaaaactttattattgaattacaactaataagcaatctaaaagagggcaccaccaatgatgtgttgggggggggaggctgctgggtttgtcaaagcaagttggacaaagggcaacaattgttgtagttgtaagagggttgcggggttagccgcaaactgctggtagaaaggcagcaactgttgctgtgtcaagaaggaagcacggcttgctgcagctagctggctaaatggtagtaatatttgctgctgcaaataagcagcgaggttcagtgcggccaattggttaaatggaagaagttgttgttgatgagagtaggcagtagctagctggctgaatggtaatagttgttgctgcaaataagcagcagggttcagtgtagatagttggttgaatggaagaaattgttgttgctgatagtagggagaaaggtttgccagagctacttggttgatcacaggtag

SEQ ID NO: 10568 - DNA, 556 bp, Zea mays
  Clone ID: LIB3061-089-Q1-N6-G10
aatctaaaaatgtactttcttatttctgggacgccacaaacatcatccaaaaaacttcattattgaactataactcataagcaatctaaaagagggcaccaccaatgatgggttgttggtagaacactgttgggtttgtcaaagcaagttggttgaatggcagcaattgttgcagttgtaagagggtgccagcgttaggcatagcgtgcaggtagaacggcaacaactgttgttgtgtcaagaaggcagcagggctcacatcagctagctggctgaatggtagtagttgttgctgctgtaaataagcagcagagttcaatgctgctagttggttgaatggaagaaattgctgggggtaggcagcaactagctggctgaatggtaattgttgttgcaaataagcagcagagttcaatgcagccagttggttgaatggaagaaactgatgttgctgagagtatgcagcaaggtttgctagcacaagttgttgtagttgttgtgccctgatgttttgtgccaccaaatggaccaaaggtaactgctgtaatagggctga

SEQ ID NO: 10569 - DNA, 263 bp, Zea mays
  unsure (1)..(263): unsure at all n locations; Clone ID: LIB3061-089-Q1-N6-G11
ataaaaaattttttttttttttttttttttttttttttttttttttttttttttttttttttttttttttttttttttttttttttttttttttttttttttttttttttntnnnnnttnnnntttttttgggggggggggggttttttnttggggnnttttttttaattttttttttttttttttcttttttcttttttttttccttttttggtttttttttttttttgtttttttttgtttttttttctgttctttttttt

SEQ ID NO: 10570 - DNA, 513 bp, Zea mays
  unsure (1)..(513): unsure at all n locations; Clone ID: LIB3061-089-Q1-N6-G3
agaaatgtactttcttatttctgggacgccacaaacatcatccaaaaaacttcattattgaactataactcataagcaatctaaaagagggcaccaccaatgatgggttgttggtagaacactgttgggtttgtcaaagcaagttggttgaatggcagcaattgttgcagttgtaagagggtgccagcgttaggcatagcgtgcaggtagaacggcaacaactgttgttgtgtcaagaaggcagcagggctcacatcagctagctggctgaatggtagtagttgttgctgctgtaaataagcagcagagttcaatgctgctagttggttgaatggaagaaattgctgggggtnggcagcaactagctggctgaatggtaattgttgttgcaaataagccgcagagttcaatgcagccagttggttgaatggaagaaactgttgttgctgagagtttgcagcaaggtttgctagcacaagttgttgtagttgttgtgccctgatgttttgtgcc

SEQ ID NO: 10571 - DNA, 356 bp, Zea mays
  Clone ID: LIB3061-089-Q1-N6-G4
aaaaagggcccttttttttttgggggggccccccccctcccccaaaaaactttgttttgggccctttccccttaaaaaatttaaaagaggggccccccccaattgggggtttggggaaaaacccccggggttttccaaaccaagtgggttttttggcccccttttttccctttttaaagggggcccccctttgggcccccccctcttttttacccccccccccctgggttttttcaaaaggggggcggggtcccccccccccccctggtttaaggggggtattttttcctcctttttatacccggggagtttcaacgcccccctttggttggtgggaaaaaatttttggggggggg

SEQ ID NO: 10572 - DNA, 533 bp, Zea mays
  unsure (1)..(533): unsure at all n locations; Clone ID: LIB3061-089-Q1-N6-G5
gaaaaaaaacgaaacattaaatccatcccaagcatgcaacaacagatgcccactgaactagagcagttcaagttccaacattcaccacatgttgtttactgacatctgttttctagttctgaatttattcgttcaggggtgcatgcaactgtcggctgttatttttatttctcgcaattgaggtgtcagatctgtccttgttccccaattctcgaggggggaggtgtcatttctccccttttgtctatagaagaaaaaccctgtgcgtcaattgtacgccacctgactgcaaaaactctatcttcagcttgtcgctttcctcacaaacagcttttgaacctgctccaatgtcaagaacataatcacattccaagatcccagtcttgcaaagtttggcaggaagcctttgtnaaatgccaaagggccatcattctttagcgtcttcacaaaacaatcgagagtgcttttgttggctgagtcacccatcattctcgacttaaccacatcaactggggaaccaacacaaacagcaa

SEQ ID NO: 10573 - DNA, 442 bp, Zea mays
  unsure (1)..(442): unsure at all n locations; Clone ID: LIB3061-089-Q1-N6-G6
ccaaacatcctttttccctttttttttttcctttccatttcaatggttcattcaggtcattgctcacacttgcccccttggtgatgggtgacactccgtttcttttggggggtgaacgagtgaactagctttagcccttttggtggcttgtcagcggctcccttccatttttcctcccgtccatagtttcctcagttgtngacacccccggcggctgctttgctggggcggggccctggctgctgcggcttcagtccgcacatcgccgtcagctgttgcgctccctgggccgccttctgcgccgcgggctccccctgcggctgctgctgctggtgggactgctggtcccccccctttgtcccctggtcccggtgccgcggctccccctgcctgttctggtggcngcccttttgctgcttctccttgctctttggcgggccgt

SEQ ID NO: 10574 - DNA, 206 bp, Zea mays
  Clone ID: LIB3061-089-Q1-N6-G7
aaaggggggggggggggttttggggccccccccccccccccccaaaacccttttttttggccttttccccttgggccctttaaaagaggggcccccccaaagggggggggggggggaacccctgggggttttgtccccagggggggggggggggggctcctttttttctttgtggggggggggccccctttggttttttggtcggg

SEQ ID NO: 10575 - DNA, 257 bp, Zea mays
  unsure (1)..(257): unsure at all n locations; Clone ID: LIB3061-089-Q1-N6-G9
gggtggggggtttttaaaaaatttttttttttggttttggttttgtttttttttttttgggggggggggcctgccccgggccaataaaactccgttttcgggttgccccccatttttcctttttntgggggcccccccaatttggggggggggggggggggctcttgccttggccaaaccantttgccctaagaaaaccacacacccttcctgtccggggggttttggggttgcccccggcgggccttttggggggg

SEQ ID NO: 10576 - DNA, 395 bp, Zea mays
  unsure (1)..(395): unsure at all n locations; Clone ID: LIB3061-089-Q1-N6-H2
gggggggggggggggggggggggggggggggggggggggggggggggggggngggggggggggnnnnnnnnnnnnnnnnnnggggggggggggggggnnnnnnnnngnnnnnnnnnnnnnnnnnnnnnngnggnnggggggggggggggggngggngggggggggggggggggggggggggggggggggggggggggggggggggggggggggggggggggnggggggggggggggggggggggggggggggggggggggggnnggggggggngggggggggggggggggggggggaggggggngggggggnggggggggggggggggggagggggagggggggggggggggggggggggggggggggggggggggggggggggagggggggggg

SEQ ID NO: 10577 - DNA, 523 bp, Zea mays
  unsure (1)..(523): unsure at all n locations; Clone ID: LIB3061-089-Q1-N6-H7
ggggcggggggggggggggnaaaaanaaaaaaaggtgggggggggnnnnntnnngnggggggggggggcccccccgcccgcgggggggggggggggggggggggggggcccgcnaaagaaagaacttttataaaaatattttcnnccccnnnnncnncctttggggtcccgcccggggggcncnnnggngggnncnnccncncncacccaaaaaaagaaaaaaaccccccccggggggggggggggggcgggngggggggggggggggccccgcgggggggggcggccccggggggggggccgcgcgggggggggggggcggggcgcgccgcgggggggggcgggggcggggggcctccgcccccggcgcggggggcgggggggcggggcgggccggggcgcgcggggggcgggcgggcgggggggggggggggggggcggcgggggggggggggggggggggcggggggggggggggggggggggggggggggcggcgggggggggggggcggggggggggg

SEQ ID NO: 10578 - DNA, 560 bp, Zea mays
  Clone ID: LIB3061-098-Q1-K6-A1
cagcaagcaacatagaaagtagaatccattagcaacaatagagcaacaatggcgaccaagatattttccctccttatgctccttgctctttctacatgtgttgctaacgcgacaattttccctcaatgctcacaagctcctatagcttcccttcttcccccataccttccatcaattatagcttcagtatgtgaaaacccagctcttcaaccatataggcttcaacaagcaatcgcagcaagcaacatacctttatcgcccttgttgtttcaacaatcaccagccctatctttggtgcagtcattggtacaaaccatcagggcacaacagctgcagcaactcgtgctacctgtgatcaaccaagtagctctggcaaacctttctccctactctcagcaacaacaatttcttccattcaaccaactgtctacactgaaccctgctgcttatttgcagcaacaactattaccatttagccagctagctactgcctactctcagcaacaacaacttcttccatttaaccaattggccgcactgaaccccgctgcttatttgca

SEQ ID NO: 10579 - DNA, 577 bp, Zea mays
  unsure (1)..(577): unsure at all n locations; Clone ID: LIB3061-098-Q1-K6-A11
cccacgcgttttttggnatacagtagcaaaatagcgtggcggggggggccaagatataaaacatccttatgctccttgctctttctgcatgtgttgctaacgcgaccatttttcctcaatactcacaagctcctatagctgcccttcttcccccataccttccatcaatgaccgctttagtatgtgggggctgcatggggtgcaaccctacangatccancaagcaatctcaacaagcaacttacctttatcacacctgttctttcaacaatcgccagccctatctttggtgcagtcattggtacaaaccatcagggcagaacagttgcagcaactcgtgctaccagtgatcagccaagtagctctggcaaacctttccccctactctcagcaacaacaatttcttccattcaaccaactgtctatactgaaccctgctgcttatttgcagcaacaacaactactaccatttagccagctagctactgcctactctcagcagcaacaatttctttcatttaaccaattggccgcactgaacccctctgcttatttccagcagcaaatactactacca

SEQ ID NO: 10580 - DNA, 351 bp, Zea mays
  unsure (1)..(351): unsure at all n locations; Clone ID: LIB3061-098-Q1-K6-A12
tgcacatanaagcacaatatgtaccaacatggcagccaaatattttgcctccttatgctccttggtctttctgcaagtgctgctacggcgaccattttcccgcaatgctcgcaagctcctatagcttcccttcttcccccgtacctctcaccagcggtgtcttcggtatgtgaaaacccaattcttcaaccctacaggatccaacaggcaatcacagctggcatcttacctttatcacccttgttcctccaacaatcatcagccctattacatcagttacctttggtgcatntattggcacaaaacatcagggcacaacaactacaacaacttgtgctagcaaaccttgct

SEQ ID NO: 10581 - DNA, 306 bp, Zea mays
  Clone ID: LIB3061-098-Q1-K6-A2
aggctgctgtcagtatttgcactgtcgaatttccatgataaggagcatgggaactctactggctattggcactgccaagggtttgcagttctggccaaggaggacccttgctggtggattcatccacatatataagtttgtggatgaagggaggtcacttgaacttgtgggggggaggggggtggaggaagttccttttgctttgtgccaattttcgtggcgttttcttgcttgggttggttctgtgctttgtttttttggtcttgggttttgttatttttttttttttgtgttttccttcttttt

SEQ ID NO: 10582 - DNA, 352 bp, Zea mays
  unsure (1)..(352): unsure at all n locations; Clone ID: LIB3061-098-Q1-K6-A3
acaacattgggtgccatgatattattcctgcttgcgcttgttgcgctttttgtgtgttgtcttggttggcgtgttgtgtttctcggtgttgtgttgggtttgtggttggttggttttnntnttttttggggggggggggggggntntnntttttttnttttttttttttttttttttttttttttttttnttttttttttttttttttttttgtnttttttttttttttttttttttttttttttttttttttttttttgtttttttngttttttttgttttttttttttttttttttttttttgtttttttttttttttttttttgttttgtttttgttttctttttcttt

SEQ ID NO: 10583 - DNA, 559 bp, Zea mays
  unsure (1)..(559): unsure at all n locations; Clone ID: LIB3061-098-Q1-K6-A4
ggtgccttatctgttgacgggttgtagggggaatatggcaaaaccctgaaattgggtctgaagaatgcttggaaagagggcgcgccccctaagcccgacgtgccagtcatcacaccgcaggaacttgcagaggctgacggtatcctctttgggtttccgacaagggtggggggtgtggggggtcanatnaanncnttcttntattccaccttttgtctctggagggagcagagcctcgctggctagcctgccggcttgttcttcagcactggaacccagggtggtggtctagagactacaccggtgacggtgattacccagttgacgcaccacggcatggtgtttgtgcccgtgggctacaccttcggcgccaagctgtttggcatggaccaggtccagggtggcagcccctacggcgccggcacgttttccgtcgacgggtcgaggtggcctagcgaggtggagctggagcacgccttccaccaggggaaatacttcgcgggcatcgcccagaagctcaagggctctgcttggatctgcacataccccttatcataaa

SEQ ID NO: 10584 - DNA, 589 bp, Zea mays
  unsure (1)..(589): unsure at all n locations; Clone ID: LIB3061-098-Q1-K6-A7
gtcgacccagcgttcttttgnaaaccaacaagcaacatagtaagtggggatggcgggagcaaaaatagagcaacaatggcggccaagatattttccatccttatgctccttgctctttctgcatgtgttgctaacgcgaccatttttcctcaatactcacaagctcctatagctgcccttcttcccccataccttggggagtgggcgctttagtatgtgaaaacccagcccttcaaccctacaggatccagcaagcaatcgcaacaagcaacttacctttatcacacctgttctttcaacaatcgccagccctatctttggtgcagtcattggtacaaaccatcagggcagaacagttgcagcaactcgtgctaccagtgatcagccaagtagctctggcaaacctttccccctactctcagcaacaacaatttcttccattcaaccaactgtctatactgaaccctgctgcttatttgcagcaacaacaactactaccattcagccagctagctactgcctactctcagcagcaacaatttcttccatttaaccaattggccgcactgaacccctctgcttatttcca

SEQ ID NO: 10585 - DNA, 549 bp, Zea mays
  unsure (1)..(549): unsure at all n locations; Clone ID: LIB3061-098-Q1-K6-A8
gaaacccattcttcaaccctggggggggggcggcaataaaaaatggcatgtgacctttatcacccttgttcctccaacaatcatcagccctattacagcagttacctttggtgcatttattggcacaaaacatcagggcacatcatctacaacaacttgtcctatctggggttcgcngggggctcancaacancantttcttccattcaaccaactagctgcattgaactctgcttcttatttgcaacaacaacaactaccattcagccagctatctgctgcctacccccagcaatttcttccattcaaccaactgacagcattgaactctcctgcttatttacagcagcnacaactactaccattcagccagctagctggtgtgagccctgcttccttcttgacacaaccacagttgttgccgttctaccagcacgctgcgcctaacgctggcaccctcttacaactgcaacaattgctgccattcaaccaacttgctttgacaaacccagcagtattctacccaacaacccatcattggtggtgccc

SEQ ID NO: 10586 - DNA, 596 bp, Zea mays
  Clone ID: LIB3061-098-Q1-K6-B10
gcgttcttactagtgaagtcctagcccttgttagcccaagggagccaaaattttgccctccttgccctccttgctctttcagcaagcgctgctacctcgacttttattccacaatgctcacaacaatacctctctccggtgacagccgcgggatttcaatacccaactatacaatccggacagggggcaagaggccatccaagcaagcatcttacggtcattagcattaaccctccaacaaccatatgctctattgcaacagccatccttagtgcatctgtatctccaaagaatcgcggcacaacaactacaacaacagttgctaccaacaatcaatcaagtagttgcagcgaaccttgctgcttacctccagcaacaacagtttcttccattcaatcaactagctggggtgaaccctgctatctacttgcaggcacaacagctactaccatttaaccaacttgtcgggagcccttatgccttcttactgcaacaacagcttctgccattccatctgcaagctgtggcaaacattgttgctttcttgagacaacaacatttgttgccattttacccacaagttgtgggaaacatta

SEQ ID NO: 10587 - DNA, 318 bp, Zea mays
  unsure (1)..(318): unsure at all n locations; Clone ID: LIB3061-098-Q1-K6-B11
gaacacccagcngngcaagccnanaggcnacaacaagcgcnngcggcgagcgncnnagaacaaccaanngcccaannacaacaacaanccnnggcacancnaaccanacaaaccancgcaacgcagcagcaacaagcaccgagccaccnagccgnggngaacccnancgccnacnngcaacaacagcngcnngcanccaacccacnngcnnnggcaaacgnagcngcanaccaacaacaacaacagnngcaacagnnncaaccagcgcncagncaaccagccanggngaacccnancgccnacccacaacagcaacaa

SEQ ID NO: 10588 - DNA, 575 bp, Zea mays
  unsure (1)..(575): unsure at all n locations; Clone ID: LIB3061-098-Q1-K6-B12
ccccgcgtccgaatctctgacataacagtccaaacccccgaactgctacgtctcgctgaaaatatctgcgtacctagaggtgtcggataggattctccgcctataataagtcggctgccanagcgggaaaaaaatctctgtttgtggcgtgcggaaggagtcggagggaaccgaaaactcaggggctcgaatttcctaggagcggaggcgatggctgggaagggaggaaaaggattgctcgccgcgaagacgacggcggccaagtcggcggagaaggacaaggggaagaaggcccccatctcacggtcctcccgcgcgggcctccagtttcctgttggacgaatccaccgtcagctgaagcaaaggactcaggcaaatggccgcgttggtgccactgcagccgtctactctgccgccatcctggagtacttgactgccgaggttctggagctggctgggaacgctagcaaggatctgaaggtgaagcgtatcacccctcgccacctacagttggccattcgcggagacgaggagctggacaccctcatcaagggcaccatcgcaggtggaggtgt

SEQ ID NO: 10589 - DNA, 517 bp, Zea mays
  Clone ID: LIB3061-098-Q1-K6-B2
gcaagggtccaggtcgccgcgacaacgggaccacggtgttcgacgacgtgctccgtgcggggcagctgctcatcgtaccccagggctacctcgtcgccaccaaggcgcagggagaaggcttccagtacatcgccttcgagacgaaccctgacaccatggtcagccacgtcgccgggaagaactccgtcctgagcgacttgccggccgccgtcatcgccagctcgtatgccatctccatggaggaagctgcagagctcaagaacggtaggaagcatgagctggctgtgcttactcctgctggcagtggcagctaccaacaaggtcaagctggcagcgcccaacagtaggcacaacctcagagtgatctgcctgaataagtactcgtagactgtaataattaaacaaagcttgctcatggttaaactgcgtgttgattagtctttcaactacatagctctaaagtttttgatacaccgagtgatttgccaggaaaaaaagagcagattgttgtaagcaa

SEQ ID NO: 10590 - DNA, 442 bp, Zea mays
  unsure (1)..(442): unsure at all n locations; Clone ID: LIB3061-098-Q1-K6-B6
tcggggggctttctgcaagtgctgctaccgcgaccattttcccgcatgctcgcagctccttagcttcccttttcccccgtcctctcaccacttgtcttcgttctaatttggggggggggggtacannatccaacanncaatcacanctttcttcttacctttatcacccttnttcctccaacaatcatcatccctattacatcatttccctttnntgcatttattggctcataacatcttggctcatcatctacaacaacttgtgcttgcaaaccttgctgcctactctcagcaacagcagtttcttccattcaaccaactagctgcattgaactctgctttttatttgcaacaacaacaactaccattcagccagctacctgctgcctacccccagcaatttcttccattcaacccactggcagcattgaactctcctgct

SEQ ID NO: 10591 - DNA, 273 bp, Zea mays
  Clone ID: LIB3061-098-Q1-K6-B8
ttgctcttgctttctacttcgtagctcttctgtggtgtcacctgatttcatttcactgtcctgcctttttcttcttccttactgccaatcccctgcttttccccttcttaatctccttgctttcctccccctttcccccgcttccttttttttgttgtagccccctcctttcccccctttcccccgtttctctccctgtttttctttttcgtcgcaccctgttctcccccctttcctccccctcttcttcttttctctttccccctttctccc

SEQ ID NO: 10592 - DNA, 541 bp, Zea mays
  unsure (1)..(541): unsure at all n locations; Clone ID: LIB3061-098-Q1-K6-B9
aaaaaaaagatgtgtaatatggcaattgtactaaatatagtaaagaaatcaaaataatctttagatcaatctaagatttcgattcccagtaaaaaaaaaagaatataatagaaaaattgggacaaaaaataattggggggggtggggggcttnntacaacccaaaatcaccattccttttggttcgcacaaccaaaaaattttctgaaggtctacaggaagataaaaaaatacggaattgtatcaagaactatatacaaaagaataggaaaaaaggctcgaatagaaaaatggaatcagactcaagttctgaagtaattacacatatagaaattcaaaaagaaatcgatacaatccacgtcataatccatattggattccccaacttattaaagaaaaagggagcaatcgaagaattagagaaagatctccaaaaggaagttaattctgtaaaccagagacttaatattgctatcgaaaaggttaaagaaccttatagacaacctaatattcttgcggaatatatagctttccaattaaaa

SEQ ID NO: 10593 - DNA, 149 bp, Zea mays
  Clone ID: LIB3061-098-Q1-K6-C1
cccacgcgtttctgtctttctgcaagtgctgctacgggttgcatggggcccgcaatgcataacaagctcctatagcgttcccttcttcccccgtacctgtcaccagcggtgtcttgggtgtgtgaaaacccaattgttgaaccctacag

SEQ ID NO: 10594 - DNA, 598 bp, Zea mays
  Clone ID: LIB3061-098-Q1-K6-C10
cgacccagcgttttgcgccagcttgctcgcgctctctttggaggtggtacgctaaagcaagtctagtctctagaggaggaggcggagggggaggccatgggcaaggacgacgtggtccagagcggcgcgggcggcggggagttcgccgccaaggactacacggacccgccgccggcgccgctggtggacggttctggactgggttcgtggtcgctgtaccgcgcggtgatcgcggagttcatcgcgacgctgctgttcctgtacgtgacggtggcgacggtgatagggtacaagcaccagacggacgcgtcggcgtcgggggccacggccgacgcggcgtgcggcggcgtgggcgtgctgggcatcgcgtgggccttcggcggcatgatcttcgtgctggtctactgcaccgccggcatctcggggggccacatcaacccggccgtcaccttcggcctcttcctggcgcgcaaggtgtcgctggtgcgcgcgctgctgtacatggtggcgcagtgcctcggcgccgtctgcggcgtcggcctcgtcaaggcgttccagagcgcctacttcgaccggtacggcggcggcgccaactcgc

SEQ ID NO: 10595 - DNA, 592 bp, Zea mays
  unsure (1)..(592): unsure at all n locations; Clone ID: LIB3061-098-Q1-K6-C11
tctggggcgcagnagcttgctggcttgctggctacctagctcgtcggggccctatggagatccagcaccaccgggggctgggcaactccaaggttgtcaaggtgcagagcgaggaggcgtgggatctgttcaccgatcaagcgagcaacgaaggccggcccgttgttgcccatttcggggggtgatggggcgtgacgtccctgtccatgaactacaagtttgaggagctggcgcagacccaccccgaggtcttgttcctctacgtggacgtcgacgatgtccagagtgtttcatccaggtacggagtgaaggccatgccgacgttcttcctcatcaagagcaaggaggtggtggggaagatcgtcggggcgaacccagacgaggtgaagaagctggtggatgcttccgccgagcccttggagactcagatagtcgtggagtagtagtcgtttcagactttttttttgaagagtcgttcgtgtcttccgaaactgctccgcgagactgtgcgaccgtgagtgcttcttggtcagggtctggatcgtcccggactgtccagtgtcgcccgtgtgtgtgcgcgtgtgatgggttt

SEQ ID NO: 10596 - DNA, 588 bp, Zea mays
  Clone ID: LIB3061-098-Q1-K6-C12
agaatacctattattttggcaaaagaacttcattatatatacatgtatatagtgtatatgcatagatagaaaatgaatcaaataaataaaggaattatgttaatttggaccaaaatatctccttcctatttctcatacctaactaacctaatagtttgtcgtggaccatgaggcccaacagagcgacaaagcccacctcagcacctcacgacaaaaaaaatccccaaaccctattgtagtcgcaccatggcagagtcattagatgggccaactaccaagtcgtggtcacgtcttacaaccccacatgccatggagacaccagcacctccgttgcgccattgtggctccgcagcacagctacgtacctagacttgaccggctaactgtcattgtgttgcatctagcctcgtttttgcatcgtctgtcgtccgtcgtccgaggcttcaatccaccatagtcaggcgtgtcaccgcgtgccaggacagacaaccaggtggcaaggtcccatcgagccgatgtccaagcccacctaacctgtggccacccgaccttacctcccctgatttgctgcttgcagtactggaatgt

SEQ ID NO: 10597 - DNA, 570 bp, Zea mays
  Clone ID: LIB3061-098-Q1-K6-C2
cgacccagcgttctgtactagcacatactagtgaagtgtggagcaacatcttagcaccaatggcagccaagatttttgccatccttgccctccttgctctttcagcaagcgttgctaccgcgactattattccacaatgctcacaacaatacctctctccggtgacagccgcgagatttgaataccggggggggggggcctacaggctacaagaggccatcgcagcaagcatcttacggtcgttagcattgaccgtccaacaaccatatgccctattgcaacaaccatccttaatgaatctatatctccaaagaatcgcagcacaacaactacaacaacagttgcttccaacaatcaatcaagtagttgcagcgaaccttgctgcttacctccagcaacaacaatttcttccattcaatcaactagctggggtgaaccctgctgcttacttgcaggcacaacagctactaccattcaaccaacttgtcaggagccctgctgccttcttactgcagcaacagttgcttccattccatctacaagttgtggcaaacattgctgctttcttgc

SEQ ID NO: 10598 - DNA, 640 bp, Zea mays
  unsure (1)..(640): unsure at all n locations; Clone ID: LIB3061-098-Q1-K6-C3
tgctnncttggtttttgtttttttgtggtgcttttgtttttttttttttttttttgtgtgtggtgggtgttttttcttttttttttttgtttttttttttttntnttttttttttttttgggggtttgtttggggggttttttttttttnttttntttttttttttttttttttttttttttttatttnttccccttttttttttttttttttnnnttttttttttttttttttttttttttttttttttttttttttnttttttttttttttttttttttttttttttttttttttttttttttttttttttttttttttttttttttttttttttntttttttttttttttttttttttttttttttttccntttttccttttttnttttttttnnttttttttttatttctcttttttttttttntttttttttttttctttctttttttcttttttttttttttttttttttttttttttnnttttttttntttttttttttttttttttttttttttttttatttttttttttttatttttttttttttntaacctcttctctctctcctccttttttttttttgtttttttttctctgtttttttttttgtcccctctttctcctcccctcccc

SEQ ID NO: 10599 - DNA, 581 bp, Zea mays
  unsure (1)..(581): unsure at all n locations; Clone ID: LIB3061-098-Q1-K6-C4
gctgattggatactgcttagtagatgagcaccgactgctagtatacgagttcatgccccgtggngaacatgngaaaaccatctgtttaggagaggctcatacttccaacctctgtcatggaaccttagaatgaaggttgcactgggagcagcaaaaggactagcttaccttcatagggggggagggggaggttatttaccgagattttaagacttcgaacattctccttgacacagattattctgcgaagctttctgattttggattggctaaggatggtcctgtcggtgagaagagccatgtgtccacaagagttatgggaacatatggttatgcagctcctgagtatctttcaacaggtcacctaactgcaaagagcgacatctatagctttggggtagtgcttctggagatgctgtcaggccgccgcgccatcgacaagaaccgtccccagggtgagcacaatctcgtggagtgggctcgaccttacctcacacataagcgcaagatattccggatcctggatacgaggctggaaggtcaatacaatctgaacggtgcacaaacaattgctgcccttg

SEQ ID NO: 10600 - DNA, 500 bp, Zea mays
  unsure (1)..(500): unsure at all n locations; Clone ID: LIB3061-098-Q1-K6-C6
cagtgcagcccgtacggcgacgccctactgctcgcctcagtgccagtcgttgcggcagcagtgttgccagcagctcaggcaggtggagccgcagcaccggtaccaggcgatcttcggcttggtcctccagtccatcctgcagcagcagccgcaaagcggccaggtcgcggggctgttggcggcgcanatagcgcggggggggacggcgatgtgcggcctgcagcagccgactccatgcccctacgctgctgccggcggtgtcccccactgaagaaactatgtgctgtagtatagccgctggctagctagctagttgagtcatttagcggcgatgattgagtaataatgtgtcacgcatcaccatgggtggcagtgtcagtgtgagcaatgacctgaatgaacaattgaaatgaaaagaaaaaaagtactccatctgttcctaaaaaaaactaaaaaagaaactagggaaagaaaaaagaaaccagaaatttctgctgtta

SEQ ID NO: 10601 - DNA, 575 bp, Zea mays
  unsure (1)..(575): unsure at all n locations; Clone ID: LIB3061-098-Q1-K6-C7
gcagntctcaccttagttgcctgctgggggtgggctccctccgcagcgtcagatcggccgtcgctcgccgagccctagcgccgccgatctcagcccgtaccagtcttgcagatcggggtcgcgccgcggcggcaagaacgatggccgaggaggccaagtacctggagactgcgcggggcggcggggccgtgtggctcatgaagtgccccccggtcgtctcccgcgcctggcaggccgcctccgcctccgcctcttcctccgacgccgctaacgccaaccccgttgtcgccaaggtcgtccattccctcgacctgctccgcccagaagaacgccccgaagagcgcccggaagagcccacgctccagttcaagatggagttggcacaaactaacactgggaatacacctaagagctactctttgaatatgttcaaagatttcgtgcctatgtgtgttttctccgaatctaaccaagggaaactttcatgcgaaggaaaagtcgagcataaatttgacatggaacctcacagtgataatttggcgaactatgggaagttatgtcgtgaaagaacacaa

SEQ ID NO: 10602 - DNA, 548 bp, Zea mays
  Clone ID: LIB3061-098-Q1-K6-C8
caccaagcgaagcgcctagcgacgacctaacaacaatggctaccaagatattagccctccttgcgcttcttgccctttttgtgagcgcaacaaatgcgttcattattccacaatgctcacttgctcctagtgccattattccacagttcctcccaccagttacttgaggttgcggggaacacctagctgtgcaagccaacatgcaacaacaagcgcttgcggcgagcgtcttacaacaaccaattgcccaattgcaacaacaatccttgccacatctaacaatacaagccatcacaacgcaacagcaacaacagttcctaccagcactgagccacctagccatggtgaaccctgccgcctacttgcaagagcagctgcttgcatccaacccacttgctctggcgaacgtagttgcaaaccagcaacaacaacagctacaacagtttctgccaacgctcagtcaactagccatggtgaaccctgccgcctacgtacaacaacaacaactgctttcatctagcccgctcgctgtgggcaatgcacctaca

SEQ ID NO: 10603 - DNA, 577 bp, Zea mays
  Clone ID: LIB3061-098-Q1-K6-C9
acacctagcgaacgcactggcggcgacctaacaacaatggcttccaagacttatccctccttgcgcttcttgccctttttgtgagtgcaacaaatgcgttcattattccacaatgctcacttgctccgagtgccattattccacagttcctccctccagttacttcgggtggctggggacacccagctgtgcaagcctataggctacaacaagcgcttgcggcgagcgtcttagaacaaccaattgcccaattacaatcaacaatccttggcacatctaaccatacaaaccatcgcaacgcagcagcaacaagcactgagccacctagccgtggtgaaccctatcgcctacttgcaacaacagctgcttgcatccaacccacttgctttggcaaacgtagctgcataccaacaacaacaacagttgcaacagtttctaccagcgctcagtcaactagccatggtgaaccctatcgcctacctacaacagcaacaacttctttcatctagcccgctcgctatgggcaatgcacctacatacctgcaacaacagttgttgcaacaacagttgctgcaac

SEQ ID NO: 10604 - DNA, 570 bp, Zea mays
  Clone ID: LIB3061-098-Q1-K6-D1
cccagcgtccgaatattttgagcattcagaaacacaccaagcgaagcgcactagcaacgacctaacaacaatggctaccaagatattagccctccttgcgcttcttgccctttttgtgagcgcaacaaatgcgttcattattccacaatgctcacttgctcctagtgccattattccacaggtcctcccaccagttacttcaatgggcttcgaacacctagctgtgcaagccaacatgcaacaacaagcgcttgcggcgagcgtcttacaacaaccaattgcccaattgcaacaacaatccttgccacatctaacaatacaagccatcacaacgcaacagcaacaacagttcctaccagcactgagccacctagccatggtgaaccctgccgcctacttgcaagagcagctgcttgcatccaacccacttgctctggcgaacgtagttgcaaaccagcaacaacaacagctacaacagtttctgccaacgctcagtcaactagccatggtgaaccctgccgcctacgtacaacaacaacaactgctttcatctagcccgctcgctgtggg

SEQ ID NO: 10605 - DNA, 589 bp, Zea mays
  unsure (1)..(589): unsure at all n locations; Clone ID: LIB3061-098-Q1-K6-D11
gcgttctggaacggagccaaccagnagatgccctggcacgnatcgaaaactttcggaagtaaacccgatgcttggcttccgtggctgcaggcttggtatatcgtaccctgagctaacagaaatgcaaggccgtgccatctttgaagctgctataacgatgaccaaccagggcgttcaagtcgttcganagataatggttcctcttgttggaacaccgcaggaattgggacatcaggtggcccttatccgtcaagtcgctaacaaagttttcaccagtatgggtaaaactattgggtacaagatcgggacgatgattgagattcccagggcagctctagtggctgacgagatcgcggagcaggctgaattcttctcctttggaacgaacgacctcacgcagatgacctttggctacagcagggatgatgtggggaagttcatccccatttatctggctcagggcatcctccagcatgaccccttcgaggttctcgaccagagaggagtgggcgagctggttaagcttgctacagagaggggccgcaaagctaggcctaacttgaaggtgggcatttgtggagaacatggt

SEQ ID NO: 10606 - DNA, 574 bp, Zea mays
  unsure (1)..(574): unsure at all n locations; Clone ID: LIB3061-098-Q1-K6-D12
agtggaatccagtggcgacaacaggagcacaatggcgaccaagnaattttccctccttatgctccttgctctttctgcatgtgttgctaacgcgacaattttccctcaatgctcacaagctcctatagcttcccttcttcccccaaccttccacaagatggggcagaggggaaaacccagctcttcagccctataggctccaacaagcaatcgcagcaagcaacatacctttatcacccttgttgtttcaacaatcgccagccctatctttggtgcagtcattggtacaaaccatcagggcacagcagctgcagcaactcgtgctacctgtgatcaaccaagtagctctggcaaacctttctccctactctcagcaacaacaatttcttccattcaaccaactgtctacactgaaccctgctgcttatttgcagcaacaactattaccattcagccagctagctactgcctactctcagcaacaacaacttcttccatttaaccaattggccgcactgaaccccgctgcttatttgcagcagcaaatactactaccatttagccagctagctgc

SEQ ID NO: 10607 - DNA, 576 bp, Zea mays
  unsure (1)..(576): unsure at all n locations; Clone ID: LIB3061-098-Q1-K6-D3
cgacccagcgtcctttgctctttccatccttggctttggagggtgggtcttgatgcgcactcattatagatcagatgtgaaccattctgatcaagcacttgagattgcatctgatcgtgtctattacatttttcagactctatatgactgcgaggaagtattagctacatatcgtgaagagggtatttgtggggggggggggtntcgagagcaaaatctgattgataagcaccattcagaattcttgaaatatatgtcgaatgatcttaaaaccacagatgttctggatcgttgcttcatggagctgctgaaggccataaacagcagtttgaatgatttgaagaaactgcaacagaaaatagaacagcaaaagaagaaacagcaacagcagaagaagcagcaacagaagcaacagcaattgcaaaaacagccagaacattatattcaagctctgattgcactggaaatagaacttaaaaataaactgtctatacttggtctgatgccatcttcatctttggcagaggtactgaagcaattgaaggacaaagcactaaagagagcggggctgactga

SEQ ID NO: 10608 - DNA, 555 bp, Zea mays
  unsure (1)..(555): unsure at all n locations; Clone ID: LIB3061-098-Q1-K6-D4
tctctctgcagcaacccccattccgggggggggggggctcgtcgacactgaggctgtggaggccagcggcgcagcgcaacatgcgcaatcagtggtcccatctgagcgccgccaaggagcagtggctggccgccgttgctgacggccgtgcccacgcctccgcgctcgtcaacggggggggggggggggggaacatgccnactatngatttgggggtgctcaaggatatgccggggatccgcgataaggcgaactccaagttggcgcttagagaggagcaatacagcggcatgcttctgtcggcctacaaggagatggtccgtcagctgtcctacttggttgaagcttcccattctatgcgccgtttttctaaagcggctccaaattgccccatcacacagttttctgaccgccaagataatttgaatgattcatgggatggtggaggagccccagtattcaaatggttctctgtattagaatttgagagtcttgcccaggagcttgttcagatgtttgtttcagagcaaaagttgaagaggctgctactttttg

SEQ ID NO: 10609 - DNA, 582 bp, Zea mays
  unsure (1)..(582): unsure at all n locations; Clone ID: LIB3061-098-Q1-K6-D5
tcgggtaaaggaaattttggagttgggagaaggaagangtacaagttgcagggatggtttgcctgaaggttcaaaacatgagnaaaactgaggcatcctcacattcagatggcacgactgaagatgccacagacagccatacattgtttactaaattgaagtcaacaatctcatctgcttcacgggggggatccggtgcgtttgcaaagttgaaggacacaaaagtctcaactttagctaagcagggatatgaaatcgtcaaggatgaattaagctctaactctagcagaaagaaaaaacaccaagctaggcatgcttctgctaaagtagaaaagagtacaagaaccgatttagttcttacgccaacaaaaaagacagtattgggtgaaaaatgggaagaatttaagaataagatccgaggtcacccggtctacagaagagtggatgaatacaccaagcctgttgtaaccaagggacaagaggtagctgaagatgtcagggaaagatgggagacaagtgacaatccagtggttcagaaaattcaagacttgaatgaatctttgcttgaagaaacctcagctg

SEQ ID NO: 10610 - DNA, 573 bp, Zea mays
  Clone ID: LIB3061-098-Q1-K6-D6
ccgaacggcggcgatggcggcggagaagccggctcccgtgcgcgtgctctactgcggcgtctgcggcctcccggccgagtactgcgagttcggccccgacttcgagcgctgcaagccctggctgcgcgcgcatgcgcccggcgtctaccccgacgaccttgtcgccgcctcctggggggggtgcggcggcggcgacaaggacgtcgacagggtcggggatcgcctccagggcgtcgggatctccgacggctccaccagcgccgcaggggatgcttccgcgtctaagccccaagaggcgaaacgcctgcctggtggtaagctcaagaaaaaggagaagcaagaagtggtcattgagaagattgtccgtaacaagcgcaaatgtgttactgtggtgaaggggcttgaattgtttggtgtaaagcttagtgatgcttcgaagaagcttgggaagaagtttgcaaccggagcttctgttgttaagggccctacggagaaggagcaaatcgacgtacaaggggacatctcatatgatattgtggagttcattacagatacatggcctgatgtacctga

SEQ ID NO: 10611 - DNA, 567 bp, Zea mays
  Clone ID: LIB3061-098-Q1-K6-D7
cccggtcgacccagcgtccgcgaccatcgaggggcggtgcacgtgggctgcatccgtcattgtcatcggcggtggcatctcgggcgttgcagctgcccgtgccctctccaattcttcatttaaggtgactgttttggaatcgagagatcgtattggcgggcgcattcatactgataactcgtttggatgcccaattgatgggggagcctcatggctacacggcgtgtgcaatgagaatccactggcaccattgataagctatcttgggctgaggttataccgcacaagcgatgataactcagttctgtatgatcatgatttagaaagctatgctctctttgataaggatggtaatcaggtcccaaaggagacagtcgataaagttggagaaacattcgagagaattcttgaagagacggtgaaagtgcgcgatgagcaggaacacgacatgccactgctacaggcaatttctattgtgtttgagaggcacccccatctaaagcttgaagggctagatgatcaggtcttacaatggtgtgtctgccggcttgaggcatggtttgctgc

SEQ ID NO: 10612 - DNA, 606 bp, Zea mays
  Clone ID: LIB3061-098-Q1-K6-D8
ccgggtccaactcagcaacatattaagcacaatagtgtaccaacaatggcggggaaaaattttgcctacttatgctccttggtctttctgcaagtgctgctacggcgaccattttcccgcaatgctcgcaagctcctatagcttcccttcttcccccgtacctctcaccagcggtgtcttcggtatgtgaaaacccagtggtgcaggggtacaggatccaacaggcaatcgcagctggcatcttacctttatcacccttgttcctccaacaatcatcagccctattacaacagttacctttggtgcatttattggcacaaaacatcagggcacaacaactacaacaacttgtgctagcaaaccttgctgcctactctcagcaacagcagtttcttccattcaaccaactaggttcattgaactctgcttcttatttgcaacaacaacaactaccattcagccagctacctgctgcctacccccagcaatttcttccattcaaccaactagcagcattgaactctcctgcttatttacagcagcaacaactactaccattcagccagctagctggtgtgagccctgctaccttcttgacacaaccac

SEQ ID NO: 10613 - DNA, 588 bp, Zea mays
  unsure (1)..(588): unsure at all n locations; Clone ID: LIB3061-098-Q1-K6-D9
caactagcaacatanaagcacaatagtgtaccaacaatggcagccaaaatattttgcctccttatgctccttggtctttctgcaagtgctgctacggcgaccattttcccgcaatgctcgcaagctcctatagcttcccttcttcccccgtacctctcaccagcggtgtcttcggtgtggggaaacccaattcttcaaccctacaggatccaacaggcaatcacagctggcatcttacctttatcacccttgttcctccaacaatcatcagccctattacatcagttacctttggtgcatttattggcacaaaacatcagggcacaacaactacaacaacttgtgctagcaaaccttgctgcctactctcagcaacagcagtttcttccattcaaccaactagctgcattgaactctgcttcttatttgcaacaacaacaactaccattcagccagctacctgctgcctacccccagcaatttcttccattcaaccaactggcagcattgaactctcctgcttatttacagcagcaacaactactaccattcagccagctagctggtgtgagccctgctaccttcttg

SEQ ID NO: 10614 - DNA, 561 bp, Zea mays
  unsure (1)..(561): unsure at all n locations; Clone ID: LIB3061-098-Q1-K6-E1
caacataggaaagcacaatagtgtaccaacaatggcagccaaaaattttgcctccttatgctccttggtctttctgcaagtgctgctacggcgaccattttcccgcaatgctcgcaagctcctatagcttcccttcttcccccgtacctctcaccagcggtgtcttcggtntgtgagaggcgggttcttcaaccctacaggatccaacaggcaatcgcagctggcatactacctccatcacccttgttcctccaacaatcatcagccctattacaacagttacctttggtgcattcattggcacaaaacatcagggcacaacaactacaacaacttgtgctaccaaaccttgctgcctactctcagcaacagcagttacttccattcaaccaactaagttcattgaactctgcttactatttgcaacaacaacaactaccattcatccagctacctgctgcctacccccagcaatttcttccattcatccaactagcaacattgaactctcctgcttatttacagcaacaacaactactaccattcatccagctagctggt

SEQ ID NO: 10615 - DNA, 594 bp, Zea mays
  Clone ID: LIB3061-098-Q1-K6-E10
tttttgagcattcagaaacacaccaagcggagcacattagcaacaacctaacaacaatggctaccaagatattatccctccttgcgcttcttgcgctttttgcgagcgcaacaaatgcgttcattattccacaatgctcacttgctccaagttccattattacacagttcctcccaccgggtgcgggaatgggcttcgaacacccagctgtgcaagcctataggctacaacaagcaattgcggcgagcgtcttacaacaaccaatttcccagttgcaacaacaatccttggcacatctaacaatacaaaccatcgcaacgcaacagcaacaacaattcctaccagcactgagccacctagccatggtgaaccctgccgcctacttgcaacagcagttgcttgcatcaaacccacttgctctggcaaacgtagttgcaaaccagccacaacaacagctgcaacagtttctgccagcgctcagtcaactagccatggtgaaccctgccgcctacctacaacagcaacaactgctttcatctagcccgctcgctgtggccaatgcacctacatacctgcaacaacaattgttgcaac

SEQ ID NO: 10616 - DNA, 586 bp, Zea mays
  Clone ID: LIB3061-098-Q1-K6-E11
tacaacaaccaattaaccaattgcggcggggtgcttggcacatctaaccatacaaaccatcgcaacacaacagcaacaacagttcctaccagcactgagccaactagatgtggtgaaccctgtcgcctacttgcaacagcaggtgcttgcatccaacccacttgctctggcaaacggatcggcaggccaacaacaacaacaattgcaacagtttctgccagcgctcagtcaactagccatggtgaaccctgccgcctacctacaacagcaacaactgctttcatctagccctctcgttgtgggtaatgcacctacatacctgcaacaacaattgctgcaacagattgtaccagctctgactcagctagctgtggcaaaccctgctgcctacttgcaacagctgcttccattcaaccaactgactgtgtcgaactctgctgcgtacctacaacagcgacaacagttacttaatccactagcagtgcctaacccattggtcactgccttcctacagcagcaacaattgctaccatacagccagttctctttgatgaaccctgccttgtcgtggcagcaacccatcgtt

SEQ ID NO: 10617 - DNA, 571 bp, Zea mays
  unsure (1)..(571): unsure at all n locations; Clone ID: LIB3061-098-Q1-K6-E2
cttctgcttgctctgggggggtggtgggggggngnagcgagaaaagagagagagatctagtagagaggctagtaggtggtcctcgaacgaagatgttggcggtgttcagcgggcaggtggtggaggtgccggcggagctggtggcgttgggcagncggactccttcttctttgggggagtggggggggtnntnnntctctttctgtctcttttctaactaaacaaatacgttcagtttggtgaccatggtcactttgnttattgttatattaactaggcggtgttttgacttaggtcttttttgtgcatagactaggtgttntgtctgttttaaggggtgctggacaacctgggttgggtgagccagaagcactggctgttaagcaagggtgccaacgaggtggttttggttatcgagggctacaagacgctgtgcgattgggcgccctacccggccagctttatgctttgtcaggtcaactggtcctacgccttagttttttttgacgaagttcaccaactcccttcttgttggaattgtacctttaggcagggttgcctctctttttgg

SEQ ID NO: 10618 - DNA, 577 bp, Zea mays
  unsure (1)..(577): unsure at all n locations; Clone ID: LIB3061-098-Q1-K6-E5
ttgcagaatcaggnagcttacctccgtggtgcagaagagttcaactaacctgagatggcgtcgagctttacgccgagaaggtcgtcaaccgtgggctctgtgccatcgcgcaggccgagtccctccgttacaagctcctcggaggccttgccgtccgcagggcttgctatggtggtgggtggtggggttatgganagtggtgccaagggttgtgaggtgattgtgagtggaaagctcagggcccaaagagccaagtccatgaagttcaaggatggctacatgatctcatctggtcagccagtgaacgagtacattgactcggctgtgagacacgttcttctcagacagggtgttctcggtatcaaggtgaagatcatgcttgactgggacccgaagggcaaggttggcccgatcactcctcttccggacctggtgaccatccacaccccgaaggacgaggacgagccgagccctccggtcttggcacctcctgaggtgtaaggtcccaactgtgtccttgaaatggcagtttgatcgggtcctagataggtttctatcttacgataaggacaatgct

SEQ ID NO: 10619 - DNA, 275 bp, Zea mays
  unsure (1)..(275): unsure at all n locations; Clone ID: LIB3061-098-Q1-K6-E7
gccgtccccacccggccttcttcagggcgtggggacgagacctccgtagagctagctagctacctgcctctttcagttcgtcagtgcaaattaagcaccaaatgtcgaccgatgcctctgaataaatttaactgcgaggctagctgctgaacatcgatctgctagtattactacgggggncgtctgggacagcgctcagttcggaatgtatgtataatctgaacgccaagtttaattttatgttacttctaccgattaaactgttaaaccctagt

SEQ ID NO: 10620 - DNA, 565 bp, Zea mays
  unsure (1)..(565): unsure at all n locations; Clone ID: LIB3061-098-Q1-K6-E8
gtcatcgagtattgcaacaagcacgcggagcgcgaccgggccgggcgacgcggccggcaccaccaacggtccgccgaggatgagctcaacatcttcgacgcagacttcgtcaatgtagagcactccaccctcttggacctcatcctggctgcaaactacctggacatcaaggggctgggtagacgggcccnccaaaccattacagacttgatcaatgggaagatgcctgaggaggtctgcaagaccaacatcaagaacgacttgaccatcccttccacgtcggccttggccaccacaatgccctcctccgagcgaaagcagatggaggccaggtttatcgcctatatgcaagaaactgctgaggagaggatgactgggtttgctgttcgtggtgaaaaatacagaaagcatggtgaacgtccgccacaaccaccattggagatagttaaatacccagctcttttggaaagagcttggggatgggattcgatactgccgtactgtcctgtgaattcttggcccctatacaagacttacctccaagaatattatgagcgcaattctc

SEQ ID NO: 10621 - DNA, 586 bp, Zea mays
  Clone ID: LIB3061-098-Q1-K6-F10
tccagaatcagcaagcggcagtgcgtaggggggatcgtcgaacaaaacagcatgaagatggtcatcgttctcgtcgtgtgcctggctctgtcagctgccagcgcctctgcaatgcagatgccctgcccctgcgcggggctgcagggcttgtacggcgctggcgccggcctgacgacgatgaggggcgccggcgggctgtacccctacgcggagtacctgaggcagccgcagtgcagcccgctggcggcggcgccctactacgccgggtgtgggcagacgagcgccatgtaccagccgctccggcaacagtgctgccagcagcagatgaggatgatggacgtgcagtccgtcgcgcagcagctgcagatgatgatgcagcttgagcgtgccgctgccgccagcagcagcctgtacgagccagctctgatgcagcagcagcagcagctgctggcagcccagggtctcaaccccatggccatgatgatggcgcagaacatgccggccatgggtggactctaccagtaccagtaccagctgcccagctaccgcaccaacccctgtggcgtctccgctgccattccgccct

SEQ ID NO: 10622 - DNA, 574 bp, Zea mays
  Clone ID: LIB3061-098-Q1-K6-F11
ccggtcgacccagcgttcttccagcgtccggcgtgagtgggatgagcgaactcaatcctggaaagcggactcatggctatgaccgtgttaatgatgacaaagacattccaatcattgaagccaaattgactgatgagcctggtgttgatccatttgcgcaaagaagggatgagaagaagaagaggttgaaaaggggaagaagggactggataacttaaagaaagctgcaaaggttggcgctttgccaagtcatatacagcttgctgcgaaggcgttgcccatcacaggaacaaaagctgaccttccaaaaaaatctagaaaagaggatcttgagagtgttgtcggcatggcttcatcagcaacagcaagtggtgggaagtttgatgagaagttgcctggcgagaaacctccaaagcaccctggcaaacacagaaagttcctcccagttgccgaagggaagggaatgggcagcctggagaaacagcagaatgacaaaatcctgaactctctacttgccagaaactctgatgaaccacttgatgtcggcaaggcaattacaatgtacaaggtgaaa

SEQ ID NO: 10623 - DNA, 570 bp, Zea mays
  unsure (1)..(570): unsure at all n locations; Clone ID: LIB3061-098-Q1-K6-F2
gcagcttctgcttgctctggggggtaggagagagagagagcgagagagagagagagatctagtagagaggctagtaggtggtcctcgacgaanagttggcggtgttcagcgggcaggtggtggaggtgccggcggagctggtggcggcgggcagccggacgccgtcgcccaagacgaggggggcgcagctcgtggggcgcttcctggccgcgtccgagccggccgtgtccgtgcagctcggcgaccacggccacctcgcctactcccacaccaaccaggcgctcctccgccccaggtcgttcgcggccaaggacgaggtgttctgcctgttcgaaggggtgctggacaacctgggtcggctgagccagcagcacgggctgtcaagcaagggcgccaacgaggtgctcctcgtcatcgaggcctacaagacgctgcgcgaccgcgcgccctacccggccagcttcatgctcgcccagctcaccggctcctacgccttcgtcctcttcgacaagtccaccaactccctgctcgtcgcatctgaccccgagggcagggtgccgctcttctggg

SEQ ID NO: 10624 - DNA, 500 bp, Zea mays
  unsure (1)..(500): unsure at all n locations; Clone ID: LIB3061-098-Q1-K6-F4
aagcggcggctgcggctgccagccaccgccgccggttcatctaccgccgccggtgcatctgccacctccggttcacctgccacctccggtgcatctcccaccncctgggggggggggggggggggtccacctnccaccnnccnntccatntaccacacaccaattcatctgcctccgccaccatgccactaccctactcaaccgccccggcctcagcctcatccccagccacacccatgcccgtgccaacagccgcatccaagcccgtgccagctgcagggaacctgcggcgttggcagcaccccgatcctgggccagtgcgtcgagtttctgaggcatcagtgcagcccgacggcgacgccctactgctcgcctcagtgccagtcgttgcggcagcagtgttgccagcagctcaggcaggtggagccgcaccaccggtaccaggcgatcttcggcttggtccctccattccatcctgcaacagcagccgcaaagcggcc

SEQ ID NO: 10625 - DNA, 213 bp, Zea mays
  Clone ID: LIB3061-098-Q1-K6-F6
ggggtaggcagcaggtagctggctgggtggtggttgttgttgttgcaaataagaagcagagttcaaccaacttgctttgacaaacccagcagcgttctaccaacaacccatcattggtggtgccctcttttagatttcttatgagttatagttcaataataaagttttttgtctgaggggggggggttcccagaaataagaaagtacatttct

SEQ ID NO: 10626 - DNA, 560 bp, Zea mays
  Clone ID: LIB3061-098-Q1-K6-F7
acaatagtgtgcgaacaatggcagccaaaaattttgcctccttatgctccttggtctttctgcaagtgctgctacggcgaccattttcccacaatgctcacaagctcctatagcttcccttcttcccccgtacctctcaccagcggtgtcttcggtatgtgagagccgggttcttcaaccctataggatccaacaggcaatcgcagctggcatcttacctttatcacccttgttcctccaacaatcatcagccctattacagcagttacctttggtgcatttattggcacaaaacatcagggcacaacaactacaacaacttgtgctagcaaaccttgctgcctactctcagcaacaacagtttcttccattcaaccaactagctgcattgaactctgcttcttatttgcaacaacaacaactaccattcagccagctatctgctgcctacccccagcaatttcttccattcaaccaactgacagctttgaactctcctgcttatttacagcagcaacaactactaccattcagccagctagctggtgtgagccctgcta

SEQ ID NO: 10627 - DNA, 580 bp, Zea mays
  unsure (1)..(580): unsure at all n locations; Clone ID: LIB3061-098-Q1-K6-F9
atagtgtaccaacaatgggtgggggggggggtgcttccttatactccttggtgtggctgcaagtgctgctaccgcaaccattttcccacaatgctcacaagctcctatagcttcctttcttcccccatacctctcaccagcggtgtcttcatatgtgaaaacccatttggggtcgctggaggatccaacangcaatcncancangcatcttacctttatcacccttgttcctccaacaaccgtcagccctattacagcagttacctttggtgcatttgttggcacaaaacatcaaggcacaacaactacaacaacttgtgctaggaaaccttgctgcctactctcagcaacagcagtttcttccattcaaccaactggctgcattgaactctgctgcttatttgcaacaacaactaccattcagtcagctagctgctgcctacccccagcaatttcttccattcaaccaactggcagcattgaactctgctgcttatttacaacagcaacagctaccaccattcagccagctagctgatgtgagccctgttgccttcttgacacaacaacagttgttgcc

SEQ ID NO: 10628 - DNA, 167 bp, Zea mays
  unsure (1)..(167): unsure at all n locations; Clone ID: LIB3061-098-Q1-K6-G10
aatgtgaggaaagtgctttcttatatctgggaagccacaaacatcatccaaaaaacttcattattgaagtataactcataagcaatctaaaagaggcaccaccaatgatgggttgttggtagaacgctgttgggtttgtcaaacaancttggggtttcgtacagggn

SEQ ID NO: 10629 - DNA, 581 bp, Zea mays
  Clone ID: LIB3061-098-Q1-K6-G11
tccgctcaagcatcagcggcaggagctctgggcagcgtgcgcacgtggggtacctagctcgctctgctagcctaccatggctgatcaccaccggggtgcgacgggaggtggcgggggctacggcgacctccagcgcgggggcggcatgcacggcgaggcgcagcagcagcagaagcagggcgccatgatgacggcgctcaaggccgcgacggccgcgaccttcggcgggtcgatgctggtgctgtccgggctgatcctggccggcaccgtgatcgcgctcacggtggccacccccgtgctggtgatcttcagcccggtgctggtgccggccgccatcgcgctggcgctcatggcggccgggttcgtcacctccggcggcctcggcgtcgctgcgctgtccgtgttctcctggatgtacaagtacctgacgggcaagcacccgccgggcgccgaccagctggaccacgccaaggcgaggctggcgtccaaggcccgcgacatcaaggatgcagcacagcaccgcatcgaccaggcgcaggggtcttgagagaagaaccacactcgagcggaccgcgcgcgcg

SEQ ID NO: 10630 - DNA, 565 bp, Zea mays
  Clone ID: LIB3061-098-Q1-K6-G12
accaattgcccaattaccgcgtggtgggttggcacatctaacaatacaaaccatggcagcgcagcagcaacaagcactgagccacctagccgtggtgaaccctatcgcctacttgcaacaacagctgcttgcatccaacccacttgctttggcaaacgtagctgcatacgggctcagcaaggggtgcaacagtttctaccagcgctcagtcaactagccatggtgaaccctatcgcctacctacaacagcaacaacttctttcatctagcccgctcgctatgggcaatgcacctacatacctgcaacaacagttgttgcaacaacagttgctgcaacaaattgtaccagctcttactcagctagctgtggcaaaccctgctgcctacttgcaacaactacttccattcaaccaactgactgtgtcgaactctgctgcgtacctacaacagcgacaacagttacttaatccactagcggtggctaacccattggtcgctgccttcctacagcagcaacaattgctgccatacaaccagttctctttgatgaaccctgccttgtcgt

SEQ ID NO: 10631 - DNA, 589 bp, Zea mays
  unsure (1)..(589): unsure at all n locations; Clone ID: LIB3061-098-Q1-K6-G2
tcgacccagcgtccgttttgagcttcanaacacaccaggcgagcacattagcaacaacctaacaacaatggctaccaagatattatccctccttgcgcttcttgcgctttttgcgagcgcaacaaatgcgttcattattccacaatgctcacttgctccaagttccattattacacagttcctcccaccgggggggggaatgggcttcgaacacccagctgtgcaagcctataggctacaacaagcaattgcggcgagcgtcttacaacaaccaatttcccagttgcaacaacaatccttggcacatctaacaatacaaaccatcgcaacgcaacagcaacaacaattcctaccagcactgagccacctagccatggtgaaccctgccgcctacttgcaacagcagttgcttgcatcaaacccacttgctctggcaaacgtagttgcaaaccagccacaacaacagctgcaacagtttctgccagcgctcagtcaactagccatggtgaaccctgccgcctacctacaacagcaacaactgctttcatctagcccgctcgctgtggccaatgcacctacatacctgcaa

SEQ ID NO: 10632 - DNA, 571 bp, Zea mays
  unsure (1)..(571): unsure at all n locations; Clone ID: LIB3061-098-Q1-K6-G3
tccgataaattaagatatgcaaaaaatgtgagaggatcaagtgtcttgacatatacaatctatctgaatgctggagggttttagtactttgggtgctttggtatccttgactttcagttagatatgtccacaaaaagttcagtcagcagtacaaagctacaatcggtgcagatttcgtgagggggggggttctgatcgaagacaggctantcacgttgcagatatgggacaccgcggggcaggagagattccagagtcttggggttgcattctacagaggggccgattgctgtgtgctcgtctatgatgttaactctaacaggtcatttgatacactcaatacatggcatgatgaaatcctcaaccaagctagcccatcagatcctaaaacttttcccttcatcttactcggtaacaagattgatgtagatggtggaaaaagcagagtggtttctgataagaaagcaatggagtggtgtgcttctaaaggcaatatcccttattttgaaacttctgcaaaagaggactacaatgttgacaatgctttcctgactgttgccaagcttgctct

SEQ ID NO: 10633 - DNA, 498 bp, Zea mays
  Clone ID: LIB3061-098-Q1-K6-G6
caaaaacacaccaagcgaagcgcactgggaacgacctaacaccaatggctaccaagtaattagccctccttgcgcttcttgcccttttagtgagcgcaacaaatgcgttcattattccacagtgctcacttgctcctagtgccattattccacagttcctcccaccagttacttgagggggcggggggacatccagccgtgcaagcctacaggctacaactagcgcttgcggcgagcgccttacaacaaccaattgcccaattgcaacaacaatccttggcacatctaaccctacaaaccattgcaacgcaacaacaacaacaacaacagtttctgccatcactgagccacctagccgtggtgaaccctgtcacctacttgcaacagcagctgcttgcatccaacccacttgctctggcgaacgtagctgcataccagcaacaacaacagctgcaacagtttatgccagtgctcagtcaactagccatggtgaaccct

SEQ ID NO: 10634 - DNA, 594 bp, Zea mays
  Clone ID: LIB3061-098-Q1-K6-G7
tttcagcattcaaaaacacaccaagcgaacgcactagcagcgacctaacaccaatggctaccaagatattagccctccttgcgcttcttgcccttttagtgagcgcaacaaatgcgttcattattccacagtgctcacttgctcctagtgccattattccacagttcctcccaccagttacttcaatgggctgggggcatccagccgtgcaagcctacaggctacaactagcgcttgcggcgagcgccttacaacaaccaattgcccaattgcaacaacaatccttggcacatctaaccctacaaaccattgcaacgcaacaacaacaacaacaacagtttctgccatcactgagccacctagccgtggtgaaccctgtcacctacttgcaacagcagctgcttgcatccaacccacttgctctggcgaacgtagctgcataccagcaacaacaacagctgcaacagtttatgccagtgctcagtcaactagccatggtgaaccctgccgtctacctacaactactttcatctagcccgctcgcggtgggcaatgcacctacgtacctacaacaacagttgctgcaacaaattg

SEQ ID NO: 10635 - DNA, 589 bp, Zea mays
  unsure (1)..(589): unsure at all n locations; Clone ID: LIB3061-098-Q1-K6-G8
ctagcaacatagnaaagcacaatagtgtaccaacaatggcagccaaaaattttgcctccttatgctccttggtctttctgcaagtgctgctacggcgaccattttcccgcaatgctcgcaagctcctatagcttcccttcttcccccgtacctctcaccagcggtgntcttcggtgatgggagggacccaattcttcaaccctacaggatccaacaggcaatcgcagctggcatcttacctttatcacccttgttcctccaacaatcatcagccctattacaacagttacctttggtgcatttattggcacaaaacatcagggcacaacaactacaacaacttgtgctagcaaaccttgctgcctactctcagcaacagcagtttcttccattcaaccaactaggttcattgaactctgcttcttatttgcaacaacaacaactaccattcagccagctacctgctgcctacccccagcaatttcttccattcaaccaactagcagcattgaactctcctgcttatttacagcagcaacaactactaccattcagccagctagctggtgtgagccctgctaccttcttg

SEQ ID NO: 10636 - DNA, 544 bp, Zea mays
  Clone ID: LIB3061-098-Q1-K6-H1
acaactgaactgctttaattaacagaagagctcagtgatttaccctttaaaaacctctccttgctagctctgaggcatggcagctcctaagcaccgacaccaacatattctcagagttctcctgaactgcatcattgaatccttgccagaggcggggggacatatgaagcagcattgccaaatggccgaggcgctgcccggaatgtctcaaaggtgatgccatctcaatcccactttgggatgaatatgctgatcagcagggtcctagaatcacatggagactgctgcaagaactcctccaaagtaaggcacaacctttttggaagccgtctggattgtgactgttgtacctgcagccagtagcacagttgctatgtctgactcgaatggcaacctctgcgccatgattatgttgccacctatggttgctgtgttccgaacaaatggcgaagccactttgcttaggtgattggcaatttttctgaagaccagatttccatctgacaacacctcaatggttgtagcctgtagagatggacacaac

SEQ ID NO: 10637 - DNA, 580 bp, Zea mays
  Clone ID: LIB3061-098-Q1-K6-H11
tacagagtcactgaccgaccgctatggcatcgaggcagaacacgcgtgaggcgcgcgccgaggccgacgcgcggcgcgccgtggaggagctggctcgggcgcgggacgagcacctcgagaaggcggaggtgaacgcccgctcggccgcggacgagatcgggcgctcccgcgccgaccgcggtgccgccggtggcggcggcatcctggagagcgtgcaggagggcgccaggtccttggccagcgccgtgggccgcaccttcggtggcgccaaggacgcgaccgtggacaagacctcgcagacggcgcacaccgcgggcgacaagctcggcgagtacagggactacaccgccgacaaggcccgggaggccaacgacagcgtctcgcgtaagacgggcgagacggcggaggccacccggaacaagctgggcgagtacaaggacagcgccgtggagaaggcgagggagaccaaggacgcggtggcgcagaagacgagcgagaccgcggaggcgaccaagaacaagctcggggagtacaaggacgcggcggccggcaaggcgcgggaggccgcggacaccaccgc

SEQ ID NO: 10638 - DNA, 456 bp, Zea mays
  unsure (1)..(456): unsure at all n locations; Clone ID: LIB3061-098-Q1-K6-H12
ccctcgctctcctgtctttttttgttgtgcgccgcctnacacaaatacaagcggggggtgcggctnccanccaccncccccngttcatctaccgccgccggtgcatctgccacctccggttcacctgccacctccggtgcatttttttttttcngtccacctnccttcttcgtgcgtgtgggggcgccnnnccatntnccnnccccccttcatctaacaaacaaaaccatcccactaccctactcaaccnnccctncctcancctcattctcatccacacccattccctttccaacatcctcatccaatccctttccatcttctttttaaccttctnnnttttcattacccctatcctntnccatttcntcnatttttttatgcatcatttcatcccctctgtnactccctactgctcttctcantgccagttttttttttttgcattgtttcctt

SEQ ID NO: 10639 - DNA, 553 bp, Zea mays
  Clone ID: LIB3061-098-Q1-K6-H2
acaatagtgtaccagacaatggcagccaaaaattttgcttccttatgctccttggtctttctgcaagtgttgctaccgcgaccattttcccacaatgctcacaagctcctatagcttcccttcttcccccatacctctcaccagcggtgtcttcaatgtgtggaggggggggggtcaaccctacaggatccaacaggcaatcgcaacaggcatcttaccattatcacccttgttcctccaacaaccgtcagccctattacagcagttacctttggtccatttggtggcacaaaacatcagggcacaacaactacaacaacttgtgctagcaaaccttgctgcatactctcagcaacatcagtttcttccattcaaccaactggctgcattgaactctgctgcttatttgcaacaacaattaccattcagccagctagttgctgcctacccccagcaatttcttccattcaaccaactagcagcattgaactctgctgcttatttacagcagcaacaactactaccattcagccagctagctgatgtgagccct

SEQ ID NO: 10640 - DNA, 270 bp, Zea mays
  unsure (1)..(270): unsure at all n locations; Clone ID: LIB3061-098-Q1-K6-H3
atcagttacctttggtgcatttattggcacaaaaatnaggggacaacaactacaacaacttgtgctagcaaaccttgctgtctattttcatcaacaacaaattttttgggggggggagggggtnnattnaactnttnttnttattttnaacaacaaaaaataaaacccccccatttacctncttcctacccaaaanaatttttttcattcaaccaactttcattatttaactctcctttttatttacaacattatacaactactaccatt

SEQ ID NO: 10641 - DNA, 601 bp, Zea mays
  Clone ID: LIB3061-098-Q1-K6-H4
cgacccagcgttctatcaatcatcattcatcttagtggtgggggggcgcgaatcaaatacaacaacatcaattatctaactccaaaaccatgaagctggtgcttgtggttcttgctttcattgctttagtatcaagtgtttcttgtacacagacaggcggctgcagctgtggtcaacaacaaaccatggggacgacggggtccacaacaacatcatccacaaaaacaacaacatcaaccaccaccacaacatcaccagcagcagcaacaccaacaacaacaagttcacatgcaaccacaaaaacatcagcaacaacaagaagttcatgttcaacaacaacaacaacaaccgcagcaccaacaacaacaacaacaacaacagcaccaacaacaacatcaatgtgaaggccaacaacaacatcaccaacaatcacaaggccatgtgcaacaacacgaacagagccatgagcaacaccaaggacagagccatgagcaacaacatcaacaacaattccagggtcatgacaagcagcaacaaccacaacagcctcagcaatatcagcagggccagggaaaaatcacaacagcaacaatgtcattgc

SEQ ID NO: 10642 - DNA, 574 bp, Zea mays
  Clone ID: LIB3061-098-Q1-K6-H5
tctccagttccagcaccaccagcagcgtgggaggacgtggtcaggtcaaacgccggcgccggtggtggcaacccgcccggcaccgccgcgcccagcacggctgcggccccgacaacaacagccggatctttcttgggcatggtccagtgatcgatccatccacacgcgtatcccaagcattgtgcgtcggggtgatgactactctatcctcctcttgccgatggcttcttttctttctctcgcttgtgacatttgtatctacctacctgtcgcctccatgctcgcgtccatatatctgatctactccacaaatcctaaaaccacaacaactatccccctctcctctctattctccggcgattctccatattcttcatgcaggtcgtagccacacctcgatccatgtcgtgtcgtcgtcgctgttgcccaccctcctatttctccattcgttgctgcgctagttacagtggtcgccctcttagatgttacagtaaaaaaaaattggtggtgatatggttatttattgattcgttagggtaattaataagaaccctcaaaagcttggggtcttcac

SEQ ID NO: 10643 - DNA, 286 bp, Zea mays
  unsure (1)..(286): unsure at all n locations; Clone ID: LIB3061-098-Q1-K6-H6
ttgatacaaccaantatctgccaggtattgcagcaacattgttgtcatgatcttaggccgattgagccacaatacattcaccaagcattctacaacatggttcactccttattccaggaggagcctctacaacaaccatgtgagttatgttgatctcatcaagcttctcaaagtgcggtggtaattttgacagccgcacaatacctaccatcaatgtgcggcttttaccccttctactaccaaaataatccattcatcattcattactttattgtttttttccaat

SEQ ID NO: 10644 - DNA, 586 bp, Zea mays
  unsure (1)..(586): unsure at all n locations; Clone ID: LIB3061-098-Q1-K6-H7
tanaagtggnaatccagtagcaacaacagggcaacaatggcgaccaagatttttccctccttatgctccttgctctttctgcatgtgttgctaacgcgacaattttccctcaatgctcacaagctcctatagcttcccttcttcccccataccttccatcaatgatagcttcagtgtgtgaggggcccagctcttcagccctataggctccaacaagcaatcgcagcaagcaacatacctttatcacccttgttgtttcaacaatcgccagccctatctttggtgcagtcattggtacaaaccatcagggcacagcagctgcagcaactcgtgctacctgtgatcaaccaagtagctctggcaaacctttctccctactctcagcaacaacaatttcttccattcaaccaactgtctacactgaaccctgctgcttatttgcagcaacaactattaccattcagccagctagctactgcctactctcagcaacaacaacttcttccatttaaccaattggccgcactgaaccccgctgcttatttgcagcagcaaatactactaccatttagccagctagctgcag

SEQ ID NO: 10645 - DNA, 72 bp, Zea mays
  Clone ID: LIB3061-098-Q1-K6-H8
cccacgcgttctcattatgatgtttgtactatgatgttggaataaggatactaatagaaataataatgcgtg

SEQ ID NO: 10646 - DNA, 539 bp, Zea mays
  unsure (1)..(539): unsure at all n locations; Clone ID: LIB3061-098-Q1-K6-H9
cttgttgcccttttagtgagcgcaacaaatgcgttcattattccacagtgctcacttgctcctagtgccagtattccacagttcctcccaccagttacttcaatgggcttcgaacatcctggggttcgancgggcaggctacaactagcgcttgcggcgagcgccttacaacaaccaatcgcccaattgcaacaacaatccttggcacatctaaccctacaaaccattgcaacgcaacaacaacaacaacagtttctgccatcactgagccacctagccgtggtgaaccctgtcacctacttgcaacagcagctgcttgcatccaacccacttgctctggcgaacgtagctgcataccagcaacaacaacagctgcaacagtttatgccagtgctcagtcaactagccatggtgaaccctgccgtctacctacaactactttcatctagcccgctcgcggtgggcaatgcacctacgtacctacaacaacagttgctgcaaccaaatgtaccagcttttgactcaattagctgtggcaa

SEQ ID NO: 10647 - DNA, 566 bp, Zea mays
  unsure (1)..(566): unsure at all n locations; Clone ID: LIB3061-099-Q1-K6-A1
tctcaccagcggtgtcttcggtgtgtggaaaacccaattcttcaaccctacaggatccaacaggcaatcgcagctggcatcttacctttatcacccttgttcctccaacaatcatcagccctattacaacagttacctttggtgcatttattggcacaaaacatcagggcacaacggcggcgacaacttgtgctagcaaaccttgctgcctactctcagcaacagcagtttcttccattcaaccaactaggttcattgaactctggttnttatttgcggcatcagcaactaccattcagccagctacctgctgcctacccccagcaatattcttccattcaaccaactagcagcattgaactctcctgcttatttacagcagcaacaactactaccattcagccagctagctggtgtgagccttgctaccttcttgacacaaccacagttgttgccgttctaccagcacgttgcgcctaacgctggcaccctcttacaactgcaacaattgctgccattcaaccaacttgctttgacaaacccagcagtgttctaccaacaaccca

SEQ ID NO: 10648 - DNA, 485 bp, Zea mays
  Clone ID: LIB3061-099-Q1-K6-A10
acacttgtgctagcaaaccttgctgcctactctcagcaacagcagtttcttccattcaaccaactagctgcattgaactctgcttcttatttgcaacaacaacaactaccattcagccagctacctgctgcctacccccagcaatttcttccattcaaccaactggcagcattgaacggggggggttatttacagcagcaacaactactaccattcagccagctagctggtgtgagccctgctaccttcttgatacaaccacagttgttgccgttctaccagcacgctgcgcctaacgctggcaccctcttacaactgcaacaattgctgccattcaaccaacttgctttgacaaacccagcagcgttctaccaacaacccatcattggtggtgccctcttttagatttcttatgagttatagttcaataataaagttttttgtctgatgtttgtggcttcccagaaataagaaagtacatttct

SEQ ID NO: 10649 - DNA, 536 bp, Zea mays
  Clone ID: LIB3061-099-Q1-K6-A11
acaatatgtgggggggtggcggccaaaaattttgcttccttatgctccttggtctttctgcaagtgctgctaccgcaaccattttcccacaatgctcacaagctcctatagcttcctttcttcccccatacctctcaccagcggtgtcttcagtttgtggaaacgccaggggttcaaccctacaggatccaacaggcaatcgcagcaggcatcttacctttatcacccttgttcctccaacaaccgtcagccctattacagcagttacctttggtgcatttgttggcacaaaacatcaaggcacaacaactacaacaacttgtgctaggaaaccttgctgcctactctcagcaacagcagtttcttccattcaaccaactggctgcattgaactctgctgcttatttgcaacaacaactaccattcagtcagctagctgctgcctacccccagcaatttcttccattcaaccaactggcagcattgaactctgctgcttatttacaacagcaacagctaccaccattcaaccagct

SEQ ID NO: 10650 - DNA, 597 bp, Zea mays
  Clone ID: LIB3061-099-Q1-K6-A12
gcgttcttttttcagcattcaaaaacacaccaagcgaggggcgctagcaacgacctaacaccaatggctaccaagatattagccctccttgcgcttcttgcccttttagtgagcgcaacaaatgcgttcattattccacagtgctcacttgctcctagtgccattattccacagttcctcccacgcggggggggggaatgggcttcgaacatccagccgtgcaagcctacaggctacaactagcgcttgcggcgagcgccttacaacaaccaattgcccaattgcaacaacaatccttggcacatctaaccctacaaaccattgcaacgcaacaacaacaacaacaacagtttctgccatcactgagccacctagccgtggtgaaccctgtcacctacttgcaacagcagctgcttgcatccaacccacttgctctggcgaacgtagctgcataccagcaacaacaacagctgcaacagtttatgccagtgctcagtcaactagccatggtgaaccctgccgtctacctacaactactttcatctagcccgctcgcggtgggcaatgcacctacgtacctacaacaacagttgctgc

SEQ ID NO: 10651 - DNA, 206 bp, Zea mays
  unsure (1)..(206): unsure at all n locations; Clone ID: LIB3061-099-Q1-K6-A2
tgcggctgccagcccgcgccgccggtttatgtaccngcgccagagcatactgccacctggggggcacctgccacctccggtgcatntcccaccgccggtccacctgccgccgccggtccacctgccaccgccggtccatgtgccgccgtcggttcatttgccgtctccaccatggggggggcgtgaggggcctccccttccttatt

SEQ ID NO: 10652 - DNA, 495 bp, Zea mays
  Clone ID: LIB3061-099-Q1-K6-A5
gccgcatccaagcccgtgccagctgcagggggacctgcggcgttggcagcaccccgatcctgggccagtgcgtcgagttcctgaggcatcagtgcagcccgacggcgacgccctactgctcgcctcagtgccagtcgttgcggcagcagtgttgccagcagctcaggcaggtggagccgcgggggcggtaccaggcgatcttcggcttggtcctccagtccatcctgcagcagcagccgcaaagcggccaggtcgcggggctgttggcggcgcagatagcgcagcaactgacggcgatgtgcggcctgcagcagccgactccatgcccctacgctgctgccggcggtgtcccccactgaagaaactatgtgctgtagtatagccgctggctagctagctagttgagtcatttagcggcgatgattgagtaataatgtgtcacgcatcaccatgggtggcagtgtcagtgtgagcaatgacctgaatgaacaattg

SEQ ID NO: 10653 - DNA, 634 bp, Zea mays
  unsure (1)..(634): unsure at all n locations; Clone ID: LIB3061-099-Q1-K6-A6
tcactagcaacatagnaaagcacaatagtgtaccaagcaatggcnatgccaaaatnnattttgcgttgcctgtagtgctncnncttggtncnntttctngnncaagtgcctgnnctaccgcanacncattnnnttcccaccatatgnctnncacaagnctnncctnatnnnagcttnncctttnncttnncccccatnaccctnctncacncnnagcggtgnntcttcagtggtggggggggcgcaattcttcaaccctacaggatccaacaggcaatcgcagcaggcatcttacctttatcacccttgttcctccaacaaccgtcagccctattacagcagttacctttggtgcatttgttggcacaaaacatcaaggcacaacaactacaacaacttgtgctaggaaaccttgctgcctactctcagcaacagcagtttcttccattcaaccaactggctgcattgaactctgctgcttatttgcaacaacaactaccattcagtcagctagctgctgcctacccccagcaatttcttccattcaaccaactggcagcattgaactctgctgcttatttacaacagcaacagctaccaccattcagccagctagctgatgtgagccctgttg

SEQ ID NO: 10654 - DNA, 598 bp, Zea mays
  unsure (1)..(598): unsure at all n locations; Clone ID: LIB3061-099-Q1-K6-A8
cccggtcgacccagcgtctttaacacaacaacaaccgcagcaccaacgggcgggggggcaacaacagcaccaacaacaacatgaatgtgaaggccaacaacaacatcaccaacaatcacaaggccatgtgcaacaacacgaacagagccatgagcaacaccaaggacagagccatgagcaacaacatcaacaacaattgggttgtcatgacaagcagcaacaaccacaacagcctcagcaatatcaagcagnnggccaggaaaaatcacaacagcaacaatgtcattgccaggagcagcaacagactacaaggtgcagctataactactatagcagtagctcaaatctaaaaaattgtcatgaattcctaaggcagcagtgcagccctttggtaatgccttttctccaatcacgtttgatacaaccaagtagctgccaggtattgcagcaacaatgttgtcatgatcttaggcagattgagccacaatacattcaccaagcaatctacaacatggttcaatccataatccaggaggagcaacaacaacaaccatgtgagttatgtggatctcaacaagctactcaaagtgcggtggca

SEQ ID NO: 10655 - DNA, 592 bp, Zea mays
  unsure (1)..(592): unsure at all n locations; Clone ID: LIB3061-099-Q1-K6-A9
gtcgacccagcgtccttgcaactagnaagcacaatagtgtaccaacaatggcagccaaaatattttgcttccttatgctccttggtctttctgcaagtgttgctaccgcaaccattttcccacaatgctcacaagctcctatagcttcccttcttcccccatacctctcaccagcggtgtcttcaatgtgtgaaagggggggggtcaaccctacaggatccaacaggcaatcgcaacaggcatcttaccattatcacccttgttcctccaacaaccgtcagccctattacagcagttacctttggtccatttggtggcacaaaacatcagggcacaacaactacaacaacttgtgctagcaaaccttgctgcatactctcagcaacatcagtttcttccattcaaccaactggctgcattgaactctgctgcttatttgcaacaacaattaccattcagccagctagttgctgcctacccccagcaatttcttccattcaaccaactagcagcattgaactctgctgcttatttacagcagcaacaactactaccattcagccagctagctgatgtgagccctgctgccttc

SEQ ID NO: 10656 - DNA, 578 bp, Zea mays
  unsure (1)..(578): unsure at all n locations; Clone ID: LIB3061-099-Q1-K6-B1
tgatgnanaccaactagcaacatagtaagcgcaggtagtgtaccaacaatggcagccaaaatattttgcttccttatgctccttggtctttctgcaagtgttgctaccgcgaccattttcccacaatgctcacaagctcctatagcttcccttnttcccccatacctctcaccagcggtgggggggggggtgaaaacccaattgttcaaccctacaggatccaacaggcaatcgcaacaggcatcttaccattatcacccttgttcctncaacaaccgtcagccctattacagcagttacctttggtccatttggtggcacaaaacatcagggcacaacaactacaacaacttgtgctagcaaaccttgctgcatactctcagcaacatcagtttcttccattcaaccaactggctgcattgaactctgctgcttatttgcaacaacaattaccattcagccagctagttgctgcctacccccagcaatttcttccattcaaccaactagcagcattgaactctgctgcttatttacagcagcaacaactactaccattcagccagctagctgatgtg

SEQ ID NO: 10657 - DNA, 568 bp, Zea mays
  unsure (1)..(568): unsure at all n locations; Clone ID: LIB3061-099-Q1-K6-B11
atgtggtggcggggggtgaggaattacttaatgcttctaagtgctcttttgtatcagggttatttccacaagcaacagaagagaacacaaaatcatcaaaatcctcaattgcaactcgctttaagatacaacttcatgaactcatggagactttgagctggtcgancgccattacataagatgtataaaaccaaatagtgtccttaagcctggcatttttgagaataccaatgttctgcagcagcttcgatgttctggtgttcttgaagccattagaatcagctgtgctggttatcccacaaggaaactatttcatgattttctacatcgttttcgtgttcttgctcctgaaattttgaaagagaaaaatgatgaaaaagtctcctgtcaaaaggttttggacaaaatgggactacagggttatcagataggaagaactaaggtattcctgagggctggtcaaatggctgatctggatgccagaagaacagagatgcgaaacaatgcagcaaaaggcgttcagagtcaattccgtactcatgttgctcgtgagcagttcctagtacta

SEQ ID NO: 10658 - DNA, 577 bp, Zea mays
  unsure (1)..(577): unsure at all n locations; Clone ID: LIB3061-099-Q1-K6-B12
cggttgcaaaactccagtaanatgggtggaaaagcagaccgctgggtggctggtttcttagagaagtttgaggaagggtgccactcaatggggacggccatcaaggagaggatccaggagaggctcatcaaggcacaatccagcgactttggcagcctcctacagtacgacagctacgattctgatgaagccaggggaggggacgaggacnaagacgaactctttgaagacgtcaaggaatagcacatccgtacatatacaatggttttgtagctgcaaattgtgttgtgagtcagttgcctctctctggttggtgatctttatatatggtctcaaaggtaggtcaggttgcaatgtttgtagctgctcttggtgtttgttcaggcaacgcatggttgtaaaagctgtggaaagacttgtgcagtcaaggatacagattccgatggttacctttgggttagaacatatacggctgtaaaattggaagtcgaggtggttaaaactctgaaatcttgtctgttttccttccaaannaaaaaaannnaannaaaaaaaaaaaaaaaaaaagggcggccgc

SEQ ID NO: 10659 - DNA, 545 bp, Zea mays
  unsure (1)..(545): unsure at all n locations; Clone ID: LIB3061-099-Q1-K6-B2
tggcttctcctccccctcctgttggggggggggggcgtgagaactccggggttcggggtggtgggtgggcggatcgagatggcggcgtcggtgttgagtaccgtgttctcgcggctccctgggccacgacaccatncctcccacnccttcacacctgggggggggggggggtccaanatcatcctctatctnnaaactcatatntccctcnncttctccttcntnaccttctccactgntgaggcgatgcggaacgccatcgagggcgtgaacggcaaggagctggacgggcgcaacatcaccgttaacgaggcccagtcccgcggcggccgtggaggcggcggctgcggctaccgtggtggccgtggaggcggcggctactgcggtggcgggcgccgtgatggcggcggcggctacggcggtggcggcggcggctactgtggcggcggtggctaccgtggtggtggtggcggctaccgcggtggcaaccgtggcggcggttactggcaactccgacgggaactgtgagaactgagcggtggggc

SEQ ID NO: 10660 - DNA, 584 bp, Zea mays
  unsure (1)..(584): unsure at all n locations; Clone ID: LIB3061-099-Q1-K6-B3
tcganaatttngtcctaatgcatgtggttgggcttatggaatgaacatgtttgatctggaagaatggaagaagaaagacattactggaatttaccacaaatggcagaacatgaacgagaacaggctgctctggaaactggggacattgccaccagggcttctaactttttacaagctggggggggggggggacaaatcatggcatgtgcttggcttagggtacaatccaaccattgagcgctcagagatagacaatgctgctgtcatccactacaatggtaacatgaagccctggctggaaattgcaatgataaagtatcggccttactggacaaagtacatcaattatcagcattcttacattcatggatgcaagatcagccaatagaaaccaccctcagatattcttctgtgatgaacattgaagttggatgggactcaaaatgaaatcagtataactatcacatgttctttattcgtgttatattagatttgttagttatcatgtgtatgtagtttcgtcgcccttttgtggtgctttctcccctagctcattgttggttcttgtctctttttgtcatgaa

SEQ ID NO: 10661 - DNA, 604 bp, Zea mays
  unsure (1)..(604): unsure at all n locations; Clone ID: LIB3061-099-Q1-K6-B5
ccggtnccggaaatcccccggggncccttactttggtgcagtcattggtacaaaccatcaaggccagggggtgcagcaactcgtgctacctgtgatcaaccaagtagctctggcaaacctttctctctactatcagcaacaacaatttcttccattcaaccaactatctacactgaaccctgctgcttatttgcagcaacaactattaccattcaggcaggtggctactgcctactctcatcaacaacaacttcttccatttaaccaattggccgcactgaacctcgctgcttatttgcagcagcaaatattactaccatttagccagctagctgcagcaagccgtgcttccttcttgacacagcaacagttgctgcctttctaccagcagtttgcggctaaccccgcaaccctcttacaactacaacaattgttgccctttgtccaacttgctttgacaaacccagcagcctcctaccaacaacacatcattggtggtgccctcttttagattgcttattagttgtaattcaataataaagttttttggatgatgtatgtggccaaccagaaataagaagttacatttccagattctaatgtg

SEQ ID NO: 10662 - DNA, 336 bp, Zea mays
  unsure (1)..(336): unsure at all n locations; Clone ID: LIB3061-099-Q1-K6-B6
ccggnccgggaaccccggttgacccacgcgttcttgccaaaatgccctgactggccagggggggggggcggtccttcagcgggagcggggcatgcatggacattgtggtgtccagtgtcagagcttacctgagcgccctgaacaagatctgcagtttcgctggcgccgtngaaagccagcagcgatgtagctgagaccgcaagcgtcccgagcacatgatnagctcccgtttggttcaaagtgacatgttgttcaaaatttctgctggaaggatggtcccttgagcttaggacaggcaggaagtcttggggcctatgtagtgagtgtacaatttct

SEQ ID NO: 10663 - DNA, 580 bp, Zea mays
  unsure (1)..(580): unsure at all n locations; Clone ID: LIB3061-099-Q1-K6-C11
ctagcaacatagnaaagcacaatagtgtaccaacaatggcagccaaaatttttgcctccttatgctccttggtctttctgcaagtgctgctacggcgaccattttcccacaatgctcacaagctcctatagcttcccttcttcccccgtacctctcaccagcggtgtcttcggtatgtgaaaacccaattcttcaaccctataggatccaacaggcaatcgcagctggcatcttacctttatcacccttgttcctccaacaatcatcagccctattacagcagttacctttggtgcatttattggcacaaaacatcagggcacaacaactacaacaacttgtgctagcaaaccttgctgcctactctcagcaacaacagtttcttccattcaaccaactagctgcattgaactctgcttcttatttgcaacaacaacaactaccattcagccagctatctgctgcctacccccagcaatttcttccattcaaccaactgacagctttgaactctcctgcttatttacagcagcaacaactactaccattcagccagctagctggtgtgagccctgctacc

SEQ ID NO: 10664 - DNA, 418 bp, Zea mays
  unsure (1)..(418): unsure at all n locations; Clone ID: LIB3061-099-Q1-K6-C12
ccattggggggcacaaaacatcagggcacaacaactacaacaacttgtgctagcaaaccttgctgcatactctcagcaacatcagtttcttccattcaaccaactgnctgcattgaactctgctttttagttncaacaacaattaccattcaaccanctanttnctaactacaaaacaaaattccttccattcaaccaactagcagcattgaactctgctgcttatttacagcagcaacaactactaccattcagccagctagctgatgtgagccctgctgccttcttgacacaacaacagttgttgccgttctacctgcacgctatgcctaacgctggcaccctcttacaactgcaacaattgctgccattcaaccaacttgctttgacaaacccaacagtgttctaccaacaaccc

SEQ ID NO: 10665 - DNA, 502 bp, Zea mays
  Clone ID: LIB3061-099-Q1-K6-C2
caaccaagtagctctggcaaacctttctccctactatcagcaacaacaatttcttccattcaaccaactatctacactgaaccctgctgcttatttgcagcaacaactattaccattcagccagctagctactgcctactctcatcaacaacaacttcttccatttaaccaattggcgcggctgaacctcgctgcttatttgcagcagcaaatattactaccatttagccagctagctgcagcaagccgtgcttccttcttgacacagcaacagttgctgcctttctaccagcagtttgcggctaaccccgcaaccctcttacaactacaacaattgttgccctttgtccaacttgctttgacaaacccagcagcctcctaccaacaacacatcattggtggtgccctcttttagattgcttattagttgtaattcaataataaagttttttggatgatgtatgtggccaaccagaaataagaagttacatttccagattct

SEQ ID NO: 10666 - DNA, 540 bp, Zea mays
  unsure (1)..(540): unsure at all n locations; Clone ID: LIB3061-099-Q1-K6-C3
ggggggggggcanacaaaaattttgcctggggatgctccttggtctttctgcaagtgctgctacggcgagcattttcccgcaatgctcacaagctcctatagcttcccttcttcccccatacctctcaccagcnatntcttgggggggtgagtggggggattcttctaccctacannatccaacatgcaatcncancaggcatcttacctttatcacccttnttccttcaacatttattantcctattacatcattttccttttntgcatttattggctcaaaacatcagggctcatcaactacatcatctcgtgctagcaaaccttgctgcctactctcagcaacagcagttacctttggtgcatttgttggcgcaaaacatcagggcacaacaactacaacaactcgtgctagcaaaccttgctgcctactctcagcaacaacagtttctgccattcaaccaactagctgcattgaactctgctgcttatttgcagcaacaacaactactaccattcagccagctagctgctgcctac

SEQ ID NO: 10667 - DNA, 592 bp, Zea mays
  unsure (1)..(592): unsure at all n locations; Clone ID: LIB3061-099-Q1-K6-C4
cggtcgacccagcgttcganacaacagcacatanaagtgggatgcagtagcaacaacagagcaacaatggcgaccaagatattttccctccttatgctccttgctctttctgcatgtgttgctaacgcgacaattttccctcaatgctcacaagctcctatagcttcccttcttcccccataccttccatgggggggggggtcagtatgtgaaaacccagctcttcagccctataggctccaacaagcaatcgcagcaagcaacatacctttatcacccttgttgtttcaacaatcgccagccctatctttggtgcagtcattggtacaaaccatcagggcacagcagctgcagcaactcgtgctacctgtgatcaaccaagtagctctggcaaacctttctccctactctcagcaacaacaatttcttccattcaaccaactgtctacactgaaccctgctgcttatttgcagcaacaactattaccattcagccagctagctactgcctactctcagcaacaacaacttcttccatttaaccaattggccgcactgaaccccgctgcttatttgcagcagcaaatactac

SEQ ID NO: 10668 - DNA, 541 bp, Zea mays
  unsure (1)..(541): unsure at all n locations; Clone ID: LIB3061-099-Q1-K6-C5
gtcgacccagcgtccgccgcatccaagcccgtgccagctgcagggggactgcggcgttggcagcaccccgatcctgggccagtgcgtcgagttcctgaggcatcagtgcagcccgacggcgacgccctactgctcgcctcagtgccagtcgttgcggcagcagtgttgccagcagctcangcangtggaggcggatgaccggggccaggcnatcttcggcttggtcctccagtccatcctgcagcagcagccgcaaagcggccaggtcgcggggctgttggcggcgcagatagcgcagcaactgacggcgatgtgcggcctgcagcagccgactccatgcccctacgctgctgccggcggtgtcccccactgaagaaactatgtgctgtagtatagccgctggctagctagctagttgagtcatttagcggcgatgattgagtaataatgtgtcacgcatcaccatgggtggcagtgtcagtgtgagcaatgacctgaatgaacaattgaaatgaaaagaaaaaaagtactccatctgttc

SEQ ID NO: 10669 - DNA, 597 bp, Zea mays
  unsure (1)..(597): unsure at all n locations; Clone ID: LIB3061-099-Q1-K6-C6
ccggtcgacccagcgtccggaccaatagcacatanaagcacgtggtgggccaacaatggcagccaaaatattttgcctccttatgctccttggtctttctgcaagtgctgctacggcgaccattttcccacaatgctcacaagctcctatagcttcccttcttcccccgtacctctcaccagcggtgtcttggggggggtgggaacccaattcttcaaccctataggatccaacaggcaatcgcagctggcatcttacctttatcacccttgttcctccaacaatcatcagccctattacagcagttacctttggtgcatttattggcacaaaacatcagggcacaacaactacaacaacttgtgctagcaaaccttgctgcctactctcagcaacaacagtttcttccattcaaccaactagctgcattgaactctgcttcttatttgcaacaacaacaactaccattcagccagctatctgctgcctacccccagcaatttcttccattcaaccaactgacagctttgaactctcctgcttatttacagcagcaacaactactaccattcagccagctagctggtgtgagccctg

SEQ ID NO: 10670 - DNA, 219 bp, Zea mays
  unsure (1)..(219): unsure at all n locations; Clone ID: LIB3061-099-Q1-K6-C7
ctcggtgtttgtttttttagggggggcacgccccctgctcatgagaacgaaggaaagccccgtcattctctttgtaggcccttcttttttttttcttttggttcaattgcgctaagttcaatatgtattctgctgagaaatctgtgctcgtttgagaacccttggacgttgtatgctagggagttttaatcttgaatatanatgacttgttgagggatt

SEQ ID NO: 10671 - DNA, 564 bp, Zea mays
  Clone ID: LIB3061-099-Q1-K6-C8
cattccaggtcatgacaagcagcaacaaccacaacagcctcagcaatatcagcaggggccagggaaaaatcacaacagcaacaatgtcattgccaggagcagcaacagactacaaggtgcagctataactactatagcagtagctcaaatctaaaaaattgtcatgaattcctaaggcggcggggcggccctttggtaatgccttttctccaatcacgtttgatacaaccaagtagctgccaggtattgcagcaacaatgttgtcatgatcttaggcagattgagccacaatacattcaccaagcaatctacaacatggttcaatccataatccaggaggagcaacaacaacaaccatgtgagttatgtggatctcaacaagctactcaaagtgcggtggcaatcttgacagcagcacaatacctaccatcaatgtgcggcttgtaccactcatactaccaaaataatccatgcagcagcaatgacattagtggtgtttgcaattgaagaattgtgtctacctagccgttatactcctataacggtgttaagcaataaagtacc

SEQ ID NO: 10672 - DNA, 619 bp, Zea mays
  Clone ID: LIB3061-099-Q1-K6-C9
cccggtcgacccagcgtccggtaaaacatccttgttgaaatgggtaacatactttcaagtccaggatgactatctggattgttatggtgatcctgaatttatcggcaagattggaacggaccattgaagattacaagtgctcatggctagttgtgcaagcccttgagcgtgctgatgagagccaaaagcgcattctatgtgaggggggtggcaagaaagatccagcctgtgtggcaaaagtgaagaacctctacaaagaacttgacctagaggcggtatttcaggagtacgagaatgagagctacaagaagctgattgcagacattgaagcccagccaagcattgcggttcagaaagtgctgaaatccttcttgcacaagatctacaagaggcagaagtagggtgctcttggataaacgagctcaggagtcgttactccttcgcatgcttgacataaccggacttcctcacctggttgctctagtatgatgtggagcgtctagttaaaaaaaatcgatgtagtatgaagcaccttgctgctctgaatattaacaggcaattaaggcaaggtgctgtttcggtttggtggaccgcatgttgcagataataaattagttgt

SEQ ID NO: 10673 - DNA, 586 bp, Zea mays
  unsure (1)..(586): unsure at all n locations; Clone ID: LIB3061-099-Q1-K6-D12
aacaagcaacatagnaagtgggggggaggggcaacaatagagcaacaatggcgaccaagaactttccctccttatgctccttgctctttctgcatgtgttgctaacgcgacaattttccctcaatgctcacaagctcctatagcttcccttcttcccccataccttccatggggggtagcggcagtatgtgaaaacccagctcttcaaccctataggctccaacaagcaatcgcagcaagcaacatacctttatcacccttgtttcaacaatcgccagccctatctttggtgcagtcattggtacaaaccatcaaggcacagcagctgcagcaactcgtgctacctgtgatcaaccaagtagctctggcaaacctttctccctactatcagcaacaacaatttcttccattcaaccaactatctacactgaaccctgctgcttatttgcagcaacaactattaccattcagccagctagctactgcctactctcatcaacaacaacttcttccatttaaccaattggccgcactgaacctcgctgcttatttgcagcagcaaatattactaccatttagccagcta

SEQ ID NO: 10674 - DNA, 514 bp, Zea mays
  Clone ID: LIB3061-099-Q1-K6-D2
ctttctccctactatcagcaacaacaatgggtgggcattcaaccaactatctacactgaaccctgctgcttatttgcagcaacaactattaccattcagccagctagctactgcctactctcatcaacaacaacttcttccatttaaccaattggccgcactgaacctcgctgcttatgggggggagcaaatattactaccatttagccagctagctgcagcaagccgtgcttccttcttgacacagcaacagttgctgcctttctaccagcagtttgcggctaaccccgcaaccctcttacaactacaacaattgttgccctttgtccaacttgctttgacaaacccagcagcctcctaccaacaacacatcattggtggtgccctcttttagattgcttattagttgtaattcaataataaagttttttggatgatgtatgtggccaaccagaaataagaagttacatttccagattctaatgtgatattggtctccaagggtgttcgataa

SEQ ID NO: 10675 - DNA, 583 bp, Zea mays
  unsure (1)..(583): unsure at all n locations; Clone ID: LIB3061-099-Q1-K6-D3
ttcttaacacacctagcgaacgcactagggtggggcgggagcgcaatggcttaaaagacattatccctccttgcgcttcttgccctttttgtgagtgcaacaaatgcgttcattattccacaatgctcacttgctccgagtgccattattccacagttcctccctccagttacttcaatgggggggtgagggcggagctntncaagcctatangctacaacaagcgcttgcggcgagcgtcttanaacaaccaattgcccaattacaacaacaatccttagcacatctaaccatacaaaccatcgcaacgcagcagcaacaagcactgagccacctagccgtggtgaaccctatcgcctacttgcaacaacagctgcttgcatccaacccacttgctttggcaaacgtagctgcctaccaacaacaacaacagttgcaacagtttctgccagcgctcagtcaactagccatggtgaaccctatcgcctacctacaacagcaacaacttctttcatctagcccgctcgctatgggcaatgcacctacatacctgcaacaacagttgttgcaacaacagttgctg

SEQ ID NO: 10676 - DNA, 566 bp, Zea mays
  unsure (1)..(566): unsure at all n locations; Clone ID: LIB3061-099-Q1-K6-D4
tcggcgagcgtcttacaacaaccaattggggaggggcgacaacaatccttgccacatctaacaatacaagccatcacaacgcaacagcaacaacagttcctaccagcactgagccacctagccatggtgaaccctgccgcctcttgcaagacagctgcttgcatccaacccattggggtgcgagggtanttgcaaaccancaacaacaacagctacaacagtttctgccaacgctcagtcaactagccatggtaaaccctgccgcctacgtacaacaacaacaactgctttcatctagcccgctcgctgtgggcaatgcacctacatacctgcaacaacaattgttgcaacagattgtaccagctctgactcaactagctgtggcaaacccacttgcctacttgcaacagctgcttccattcaaccaactgactctgtcgaactctgctgcgtacctacaacagcgacaacagttacttaatccattggtagtggctaacccattggtcgccgccttactacagcagcaacaattgctgccatacaaccagttctctttgatgaat

SEQ ID NO: 10677 - DNA, 597 bp, Zea mays
  unsure (1)..(597): unsure at all n locations; Clone ID: LIB3061-099-Q1-K6-D6
cggtcgacccagcgtcctttaataatgaagnaaatgcagccaggcgtgggggtatcattggcaactacagcgatggcgacctagtcgccactctgctcgcgcacaagttgggagtcactcagtgtaccatcgctcatgccttgngagaaaaccaaataccccaactcggacatatacttggacaaattcnacagggantgcacggctcttgccagttcacagctgaccttattgccatgaaccacaccgatttcatcatcaccagcacattccaagaaatcgcgggaagcaaggacaccgtggggcagtacgagtcccacatcgcgttcactcttcctgggctctaccgtgtcgtccatggcatcgatgttttcgatcccaagttcaacattgtctcccctggagcagacatgagtgtttactacccgtatacggaaaccgacaagagactcactgccttccatcctgaaatcgaggagctcatctacagcgacgtcgagaactccgagcacaagttcgtgctgaaggacaagaagaagccgatcatcttctcgatggcgcgtctcgaccgcgtgaagaacatgacaggcctggtcg

SEQ ID NO: 10678 - DNA, 583 bp, Zea mays
  Clone ID: LIB3061-099-Q1-K6-D7
gtcgacccagcgtccggctacggcgaccattttcccgcatggtggggagctcctatagcttcccttcttcccccgtacctctcaccagcggtgtcttcggtatggtgaaaacccaattcttcaaccctacaggatccaacaggcaatcgcagctggcatcttacctttatcacccttgttcctccaacaatggtggaggggtattacaacagttacctttggtgcatttattggcacaaaacatcagggcacaacaactacaacaacttgtgctagcaaaccttgctgcctactctcagcaacagcagtttcttccattcaaccaactaggttcattgaactctgcttcttatttgcaacaacaacaactaccattcagccagctacctgctgcctacccccagcaatttcttccattcaaccaactagcagcattgaactctcctgcttatttacagcagcaacaactactaccattcagccagctagctggtgtgagccctgctaccttcttgacacaaccacagttgttgccgttctaccagcacgttgcgcctaacgctggcaccctcttacaactgca

SEQ ID NO: 10679 - DNA, 586 bp, Zea mays
  Clone ID: LIB3061-099-Q1-K6-D8
ccgcaaccatttttcccacaatgctcacaagctcctatagcttcccttcttcccccatacctctcaccagcggtgtcttcaatgtgtgaaaccccaattgttcaaccctacaggatccaacaggcaatcgcaacaggcatcttaccattatcacccttgttcctccaacaaccgtcaggcgtgtggcagcagttacctttggtccatttggtggcacaaaacatcagggcacaacaactacaacaacttgtgctagcaaaccttgctgcatactctcagcaacatcagtttcttccattcaaccaactggctgcattgaactctgctgcttatttgcaacaacaattaccattcagccagctagttgctgcctacccccagcaatttcttccattcaaccaactagcagcattgaactctgctgcttatttacagcagcaacaactactaccattcagccagctagctgatgtgagccctgctgccttcttgacacaacaacagttgttgccgttctacctgcacgctatgcctaacgctggcaccctcttacaactgcaacaattgctgccattcaaccaacttg

SEQ ID NO: 10680 - DNA, 581 bp, Zea mays
  unsure (1)..(581): unsure at all n locations; Clone ID: LIB3061-099-Q1-K6-D9
gcaacatagnaaagcacaatagtgtaccaacaatggcagccaaaaattttgcctccttatgctccttggtctttctgcaagtgctgctacggcgaccattttcccgcaatgctcgcaagctcctatagcttcccttcttcccccgtacctctcaccagcggtgtcttcggtatgtgaagacgggggtcttcaaccctacaggatccaacaggcaatcacagctggcatcttacctttatcacccttgttcctccaacaatcatcagccctattacatcagttacctttggtgcatttattggcacaaaacatcagggcacaacaactacaacaacttgtgctagcaaaccttgctgcctactctcagcaacagcagtttcttccattcaaccaactagctgcattgaactctgcttcttatttgcaacaacaacaactaccattcagccagctacctgctgcctacccccagcaatttcttccattcaaccaactggcagcattgaactctcctgcttatttacagcagcaacaactactaccattcagccagctagctggtgtgagccctgctaccttct

SEQ ID NO: 10681 - DNA, 546 bp, Zea mays
  unsure (1)..(546): unsure at all n locations; Clone ID: LIB3061-099-Q1-K6-E10
tgggaaacaacatacattgcttggtgatcttaatcaagaattgtcccaaaagtctgtactattgggtgatggttttaaactgtcagctgctgataatgatgtgtttgcaactgttcatccttttgtgatccctttttgtggggatcgatgtgggnaaatatccacatgtactgcggtggatggactacattcaaaacactgttggtgctggtacaactttgcaaaagataaatgtgaccaagtctgactttgatccaccttctcatccacagaaagctgataaaaaagatgcttaatcaagttcaaagaaagccatttccctacaaaaaactgcttacaagtcaaatggaaatgcttactcaaagaaatccacaagaaaaccttcttaaaataaagagaatcctactgcttcggggaacaacaaaacctttggggagaaaaagaaagtgccagaaaagtcagcaggaaaaacaaccnagaaagctccaaaaaaaattgcagacaaggaatcaaagtgcgatatcaatattctgaatatacaagttg

SEQ ID NO: 10682 - DNA, 590 bp, Zea mays
  unsure (1)..(590): unsure at all n locations; Clone ID: LIB3061-099-Q1-K6-E11
cccagcgttcttttgctcatcaagngaatgggaggtggcgggcgggtgcaccttcactctcataataacgctgcttaggcgcaatcatgatttaattagaaacttcttgtcaaaggatgttgtttctaactagttgtgcgcactattgtttagttcatgccgtttggttgctttccattgcgtgcaagtatggagtctattatgttctcttatcatgatatatgtttatattttgttgcttccccatttatgtaattttcaaaggggatgctgtcgaaattttatatatgaatgttagatgtgtagtttagtagcattctgggtgtttgaggatcttggggtgttacatgtacaatggcaccgatgaagatgactttttgtactgcctccgaccggataataaggaaatatttgtatgtcgggagatggcaagaaacataggatttctgaagctcgaagttggtctttcagcaatgtcgaaggatgacctcgcagacagccttgcttacaatagtctgaagggcttaatcttgagcaacactttaagagcacagaaaaagttgaggatgaaagttgtcaaatagcccttg

SEQ ID NO: 10683 - DNA, 482 bp, Zea mays
  unsure (1)..(482): unsure at all n locations; Clone ID: LIB3061-099-Q1-K6-E12
acaacgctaacaaggggcgcgccggggccctgctgctgctcctgctggccacgacggcgacggaggccgcgaacccgtgcaacccggcgcagctcacgccgtgcgcggggccggcgctgttcggcngtgctgtgcggggtcgtncggcgcncanctncngncncancangggtgcctgtgcagatactcgcgcagccccaactacgggagctacatccgcagccccaacgcggcgaggctcttcgccatctgcaacctgcctatgccgcgctgccgttattagcgggcagtagtatatatactagctagctattccaatacaatcatgctcagtcgttggtatatcgtaagtactcatgtgaagcatgcggtgcacaccatggatcatgtaggacgttctgttacatgaataaaatccaggacgtctgagtttgtgcggcaaaaaaaaaaaaaaaaaaaaaaaaaaaaaaaaaaaaggggcg

SEQ ID NO: 10684 - DNA, 206 bp, Zea mays
  unsure (1)..(206): unsure at all n locations; Clone ID: LIB3061-099-Q1-K6-E2
gggggggnnggggggggggggggggggnggggnnggggggggggggggggggngggngggngnnngggggggggggggggggggggggggggaggnggggggggggggggnggggggggggggggggngnnnngggggggggggggggggggggggggggggggggggggggggggnngggggggggggggggggggggggggggg

SEQ ID NO: 10685 - DNA, 575 bp, Zea mays
  unsure (1)..(575): unsure at all n locations; Clone ID: LIB3061-099-Q1-K6-E3
gcgttcgtcagcttcaaaacacaccagcggaggggggctagcaacgacctaacaccaatggctaccaagatattagccctccttgcgcttcttgcccttttagtgagcgcaacaaatgcgttcattattccacagtgctcacttgctcctagtgccagtattccacagttcctcccaccggtggggggaggggggcttcnaacatccagccgtgcaagcctacaggctacaactagcgcttgcggcgagcgccttacaacaaccaattgcccaattgcaacaacaatccttggcacatctaaccctacaaaccattgcaacgcaacaacaacaacaacagtttctgccatcactgagccacctagccgtggtgaaccctgtcacctacttgcaacagcagctgcttgcatccaacccacttgctctggcgaacgtagctgcataccagcaacaacaacagctgcaacagtttatgccagtgctcagtcaactagccatggtgaaccctgccgtctacctacaactactttcatctagcccgctcgcggtgggcaatgcacctacgtacctacaac

SEQ ID NO: 10686 - DNA, 579 bp, Zea mays
  unsure (1)..(579): unsure at all n locations; Clone ID: LIB3061-099-Q1-K6-E4
cgcagcacatanaagtagaatgctgggcgacaatagagcaacaatggcgaccaagatattttccctccttatgctccttgctctttctacatgtgttgctaacgcgacaattttccctcaatgctcacaagctcctatagcttcccttcttcccccataccttccatcaattgtggggggggggtgtgaaaacccagctcttcaaccatataggcttcaacaagcaatcgcagcaagcaacatacctttatcgcccttgttgtttcaacaatcaccagccctatctttggtgcagtcattggtacaaaccatcagggcacaacagctgcagcaactcgtgctacctgtgatcaaccaagtagctctggcaaacctttctccctactctcagcaacaacaatttcttccattcaaccaactgtctacactgaaccctgctgcttatttgcagcaacaactattaccatttagccagctagctactgcctactctcagcaacaacaacttcttccatttaaccaattggccgcactgaaccccgctgcttatttgcagcagcaaatactactgccatttag

SEQ ID NO: 10687 - DNA, 580 bp, Zea mays
  Clone ID: LIB3061-099-Q1-K6-E6
tcgccttccacaaccctctccctcttggggtgatttccgctgcggctgcaacaataaaataataagtctcgtgcaggcgaaggacgtacgacgacgcggacgcaccgtcaaagtctacaggctgcgcaatccctttctccctcttatccccaaggcgaggagctgaggggggggggggggcggggggctgctgttcttgtttccccgctctccaagatgtcgtccccgagcaagcgccgcgagatggaccttatgaagctgatgatgagcgactacaaggtcgagatggtgaacgatgggatgcaggaattcttcgtcgaattcaaggggccggccgaaagtaatagccctcgcgctgaatcccggttgctcttctctctccctgcctcccgtgctgatggtgcacgctcctgattctgatctagatgttgtggggtggaagttcagtttcaggaaaactgccagtctccactgttgatcgtgttcagatattcttgtccgtttagcttcatccttgattggttgctcagttgacccgaaccgtccttccttttcagtcatagtttatcacaggattttg

SEQ ID NO: 10688 - DNA, 537 bp, Zea mays
  unsure (1)..(537): unsure at all n locations; Clone ID: LIB3061-099-Q1-K6-E7
gtcagcagcttctgcttgctctggggggagaggggagagagagagcgagagagagagagagatctagtagagaggctagtaggtggtcctcgaacgaagatgttggcggtgttcagcgggcaggtggtggaggtgccggcggagctggtggcggcgggcagccggacgccgtcncccaagaggggggggtggcagctcgtggggcgcttcctggccgcgtccgagccggccgtgtccgtgcagctcggcgaccacggccacctcgcctactcccacaccaaccaggcgctcctccgccccaggtcgttcgcggccaaggacgaggtgttctgcctgttcgaaggggtgctggacaacctgggtcggctgagccagcagcacgggctgtcaagcaagggcgccaacgaggtgctcctcgtcatcgaggcctacaagacgctgcgcgaccgcgcgccctacccggccagcttcatgctcgcccagctcaccggctcctacgccttcgtcctcttcgacaagtccaccaactccctgctc

SEQ ID NO: 10689 - DNA, 544 bp, Zea mays
  unsure (1)..(544): unsure at all n locations; Clone ID: LIB3061-099-Q1-K6-E8
cggtctacccagcgttcttcagcgtccgaccatatatctccctggcgcggaggcacacataatactaacattccattccgttccatctcaaaggatagaacaatgggcggtctctccaccaagcttttcgtggtcctcctcctgctcgtttgttacaccgggacgcaaggcgggccggtgactatggtntctgcgaggaaggctaggggcanancttccgcttcaagggaccttgctcgagggacgccaactgcgcaaacgtctgcctgaccgaaggtttcaccggcggcgtgtgcaagggcctacgccaccgctgcttctgcaccagggactgctagtactgcctcgtctcgcctcgcctcggctcgtgtcctgcgtgtgcatagccgcagcggatcagtaaaacatgcatgcatgcgttaccgaatatttggcagtaccagcaagttaatggattaaataatatgtaatggaacaaagcctgttttgaacgttgaactgctgagtgctagcagcgctcgtgtttattggcatatatgaactc

SEQ ID NO: 10690 - DNA, 336 bp, Zea mays
  unsure (1)..(336): unsure at all n locations; Clone ID: LIB3061-099-Q1-K6-E9
tttgaagcgctttccaaacttcttggcgaagacccagcagtcatggaaacgcagaactaaccttgcaaagaggctcgagctgtaccggagtgcccaatccgaaattgatgccgttgcatggtccaaatagtcctgatggccaagatatctgttcttaccccttgtctggcgattctgtctccgtngggggggcatatatagctgatttttcgtgttgtaggtcaggtcattttatatatcaccggagctgtacggtgtcatgttccttgtgcttgaggatctagggggggcacttgtatctcgaacaagttcttacatcgcgctttcgttccatct

SEQ ID NO: 10691 - DNA, 565 bp, Zea mays
  unsure (1)..(565): unsure at all n locations; Clone ID: LIB3061-099-Q1-K6-F1
tgagcattcagaaaacacctagcgaggcgcactagcaacgacctaacaacaatggctaccaagatattatccctctttgcgcttcttgccctttttgtgagcgcaacaaatgcgttcattattccacaatgctcacttgctcctagtgccattattccacagttcctccctccattgcgtgatgggcttcgaacacccagctgtgcaagcctacaggctacaacaagcgcttgcggcgagcgtnttacaacaaccaattgcccaattacaacaacaatccttggcacatctaaccatacaaaccatcgcaacgcaacagcaacaacaatttctaccagcactgagccaactagctgtggtgaaccctgtcgcctacttgcaacagcagttgcttgcatccaacccacttgctctggcaaacatagttgcataccaacaacaacaacaattgcaacagtttctaccagcgctcagtcaactagccatggtgaaccctgccgcctacctacaacagcaacaactgatttcatctagccctctcgctgtggttaatgcacctacatac

SEQ ID NO: 10692 - DNA, 578 bp, Zea mays
  Clone ID: LIB3061-099-Q1-K6-F11
tattattgaaaccaacaagcaacataggaggtgggatccagtagcaacaatagagcaacaatggcgaccaagatactttccctccttatgctccttgctctttctgcatgtgttgctaacgcgacaattttccctcaatgctcacaagctcctatagcttcccttcttcccccatacctgggggggagggatagcttcagtatgtgaaaacccagctcttcaaccctataggctccaacaagcaatcgcagcaagcaacatacctttatcacccttgtttcaacaatcgccagccctatctttggtgcagtcattggtacaaaccatcaaggcacagcagctgcagcaactcgtgctacctgtgatcaaccaagtagctctggcaaacctttctccctactatcagcaacaacaatttcttccattcaaccaactatctacactgaaccctgctgcttatttgcagcaacaactattaccattcagccagctagctactgcctactctcatcaacaacaacttcttccatttaaccaattggccgcactgaacctcgctgcttatttgcagcagcaaa

SEQ ID NO: 10693 - DNA, 561 bp, Zea mays
  Clone ID: LIB3061-099-Q1-K6-F12
aactagcaacatagcaggggcagggggtaccaacaatggcagccaaaatttttgcttccttatgctccttggtctttctgcaagtgttgctaccgcaaccattttcccacaatgctcacaagctcctatagcttcccttcttcccccatacctctcaccagcggtgggggcgagggtgaaaacccaattgttcaaccctacaggatccaacaggcaatcgcaacaggcatcttaccattatcacccttgttcctccaacaaccgtcagccctattacagcagttacctttggtccatttggtggcacaaaacatcagggcacaacaactacaacaacttgtgctagcaaaccttgctgcatactctcagcaacatcagtttcttccattcaaccaactggctgcattgaactctgctgcttatttgcaacaacaattaccattcagccagctagttgctgcctacccccagcaatttcttccattcaaccaactagcagcattgaactctgctgcttatttacagcagcaacaactactaccattcagccagctagctgat

SEQ ID NO: 10694 - DNA, 518 bp, Zea mays
  Clone ID: LIB3061-099-Q1-K6-F2
attggcacaaaaatcaggcacagcgggggcggcaacttgtgctagcaaaccttgctgcctactctcagcaacagcagtttcttccattcaaccaactagctgcattgaactctgcttcttatttgcaacaacaacaactaccattcagccagctacctgctgcctacccccgggggggggggggggttcaaccaactggcagcattgaactctcctgcttatttacaggagcaacaactactaccattcagccagctagctggtgtgagccctggttcctttttgatacaaccacaggtgtgtgccggtctaccagtatgctgggcctaatggtgggaccctgttacaactgcaacaattggtgccattcaaccaacttggtttgacaaacccaggagggttctaccaacaacccatcattgggggggccctcttttagatttgttatgagttatagttcaataataaagttttttgtctgatgtttgtggcttcccagaaataagaaaggacatttc

SEQ ID NO: 10695 - DNA, 353 bp, Zea mays
  unsure (1)..(353): unsure at all n locations; Clone ID: LIB3061-099-Q1-K6-F3
tttttttttttttttttttttttttttttttttttttttttttttttntttttnttttttttttttttttttttttttttttnnttttttttttttttttttttttttttttttttttttttttttntttntttttnttnttttttttttttttttttttttttttttttttttttttttttttttttcttttttttttttttttttttttttttttcttttttttttttttttttttttttttctctttttttcttttttttttttttttttttttttttttnttttttttttttttttctttttttttttttttttttttttttttcttttttttttttcttttttttttt

SEQ ID NO: 10696 - DNA, 568 bp, Zea mays
  Clone ID: LIB3061-099-Q1-K6-F4
agcacatagtgtgccggcatggcagccaaaatataaagcttccttatgctccttggtctttctgcaagtgctgctaccgcaaccattttcccacaatgctcacaagctcctatagcttcctttcttcccccatacctctcaccagcggtgtcttcagtatgtgggaaccgaatgggtcaaccctacaggatccaacaggcaatcgcagcaggcatcttacctttatcacccttgttcctccaacaaccgtcagccctattacagcagttacctttggtgcatttgttggcacaaaacatcaaggcacaacaactacaacaacttgtgctaggaaaccttgctgcctactctcagcaacagcagtttcttccattcaaccaactggctgcattgaactctgctgcttatttgcaacaacaactaccattcagtcagctagctgctgcctacccccagcaatttcttccattcaaccaactggcagcattgaactctgctgcttatttacaacagcaacagctaccaccattcagccagctagctgatgtgagccctgttgccttcttga
